United States Patent Application Publication US 2026/0103690 A1 - sequence listing, part 87

SEQ ID NO: 429987 - protein, 342 aa, unidentified
MESIHYIGLDVHKKTIAYCIKSIEGNTVRQGVVSAERKALQQWLVELPGPWMGALEATIFTGWIYDFLKPHAVELKVAHPAMLKAITAAKKKNDRADAEKLADLLRVNLLPECVMMPSELRELRRILRYRNMVVRTAVKMKNKMSGLLMEVGATYDKRRLYGRKYFNELLERVEDVPNSVKELLQLSRGNLELFTAIQKKLIKTLREQPLIRERVERLMSIAGVGEIMALTWVLEIGEVSRFGSSREAISYCGLCSAQRESAGKEQRGPISKKRNKHLQTMLIEAAKIAPLWNPQLAELYEKEAGKGNRNRATLAVARKLVEYLLAVDRRGTPFEDVAPKVA

SEQ ID NO: 429988 - protein, 418 aa, unidentified
MDVEKDEQEIIERVAALDIGKAELVCCVRVPGPGRRRMQEVRMFSTMTRTLLLMADWLAGLGVSRVVMEATSDYWKPPFYLLEGSFETWLVNAGDVKHLPGRPKTDRLDAVWLCKVAERQMLRPSFVPPPPIRILRDLTRYRVDLIGARTAEKQRVEKLLEDAQIKLSVVASDVFGVSGRAMMAALIAGERDPQVLADLARGAMRAKTALLEEAFIGRFDEHHAFLLTTMLARIDGLTADIDAVQQRTEEQIDPFASAVDRSDEIPGVGVTAAHTIIAEIGVDMTRFPTPAHLASWAKFAPGIKESAGRREGNGATGHGNRYLAGALGEAAASAAKTDTFPGERYRRIARRRGKKRAIVAVGRSILTITWHLLNDDTARFHDLGPDYYDSRVNLNRKMRNHVRELQNLGYRVTLEPAG

SEQ ID NO: 429989 - protein, 356 aa, unidentified
MQRISQKSRKVDFRGKRCYVGVDVHKLTYYAAVLSEDGQSMQFSCPANPRTLVFKIQEMGVEIIALSHESGPTGYELAWYCQGSGIQVVVAATTKIPRKITPDSKTDRLDGLKLAEYLSKGMLCGITIPTREEHALREMERRRQQLVRSRRELRQQLKSFLLKNGIESPKGLDHWTDGALRELKEMDLKNPHLRLTLESFLRELEFICSEANQTQKTLTEELSRAGRDGLLQNLRTVPGVGITVSQTFITEIFRPDRFDRAEEICAYVGLAPITSQSGQGKGRARLVRNGQTYLRSILIESAWILVRKDPHYRSFYNKIVGRTNLPQKAIVAVARKLLVILWRLSVENRFYEFRGR

SEQ ID NO: 429990 - protein, 388 aa, unidentified
MFFLGIDIGKNTHVASLLDEKAKIIFKAYSFANTLDAAEALLVKLEPYKDSLEIGMEATGHYWLSLYSFLAEHKFIVHVLNPIQTDGWRKGIEIRKRKTDVIDSVLIADLIRYGDFLETSLADEDILSLRNLSRFRVYLVNSVSDLKRKAIAVLDQIFPEYASAFSNVFGQTSKELLKSLSLPSDYENLSATKIEEVLSNITQKKKASKTISTLSDKASRSFGISFCKDSFAFQLKLIIEQICFIEEQIASVELEIEQLMSKLGTNIKTIPGVGSIIGAVILGEIGDIERFDNPSKLVAYAGLDASVSQSGEYEASSGKLSKRGSPYLRKALYMAAQRAEFCDPVFHAYYEKKRNEGKHHLVATNAVARKLCHTIYAILKKDIPYEVQ

SEQ ID NO: 429991 - protein, 387 aa, unidentified
MMKNKGRVVGLDVHPDSFAEAVVEGRDPASAVVSSTSTRVELEQLEQWALRHTSTEDTLVLEASGNAFAVAARLRAIGRKAQILDSHRAGKVGKAYCANDRVDAVKIARIYLSALSPIVWQPDEKTLERREIFSAYQGVVKESTRAKQQLRSMLNEHCVRLEKGFRLCHPKAITCLLKLREWTPARRMLLQQLHATLLAARARRTLLRRHMAQEIVAEETLMRLTRLCGINLITLYGVVAAVGDVRRFPHSKKLVAYLGLNPSVSQSGNFEGSGALKRHGRGALRALLIQSGKKLLEVNNPLQKWGLAVASRRGRNKAAVAVARKLCVALWHVLMGHVIGALERLDTLETKLSKFATEIGPAALRAFGYNNKADFVEKKLYVLRSYP

SEQ ID NO: 429992 - protein, 442 aa, unidentified
MPDIIIGLDVGKTSHYAWVIDTDCTKLHAGKVDQSEQALNRLFTKAKKHAGDDGHVTLVVDQPNNIGYFAIACAQACGIDCRYLTGTRMRHASLLAAGNSKTDPKDARIIAETALTMPQILLPVTHTDDLADRIKVLAGQQADLISMRTATINRIRSMLNAIHPGLEKLLTGDQITAGWVIAMFLHYSSPAAIKRAGARRLATFIHTHAPGTKNQDAKAHKVITAITAQTITVQNTDIKWQSIQTAYRMITTLNTDIRALDAQIEDIAKDTPTYQILLSMPGVGPKTAATWVATVGDLADFDSADKLASYAGICPVTRQSGTSIKGEHVNRSGNKKLKNALWYSAFASIKTHGRSKEYYQAKRAAGKRHNAAVMALARRRLNVMFAMVKNSEFYDDNRQAPPHRRTTTPATTPAAAPRKRQRSRTAPATPAHPTTANTPTHT

SEQ ID NO: 429993 - protein, 343 aa, unidentified
MTHYIGLDVSQKLTAICIVDDTGRGLWRGQCTSDPEHIERVVRRHAEKDGRIGVETGPMTPWLVHELRSRGLEVTCLDARHARAALKMQINKTDPNDAEGLAQIMRTGWYRSVHVKSFGSHRARALLGARVQLVGMTTRLSNHIRGVLKTFGLLPGPMRGVPFDRRVEAMLADRDDIAPIIQPMLVAWRQLRQQVATFDKAVRRLVKSSPACRHLMGIPGIGVLSVLAYVSMIEDPARFGRSRSVGAHLGLTPKRYQSGEIDRSGRISKCGDTLARTLMYEAAVVLMTRVKRTCGLKEWAQAIARRSGAGKARIALARKLSVIMHSIWRSGEPFRWSEQPAAA

SEQ ID NO: 429994 - protein, 343 aa, unidentified
MDEYDGRQFVGIDLHRRRSVMVRQSESGEQLSAVRIVNDPVALGLQLEQAGSDPEVVLEATYGWYWAVDVLQAGGARVHLAHPLGVKGFRYRRVKNDVRDAGDLADLLRMGRLPEAWIAPPETRELRELVRYRAKLVAIRSGLKAQIHAVLAKAGVLIAASDLFGVTGRQRLARVPLGSAYAERVRSLLELIDILDGHEARFAAMIAERLHTHHGYQAIQQVPGIGPVLAAVFVAEIGDVHRFAGPAQLCSWAGLTPTHRESDTVVRRGHITKQGSKLVRWAAVEAIQRQPDTTKIALDRQRIEARRGRNIAKIAAARKLLTLVYYGLRDGHIRAVAHRQAAA

SEQ ID NO: 429995 - protein, 350 aa, unidentified
MMIIGCDYHPAFQQIAFVDTDTGELQERRLQHREEAEKFYRDLAAQGIKVRVGMEASGHARWFERLLAELQFELWIGDAAEIRTKRVRKQKTDRQDAQLILKLMLKDDFPQIWVPSWENRDLRQLLWHRHRMVQARTRIMNQLQAVALNEGLRCKKRLWREAGREQLEAFRLAPWASRRRRDLLELLDRLNPTITDLTQTIEQEVEKCPEAQRLMTHPGVGALTALAFVLIIGTAERFQCGKQIASYLGLVPLEESSGNRRRLGHITKQGNALLRFLLVEAAQVSARSIPEWRHKYFHLAMRRGRKIAKVAMARRLAVQLFWMWRKGWDYEQVRKFGSHAGQPGNRDGVH

SEQ ID NO: 429996 - protein, 320 aa, unidentified
MSTTTTVERYAGVDVSKARLDVAVRPTGERYSLANEPEGIDALVGRLEEAGPELVVLEATGGFERPAAAALAASGIAVAVVNPRQARDFAKATGTLAKTDKIDAYVLARFAEALKPEPRTLPGEEALLLGEILGRRRQLIGMLVAENNRLSAIVSAPVKRRIRAHMRWLEKELSRTDLELEEILEASPVWRENEALLRSVPGVGPTLARTLLAELPELGTITHKRLSALVGVAPFNRDSGRIRGKREVWGGRARVRTALYMSAMVASKHNPLIREFYERLVEAGKPKKVALVACMRKLLAILNAMMRDRRPWRFTHALTP

SEQ ID NO: 429997 - protein, 382 aa, unidentified
MQTIDTVNPTILLAIELSASTWLVAARVPGLEKPHLHRIDGGDTAALLALISSLQARAARRLDATISVVCCFEAGRDGFWLHRLLTAHGVVCHVLEPTSILVNRRARRAKTDRLDAEGMLRVLAAYLRGDHQACSMVRVPTPEEEDAKRTHREREKLVQEKLRIENRIEALLFTQGIRKRPSLRSWERDLAVLRTGDGREIPRHLRAELDRLRRRLVMTSELIREVEAERDQAAKTKPQDQACQKIAALSRIRGIGENFAAVLTREVFYRSFDNRRQIASYVGITPMPYQSGGMDRDRRISRAGNPRARTTMIQLAWLWLRYQPGSELAEWFRERVGTLAGRTRRIAIVAMARKLLIALWRYAETGVIPAGAEIRAETTVAA

SEQ ID NO: 429998 - protein, 353 aa, unidentified
MVYSPNEYDIFIGIDVDQKSFSFTVKNHDTMSNSYKIPASPENLYQHIRNRYNNQRVICAYEVGVTGYHLHDYLTSQNIRCLMVPPPSVPKASNDRTKNNRLDSERISQHLKNGDMNPIRVPDYDCRELRQLLRSREEYVDLRKVSKQRIKSLLLFAHLHTLLKDTTQYWSYSHIKRLKSLPCSPATRQRLDLLLKDLDYARSQTVVILKELKTLSERNTGLRRNIHYLRSIPGIGFITAITILASIGDPQQLRNPRELSAFAGLVPSEYSTGERISRGRITHLGSSVLRSLLVEAAWANIGKDARLRQFYDRIRAKHHPQVGARKAIVAVARKLTLIIYRVLKEQREYIANI

SEQ ID NO: 429999 - protein, 374 aa, unidentified
MEHYSTLYVGMDVHRDSFTLAHYALDMKQPTGIVKTDNDYRRIVAYVHRLREKYGKETRIVCGYEAGCLGYTLYHQLTKAKIESIILAPTTLPSPRGGKRVKTDGRDAANIAQCLAYGTYSPVHVPSAEDEQVKEFIRMRNDHCQMLKKLKQQILSFCLRHGYQYSGTRSNWTQAHMKWLDALQPEGLLGDTLEEYLTSFRYHQNKLERLDRRIEEISREETYREPVGKLCCLIGVKPLTALSVVSEVSDMHRFPTAEKFAAYLGLVPGEHSSGNSVRRSSITKAGNVHVRALLTEAAQSYTRGKVGYKSSALKKRQSGQSETVIAYADRANERLRRRYYQMTLQNGKRGNVAKTAIARELACFMWGLLTDHVA

SEQ ID NO: 430000 - protein, 343 aa, unidentified
MDHFAGLDVSVKETSVCILDDAGKIVKEVKVASEPQALLKVLGNPAYCFERIGLEAGPLSQWLFSALAEAELPVICVETRHMQAVLKAQINKTDRNDARGIAQMMRVGMYRPVHVKTLRSQKLRMLLTHRKLLQSKAIAIENDLRGTLRNFGLKVGMVGTVRFEARIRELVATTPDLAVLVEPLLVVRRALREQIVILHRRLLAIVRDDEVCRRLMTTPGVGPVVALTYRATVDVPARFRKSKSVGAVFGLTCSRYQSGEIDWSGRISRCGDEMMRVMLYEAAQSMLRSKKWSWLKAWAMQIARRRGMKKAIVALARRLAVILHRIWVDGTEFRWTREAVPAA

SEQ ID NO: 430001 - protein, 340 aa, unidentified
MVYGAIDRHLRYSQIRIVDAEGRVVREQRVVTSAERLVQAFAGEGRMRVLLETGTESEWVAQALEAAGHEVVVADPNYAPMYGEVRRTIKTDRRDVAALAEANRRGWYRATHRVSAAQYGVRQVLRTRRQLVQMRSGSIALLRSLLRQSGYRLASGSAPTVPTRLSRLTLPPALLATLTPLRRAIEMLTAEIATVDARLQQVAAADPIAQRLQSVPGVGIVVALSFRAYVDDVARFAHAGQVSAAVGLVPREDSSGERRHRGHITKAGPRELRSLFVQAAWSCWRSRRAVRLRAWADALAARRGRRIAVVALARRLSRIVYAIWRDRSVFDAAHAAGAAA

SEQ ID NO: 430002 - protein, 367 aa, unidentified
MKNTIVHHEGAASLKVAGNKIKLPGSIIKIGLDVHARLYVAVAQYDQLLPKPARRLAPLEFVPWVEQLLRAGHTVHVVYEACGFGFGLYRELKALGVHCYVIAPRKLDEGCTRVKTDPRDATTLCQRLSRYLEGNTRELAVIRVPTEAEEQARHVSRQREQLVRHRQKLEAQGRSLLINHSLPSPAHWWKNQTWSRLSKLLPAWICVRLKVHRPALLTLQQQISALSAELEAAAPADVPAGVGKLTTVVMTREICSWERFRNRRAISSYTGLCPGEYSSGTKRVPGSVTKHGNPRLRAALVECAWRMVRFQPQYPPVKKRLSVLAKGARATGGQRKKAIVAVARHLAVDLWRLHTGRNTAAQLGLTI

SEQ ID NO: 430003 - protein, 421 aa, unidentified
MFELVEAWTSYHKRSCGIGAIVGVPANQIRGDGMGPVVGLDVSKGASVLQAFTERNKPYGRCKRIAHTPEGFEQLGELLKELEKSTGFEPAVVLEATGHYHRSLVAYLEREGYQHFIVNPLQSKRAKGTHLRKVKTDAMDAWHLAEMYYRGDLKPHRTWSEALTELQHLTRQHEFICPMLVQAKQNARALLDQVCPAYETVFDNLFCTTSLQVLRQMLSSTPVTAETIQAAAGSSHGQAWVQEKLERIQALPPLSQSSKAQQMALLGVLNMVLTGQEQLRQLEKAMEELAMMLPEVELLRTIPGVGDKLAAVLAAEIGDASQFETPKQLVAYAGLDPGVHSSGKFTASSSRISKRGSKRLRRALYLAAQCGIRNGVNERLKAYFEKKRKEGKPCKVAVIACANKLLHHVHAILVKGEPYKA

SEQ ID NO: 430004 - protein, 349 aa, unidentified
MAYGAIDLHKKESQVRIVTDAGDVIDRRIGTRREAFTQLFGEQPRMRVLLEASTESEWVACHLERLGHEAIVADPNYAPMYGGRSRRIKTDQRDVAALTTACAHGTYRPVHRRSPARRAIQAHLNVRDELVHTRGRAISMVRAMTRAEGLRIRSGSPETFLRRLAAVDVSPSLAATVEPLCQLIACANDQLRGADLYVRDLVTQDPTIARLTTFPTIGPVTASAFVAALDDVSRFRRASQVASYLGLVPREYSSGERQRRGHILRSAHPRVQALLVQAAWRIWLSTRNETAALRTWARLLARRRSTPIAIVALARRIARILFAMWRDECEYHVPRRAERAPVSMDAAVS

SEQ ID NO: 430005 - protein, 355 aa, unidentified
MNSQKYIGMDVHQATISVAVMDDQGKLIMECILETKAATILEFIQGLRGTLWVTFEEGTSAAWLHDLLQPHVSHLVVCDPRRNALLKDGSKSDRIDARKLAELLRGNQLKAVYHGENGVRTLKELGRSYLTLTQDLTRVMNRIKALYRSWAIPCQGTTVYAARHRAEWLAKIREPGVRLRAERLYQQLDLLQPVRQQARRDLLLESGKHPGVKLLRQIPSIGPIRAALLVGLLQTPNRFRTKRQLWAYSGFSVEIHDSGEFRYVRGKLRRNRERITVRGLNDNHNRDLKNLFKSAALSASARPGPLYDFYVALLAKGMRPTMARLTLARKMAAITLTMWKKGVDFDPKQLHRQAA

SEQ ID NO: 430006 - protein, 341 aa, unidentified
MSIMTIGIDLAKNVFAVHGVDDNGKAALVKPKVSRDQLLPLIAQLPPCLIGMEACTGAHHWARLFRQHGHTVRLMAPKFVAPYRMSGRRGMNDAADAAAICEAVTRPNMRFVPVKEEHQQIILTLHRTRQGFVEERTAIYNRLRGLISEFGIVLPQKVSCLRREIGGHLEDLPGYANQCVGDLLAHADRLDVLVAEYDRAIAKAARDDARSKRLMQLPGIGPTTASALLASIGDAHEFDSGRQVAAWIGLTPGQYSSGGKARLGRITKAGDAYLRNLLVMGARAILSGLGDKQDRFSRWARSLVERRGYWRAVVAIAAKNARLSWAVLKYGEAFRLNPVVA

SEQ ID NO: 430007 - protein, 315 aa, unidentified
MSLDSLFAGVDVGAAWLDVALTGGPAVRRFTNSPDGCAQLLAWLQPQTPALIVLEATGGYEQTLLGALQRAGLPVVRVNPARVRWLAQGLGFLAKNDRVDARVLARFAALCELPPQAAPDPDRVQLGALAQRRRQVLAARTAEANRLATAHPSVRDSIAAMVAAYNAQLADLDQRLEALLAAVPAFVADRQLLVSVPGVGPVVSTTLLAQLPELATASPKSLAALVGVAPCDDDSGRRNGPRHIRGGRWEVRHVLYMAALVGARHNPVLKAYFDRLIRAGKPKKVALVAVMRKLLGILHAILRDRQPWRADRIPA

SEQ ID NO: 430008 - protein, 343 aa, unidentified
MKLHVVGIDLGKTVFHLVGLDSTGRAVIRKKCSRKQLLAFTANLEVELIGMESCSGSHFLGRALREQGHEVRLMPAQYVKPYVQTNKSDLLDAEAIAEAVQRPRMRFVPIKTEEQLDLQALHRVRERWVMRRTAVVNQIRSLLLERGLTLPKGRRYVDAQLPRILEDAELRLSDSVRVLLAQLKLELEQLTARIEEMDRVIQKTAKENEDCQRLTEIPGVGPVTATALIAAVGNASAFRKGRNLAAWMGIVPGEYSTGGKQKLLGISKRGNKYLRTLFIQGARSVVQQRHKQTPGLSSWLAQLLARAHQNVVIVALANKLVRMAWAVLCKNQRYRAPDLAVSA

SEQ ID NO: 430009 - protein, 366 aa, unidentified
MKKHTSKNQTTRKGPVKETFAFYIGIDLGDKKSDICVLDEQGELHDEFRLRMNAQEFQTYFGSLARSRVAIEAGAQSRWVAEVIQRCGHQVYVSNTRQVPYIHQSDAKNDPGDAYKLAELVRFQPRLLHPIQHRSQEAQADLSWIRAREVLVQSRTQIINAIRGMSKAFGERLQKCSTTSFTGKRADRIPAQIRSAVAPLLETIDHLNEQLGYYDQMIQQVARTRYPRHRLLDQVQGVGVHTALAYMLTIGDPERFDKSRAVGSFLGLRPKQKDSGERKPQMGITKAGDEYLRKTLVNCAHYILGPHGADSDLRRFGLRICERGGKNAKKRAVVAVARKLAVLLHRLWISGEVYEPLRNRTVAAAA

SEQ ID NO: 430010 - protein, 421 aa, unidentified
MKNTAARKLRQVPEGYLIIGIDPHKKKHAAVAITQDFTLRDRFKFDNTREGLEFLLRRVKTEMVKSNCRGVMFAIETGGHYWRNIAYFLNEQGIPFRFINQYTLKRRREGKDLNRRKNDYRDSEVAAQLLCTGEFVESAIPQGVYAELRTAHNAYRRLVKERTRIINLIKGLLDSLFPEFTQVFKDPCGLTALSVLSTCSIPGVIAGMTGEEFVAAIEAKHHGRLMRKKLMALHYAARSSIGIAAGAKSVSSEISFLVEKIELIRRHICAIEGTLVGLVDETEEGKYLLSIRGLNYIAVAGLLAELGCFKSYRSAKQMIKMAGSNPTESESAGKKRSRTPMSKQGRPVLRYCAWTSVIPMLRFNPDFRAWAKQRRERPAHANPLGGREIVGAALNRLLRLSFALVKNQTYYRSPQLVQVTG

SEQ ID NO: 430011 - protein, 420 aa, unidentified
MIYIGLDVHRDYCEVAIAEAGQVRAGGRIATNPSVLESWAREVADEATVVLEATANALAIARVIELHVGQVVLADPKAVRAAAHGGAKTDRIDAALLARLCASGFLAEVWAPDEATRAHRRLVSRRMQLVHQRTREKNQIHAVLYRGLIGRPPVSDVFGVGGRAWLAALTLPADERLTIDGCLRQIDLMDGEIAIVEAEIARRVLGSPEMRRLLTIPGVNAVTACSLMAAIGDIARFPSARHLVGYLGLDPRVAQSGPGPARHGRISKQGPGYARHVLVEAAWHLGRTIGPLRAFHERVRARRGANVATVAVARKLAVICWHMLTKNEDYAFARPSLTREKLRRLELMTGAERQRGRRHPERVFAPRAQHEAERELARQAEAAYLRLMSDWHQRGAQVGAGATPGRVKTPTKRRGSAADL

SEQ ID NO: 430012 - protein, 419 aa, unidentified
MDVIVERPGALDVHKAQVTACVRVPDEKGTRVQHLAEFKTTVRGLLALRDWLAAHGVTQVAMEATGVYWKPVWHVLEDDFELLLVNARHVKQVPGRKTDVKDAEWLCRLLEAGLLRASFVPPKPIRELRQLTRYRKAQIAERQREANRLHKALEDTGIKLDCVATDILGVSGRAMLDALCRGTTDPVVLAELAKGRMRAKIPALREALEGRFDELHALLIGAILAHLDFLDVQIETLSGAIEVKLAPFAAAVDLLRTIPGFETRTAENVIAEIGTDMTQFPSADHLASWAGQCPGNHQSAGKRRSGRSRKGSKWLNQALKEAAMAALRTNGSYLQALYRRKKSQLGHARALGAVKHSILCAIWHMLTTGELYRDLGGDYYQRRDPERQTRRLIAQLERLGHTVTLQATATATAEAVAAV

SEQ ID NO: 430013 - protein, 346 aa, unidentified
MVYVGIDLHRNRSQIAVLDKDGGELLSRRIVNDPELFLETLAEFEQPRVALEATYGWEWLADLLEEAGCELHLAHPLRTKAIAAARVKTDAVDARTLAHLLRADLLPEAYIAPRELRDLRDLLRHRIALTRIRSALKQRVGSILAKNGIARPYSNLFGAGGSRFLAELELREAPRRRMDSLLALIADFDREIAATTDEIEKHATEDPYVDVLCQIRGVGRYIAMLIIAEVGDITRFPSARHLCAWAGLTPTVRSSDGKARLGHISGQGSPALRWALVEAAQHTPTGGGPLRAAYERISKRRGKQVAKVAVARKILTLCFYGLRDGEIRCLAPRAKPRTIRTTAVAT

SEQ ID NO: 430014 - protein, 315 aa, unidentified
MDDTLMVAGIDVSKDKLDVHVLPGNLVFTVGRDRRGLAELTRRLHRAGVGRAALEASGGYERLVLDQLEADGLVVHLLNPARVRHFAEAAGVLAKTDPIDARMIASFCQHFPEKGLTRKPENARKLTEFLAVRAMLLKAIGDARNQLEHLAHPNLRGLVESCLAEARSRLVAIDQGIAAAIAEDEAMACKAKLVRSMIGAGPVLTSNLLARVPELGSADRRHAAHLCAVAPADKRSGKSRRRATIKGGRDQLRPILHMAALAAIRHNPVIAAFAKRLTAAGKPWRLVIAAGARKIIVILNAMLRDQTSWQIKQPA

SEQ ID NO: 430015 - protein, 345 aa, unidentified
MEARNTAYQLYVGVDIAADTFTAAWLLSGGSPSVPFTGEQTPTGFAALRRRLQATATPLAETLVVLEATGNYWVALAVTLHEAGYRVAVVNPRQAHHFAKAQLRRAKTDALDARDLAQLAAALRPAPWTPPPTVYHEARQRLVARDALLAMRTQARNQRHALLQWPVVVAAVRQHLDELIAELDRRVASLDAELAAVLKESAWAASLACLTSAPGIGLVTAAWLLVGTLNFTLCAGPESLAAYAGLAPMPRESGRSIRGRPSIGHDGNGRLRTALYMATLSAARYNPAIKAFYQRLRAAGKAPKVARCAAARKLLHQAWALGTKQQYFDPDHQQQQHEPLPELAA

SEQ ID NO: 430016 - protein, 415 aa, unidentified
MLPKRSKRHVVETGKPAALSAREKPQASRSAADRLRLGDQNTVTEHDRRVSVGSSPNSRMNRTSDSVVSSSHLQDRVKTISITPVITSTPVTTSVAPVTPPVFVGIDIAKDKFDVHVRPFSKTWTLTNDLKGFEQLVVHLNQFPTLQLLVVEASGGYERTLVSQLIEANIPVAVVNPRQARDFAKGLGHRAKTDPMDASDLAQFAELVKPKLTHKTPENQQQLQDLVTRRRQIIHLQTIEKNRQHTTHGVIPNKTIKETLALFDKQLATLEKAIAELFDASDDWTAKTAILTSVPGVGKITAQQLLAEISELGTVKRTQIAALGGLAPYNHDSGKLKGRRCISGGRQSVRTALYMAALTARRFNPVFIAFAKRLKQAGKPYLVIQVACMRKLLVTLNAMLKSRTDWNHTLVQESS

SEQ ID NO: 430017 - protein, 456 aa, unidentified
MSQDNEEDVVSKGSALSRGDKRRNARLARLRELVPIGNAILGIDLADVKQVAVLTDRDSRVLARQRVSARAWDLEPLLEWAHQMALEHGFAGVTVGCEPTGHRWRVLEQLAAQRDLPFVCVNPMLVGRARETEDYTRDKSDDKDAVLIARLVAQLHCYIPERADQSWARLRQLGARRERLVTEAVACVQQLRDLLECAWPGVLGAAADPFGSMNWCAALAVVLDRCGGAPERLSRWGMARFEAAVVRELPRWGGSRRRRAIIEAVFVALVDPRAVWAQRPGALERARGVLADWHAVRARLVEVETRMVEVLDNELGLTELVTSIPGISAVGAAAMLAETGDPTRFDSPRALVKHAGLCPRENASGTFRGRSHISRRGRPRLRLAAWRAVWGALPHNPVMATRYRYLTTREHNRLTDGQARAALAAALLRWLHVITTKNVPFDARLAGAAEVMPVAA

SEQ ID NO: 430018 - protein, 313 aa, unidentified
MNENPCFVGIDVSKASLEIALRPSGRQQSFSNDDEGVSRLVQWLRVEAPSLIVLEATGKFELRVARALAMEGLLFNIINPRQARAFAKAIGILAKTDRIDALVLARFAEVLQPEARPLKTEETEALSDLVTRRRQVVEMITAEKNRQVTASKRIHRDIQTHIRWLEKRLEDLNDDIDDLIRKSPLWREKEKLLQSVSGVGPVLVSTLLGALPELGTLNRKQISALVGVAPFNRESGRFRGKRTILGGRGPVRSVLYMGTLAAIRYNPVIRVFYQRLFEAGKPKKVAITACMRKLLVILNTMIKNGTSWQHQPA

SEQ ID NO: 430019 - protein, 409 aa, unidentified
MDQMLERLAGLDVHKKTVTVCVRVPGARGGRRQEVRTFGTTVPELLALREWLETQGVTHAAMESTGVYWKPVFYILEEAVTCILANAAHIAQVPGRKTDVQDCVWIAQLVEHGLVRGSFVPPAPIRDLRDLTRARKALSQDRTRAANRLHKVLEDAGIKLASVANDVLGVSGRAMLAALVGGTTDPTVLADLARGKLRAKLPALRHALTGRFRPHHAFLVGQLLAQLDFLEEAMAQMSTQIDEVIAPFQAELERLDAIPGVNRRTAEVFIAEVGVDMRQFPTAKHLASWAGLCPGNRESAGKHKSGTTRKGDRWLRTALVEAALSASRATDSALAARYRRVMRHRGHKKAVIAVAHAILISAYHVLARQIPYHDLGPDYYDHRHAERVRRRAIAALERQGYRVTLQPAA

SEQ ID NO: 430020 - protein, 352 aa, unidentified
MATMVTAVYGGVDTHGKTHHAAALDSVGRLLGDREFPATRTGYLQLISWLSAFGAIARVGVEGTGSYGAGLATALREQQISIVEVDRPDRRARRRQGKSDPLDAAAAARATLSGDATGTPKTRAGSVEAIRVLRVARRGAVKARTAAFNQLHGLLVSSPHELREALSALSRTALVHRCAAFRVNEGTPFDPTVATKTALRAVARRVRVLTDEIQSADRQLQKLVERTAPRTTALLGVGVEIAGQLLITAGDNPERLRSEAAFAHLCAAAPIPASSGRTDRHRLNRGGDRAANAALHMAVVTRLRYHEATRAYMSRRTAEGLSKKDIMRCLKRYLAREVYAAVLADSAAADAS

SEQ ID NO: 430021 - protein, 319 aa, unidentified
MHCIGVDVSKQELVTYDGVSERVFANTPGLAAFRRFVGSADDLVIVFEPTSTYSRRLETLCRTERIACCQLNPRVVPHYRQVGKGRSKTDKTDAELLYRYGIERGREEAGQLTNDAMAQAVAARLACHRVVQKARVAYQGLLDALEHDPATEKGLLGGLRREIAELKAREARQLEEAQAVVAADADAAKRFDVLLSIPGIGPMTALTLLALFRKYPDVNRQQLVALGGLDPIQVQSGTSVHGKSRISKRGNREVRKCLFEATLSAARFNPGIRSIYRRLKEEGKPDKVARIAAARKLLLLAHAIYESGEAFRTPAEEVT

SEQ ID NO: 430022 - protein, 423 aa, unidentified
MADMSFAWFAGIDWGSERHHACLVDLEGTIIAERECSHSGTGLAELADWLIQMTGAASEVIVAIEVPHGPVVDTLLDRGFAVYSINPKVLDRLRDRFSVAGAKDDQRDAYVLADGVRTDRRLFRRIQVSDPRFIELRAWSRLAEELQEERVRLSNRVHHQLWRYYPQMLKLSSDAAAPWLLELWTIAPTPNKGSQLRKSTVERLLKQHRIRRVTAEIVVGTLKEPAITVADGVAAAACAHMRSLVARLRLVNRELQESEHKLDELCSAVGEVDAVSGEGLQHRDVVILRSMPGIGRINLGVLLSEGSGLLKSRDYQGLRTLCGAAPVTRRSGKSQIVIMRYAAHARLRNAVYHWARVATQHDTKCRAKYAALRRRGHSHGRALRGVADRLLALACVLLQRQTLFDPCLRQSEGHRALFDAQAV

SEQ ID NO: 430023 - protein, 336 aa, unidentified
MRYIGIDLHKNNFHVCYLEGEDKRFAQYRIEDLDKFRAGLKKEDHIAVESTGNARYFVNQIKEKVGRVIVVNPRQFKVISNSVKKTDKRDSEHLALFLSRDMLPEVRMKGEQQSQIKSLANTRDKLVKLRTALKNKIHNILSAHGIVSAREAFSSNKSLEAITDYPVNELARLELEVIAAQIRSLNEGIKKLDKQIEDAGKDLDGFENITSIKGIGKKSGTILLSIIGDINDFSDAGKLASFFGIVPRVNNSNETVHQGRITKQGSKLGRTTLVQCTLIAIRYSEYLRSFYERLKARKGSGKAIIATSRKLLDIIYKTLKESLIFEDFPNFVLKSS

SEQ ID NO: 430024 - protein, 395 aa, unidentified
MFIVGIDIAKRSHEAIIIAEDGQVVRKAFSFRNNCTGYNLLLEQVRRLTLVKSQIVFAMESTAHYWLALYARLLKDGYAVMVLNPIQSHSLRELYIRKAKTDARDSLIIADLVRFGRCKASNVPQDKILALRELCRSRAYLVDMAADLKRKLIALLDRIFSEYESLFDSVFSKASIAVLSKYSTPQKVKNANLRKLTDILMESSNGHFGEWKAHQLKEAACSSFGIDDSGGVYSTLLGMFLEQILSLTAQADSLEKQISVFFQEFNNPLTSILGVGTVLAATILSEIGDITRFSSADKLLAYAGLDPSVKQSGEFKSNQNRMSKRGSPYLRRAIWLASTVAVHRDPMFQTYYEKKISEGLHYMNVIGHVSRKMTAVIFAVLRDGQPYQPILQSAG

SEQ ID NO: 430025 - protein, 480 aa, unidentified
MSQQKKHSRPLGEEKTAAGTGKRGRKRKGMCLEDRPILEANAAGIDIGAREVFVAVPPDRDEHPVRVFSTFTEDLEKLAQWLVSCGITTVAMESTGVYWIPLYDVVEKYGVKACLVDARGMKNVPGRRTDWHECQWLQFLHSVGLLRAAFRPEGDVCAVRSMMRYRTELVEMTSQHIQHMHKALTQMNVQIHHVISDLTGVTGLAIVDAVIAGQRDPVVLAKLRDPRIKASEETIRKSLVGNWRAEHLFTLEQSRKSYQHYQGQISACDEAIEKLLVAFVPRVDPTERPLPPDRKRKQRGRKKKNANPNTFDLRTESYKLFGVDLTQIPGLMAMVLMLFSEVGRDMSRWKTAGHFVSWLALCPDNDISGGRVLWRGMRRVHNRAGDLFRMAAYSLHHDATPLGDYLRRMKSKLGPAGATTATAHKIAIIFYTMVKKQVEYDATLWADRDAEREKRFEAKLKRQAQQLGYKLVPIEERPAA

SEQ ID NO: 430026 - protein, 381 aa, unidentified
MLDQTAHNPVPTVYAAIELSKKSWVVAIVQPAKGQPSIYRIKGGAFSDLVMRLRTATPGGERLLVCYEAGYDGFWLARSLQTEKIDCRVLDPASLQVNRRARRVKTDRIDVLMLVRALIAVDRGDRHVCTIVRVPTVEEEDARRSHRERQRLIRERTAHINRIKGLLFGQGIRGVEPRLRRSRIDFSDLRTGEGLPLPARLRAELEREYARLDLVETQLRVTEAERDTADAQDPSIEYKRNMLIQLRGVGPASAAILTREIFGRRFANRRQLGSYLGLTPSAYDSGSTTRCQGISKAGNSFARRVMIEVAWLWRKYQPNSALAKWYEERAAGQSPRIRRIMLVALARKLIVALWRYVEIGLVPAGAVSCANNGAALDAAAA

SEQ ID NO: 430027 - protein, 317 aa, unidentified
MSIYHNFIGIDIGKFSFTVACHGKNDVKEYENTPSGINTFFKEFKRVFPKSLVILEATGGYEMELLLSICDKKISVHRANTRKVKSFIKSFGHAAKTDALDAKALALYGCERHKILDLFVPASPHLLTLYTLVQRRHDLKKILVAEKNRSKGPKAGPIQESCAIVIQTIETQIELISAKIEELIEQDPVLQARQKVLMTIPGVGKIVSQELLSLMPELGTLNRKQVACLAGLAPRANDSGKFKGYRSTGHGRQGIKPMLFLAAMAARNSHSSLKEFYNNLIGRGKKKMVALTALMRKIIVIANARLKNLAEGKIVTT

SEQ ID NO: 430028 - protein, 344 aa, unidentified
MDHYAGIDVSLEYSSVCVVDASGKVVREAKVVSEPEALIGWFGSLGLGLARIGLEAGPLSQWLYAAMKQTGLAVELLETRHVSDAFKAMPVKSDRNDARKIAQLMRLGWFRPVHCKSITAQEIRAMLTARKLVQSKLLDLENSLRGILRGFGLKVGKTTRTNFAGRIEELVKGHPNLQTIGQALLRARAVLLAEFNGFEKRVRAMSRLHDKARLLMSTPAVGPIVSLTFACAIDDPSRFTSSKQAGPHFGLTPKKYQSGETDYTGRISKHGDASVREALYEAAHIMLTKPIKSCSGLKSWAMRIARRAGTNKAKVALARKLAVIMLRMLKDNVPFNPAAKPATA

SEQ ID NO: 430029 - protein, 319 aa, unidentified
MRRTPVGVDIAKHKFDVAVLLDNQKYKTKKFANTPSGCREFAAWLSRFGDCHVCMEATGSYSTELATYLADNNYHVSLMNPACIHSFGNTELARNKTDKSDAAMIARYCALHQPAPWFPAPLSERQLTALVRHLKNLEEMRQMEENRLEVAEAVIVPSLNEHIATLDELIRETKKKISQHIDDNPDLKRDSELLKSIPGVGEMLSSSLLAFAGNLRRFTSSKALVAYAGLNPQRCESGMFKGKSRLSKVGHGELRSALYMPAVVASQYNVVVKDLTERLKLRGKSGKERVCAAMRKLLQLAYGVVKSGKTFNAEIPLAG

SEQ ID NO: 430030 - protein, 339 aa, unidentified
MNKSDFAGIEVSQEELLVALRRGEQTLPLKSFPNTGEGHRALARYLARKSRVVRACLESTGVYGLDLALLLQKRPGVEVMVANPRAVRHFAQALMQRSKTDPLDARVLLEFAARMPFQPWQPPSPTVRHLCALARRIEAVTDLCAAERNRLHAASAAAALPAAIRQEIRRSIAFQERALQRLTQQAIHLIAANTALQERFEQLDSVPGIGVTSAIALLAELSLLSPDLDVRQWVAAAGIDPREYSSGNSVHKKARISKAGNRHLRRALYMPALVAVRYDPHLGAFYQHLLGNGKAKMQALVAVMRKLLHAIFGMWKHHQAYDGAQLFPLASEVCTAEVA

SEQ ID NO: 430031 - protein, 344 aa, unidentified
MTYYTGIDVSLRSVSICVVNDKGKVCLEAKVAAEIDAIVDRLRRFSSDVKSVGFEAGTLTQYLTYGLQAAGFEVICLEARQVSVTLAAMRNKTDRNDARGLAQILRTGWYSRVHVKSLHSHQVRALLASRKAILKKCVDLENELRGLLKVFGIRLPSRVGHGSFDAELRDTVSGDEMLACALVPLLDARTVLYKTYLKLDNAVKGLVRVDPVCRRLMSIPGVGPVTALTFKAAVDDPNRFKSSRTVAAHFGLTPRRFQSGELDNPGHISRAGDADVRSALYVAAHSLLTRNAQWSTLKAWGVGLAKIRGHRRAVVAVARKLAVILHRMWIDGSEFRWGPAPASA

SEQ ID NO: 430032 - protein, 421 aa, unidentified
MKFKAQDKQNQLIENITVHHLVVGVDIAQETHVARAVNFRGIALGAPLEFGNHREGFKLFERWVQDLFKTHNLSSSIVGMEPTGHYWFNLARWLVGKGIEAVLVNPHLVKKNKENRDNTPSKSDRKDALVIADMIKNGYYSPVRFHPEAYEELRILMANRETVTKRLNSAVNQIHRWVDIVFPELRQVFKILTCTSAIATLRLFPLPSEISLLSTEQVLAGWKQYVKRHAGVKRAELLITLAKSSVGTIQALHAYKLHLGQLLDEYDLAQRQLEQIESELKSILKRIPYTKKLLEIRGVSATCLAGVLGETGDLTGYSHGNALLRHAGLNLAEASSGKWRGKMVLSKRGRPRLRHFLYLMTMCMVMTNPEIQALHRYNVEGKKLKKMKSIMKLCSKVARLLVGLAKSSEAYDSTRVFPQAV

SEQ ID NO: 430033 - protein, 407 aa, unidentified
MNTAVGIDVSKGKSVVAAMRPFGEVALPPHEVLHTSEDLSALMQSLRLIDGNTRVILEATGRYHEPVVAALREAGIFVSVVNPKLIKDFGNNSLRKVKTDKADAVKIARYGLEYWEDMREYTEADAVRQQLKLFSRQYNLHMKTVVSLQNNLISLLDSAFPGINERFKSPVRDDGHQKWVDFVCTFYHRDCVCGVSIAAFSERYLKWCRRKGYQFSTAKAAELYAASREMVVTLPKNALTKALIASAAGQLVAATTMLATLKAEFIRLAATLPEYEIVHSMYGVGDITGAQLMAEIGDVRRFANRGALIAFAGVDPGVNESGKHSSQSVRTTKRGSPHLRKTLFQIVSTHLKQSPPDEPVYQFLDRKRAEGKPYLVYMTAAANKFLRIYHAKVREHLNALESVTLDT

SEQ ID NO: 430034 - protein, 388 aa, unidentified
MPEGLEGITRLHALVAEHAPAGWAELSSEQAAAQVVVGIETDRGPWVTALRAAGYQVYAINPLSAARCRDRHSTSGAKSDAGDAHVLAEIVRLDRDHHRPIAGDSDLADAIKLLARAHQTAIWERTRQVLRLRSTLLEYFPAAVQAFEDLSAPDALALLARAADPDRAAKLTRSQLVAALRTARRHHVEAKAEALQAVLRAPTLRQPAATQGAYAAVVSGQVGIITALNEQIAQLGQVVDEHFGRHPAADIYRSQPGLGVVLAARTLGEFGDDTGRFTDARARKNYSGQSPITRASGKKSIVLARYATNRRLGAALHQQAFSALSGSPGARAYYDTIRSRGIGHHAALRQLANRLVGILHGCLKTGTLYDEDTAWQHRRTAHSHIAAA

SEQ ID NO: 430035 - protein, 387 aa, unidentified
MKKLDSNVACAGMDVHYKFSNVTFRDACGKVVSHQRLYHPDRKQLVERLSHWPRGIPVVMEASFGWGWLSDIVEEAGMEVHLSNCFKVEQMRKARGWVKTNKKDADLVSLLPFELSDWWKVWRAPPDVRNRREQMRFRSDLVKAQTGEKSRIHAVFHRHGVFHEFSDLFGAKGRMFLTELCLHNPVSLPAEALVALRGHVKLLDHLRSQLADVARILHKQMLRTPLTIRLKTIPGIALILAHILAAEIGRIERFKNHKSLASYCLLAPCADDTGEETPGQSPLGRHLGIRGNHVLKWAFIEAAHGAVRSGGKWRDIFDRATNGGKKNRGRGYIKVARELVKVVYVVWAKSVDYQATPPVRPGRKRNKKKSRSETGQLLHPMVHASTA

SEQ ID NO: 430036 - protein, 356 aa, unidentified
MSRDIQYIGMDVHKEAIVIAVLNGSGKLVMESIVETKASSILQFIHGLRGELHVTWEEGTWAAWLYDLLKPHVQQVLVCDPRRNALLKEGNKSDKIDARKLADLLRTGMLRSVYHGEHGLRTLRELGRSYRTISQDLNRVMNRIKALYRGWSIPCAGTQVYAPRYREEWLHKIEHAGVRRRAELLYQQLDGLQTLRRTLRPELLAESRKHKASKLLRQIPCIGPIRAARLIALMQTPHRFRSKRQLWTYSGLGIETRDSAQYRFVRGQLQHAKKPQQIRGLNQNHNHEMKEIFKGAANRASCGVGPLRDFYLSLQAKGMKPEMARLTLARKIAAIALTLWKKEERFDAEQLKPQAA

SEQ ID NO: 430037 - protein, 336 aa, unidentified
MIAEGLDLVVGVDTHLDEHVLAIIAAPSGALVAQRSMPAGARGYAAALRFAANRGSGARVWAVEGTGSYGAGLARFLADRGEVVLEISRTPRAERRLRGKDDSLDASRIARAALASETLALPRSGERREALRLLLVARRSAVGVRREALGQLRGVIVTGSRSAGCSSAAAACAAHARQARTSSRRGSCCAASPAGSKQRPSRPPSSSASCSVTCAPALLDEPGVGPIVAAQLIVACSHPGRLRSEAAFARLAGVAPVPASSGKTTRHRLSRGGDRQLNRALHTVVLHRRQHDAGTKDYIARRIAEGKTRRDATRLLKRYLARHLYRVLEQQTPLVT

SEQ ID NO: 430038 - protein, 354 aa, unidentified
MLIIGCDYHPGFQQIAYVDTDTGELQERRLVHRQEAEEFYRALQPQQIGVRVGMEASGQARWFERLLAELQFELWIGDAAKIRSKRVRKQKTDRQDAQLILALMLENRFPQIWVASWENRDLRQLLWHRHRMVQMRTRLMNQLQAVALNEGIRRKKGLWREAGRKQLQSVALAPWASQRRHDLLELLDRLSPRIAELSERVEEEARKSPVAQRLMTHPGVGPLTALAFVLILGQAERFACGNQVASYLGLVPEEDSSGEHRRLGHISKQGNSLLRFLLVEAAQVTVRSDSEWRRKYFHLALRRGRKIAKVAMARRLAVRLYWMWRKEWDYGQWKKFSPHAGQPGTGVGVQSNTE

SEQ ID NO: 430039 - protein, 366 aa, unidentified
MRKTSTVRGTKGRVFKARKLTVGLDLGDRSSFYCLLNERGEVILERKLATIPKAIQEVFSRMVASRIALETGAHSPWVSRLLTQLGHEVIVANARNVRLIGESRRKDDRLDARTLARLARIDPQLLSPVQHRSAKAQIHLTVIRARAGLVNARTALVNAARGLVKSYGERLRGCGTQQVSRELAAGLSTELREALEPLLREVESLNERIKEYDRRIDEMAKQTYPEVALLKQVKGVGNLIALAFVLTMEDPHRFRKSREVGCFLGLRPGRRNSGQSQPQMHISKEGDRYLRTLMVQGAHYILGPFGEDSDLRRWGLKLAERGGKNAKKRAVVAVARKLAVLLHRLWVGREVYEPLRNTHRAMGAAA

SEQ ID NO: 430040 - protein, 342 aa, unidentified
MDITTIGIDLAKNSFSLVGMNKQGKVLVRKTLSRKKLLPFIAQCPPCLIGMEACSGAHHWGREFSKLGHRVGIIAVKFIAPYRRGDKNDNNDAEAICEAVLRPNIWFVPIKTPDQQAVLCIHRVRQGLVRDRTRMMNQLRGLLSEFGIVMPRGRYLAQSAIGGILEDAENGLPMMARGVIDDLWQRIKQANEHINGYDRELSQLVKANPVARQIMTIPGVGDQTASGVVASVPDPRMFRNSRQFSAWLGLVPRQYTTGGKIKLGRITKRGDQYLRTCLVHGVRAVVANLRDKQDRVSCWIRALIARRGYLRAVVALAARNARLIWTLMMKQEDYRAMPATNR

SEQ ID NO: 430041 - protein, 351 aa, unidentified
MPRIADPEQAVTGGVDTHAEVHVAAVVDLVGRVLGTEEFPATAAGHQKALDWMRGHGRLAKVGVEGTGSYGSGLARYLTVHGVEVVEVIRPNRQTRRRRGKSDAVDAVAAALAALNGDAAARPKTHDGAVESIRMLRVARRGAIKARTQAANQLRDLVVTAPQSLCDRLAPLPTVERVAVAARLRPGDLTDPAGAATVAMATVARRYQMLTAEIDQLDGQLDRLVEHTAPPRLLAKQGVATQVAAALLVAVGDNPTRMEREASFAALCGVSPVDASSGKQRRHRLNRGGDRQGNSALWRIVITRMAHDPRTRSYVARRTAEGKTTKEIIRCLKRYVAREVYKTLVAVASSP

SEQ ID NO: 430042 - protein, 369 aa, unidentified
MAKNGTLAKSQDLQPSFQTTTEQITIGIDLGDRFSHCCVLGPDGKVLTEGRLRSTPETMARHFQDLLPARIAIEVGTHSRWVSQLLGQWGHEVIVANPRNLRMIADSIRKSDQVDAHMLARLARVDPKLLSPIVHRKQESYPDIIQLKARDLLVKNRIRLMNAVRGVLKSAGLRVPSSGTSCFPSKAAVCIPDELKLSLTPLLETISHLNKQIYSLDKAIESTAQNRYPETNRLRQISGVGSITALQYVLTIGDPGRFAHSRDVPAYLGLTPRRHQSGSVEQQLRITKAGNKQLRSLLVQCAQYLLGRFGPDSDLKRWGTRMFERGGKNSKKRAIVAVARKLVVLLHRLWVTGDTYHPLYNVAMSSVTP

SEQ ID NO: 430043 - protein, 408 aa, unidentified
MNMKHVLAFDVSKGKSTMVIYNHYKKCEFEGEINHNKMSFKVLNEKICEINKLDGQAPEIVFEASGVYSRPLEYFFQKEGYAYHRVSPIEANLQTATMRRHKTDKSDAHELAKSHFRTERSKTYQEDAYYQQMRALTRYYDELDSEIINLFSRMHAILQLSFPELERLLSKRSALFLNIVQLYPHPDEVLACSRTVIRNRIKANTKKNISLARADAKGLELLHAAENSFPAISKDDVRCEQVRDYATRIADLKDKKEKLIKQMVDISKERIEYQVFLSFPGIGEATAVRLIGEIGDLRRFQNHKQLNAYVGIDIMRYQSGNTFYKDKINKRGNNKLRKILYFMIQTMIKLRKKTNNHIVEYYDKLKTQPQGKPHKVASIACVNKFLKVAFHLITHNITYDYEVASTCS

SEQ ID NO: 430044 - protein, 366 aa, unidentified
MDKESIGVDLHSTQVTVHRIIIGENGLLERKKSQYPMERMETHFILSLHPGCAVCVEAGSGSHTLARMIVAAGARAFVVNPLSMPQIFMTAKKTDRIDAKKLADCLKQHLQSNDPNDGFPEVTVADEDTQRLRMLISQYQRVNADMIALKNNLYALFRQWLVQVDKGFVIDRLDSYLEHPRLPPEVGIIARQEKHRYEELEAFKAQLRSMIESIGAIRYSEQVGLLIGVSGISVFGAVCIMADIITIDRFRTSKNLVSYLRAAPRVDASNNTIHIGRLNKAGRKMAFEILLQSVTHLVDGNPNLLRYTKHAVGKSKNKIRAAVVGRTIRQIFYILKNKEPNWFLKEETCSVKKRQVERILFAQKTA

SEQ ID NO: 430045 - protein, 345 aa, unidentified
MKIIGCDFHPSFQQITICDLETGELQERKLSHADGQAERFYQELGESALIGIEATGNCQWFLDLVQRLGHEVRVGDAAKIRASYVRKQSTDKRDAGHILKLLLEKRFPQLWTPSAAMRDQRQLLRHRDKLVEIRTKVKNSLQHLAMNRGMQKKSRLWTRLGMEQFQQLAMPGWAGTRREDLLQLLKELNGQIEPLDQAVKQAAEQHPQAQLLMTQPGVGPVTALAFVLTVGDVTRFAGSKQLTSYLGLVPSEHSSGSKRWLGAITKQGNRFLRKLLVEAAQTTVRKDEGFRKEYQHRCRRRPKGVAKVAAARKLAVRLYWMLRSNVGYPEIVHIESNPRVPLGEV

SEQ ID NO: 430046 - protein, 318 aa, unidentified
MPDSIVVGIDVAKRSFDAALGVAGSIKTFSNEDAGHDALVAELGGQSVELVVMEATGGLERDLACALQAAGFAVAVINPRQGREFAKAMGYLAKTDRIDAKALAELAQVLSRHPERERFVRALPSAEQQTLQALVARRRQLVTMQVAERQRLSSSHAVARNSIEAMIIAIRAQLDAVEAELSAHIERHHGELAHQLGSVRGVGPATVASLIAEVPELGRLSRREISALIGVAPFNRDSGQMRGKRTIYGGRAQVRRGLYMCALSAIRFNAVIRAFYTRLVLAGKPKKVAIVACMRKLLTILNAMVRSGKSWDDSLHSA

SEQ ID NO: 430047 - protein, 372 aa, unidentified
MNYNTVYVGMDVHKESFSLCAYTIEAEKASHYQRTEADYKKVLNYLEFLRTIYGDDANFICGYEAGCFGYTLYHQLTANNVKCIILAPTTMLEQRSKKRIKTDRRDAEIIAKCLAQHNYSPVHIPTAKDEETKEFLRMRDDHKLALKKVKQQILAFCLRHNYRYDGKSHWTAAHLKWLKALTPEALYKEILDEYLLTYQTLSDKIERLDKRIEELATQDEYKEAVKKLCCFIGVKTHTALSVLVEVGDFKRFASAQHFASYLGLVPGDDSSGDDQNRLGITKAGNRHVRLLLTEASQCYARGQVGFKSKELKSRQSGNTPAVIAYADKANERLRRRYYKMVLNKYKKHNVAKTAIARELACFMWGMMTDNIA

SEQ ID NO: 430048 - protein, 348 aa, unidentified
MDSMTYVGLDLHKRSVAYCVKAASGEIVDEGTVLASRAALVEWAQSLPTPWEGGMEATIFTGWVYDLLLPYAEHLRVGHPLMLKAICCSKKKSDQIDARKLADLLRSNLFPECTMLPKELRDLRRVLRFRNRIVRQAIRMKNTACGLLMESGQAYSKRKLHGKRYFAELVDSLEDVPESVIELLRLSHGTVEFFTSMQKELIAGLRGQSLLRERVDRLMTIPGVGEITALTWALEVGDPDRFGSVREAVSYCGLCSAYSESGGKERRGPISKQRNKYLQTILIEASKLAPQWNAELRALRDRERMRGHHNRATLVVGRKLVAYLMAVDKRGTAFEDRASRAGGEGLAA

SEQ ID NO: 430049 - protein, 459 aa, unidentified
MRKAKKNAVDRFEKMPIVHPQAAGIDVGSKSHFVAVGQRKGDVKEYGVYTEDLHRLFKDLLNAGMTTVALESTGSYWQPLFVMLQQYKLNPILVNGKFTKNVKGRKTDVQDCQWIQKLHTMGMLEGSFIPDLFTETIRQYYRHREYLVENGAGYINKMQKALRLINIRLDAVLSDVVGLSGKDIIEAILKGERNPAELASLAHPSVKKSKNEIIAALTGDWREEYIFELRQCYELYQYYHQKIDECDEEIKKIITTEIDRKQKEEGLVKVTELSIKKKRIQKNTPNINMQQLMVAMTGGVDISAIDGVGIGFLLCLIAETGVDLSAFETHQQFASWLRLSPDLKKTGGKVISNKTRKGKNRLAQAFMHCANAIGNMKEGSYLVQFFKRLARKKDRAVAIVATARKLAVIVWNMLVKKTPYNPDPPAEYQNKIRTNQIKDIQRKIRKLNIKKNELIFATA

SEQ ID NO: 430050 - protein, 350 aa, unidentified
MTLYIGVDFHPHQQTVAWCDTETGETKTVDLAHNLEDIRSFYASLPGPAIVGIEASVKAVWFENMLFETNHKLLVGNPVLIRKRATSRHKNDRRDAELILTLLLRDEFPAIWRRPPESSQVLEILRLRRNLVRQRTQVYNRLQCLAHNAGLPKGRMKASVFQNVIRSLDMDETDSMQRMHLFRLLENFNEQIAELEIWLRKKAEPEAKVQLLLTQKGVGYLTALAMVHTIGDVTRFTRGPKQITSFVGLDSLEASSAGKTRFGRVSKAGSSLLRFQLGQAANIAARSDMKLKSFFKRLAKKKPKGVAKTAIARKLLVKLSIMLRDNITADEFDRRGTHSLAMLEKPGGLK

SEQ ID NO: 430051 - protein, 349 aa, unidentified
MQEITRVGVDLAKHVIQVHAVDGSGKLRTSRALARDKFMAWCAQLPPGCMVAMEASSSAHHWARKLAVLGLEPRIIAAHLAAPYRLQGKGGKNDANDAAAICEAASRPTMRFVPVKSVEQQSMLCIHRLREGFKVERTACINRIRGLLAQFGVVFSQSPAVLRQALPDALEDATNELGGLARLALQRAWQQWQELDAHVSWCDDRIKAHGKSSAAVASAEQLMGVGPVTASAVVATVGDFRQFKNGAQFGAWLGLTPRQNSSGGKSNLGGITKRGDMYVRSLLIQGAKSAVMNAHKRDDPISQWALALRERSGWQKAVVALANKNARILWAVMTKRHAFDARHVSIKPC

SEQ ID NO: 430052 - protein, 427 aa, unidentified
MKHDNAIKYQQFCQFKAEIRGSRDYLIVGIDVAKDKHHAFFGMATGRTLLRRLIFNNNREGFERLIERSRQLQLEQSLSKAVFVLEPTGNYHKPLAHWLTEHEEPVVLASNKSIADNRQSLDGRWDKNDNKDSANAADLASQGKCQYLEQPEDDIVELRTLLSLRKRLKKEAHRLRMQIRNGLVAKHFPEFDRLWGSCLIENLAIVRWCLDPQKITAMPFNDFVRLVTTRDRGQQQVKRLRSIYAVAGVSIGCPMGEAAGFEARQLADRLAAKGEQLDAVMKRIEQVCRRFVSYRHLRSIPGFGPYVAAVVLAVIGDPNRFRGRRQVIRLAGLDLNAKRSGKYSDTAVPVISKRGNADLRYALYQAAQIATYHDQRFRALFIRYLKGREKERGIKTKVRVKLSAKMLVIAWTLMKDNTDFDPSLLIV

SEQ ID NO: 430053 - protein, 347 aa, unidentified
MSYFAGIDLHKRYLTLCVLDPDGNVVVQHRRLTTDGLFAVLAELDGPITVAVEATLHWAWLHDRLVAQGYAVQVADPGQVKLICKARCKTDPIDAKKLADLVRSNLLPAIWVPDPATRANRKLLRGYAFLVRIRTRIKNRIHAYLAEINLASPATDLFGKQGRIWIDSLSLPDEVRFQVDGLLELLDQLESRIRKVAKRIEQRVDMTPEAQLLLSVPGIGAKTAMLIMAEIGDLSRFPTSHDLTSFAGLVPTTRSSGGKTTHGSLPGSGSPWLRWALVETTQTLKMKPGPVRAHFTRLTRAKGNSKATVAAARKLCCYLFWMLKENRTYPEWLQNRHSNQLLEVRPT

SEQ ID NO: 430054 - protein, 322 aa, unidentified
MKVTTIAIDLAKNVFQVLGMTADAKKVYNKRLNRNQLKELLCNTPACTVVMEACYSSHYWGRVGLQFGHNVKLIPAQHVTPFVRGNKNDSNDALAIFEASSRPNIRFVPIKSEAQQEVLMMHRIRDRLIKQRIACTNQIRGLLVDFGFVFPQGFTAFEQNIWDIINDSEQRPLLRYLLNQVYDEYLQITKQLKDLNKLIKQKVEQTETGPILLSIPGIGHVIASAFEACIDKGQAFNGPKELAVWLGLTPRQYASGNKSQIYGITKRGDSYLRKQLIHGARTVVSHAHKKDDALNQWITQLKTRIGFNKATVATAHKLARLM

SEQ ID NO: 430055 - protein, 402 aa, unidentified
MNSVGIDISKGRSTVAVMRPFGEVVISPFEVRHTDSELSELARQLKSLDGETRVVMEATGNYHAPVAKLLHDAGLYVSVVNAKLVHGYGNNDLRRVKTDRKDAVKLANYGLDRWLTLPRYVPEEDTRLLLKNCYRQYRQYSKVQTVLKNNLISLLDTVFPNVNRLFSSPIRGDGSEKWVDFVAEFWHCRCASEKSERAFTSKYLRWCRKHGYNFREAKAHTIYAEASGHIGVMPKFETTKLLVEQAVAQLRATSTALAALKQEMQSLASVLPEYPVVMDLFDVGPTLGPQLIAEIGDVRRFYSKKALVAYAGLDAPPNDSGDVTGRHKSMSKIGASSLRRTLFLVMSVYLQTAPLDEPVYQFMDRKRAEGKPFRVYMMASANKFLRIYYATVKAYLESLEQV

SEQ ID NO: 430056 - protein, 316 aa, unidentified
METPQPFVGIDVSSQRLDVDSLPASHHFSEPNTEDGIASLVLRLRKLNPQIVLLEATGGYEVPVAYALYEAGLPVVIMNPKALRHFAKAIGKLAKTDKLDAQVLAHYAQSIRPPVRPLKDQEQLELATLMTRRRQLQGMIVMEGNRRRTCTPKVRGNIDQSLAHLRQLLEDLDREIHDSIRRTPLWHENSEILQSFTGIGPKVSASLIAVIPELGTLPGTKVSALAGLAPMNRDSGQYRGKRKIQGGRPAVRQALYMAALVASHHNPVIMEFYQRLRLAGKPAKVALTACMRKILVILNAMLKNRTYWNPQLPLAA

SEQ ID NO: 430057 - protein, 343 aa, unidentified
MDHFAGLDVSVKETNVCIVDDTGRIVREVKVASEPAALLPVLTTPTYHFKRIGLEAGPLSQWLFSALAEAGLSVICVETRHMRAVLKAQINKTDRNDARGMAQMMRAGLYRPVHVKTLRSQKLRMLLTHRKLLQSKAIAIENDLRGTLRNFGLKVGMVGKVKFEARIQELVENLPDLAVLVEPLLVVRRVLREQLGILHHRLLAIVRDDDVCRRLMTIPGIGPVVALTYRATVDVPARFKNSKAVGAVFGLTPSKYQSGEIDRTGGISRCGDEMMRVMLYEAAQVMLTRTNKWSWLKAWAVKIARHRGMKKAIVALARRLAVIMHRIWVDGTEFRWTREEAAA

SEQ ID NO: 430058 - protein, 354 aa, unidentified
MIIIGADYHPGFQQIAFVDTDTGEFQERRLQHREEAEKFYRDLAAQGMQVRVGMEASGQARWFERLLSELHFELWIGDAAEIRTKRVRKQKTDRQDAQLILRLMLEDRFPKIWVPSWENRDLRQLLWHRHRMVQARTRIMNQLQAVVLNEGLRCKKRLWRDAGREQLESFALAPWASRRRRDLLELLDRLTPTIAELTQAIEQEVEKCPEARRLQTHPGVGALTALSFVLIIGQADRFQCGKQIASYLGLVPLEDSSGQRRRLGHITKQGNSLLRFLLVEAAQVTVRSDPEWRSKYFHLAMRRGRKIAKVAMARKLAVRMYWMWRKGWDYEQLKKFGSHAGQPGNRDGVQSITE

SEQ ID NO: 430059 - protein, 395 aa, unidentified
MSAEGEAIRSNDYRKDTTVKAPSTRPAAVLGLDVGKSSHWACLIDRDGEVLASAPVRNREAELDALFASAPAGTLVVVDQFRNIGSLAVRRARAAGLGVAYLPGLAASRAAGLFAGEAKTDERDAAVIARTALGVPDSLSGVPGRGEALEAARALSSQRAHVVACATRDKNRLRAVLLESCPALEAAVDLSDRRWLELLAGFGGAWGIARSGAEGPRAEAAGEAAAASTAPPPALVEAENRQVRFLAARISEALDEAGALEAETAALLEGDETYACLLTVPGIGPRTAAQLAVSVDIGRFPDHDHLASYCGIAPRVRSSGTSVRSVRASRRGDARLKSLLIFSCNSLVRSSGRYGEYYRACRARGMGHGRALKAVARKRLRAIYAVMRDRVPYRE

SEQ ID NO: 430060 - protein, 316 aa, unidentified
MSEKLQEWFVGIDVSKNTLDLRIEPVGESLHVAYDDTGVSEICQRLSEVLPTLIVLEATGGLETRLASELAAQGLPVAVINPRQARDFAKATGQLAKTDRVDAAILAAFAQAIRPAVRPLKDADTRELDDLVTRRRQLVAMRVQESLRLGTAHSKGLQKNLKSHIAWLDKQIAKLDDDLSVRLRQSDVWKAKDDLLRSIPGVGAVTSLTMLAQCPELGQLNRREIAKLAGVAPLANDSGKHRGKRFIWGGRADVRAVLYMATVSAIRCNRAIKAFAERLKQTGKPAKVVIVACMRKLLTIMNAMLKSNTPWTSKIA

SEQ ID NO: 430061 - protein, 340 aa, unidentified
MDEAAEVVSEDQVPTTKAGLDSVFAKMPASRIALEVGTHSPWVSRHLASMGHEVIVANAHKVKLITQSVRKNDRIDAQQLARLARVDPKLLSPIRHRGEQAQKDLAVIRARADLLAARTQLVNSARGLVKPLGERLKKCDADQVTAGLGDSLSESSQAVIGPLLKAVERISEQIDKYDEQIEGIAQRYPEVKLLQQVYGVGPLIGMTYVLTLEDAQRFAHSRDVGPYLGLTPKQRDSGDSQPELGISKAGDGLLRSLLVQGAHCILRKGAPDSDLRAWGLGKMGNGGKRAKKRAVVGVARRLAVLLHHLWATGEVYDPQYNRKAAEAAAAKAKGQGKVAA

SEQ ID NO: 430062 - protein, 380 aa, unidentified
MNTTTVGIDLAKSIFAVCEGDSRGHGSRSSILKSGEFLKWLRTLPTGTVVAMEACSSAHSWGRTMQALGLEPRLIAAEFVRPYRKNQRIKNDTRDAEAVLTALHAPGMRFVTIKTEDQQQRLAWHRLREGWKAERTALFNRIRGLLTEFGIVVELGAAKIRRKLAELESDAAYPQSIQLMAQSVRAQIGILDQRLAECERQIARQSKSDPAVARLRSRPGIGPLTADAIVATVGNARQFKNGRQFAASLGITPRQHGSGGKTHLGAITRRGDSYLRCLLVQGARCVLQAALRLHKNKPDTLNRLQLWMITLNERVGYHKAAVAIANKHARQVWAMIARGEAYNAEAYKDWEAAHATVRPGDIQEASDYDLSTAALAAASV

SEQ ID NO: 430063 - protein, 318 aa, unidentified
MNIIGLDISKDTIDATLHKTNGSIHYIKFKNNDDGLKQFRLWIKGNRIRKAYIGMEATGIYYEKAADMLSSYYTVYVINPLKIKDYGKSRFNRTKTDKADSNLIADYIKRHQDTLIPYQIPKNKALQKLINLKNQLQQHQKQIKNRLHSTEEDFIRNIHQDLIDTIQDKMEQVKIAISEQIKKQTDNNHYRNLQTIPSIGKDTASVLYAQLTEKHFKTANQFVSYAGLSPAIIQSGTSVRGRGRLSRYGNRRLKSTLYMPALCAYRFNAFPKLINNLKKAGKPKMVIIVAIMRKLAKLAYYIVKTGQPYDAERHRLNQ

SEQ ID NO: 430064 - protein, 344 aa, unidentified
MKITRVGLDLAKQVIQLHAVDAREQVVKRVALKREALMGFFHNLPACAIGMEACAGAHDWARRLRALGHEVKLLPPHRVKPYVHGQKNDRNDAAAICEAMTRPSMSVVPVKSVAQQDGQALVRIRSERVASRTALINQVRGLLAEYGLVIAPGAVNVRRAIPRLLEDAQNGLSGVFRSLLADLYDDLVALDARIATLDRTVVHYVRDHEAPRRLCAVPGIGPVTAVALVASVGNAHQFNSGRQMAAFFGLTPRQHSSGGKTRLLGMHKRGDSYLRGLLIHGARSMQRTATHKDDARSRWLNALAQRRHRNIATVAQANKTVRIAWALLTRGETYHDTGASPLAA

SEQ ID NO: 430065 - protein, 424 aa, unidentified
MMSHDTKDVPFQQQFNLFAGFDWASDHHDIVTVDPDGQVVMEVTIDDTAEGWATLRDKFAKHVGQDLSAVAVAVETCNGPAVERLLAMGCAVYPLNPKVAERYRERKSNAGCKDDRLDAFSFADALRTDGQAWRRLKPDDPVTQELRLLCRDEIQLIAQRTALVNQLRASLREYYPAALEAFEDWTSDGPWAFVQAFPTPQALVAAGKRRWEKFLHANRLYRRETYERRLEIFARADQFCGTPPVTRAKSRLALALAAQLRVLEKQLVEYRQSIEKLFSQHPDHDLFGSLPGAGAKIAPRLLGELGNDPSRFDTHESLQCYGGSAPVTKQSGKNRWVSFRRACNTTLRATLHHWADNSRGKCAWAQAYYQHKRDHGQSHAAALRCLANRWVKILWKMWQSHTPYDEALHTRNQVRHGSWVIQLT

SEQ ID NO: 430066 - protein, 365 aa, unidentified
MQKISTLQTSGENIFKGQLTMGLDLGDRSSAFCVLNEAGKIVFEHKLATTPEAMKQVFGSMPRCRIAMETGTHSPWVSRLLTALGHEVIVGHAQKVRLITKSRRKDDRLDARTLARLARIDPELLSPVKHRSAQAQLHLTEIRARAGLVSARTALVNAARGLVKSYGERLRKCGTQQFRRETTSGLSAGLREALEPLLREVESLNERIKEYDQRIAKMAKQTYPETALLKQVKGVGDLIATAYVLTIEDPHRFGKSRDAGCFVGLQPGRRNSGESEPQMHISKEGDEYLRTLLVQGAHYILGPFGEDSDLRRWGQKLSARGGKNAKKRAVVAVARKLAVLLHRLWVSGEVYEPLRNSQKAMSAAA

SEQ ID NO: 430067 - protein, 397 aa, unidentified
MYIVGIDIAKRKHEAAVIDGEGAVIIKPFSFTNNCSGYNRLLAMLTKAKLPLDEVSFAMEATGHYWLALFTRLQKEGFRVQVINPVQTNSIRSFYIRQAKTDPRDALLIAEVIRFGHFSESTLHPENIYELRELCRGRHAIVSMQADVKRKVVALLDQVFPEYETAFTNMFGDTSMAILQTCPTPKELSEMPLEELCHLIEVSSHKRFRMAKAQELQALARNSFGFAMAGDVFSTMIRLYAKHLDFLKQQVREMDRKIAEIMETLDTPITTITGIGPTLGAYILSEIGDISRFSSAAKLAAYAGIDPTMRQSGEYNGVRNRMSKRGSPYLRHAIWLAASSAVLHDPALKLYFQKKRDEGKPYMASVGHACRKMVSIIYAVMRDNKAYTPCIPNEISA

SEQ ID NO: 430068 - protein, 351 aa, unidentified
MATVEIVYPTCCGIDVHKNFLVACIAKTDERGHTNHLMRRCSTNTGDLRKLADWLISNNCKDVCMESTGKYWIPVFNILEKTCNVCLTHPKYVKAIKGKKTDKKDAKWIAELFKCYLVRASFIPPFDIRQLRDLCRYHAKLTYMVTSEKNRSQNCLTTCNYKLDAVFPDVFGKSASRILDNLIALGNSDFDITPLLHKRCKASVDEIQAALDGEFSFAQSEKLKIIRKHMEHLESLKETLENLIYQLADKYQSEITLLLSVPGISSPLTAVRILAEIGTDMSVFETAKKLCSWAGVTPQNNESAGKKKTTRISRAGAYLKPLLVQGAIRLPNVSNVFFCDGLPVPSNKNRV

SEQ ID NO: 430069 - protein, 339 aa, unidentified
MNVVIGVDPHKASHTAVAIDEAEDEVSSVKVRATRRQVEQLVRWAEPFEKRTWAIESAGGMGYLLAQQLVAQGEEVLDVPATLASRIRVLATGRSNTNDPNDAHSIAVAAFRAPSLRSVEPADHSQVLRLLAKRNVDLGSHRTRVVCRLHALLAELVPGGIAKELYVSDAERFLANITPSTPVEQVRYDMALELLDDIRRLDEQTKESHRRIRLAIKASGTSLTDIYGVGPIVAAQLIGYAGDVRRFANRDAFASYNGTAPVEFASGGRVVHRVSQRGNRRLNHGLHMVAVTQIRNAGTEGRIYFERKIAEGKTKKEALRSLKRQISNAVYRQLLLDAR

SEQ ID NO: 430070 - protein, 319 aa, unidentified
MAQNDRVVVGIDVAKDKVDACIRSLSQRRTFPSTAEGRRQLISWLRKHKATKAVMEASGGYEREWAKALREKDVEVRIVDPKRVRHFARSAGRLAKNDDIDSDTIAWFAETFGEAKGQAYDAARETLVQTVNARQGLLELQTSLQNRGEHAAPEPVKKMQGRLLKKIVLEVARLEAAIAVMIKATPHFAELAEIIESVPGLAEITSAGLIAAMPELGQVSNKVAPALLGAAPYDDDSGRRRGERHIKGGRRKVRNLFYMACLGAATRHNPVLKAFYQRLIAKGKPPKVALVACMRKLIVILNTMIARGEKWDATRYVLS

SEQ ID NO: 430071 - protein, 351 aa, unidentified
MKSITIGMDLGDKNHVVCVLNAEGDVIIETTVKNNKESIDIFFSKYKKATVAIEASTHSPWISRLLAALGCAVLVGNPRKLRVIWDSDAKTDKRDARMLAQIARFDAKLLYPITHRGKQAQIDLEILQARDNLVKNRTNLVNHVRGSVKAQGERLLSCSTESFHKKVAESMPDFLKETLTPIVEIIGKLTEQIKEYDRKIEQISKEKYPETELLRAIKGVGPVTALAFVLVLEDPERFSKSRQVGSFLGLTPRRDQSGEIDKQLRITKAGNPFLRRLLVGAGQYILGPFGEDCDLKRFGLRLSARGGKNAKRRAVVAVARKLSVLLHRLWKHGEMYEALHISGRIKLAKAS

SEQ ID NO: 430072 - protein, 310 aa, unidentified
MQDTIGIDISKDTVDAHRLSDGKHMKFDNDGDGLKALCRWIGKAPVRVVYEATGRYHRDLEGALGGAGHALVKVNPNRARRFAQAISQGAKTDRVDAAMLARMGAVLDLDAKPARTDSMHEIRELHIARTGLIKDRTACRNRLQGARNKVVLSQLRARLRQVEKQIDQIDTELQRLIAKDPDLARRFDILMSIPGIGPIAAVAMIVEMPELGEMTGKEAASLAGLAPITRESGKWKGRSKIGGGRAGLRTMLYMPALVATRYNHQLGKTYRTLVDAGKPAKVAITAVMRKLLVLANALIREDRKWAQTAP

SEQ ID NO: 430073 - protein, 363 aa, unidentified
MNYVGVDIHKKYSVLCAVDEVGKKVREGRVEGNSEKGFARFFAGLEGPSKAVLEACWNWGLIHDLLEEIEEVEEVVLAHPLKTRLIADAQIKNDRLDAYALGTLLRGELVARTHIPGRETRARKNLLRQRLYWARLRTMLRNRIHALLDRQRGVQLPQCSDIFGVRGLGFLRRLELAEPDGILLREALALHDLIAQQIKAQEKRIVAEFEDEAEHGRLRSVPGIGTTLAAVIGCEIDGIERFGSAEKLCAYAGVVPTTYASGGKVAHGRLLPSCNKWLHWALIEASWVAIGYSAYFGAFYQQRRARGKKPNTAVTIVARRMCCILYQLLQEKRDFEKQPQRAHTQSYTRSLRVKTDGTTTACC

SEQ ID NO: 430074 - protein, 498 aa, unidentified
MIWWQLRWVGISGLDPVGEYCSAIRNRAEPADFICERSVYEPQRKTQKRKTLGATEGLPMLHRHAAGIDVGNAEHYVAVPPDRDARPVQKFGSFTADLQRMARWLQACGIETVVMQATGVYWVALFEVLQSYGLQVQVVNAQHTKTLPGRKTDVQECQWLQKLHSFGLLNPSFRPAEEIRVLRSYLRQRENLVSAASTCVQHMQKALTEMNVQLANVISDITGVTGMAIRRALMNGERDPRQLAELKHKQIRASREEIARSLEGHWRAELIFTLGQSLELYDFHLAKIQECDERIEAQLKTMEPQAEVSTHPMPASRQGRKIRKHGPRFDLRQQLYRLTGVDLTEIDGFDLQVAQTVISEIGVDMSHWKTENHFSSWLGLSPDNRTSGGKVLKRGTRHVVNRAATALRLAAWNLIRSQSALGAKFRRLRTRLGAPKAITAMAHHLARLVYRMLKFGTAYVDQGSQHYEAKYRLHKIKWLQKQAAALNLQLIPAQGIAQ

SEQ ID NO: 430075 - protein, 342 aa, unidentified
MNKKKVTKQIVATDIGMENFYACYKIQYDDKSTVIKGTKSFGNSLSGINEFYTWCKKRNKAPEVEPIFVMEATGVYYEELAYFLHHKKEKVSVQLAQKIKYFAKSCNLKTKTDKVDSKMIAEFGIEKNLTGTDLWTPPSEDFKIIRDLAREHTSLKKAQTVSKVQLHALKHAHSAYANVIELKEQQIDFYEKQINNVEKEIKTLVKSDKSLYSKIEKIETIKGLGFITIIKVLTETNGFLLFNSIRQLVSYAGLDVIEKESGKYKGKTKISKKGNARIRSALYMPAMSAAQHNRTLKVFYNRINEDMTIKKQGLIAVMRKLLILIYTLWKKEEKYIENYQMT

SEQ ID NO: 430076 - protein, 364 aa, unidentified
MDVHLRSTTVCALDAETGEAVTRRFRGNPWGEVAEWMSGFPGPSLAAYESGYLGFAPQRELSGLGVDCVVAAVSKVPRSAADLSSKNDRNDAARMAKAILSHDVTPVWVPSPEIEGLRDLAAAHDAATARLAAAKQRLLAFLARRGYVYGGTTPAGNPRKYWTYGFLRWLDGIHPADDGGIRALAALRNEVEAADETREALLAEYRAAVAAGPLSAEVEALQSIKGCGFALAAAFASEVGDFSRFRSGRQVTAYFGLAPKQRSSADSVRLGGISGAGNALVRKLAVEGSWCYAQAGHQPKLMPKGSGVPLEIRMHGRKGSERLLRRREEMLERGMPQAKANAATAAELVRWLWALGTMCREAGE

SEQ ID NO: 430077 - protein, 423 aa, unidentified
MPYRIAGIDVHKKMLAVVVADVEVEDEYHFERRWYGSNPEQLHMLSDWLIEQQVEEIVMESTAQYWKPVWGALERFWKPICQSREGVGRMSGTLHLAQALSNRGRRGRKTDFRDAERLIKRLVSQELVLSFVPDAEQLLWRTITRTRYQRTRDKVRLQNQLEALLEEAHIKLSSLVSDLLGASARRMLNALAGGETDPSALAALADQRLRATPAQLHDALGASKELNPVHRRLIKMTIEGLEFVERQIGQLDKEIASLLQLYQDAVQRLAVVPGLGVDSAQQIIAEVGAKAATFPSADNLSSWVGACPGKDESARVNRSQHSPKGNRQMRRVLNQAANAAVKRKGSIFEILYRRLVPRMGHNKTIGVIAHRLCRLIWIILHNGVQYEERGPAVSKESQQRHTAKMIRKLRLLGYRVEPLEALG

SEQ ID NO: 430078 - protein, 343 aa, unidentified
MQVSTIGLDLAKNVFQAHGVSAEGKVVLKKQLRRGQVLSTFAKLPPCLVGMEACAGAHYWARELRKLGHDVRLMPARDVKAYVKRDKTDAADAAAICEAVSRPSMRFVALKTPEQQGRLMQHRVRDLLLRQRTQTINALRAHMAELGLVAATGRQGLGLLLAILADARDARLPQDARASLKLLASQIAALQAQIDTLDKRLHAQHRQCPASRRLETIPGIGVIGATALAATITDPKAFKSGRDLAAFIGLVPRNNSSGGKQRLGPISKQGDRYLRRILVVGAHSILKQARTRPDKHPWLARLMARKPGKLAAVALANKTARIAWAVLARGESYRAPTAPAAAG

SEQ ID NO: 430079 - protein, 336 aa, unidentified
MVQIYGIDLGMSSFDVSFLSESGRVRHLSGVKNTVHGISKFLLSLPSSAVLCAEHTGVYGDLLLRLCTLNRICLCFVPGYQIKHSLGLQRGKSDPLDACRIREYAERFYDLLRPCFYPGEEMSELQELYRTRSLLVDSRKRLDTLNIGDNCKSSVSLAAGHARRAVLAELNTQISGLDHEIEALIQNSSEFSRNYQILTSIVGVGPVTSCELIIKTENFRKLDTAKKCAAYAGIAPYPKESGKMKCGHKISPMGDKQLKTLLFLCARSAKEHNKEIRLYFLKKHKVEKKHFFVAMNNIANKLLRLIYSLIHKQQTYDRDYIQRDPRCVVISDTNKC

SEQ ID NO: 430080 - protein, 413 aa, unidentified
MIYCGIDWAERHHDVALVDDTGELLAKRRITDDAAGYQLLMDLLAEYGDTEDAPIPIAIEASRGLLVAVLRTGKRQVFAINPMAAARYRDRHSVSRKKSDPGDALVLANILRTDMHAHRPLPQDSDLARAIAVLARAQQDATWNRQQNSNQLRSLLREYYPSALDAVATWQNGLCRPEARELLRLAPTPSQAARLSRTQTQAALKRAGRKRGIEAEADRLREVFRAEWAHQPPLVEDALGKQMLALLIQLEAACTAADNLAKAVEDAFPQYPDAEVILSFPGLGVQLGARVLAEIGDDRSRFADARGLKAYAGASPITRASGKKSSIIRRRVKNDRLNHAGYLWAFAAPNGSPGAKAHYRRRRDVHGDWHAAALRNLFNRMLGQLYRCLQGHTPFDELVAFPTPSLEAEKAAA

SEQ ID NO: 430081 - protein, 356 aa, unidentified
MSHDVKYIGMDVHKEAIVIAVLNGSGELVMETILETKASSILQFIHGLRGELHVTWEEGTWAAWLYDLLQPQVQEVVVCNPRRNALLKEGSKSDKVDARKLADLLRTGMLRPVYHGENGLRTLRELARSYQTIGKDLTRVMNRLKALYRGWGIACAGTRVYAPRYREEWLNKLPQIGVRRRAELLYQQLDGLQALRRNLRPEFLAESRKHKATKLLRQIPCIGPIRAARLIALMQTPHRFRSKRQLWTYSGLGIETHDSAQFRFVSGQLQRSRKPQQIRGLNRNHNHEMKEIFKSAATRASCGMGPFHDFYAGLLAKGMKPELARLTLARKIAAITLTLWKKEERFDVEQLKTQAA

SEQ ID NO: 430082 - protein, 383 aa, unidentified
MKKESNETGKPQQTLPTKRKTAQVTIGMDLGDKTSRYCLLDYDGKVAKEGKVATTKKGMGQTFGGMARCRIALEVGTHSPWTSRLLKSFGHEVIVANARQVKLISASSRKDDKLDAQMLARLARVDPQLLRPIQHRSEEAQQDLMLIRIRAGLLDARTDLVNTARGLTKAVGERLASCDADQMGVEKLADLPVGMQETMKPLLSEVESLTRKIKECDVKIEQIARTKYPETTLLKQVKGVGTLIALTFILTVEDKERFAKSRDVGCYVGLRPRRSDSGESQPQLRITKEGDKYLRKLLVQGGHYILGQQGPDTDLRRWGLELCGRGAKNAKKRAVVGVARKLAVLLHRLWVTGEVYEPLRNSRLKEEAAKLKKSAAKVKRAAA

SEQ ID NO: 430083 - protein, 482 aa, unidentified
MKSKPQEKTSKGIDRPGPGHWHEMNRQQRRETMRKIQSDDLSLEVLHPDAAGIDIGNESHYVAVPPARDSQPVRRFGCTTAELKAMAQWLKQCGIRTVAMQSTGVYWIAVYDILEAADLEVYLVNARETKNLPGRKSDVQESQWLMKLHTYGLLRNSFRPSQEIRKMRTYWRQRNDLVQAAGRHIQRMQKALTQMNIQLANVLSDVSGMTGQAIIQAILAGERDPHKLAEFRDPRVKASQLEIARSLEGNWQEDLLFVLKQEQDGYEFCQKQMLECDRQVEQYLQKREDRSKGAPLPEENRKGRLKKKKGNAPQFNLRGELFRMSGADLTQIDSIDVMTATTILSEVGWDISKWETEDHFVSWLRLCPDNRISGAKIIGKGRLPTKNRVSIALKMAASTLRRSSAYLGAQFRRLRTKLGAPIAIKAMAAKLARLVYRMLRYGMKYVDQGAEFYEAQHRNLQIRHLKWKAAKLGFQVVAAPAT

SEQ ID NO: 430084 - protein, 421 aa, unidentified
MRKADTRKVKAIGDDTLIVAVDIGMEMNRGYCTTPDGRSSKTFKFDNTRAGMDTLWDMITINKNRFKCNEVIVGYESTGPYGEPMLHYLMKKPVRIVQVNPMHTKKVKEINDNSPLKTDDKDPRVIADIIRWGRALSIVIPEGDAAYLRRLNNSRERHVRERTALVNQLQQLVFLLFPEFRTVIKDIKCKTPLYLLRKYPTPETLSVLDKDVLGEEMRKRSRGKLKEHHADMLINLARNTVGIREGAAGLSMDIRHILIQLEMLTNLIAELESEMEIALGRIPYSPKLLSIKGLGVVSVAGLIGEIGDFKKFKAQSEIMKLAGLDLYEISSGKMKGQRRISKRGRSLIRKILYYTAIQTIRKDGILHDYYTRLTDGGMKRMKALIAVSRKLLGIIYAIVRDDSEYSANFESMKRQVIKKAA

SEQ ID NO: 430085 - protein, 353 aa, unidentified
MRTNPTKTAAIISTMGIDIGKTTFHLVGLDRRGAIVLQQKLSRSQLARRLANVPRCLVGMETCSGAHHIGRQLEALGHDVRLIPAQYVKPFLKGHKNDYRDAEAIAEAVQRPTMQFVRIKTPEEMDLLALHKVRSRLVRQRTGTINQIRGFLIERGITVQQRPAPLRKALIDILACGPAALSPRILRLLENLAVDWRRLDERIEAVSAEIEALAQADDSCQRLMTVPGIGPMISSAVVAAIGNGTGFKQGRDFGAWLGLVPRQESTGDRTILGKISKRGNKYVRTLFVQAAHVILVKRPRAAMQGLMPWIEKALKRMHRNLVAIALANKLARIAWAVLARGRSYQPRIAPHAA

SEQ ID NO: 430086 - protein, 340 aa, unidentified
MTITTIGIDLAKNVFAVHGVDQNGKTVLVKSRVIRAALPGLIAGLPLCVIGMEACSGAHYWARLFRQYGNEPRLMAAKFVSPYRMAGKSGKNDAADAQAICEAVRRPHMRFVPVKDESRQAMQCLHRPRQGFIEEKIATYNRLRGLISEFGVIAPQGTDALRHIVSAQKNSLPLQVQQCVDDLLEHVDRIEANITEYDQILPRIAKTDHRSQRLMKLKGVGPTTTCALVACIGNAHDFKNGRQLAAWLGLIPSQYSSGRKSKPGRITKAGDSYLRTLLVQGARSVLIGAEKRTDSFSRWVCSLVERRGYWRAVVAIAAKNARLCWASLHYGDDFRLYSAS

SEQ ID NO: 430087 - protein, 397 aa, unidentified
MSAVVGIDVGAYKHAAAVCRPGEREAERGVFRLSADRTGFDELDRWLKRQGPVERVVLESSGHYYWPLASHLYRRGYRVAVVNPLQAKYFAKSRLQRSKSDPADARTLAALGMSEEPRVKDPLLGAEAKEAARFWGGLVKEQAQIRNKLLRLVEIGFPELKECFEDPLCETALAVLREAPTARAASHKRVSTLAETSRPGGRRRLGAGKASRLHELAKQTIAPPELDAQMSFEVGMLIQQFDLLDKQIEIAEQRVAEVLDSELARRLQTIPGVGPALAATFIGEIGDIWRFEDFDQLASYAGVHPKELSSGTKGQNPETSWHMAKTGNAYLRSAAYKMAVVGTQHNTVIRAHYLRKRAQGKSAMNAIGHCMSKALAIVWGVWRSGLDFDPTLGGPRG

SEQ ID NO: 430088 - protein, 340 aa, unidentified
MMLVGVDLHTRESSVAMLDTATGEIKQFHLRHEGNAVEEFYAALPAPVTVAIESTGYALWFHSLMQRLEHTLLVGDAVKIRASVVRRTKTDRRDAQHILTLLKESRFPAIWVPDPDVRDQRALVAHRMRLVRMRTMIRNGGHAIALNYRLTLGASLFTRQGVGRLKALPLPTHTAHRRDESLELLTWLDARIAVLDKRIADVAASHPDARRLMTHPGIGPLTALASLLVLGPVARFATSKHVVSYVGLAPAIASSAGKHHLGGITKQGNRLLRYVLGQAGHTALRVDPDLKQLYHRVLHRRGKARAKVAVARALLVRLYIMQRDRIDYAEFRRRGEAKAA

SEQ ID NO: 430089 - protein, 511 aa, unidentified
MSTTVSSEAVPIGVGIDTARYGHHATFLRQDLQPATAPLEFTETCAGYNRLLKKLQQLQRRFPAAHFHIRIDAASQYATNLETFLRKLPFSQTISVGEPRRNKSYCRAHFPKRKADVTDSYCQARYAIVERPKDTPGVPKEFYALREIASRLEAQIRQSTRLTNQLHNLLARVFPELACVVSDLAAAWVLHLLQKYPTPEKLCRAQDASLMAIPHLSLEKADPLRALAKSSIGTLTGEVAEELVRTLVGQLQQSRAAKDRLEKLLVQAYHALPISSPITSIPGIGDATAAVLTAKIVDIDRFTSADQLVAYFGVFPEEHTSGVDKFGKPLPPGTMHMSRQGNDLVRKYLWNAAMSAVQYNPAARALYNRLLARGARPSVTIGHVMRKLLHLVFAIWKSGKPFDPNHYPWETPDTKQQVAGRNQGTRPARTAVTATQRSNVNKPARTVNRVRLTRTHTTQTNPEACHAMELPEPVTPAVPLLEENCSETARPAPSGRANSPKMKGANRRHQR

SEQ ID NO: 430090 - protein, 409 aa, unidentified
MKARNRASCRPHHDIAIVDEGGKVVARTRIGNDARGFAELLTMLAEAGDTPAEPIPVAIETDHGLLLAALRATNRPIYPINPLSASRYRSRHQVSGAKSDAMDAVMLADILRTDIAAHRPMPADTELAQAIRVLARAQQDAVWSRQQVGNQVRSLLEDFYPAALDAFAGLRPGGLARAEARGVLTAAPTPAAAAGLTRAKLRKLLVKAGRQRNIDTDVDRLLAVFATTQLRQLPMVENAMGIQLTTLLGQFDAACRAVDELAEAATAHFDRHPDAKIITSFPGLGQLTGARVLAEIGDDPDRFTDPRGLKAYAGSAPVTRASGKKTVVLHRHIKNKRLAAVGPIWTLASLTASPGARRHFDARRAAGDWNRQAQRHLFNKFLGQLHHCLRTRNLYDEHRAFQPPIALAA

SEQ ID NO: 430091 - protein, 371 aa, unidentified
MKKSSMFVGLDIHKTSIEIAIAEASRDGEVRSYGGIDGTLDALDKVIRKLVSKGCNLHFVYEAGPCGYDVYRHLTAQGFDCVVVAPSKIPRQSGNRIKNDRRDAQMLARLHRAGELTAVYVPCVEDEAMRDLTRSREDAKAMERNAKQRILAFLLRHGHCYSGKSPWSRAHFRWISILKMPHPAQQIVLQESLDTLAECTRRVDRLTEQIQTLSPQWRLFPVTQALQAMRGVSLIVATTTIAEIGDLTRFKKSTELMSYLGLVPSEHSSGRTTRRGSITKTGNGHVRRVLVEAAWAYRLPARVSRKLLIRQEGMSQEVCAISWRAQLRLCARYKRFIAKGKSHQLVVTAIARELCAFMWAIANEVQGPVKV

SEQ ID NO: 430092 - protein, 420 aa, unidentified
MKTWTEITHYAGFDWARDHHDIVIVDPQGNITTEFRIAHTLAGWQQFREKIQGYGAVAVAIETSQGAAIDQLLQSNVTVYPVHPLSAKRYRERKAPSGNKTDHLDAWALADALRVDGQGWSMLQPLDPLTQTLRLFCRDEMALIEHRTALVNQLQQALSEYYPAALEAFDDWTRPSCWEFIIHFPTPHQLVKAGKRRREQFLHVHRLWRPETVNKRLEIFARAEQFCGSEPVTAAKSFLALSLAKLLCTLEHQLQEYRKQIQALFEQHPDHDLFGSLPGAADKLAPRLLGEIGGDPDRFESVAVLQMLAGTAPVSFQSGQIHKVRIRYQCQKVLRYVVHLWANSCRKSCSWAQVYYRQKRAEGKSHACALRCLGQRLLKILHAMIRTRTRYNAELHARNQQAHGSWVLKLVTKQAPLGSE

SEQ ID NO: 430093 - protein, 387 aa, unidentified
MRAVCGLDVHKDSVFLCILHDSGEIFEKVFGVLTHQLRDMRRVMQSYGVSEVTMESTAVYWIPVWRVLEPHFRLKLVNPYFIKQLPGRKSDVKDAQWIAECTLKDLVRGSFVPPERIQQLRQYDRRIFDLDAEIVRKLSKLDGVMQRCNIRLSNYVSNTDTKSYKNVVRKLCEGVTDPEELIKEIYSRITNRHGRETILAALTGVVSDAEKDTMRQLRDELDLAEKHKQECQHKMMHICQTYYPEELRRLMTIPGIGERAATSLIAEIGVDMTKFQTAAHLASWSGLKPRNDESNKKIKSRRITHGNVYLRKTIIECAWGASRTKDCFFSRFSYHQTQVRKKNKMKVLVAVARKLLIAIWHVLHDETDYKDFCVKKDCDTSVSENNG

SEQ ID NO: 430094 - protein, 409 aa, unidentified
MEVVYERCCGLDIHKHTVVACVVVPGTGKQPHKEIRTFNTMTADLLKLADWLTAQSVTHVALESTGVYWKALWNVLEGSFTLLLVNARHIKQVPGRKTDVRDCEWIADLLRHGLLRASFVPDRPQRELRELTRYRTKLIRERAAERSRIQKTLEGAGIKLGNVASDVLGLSGRQMLEALVAGTTDPATLADLAKGTLRAKRPQLEQALTGQVEAHQRFLLAHQLVHLDGLDELIDQLGQEIADRLRPFQDKIERLDAITGVGQRTVEIFLAEIGTDVVRFPSASHLASWAALCPGNNESAGKRKSGKTGKGDVWLRTALTEAAHAASHTKNTYLASQYQHLAARRGKNKAIVAVAHSILRIVWHLLHHDCEYVDLGSRYLEERDRQQIERRLIRRLEGFGYTVKLEPAA

SEQ ID NO: 430095 - protein, 362 aa, unidentified
MYIGVDTHKKAHVLVAIDDQGQAGGTHTVANTPSGWAAALQWARELDPACIWVIENSGSLGKGFAQFLLIQGEPDVHEIVPHRTAQYRKRGRSQDKTDAADALAMARLLRAETDLLPTVLLDDLSTELRLLSDHRDNLVAERTRLINQLHAHMLQIDPCYEEKRGALTGIAAVRSCRDLEVPHAEGVLQTRLLIVRQLVGQILQLVETIETVETTLKQRIQASETPLVQLCGVGTIIAARLIGELGCSPRVHSAAALAALAGIAPVAVSSGGKHGHRLNRGGNRRLNNAFHMIALSQLRCEPLARAYYAKKRAEGKTGRAALRCLKRRLVDVVYRLWCKGAGEQVDALPALMTDPSECRSAA

SEQ ID NO: 430096 - protein, 408 aa, unidentified
MNHPKMRYTYVGIDSHKGTHTAVFLDCFFEKLGEITFENLPSKFGCFLKDALKYQVEGTTFLFGLEDISTYGRILTVFLKDNSHQVKHVNSLLVARERKNRNITQKTDSLDAECAARVLLSKFGELPNADPQDEYWILRTIVTRRDFIVRNNISLKNHLHSLLMTHYPKYRSYFENIDCKTSLAFYMRYPSPSKLKDTTLEELTEFLREYSYKTIGEAKAMEILDSLEDTTIQFQEIRDSTVRSTIRQIEFNLEELERLEITIEQILKGLDTTLLSMKGLDVVSAAQILSCIGNITRFSSPAKLARYSGIAPVTYASGQRDRQFANERGHRELNSLIYNLAIRLTMTAGSTKRVINPFFYEYYIRKISEGKTKRQALKCVERRIVNVIWTMLTRNEEYINPPTFALTK

SEQ ID NO: 430097 - protein, 456 aa, unidentified
MTSKKRTKIGKRISVMIHEHEPDAAGIDVGSTEMYAAVPAGRDEESVRRFSAFTADLIRLADWLKQCRIQSVAMESTGVYWIPLFQILEERGFRVCLVNARHVKNVPGRKTDVLDCQWLQYLHSVGLVRASHRPAQQICEIRAIWRHRENLIQMAAVHVLHMQKALDQMNLQLHHVITEITGNTGLAILDAILSGERDPEKLAELRDSRIKASRETVVQSLIGDYRSEHLFTLKQSLAAYRQYQQWIADCDRDVEDRMKTIQSRVDLTQKTLPKPKYRGKPRRNQARFDLRSHLYRVYGVDLTAIPGISSLTAQTFLMEVGTDLSRFPTASAFASWLGLCPDNRISGGKILSVHTRHVVNRLTIALRMAAQSLHGSRSFLGDYFRRIRARLGAPAAITAAAHKLARILYHLITTGQSYDESVFTEIEKHNQQRRINYIKKQAVALGLRIAPEACVP

SEQ ID NO: 430098 - protein, 412 aa, unidentified
MKDLLEISCGLDVHKEKIVACILTGPLGKPTRPEIREFSTLIPDMIALRNWIVSKNCHHVAMESTGIYWMPIYEILEDAFYGDITLLVVNARHMKNVPGKKTDMRDSEWISTLLRAGLLNGSFIPEKRIREFRDLNRYRKSVIRDITSQKNRIEKFLQSSGFRLSSFISDIFGASGRNIILHLIEHGQIDKTALDSCLKTKTRNRIDEILMSVNGTLSEHQKAFLRILMTHYDSLKKHLAEIETSLEEDMAPFALQVEQLNSIYGISTTASCAIIAEIGIDMKPFKTAEHICSWAGLCPGNNESAGKRKSTSVTKGNPYIKSMLCEIAWVIAGKRNTYLSAWYWRIKQKKGAKKAIVALARKLLVIIYTMLKQGTLFDESCFETRRKHCEQKQLSRYIRELEKHGYHVEAQS

SEQ ID NO: 430099 - protein, 348 aa, unidentified
MVTIGIDPHKQTHTGVAVDPLGVQVAQRMVAARREGFGQLLEWARKLDGERVWVIEDVRHVSGGLERFLIDRGETVVRLPPRLMADARQGVRERGKSDPIDALAIARAALREGVETLPTARLAGVELEIRLLALHRERLVDSRTRLINELRWQLHDLWPDWEIPKRVLIHPGWQTKIAGRLRRTGTTVQVQIARDMIARVRELTRTITQLYQQLAELIKRVAPQLLAEKGLGVLIAAKLIGEIAGIDRFTSDAQLARISGCAPIPVSSGRTDRHRLDPGGNRQLNHAIHMLAITKICHDPRTAVYLAKQRRKGKTNKEAIRSLKRHLVRRVYHLLRDPNSVPITICLT

SEQ ID NO: 430100 - protein, 392 aa, unidentified
MKKDSIAQGRVNKPRQRRASKGRMKEITGPAIRGIPEQTVGIDLGDETSRYAVLDREGAVKSERSVATKRKAMSEVFGKMSRSRIALEVGTHSAWVSRLLASLGHEVIVANARRVQLISHSSQKNDKMDAGLLARLARVDPALLYPIQHRGEKAQQHLAMIRARAAMVEGRTALVNTARGLTKTFGERLGKCDADQMGVGKLEGLPTAVQAALEPLLGVVEEMTEKIQGYDKQLAEIARKEYPETALLEQVSGVGVLIALTFVLTLDDPSRFEHSREVGPYLGLRPKQHDSGESQPQLGISKEGDVYLRKLLVQGAHCIVSRRGPDTDLKRWGLKLAGQAEQTAKKRQGNKNAKKRALVAVARKLAVLLHHLWVTGEVYEPLRNSQAEKAVA

SEQ ID NO: 430101 - protein, 391 aa, unidentified
MSMYFVGIDISKYKHDCCIISAADQKVVSKFTFKNDKAGFEELLTVLNSLSNPEDIKIGFESTAHYALNLELFLENAHHSFMEVNPVLIKEYKKSTTLRRTKTDSVDCESIARWLMTVEYKPHSKGFYHSYSLKSLTRLRDRLIRQRSFYLVKITNVLDHTFPEFKPFFNERLSKTALYLLENYGSAEKMARMNSASYDKLRCISRGKFSIQQFLRLKELAANTVGVNNSIFDIELISLLTLYKSLVKEIDTLESEIHKLIDEVHPHYLTIPGIGPISAAVIYAEYGDISNFSNPGQMLAFAGIEPGINDSGTESHGGRMVKHGSSQLRYVLLNACLPLIRFDLTFATYYAKKRAEGKKHRVAITHVAKKLIRVIYALERQDIDFNTQKLR

SEQ ID NO: 430102 - protein, 316 aa, unidentified
MSADPLNVGIDVSKAALDIAIRPTGQHWQIPHTNDAIHDLASQLVSLHPFLVVLEATGGLEIPLTGALATAGLPIVVVNPRQVRDFAKATGKLAKTDAIDAHVLAHFAEAVRPTPRPLPDAQTQAISAMLARRRQIVAMLTAEKNRLRTANGAVREDLLQHIAWLEERLSKLDTDLRETLRQSPIWREKDNLLQSVPGVGPVLSLTLLAQLPELGTLSRRQIAALVGVAPLNRDSGTLQGKRTIWGGRASVRAALYMGALVASRWNPVLRAFYQRLCAAGKPKKVALTACMRKLLTLLNAMLKHRTLWLTNHALNS

SEQ ID NO: 430103 - protein, 342 aa, unidentified
MAIVETRRVFVGLDYHQDKVQVCVVDDQGKLLLDKPVANAWGLIAAAANRWGSVQGVAIECCCGAANLAKELADQAGWNVSLAHPGFVARMKQNPDKTDFTDARILADLHRVGYLPKVWLAPHEIRELRRIVRYRQELVDQRRNVKLRIRALLRDERIRLPAECGRPWTRAWLAGLRGIDQLGPTSRWILGEQLERLTSLGSKIREVENRLEDLVADDAVVNKLRTFKGIGLITAVVMRAEIAQFDRFQTGKQLAKFCGVTPRNASSGNRQADAGLLKAGNKQLRMVVIEAAHRLMRLDDRWLALACRLKQAGKPTCVVIAAVANRWIRWLHHQMQPANLAA

SEQ ID NO: 430104 - protein, 360 aa, unidentified
MAKARTLVGLDVHATKIVAAVLDAETGEVQWFTLSGDVVQAAGLCAGLPRPVRATYEAGPTGYGLARELERRGVQCVVAAPSKIPRASGDRVKTDRHDAEHLVRLLLAGKLQAVRVPGPEEEALRDLVRAREAVRGDLMRARHRLSKLLLRHGVRFDDGPAWTQRHRAWLAEVQLGWPAAQATLLDTHGAIDALVHRRDQLEREITRLLPGSPWQVQVGRLRCLRGVDTLTAVGLCAEIGDFERFAKAEQLFHYLGLVPCENTTGQQRRLGSITKTGSGHARRLLVEAAWHYRPRPRIGKALAERQDGQPAEAVAVAWSAQRRLYRTWTRLEARAKRRTIIAVAAARELSGFCWAIARIE

SEQ ID NO: 430105 - protein, 464 aa, unidentified
MTKRTKARKKKPTATTATSLPTVQPLVAGIDVGSSQHWVCGPAPGDGGKPMIRSFGTTTEDLEALVDWLAAQGTKSAAMESTYVYWIPLYELLESRGIEPVLVNARQLHNVPGRKTDVSDCQWIQLLHSCGLLRGSFRPSEAISRLRALQRQMANLVAERSRCVQWMQKSLDQMNVQVHRAVTDLTGKTGMAIVRDIVAGERDPARLAMHRDGRCHKSTDEIAKYLTGHWREDHLFNLASALRIYDVLEDQIAAYDARLMQELQALQPPERQDQPVPPHPNAGKEKAIKARGDQPCRLALWRFAGVDLTRVDGISSSAAQVVLTEIGSSVASFPTEDHFVSWLRLCPRTPISGGKPLKKRRNGLGANRIAGVLRMAATSLQRSKTALGASFRRVARYKGGAVAVFATARKLAQLIYRMLRYGQDYVDIGEKAYEAQFEARRLSSLQEAARGLGYTLVQEPLAEG

SEQ ID NO: 430106 - protein, 423 aa, unidentified
MKFKAQDKQNQLIEKITPQHLVVGIDIAQLTHVARAVNFRGIVVGNPLSFSNDEEGFQILLRWIQSLQATHNLDSAIIGMEPTGHYWLSVSKWLSEKQFEVVLVNPHLVKKNKENRDNTPSKSDKKDALVIADMVKNGYYSFIHNTPEAFEELRVFLSNRDSVVTRLVSAKNQIHRWVDVVFPELRQVFKNLMCKGSLATLRLFSTPDELSKLTPQDVVRGWKSIMQRQPGDKKAQALIALASHSVGSKQATHAYKLHLMQLLAEYDLACEQLRVVEAEIIAVLDRIPFAKSMLAVKGINAISLAGILGEAGDLSGFVHGNALLRHAGLNLAEASSGKWTGQMKISKRGRSRLRRFIFMMTLSLTANNPEFKAMHAYNVQVKKMKKMRSLMKLCGKLARILVGMARSSEAYNPHKTMPLQLAA

SEQ ID NO: 430107 - protein, 496 aa, unidentified
MEKVSIIGLDLAKSIIQIHAASVDGSVLFRRKISSKKLLSFLSEVDPCVVAMEACAGSHHWGREIAKLGHRVKLIAPIYVKPFVKRQKNDAADAEAICEAAMRPTMRFVAVKSEEKQAAATVFKVRDLLVRQKTQIINALRGLMAEFGITVPQGPSHVGVLINHVEDDSSSLTEAARAPCLALVLTLRALIDKVRELDLEIGRRARHDDVAKRLMSIPGIGPVIATALEALAPPVETFTRGRDFSAWMGLTPRQHSSGGKPRLGKTSKMGQRDLRRLLIIGASAVVRWASRRGAVEGSWLTHTKRVSPTCLVHFDRNRYSVPASFANRPVSVRVYPDRIAVAAEGLIICEHRRIISRSHDGPGQTIYDWRHYLAVVQRKPGALRNGAPFIELPEAFRILQQHLLKKPGGDREMVDILALVLQHDEQAVLSAVDMALKSGVPTKTHVLNLLHRLVDGKSSTPPTIAAPQALTLANEPKANVERYDSLRKTTEVRHAS

SEQ ID NO: 430108 - protein, 462 aa, unidentified
MPKRKQKPTIDVKPVDALSQINVNAAGLDIGAEEIYACVPADRDEQLVKAFRTYTRDLHALADWLSACRIETVAMESTGVYWIPIFEILESRGFEVYLVNARHLKNVPGKKTDVLDCQWIQQLHTYGLLQASFRPPEDICALRALVRHRGTLIRYRAAHIQHMQKALQQMNVQLTQAVSDITGVTGLSIIRAIAAGEHNPRVLAQMRDSRCAKSEAEIAAALQGNYRFEHLFVLKQALAQYDFYAQQIRECDAELESLYATLPPADLDGEDVLPPPKSTRQKPRKNQVHFDLATQLYRTVGVDLTAIDGVDALTAQKVIAEIGLDMSRWPTAKHFASWLGLAPHHKKTGGKVKSSRTKKTQNRANTALRVAAQSLSRSQSALGAFYRRIKARHGAAKANVATAHKLARIIYHMLKYRQAYRDPGASYYEQRYRERAIRNLKRKAVSFGFELVPATPIPVDVS

SEQ ID NO: 430109 - protein, 343 aa, unidentified
MEHFAGLDVSVNETSVCIVDETGKIVREVKVASEPDALLTVLKNRAYHFKRIGLEAGPLSQWLYSALAEAELPVVCVETRHMQAVLKAQINKTDRNDARGIAQMMRVGLYRPVHVKTLRSQKLRMLLTHRKLMLSKAIAIENDLRGTLRNFGLKVGMVGTVKFEARIKALIENLPDLAVLVEPLLVVRRVLREQIGILHRRLLVIVRDDAVCRRLMTVPGVGPVVALTYRATVDVPARFRNSKAVGAVFGLTPSKYQSGEINRTGAISKCGDEMMRVMLYEAAQVMLTRTNKWSWLKAWAMKIARHRGMRKAIVALARRLAVILHRIWVDGTDFRWTREVAAA

SEQ ID NO: 430110 - protein, 347 aa, unidentified
MNKNWFIGIDVSKKTLDASIFVADVVINKFPHTQVRNDKEGFKELLRWLKEQGVRPQDALIGLEFTGYYSDALEQFLTSKKLCYAMLPTTVVKHYQRGARDKNDKMDSAKIADYLFRFHDTECIKLRVLPSKAMQDLKALKSERKFYVRHRTDCENRQKVAKSRDEQKNLQKIIDLYDKEIERIDQKMADVVTSDEEIHLTYMRLMSIPGIGSVNAINTIANTQNFTAFETARQYAKYVGVAPSEHLSGTSVRWRGRPSPHADLQAKADLSMAAMRAVEFSFEMNVYYERKLGNRPDDKDVKRKALNAVKFKLIRQMFSVANQHRNFKPLEQTQTQAEIHNTDQRVN

SEQ ID NO: 430111 - protein, 423 aa, unidentified
MDILYERVAGLDVHKDTVVACVRIVAEGKTKRECRTFSSTTEQLIELRAWLEECRCTHVAMEATGVYWMPVFRILGEGPFELMVANAAHIKNVPGRKTDVNDATWIADLLACGLIKASFVPGEDIQELRSLTRTRKQLVREQTRHVQRIEKTLAEANIKLNSVISDIMGASGRRMIEAMIKGVRQPRQLAELAGKQIKATPKELYDALHGRLTDHHCFLLDLHLKQWDGLDGTIREIDREIDQRIGRLHTKGASGEVPFRTLIELLSTVPGISTLSASAIVSEIGCDMNRFPTAGHLVSWSGLCPGQNESAGKRKPSRLRKGAPWLKTMLVQCAWAAKRKKDSYYRAQFFRLQSKRGPQKAICAVAASILTAVYHILKNGTEHHDLGASYFDRRPLELKANRLVARLKKLGFNVQLQPAAEAA

SEQ ID NO: 430112 - protein, 267 aa, unidentified
MATTERFIGIDVAKDEVVVAVWPTGETWASGTRTRDLRGLAKKLAKLTPALVVLEPTGGYELPVLAALDDAALPATLVQPGRVRHFAQATGVLAKTDRLDARTLARYAAQTAPEHWPRPDPARRALLLVLQRRRQLLELLAAEEQRLEQQALFPASPVKPSLERLIAHLREQLADTDGEVRTLVQQHPEWQPILALLQGIPGVGFVVAVSLLAYLPELGQLSRQRIAALIGLAPFHHASGHFDGGRHITGGRAPLRQVLYMAAIGPI

SEQ ID NO: 430113 - protein, 337 aa, unidentified
MYFIGLDIACNDFAASVYQSPEQPIITKEAILNNQDGFNMLTSWLKEHNINNANSVICMEATGVYSKAITNYLTADGFNVCVEAPLKVKRAFDPVGHKTDAVDSKQIAEYAYRYRDELRSWKPKDEILEKVRQLLSARERFTKQSTAIQNASKAYEKEPIKVALIIKSHKQALAQLKKHIADIDKELEKHIHQNPTIFQNTNTLKGIPGYGMLLSANLMVITDNFENIKDHKRLSAFIGIVPYQYQSGTSIHKKSRIRHFGPQTTRKLLRLAAQSVATHNKDFRQYYLRKQAEGKAKALVLNNIANKLVKIACAMIRENKSYIKEHRSIHPMCLKTA

SEQ ID NO: 430114 - protein, 385 aa, unidentified
MQQNDLSRSYIPFKQDNTLATVLEMGSKSWLLAGLVPGITRQPLKKLSTAPEQLLAQLHRWRDEAVKAGHTIERIVVALEAGRDGFWLARWLQARGIEAYVIHASSIPVPREHRRAKSDRLDTGMLMRALLGWLRGEPRHCHMVAIPTLAEEDAKRASRERESLVDEKTRLTNRLQSILVQLGLPKVNIKLRKTAKQLAGLRTPEGEPIPPHTLAELHRGLDRLAVIKAQIDAIEKARLQQLKAAPEAGNHPMLLMLAKVLGVGIETADRLVHEVLSRNLRDHRAVARYAGLTGSPDESGTKRREQGLAKAGNARVRRAMLQLAWRWLLHQKNSDLAKWYRARTADGRKDTRKIMIVALARKLLIALWRYVHTGEVPGGVVLKQA

SEQ ID NO: 430115 - protein, 355 aa, unidentified
MKRTRKYVGLDVHQASTVVSVRGESGRVIWRTVLPTEAEALLEFVGGMQGSVQVAFEEGTQAQWLYDLLVGVVERVVVCDRRGERRRGNKGDVKDAERLSEDLWRGRVRPVYHGGGERGLRLKELSRAYRNLVEGSRRAMQRLKALYRARGIRTAGRRLYHPARRAEWLGKLEDAGARLRAELLFRELDVLRELREEAKRALVAEARRDPAWEVLKTIPYLGPVRLALLLAVMQTPWRFRTKRNLWAYVGLAVVTQTSSEYDWQDGQAVRRRRPAMTRGLNRNGNRVLKEVFKGAAAAAVGRPGPFRDFYEGLLERGKRPAMARVTLARKIAAVMLSVWKTGEAFDPAKLSMQAQ

SEQ ID NO: 430116 - protein, 312 aa, unidentified
MVEHCYGGIDVSKDRLDVQVLPQGRCFSVANTSAGWSQLVDRLRGLSIAALGIEPSGGYERGVIRALLAAGLSVRRINPNKLRQFARARGVLAKNDRLDARLIAEYVAIMPTRVVHRDPAAEQLAAVVTMRRQLSDEHVAVENQTAHIEDAMLRRLNKRRLARLEADILLLDKRMAEIVASNANLARRYDLLTSMRGVGPTLAFTLIALLPELGQMSRKQIAALVGLAPYDFDSGKLKGHRCIYGGRIPVRNVLYMAALSAARYNPALKTFHNRLAAANKKPKVVIVAVMRKMITILNAMLRDNVAWQPKSA

SEQ ID NO: 430117 - protein, 343 aa, unidentified
MMRFVGLDVSQKTTAVCVVDGNGARVWRGQCLSTPDQIDTVIRQHAGAHARLGIETGPMTTWLVHELRGRDLDVVCLDARHARAALKMQLNKTDQNDAEGLAQIMRTGWFRSVHVKSFETHRARALLGARAQLVGMTTRLSNHIRGVLKTFGLLPGAMRGLPFDRRVEALLEGRPDVAPVVQPMLCAWRQLRVQIAAFDKAVRDLVKANPTCKLLMTVPGIGALTGLAYVSTVEDPDRFKQSRAVGAHCGLTPRQYQSGQIDRSGSISRCGDILTRTLLYEAAGVILTRLKRACSLKDWAEAIAKRAGNGKARVALARKLAVILHSVWRSGEPFRWTDGAVAA

SEQ ID NO: 430118 - protein, 350 aa, unidentified
MQLHTIGIDLGKTVFHLVGLNQRGEVVVRKKFSRKQLLHFTANLQVKLIGMEACGGAHFLGRALRGQGHEVRLMPAQYVKPYVKTNKSDYIDAEAIAEAVERPKMRFVPIKSDDQLDLQSLHRVRERWVMRRTAVINQIRGLLLERGITLRQGRRHIDAALPGILEDASTQLSGAVRLLLAQLKLELDHLQMRIDEADAMINKAAGENEACRRLVAIPGIGPVTATAIIAAIGNGAAFKKGRGFSAWLGIVPGEYTTGGKQKLLGISKRGNSYLRRLFVQGARAVLQQSTKQSYGLRAWLAQLTARTHSNVAAVALANKLARMAWAVLAKNEHYRPPMLVGATAAGLAGR

SEQ ID NO: 430119 - protein, 465 aa, unidentified
MRHNSERQRVSKKDRPSISLLERIQPDAAGIDCGQNSHFVAVPPDRDPQPVREFRTFTAELERLADWLVQCRIKTVAMESTGVFWIPLYEILEQRGFEVMLVNARDVHNVRGRKSDVMDCEWLRELHSVGLLRTSFRPAAAIVPLRSLMRQRATLVEEASTRILRMQKALTQMNVMLHVVVTDITGQTGLRIVRSILAGERDPQRLAAHRDSRCHASHPEIVAALTGNYRAEHLFALRQNFAAYEFLLRQIAECDGEIEALLTTLAAQQPPPSAPLPASRKRGSKHQPQFEIRSPLHRLTGGADLSQIDSIGPHAALQLIAEIGTDMRRWPSEKHFASWLALAPNNKISGGRLLSSRTPPSANRAAAILRRCAMSLTRTSTALGAFYRRLAARAGKAKAITATARKLALLIYRVMSGQLVYADPGATAYQQFHRTRELKSLRRRARQFGFQLVDQTTGEILNAVS

SEQ ID NO: 430120 - protein, 432 aa, unidentified
MSALSTITKQKEVFMLKIVYPICCGIDVHKKFVVATIGITNKSGVTDYQTRQFSTFTENLNQLLNWLKSQNCINVCMESTGKYWHPVFNILEEYCEVVIANPKYVKGIRGKKTDKKDSIWLCDLHKHGLVQGSFIPPLPIRQIRDLMRYRFKLINFKSSEKNRIQNSLTVSNIMISNVVSDTFGVSSMKIINHILENPDDKDFDVSQMLHTRMREKAETITKSIDGNLTKPQADKMRVCLGHFENIEKHISELETVILGLSQPYMQQIEIILSLPSIKDIFTAIAVIGEIGVDMTVFHSSKHICSWAGLTPQNNESAGKKKSVRVSRAGVYIKPLLVQCANAAIKSKKCPYFKAHYDQIKRRRGHKKAIIAIAHMLLNSIYNMLAKNEKFNYELYKIDSKPKQTYAPQLTEEMAVRYLQTLGYQIPDMPKIT

SEQ ID NO: 430121 - protein, 285 aa, unidentified
MRNTPSAVRRMVRGIGAQEPSAMFCCESTGGYERTLVDVCREEARPVCVMNALQVRRYAEHRGTLEKTDRIDARMISMAADDKNPVPMAHPDGRQRRLKELWSLRTSLVGARDAERNRLEHLCEKEAVAAVRKIVAAYDKQISELERLCREAVSQDAPSRALAERLQAVKGVGPMTVLALAAVMPELLYLDDKRLAKLAGVAPLCDQSGKMDGPRHIMKGRPLVRKALYWAAVSASQHNTILSAFYSRLVKDGKLKKVALVAVMRKLLCLLRRIAQDPNFVPAPA

SEQ ID NO: 430122 - protein, 402 aa, unidentified
MRFSVGIDWASAAHAVCILDQTGRVHWQGAVPHTADGLADLLARLRRFRRRGSLRVALERPSGLLVDTLLDAGLEVVPIHPNALKASRPRYSAAGAKSDPGDAFILADLLRTDGHRFRPLHPPSDNTRALRALVRGRDDLVAQRIALANQLRALLERFWPGAAAIFADVDSPIALAFLARYPTPDSAARLGEQRLAQFLGQHAYCGRRPVAELLARLRRAPTSQVGAAEADASGDVVRALIAVLSPLVAHLQQLSAAIAAALAQHPDGPLVQSLPRSGAVNAAQILAELGDDRARFPTDEQFAAEAGLAPVTHASGQHHAVVFRWACNKRLRRALTTFADNSRHASRWAALVYQRARTRGCRHQHAIRILARAWARILWRCWQDRAPYDVARHRAAQALAAA

SEQ ID NO: 430123 - protein, 347 aa, unidentified
MTEAYDGRQVVGMDLHRRRSVLVRMTEDGRKLETVRIENSPQVLRAVLARAGKNPRVVVEATYGWYWAVDVLEEAGAEVHLAHPLGVKAFTYRRVKDDERDAADLADLLRMGRLPEAWIAPPEIRELRELTRYRHKLVGLRTSCRDQVHAVLAKLGVPVTHSDIFGVHGQAWLDGLRLPQPYAGKVASLRQLNGELSGEIALLEQVIGDLLAGHEGYRAIRALPGIGPVLGAVIVAEIGDIRRFPGPGQLCSWAGLTPRHRESDTKVSRGHVTKQGSRMLRWAVTEAVQRQPAGTRPRQVKDGIIARRGTQAKNTAKVAAARELLTLVFYGMRDGHIRRASRPGQAA

SEQ ID NO: 430124 - protein, 315 aa, unidentified
MQTVLDLGADVDSRTFVVAAAAMSTAPQRIANARRDILAWLRSVPPGSRLGLEATGTYHELLADLAHRAGLQVFVLNARDVRRYAQGLGRRGKTDRVDAQVIARYVAHEHSELHAYVPPSPQQRALARLIKRRAKLVTIKGMLNQSLRGVPGVAAELRQATARLERLIGHVEGLMQRALEQLPSASQAAQHCRTIPGVGPLGSTCLAYTLTRVPYAHSDALIAHTGLDPRPADSGQKHGRRRLCKRGPGELRRVLFNCGMAAAKTALWRPYYQAQRAKGLSSTAAIVILTRKLVRVAFALYKYQQPFDPTRVATA

SEQ ID NO: 430125 - protein, 389 aa, unidentified
MSQPFEASRSLTALEQHNTIIAVIEMSQSKWLVAAVVPGIKRQPLKMLDADQESLLKLLHRWRKEAEQAGHPIKRVVAAYEAGRDGFWLARWLRTRGVEAYVIHPNSIAVSREHRRAKTDRLDTELLLRALLGWLRGEKRHCSMVAIPTIEEEDAKRPNRERDSLVTEQTRIGNQIKAILTRFGIRRFRLKLRKAEQQLKELRTAEGSPLPENSRAELFRHLARLHVVREQIRAIEKARLQKLEADRDRKKSPHAMVRLIARVVGIGVETADMLVNEVFSRQFRDRKAVARYAGLTGSPDESGKRRREKGLARAGSARVRTGMIRLAWRFLRFQEGNALAQWFQTRTADGRGSTRKTMIVALARKLLIALWRLVTTGEMLDGIVLRPAS

SEQ ID NO: 430126 - protein, 399 aa, unidentified
MRVVFGIDVSKASSEVAILVNGEKVHGYTISNDAIGFARLLGDLRTVHKPEIIFEATGVYSRRLQTFLDDNGYAYTRLNPLEAKKQLDSLRVRKTDQIDAEKLAQSQFVLNRKPTYVQEEVYQNLRDLSRFYQNLTEDIVRAKNRLHKVLQVTFPELENILSTPSGEQYWNLVIAFPCKDCVLELSNDELSKSIRLSTSKRISDKRVAYLAEKLIALANQSYCAVKKTSPILEEVRYTKELLRLSEQRQAVLDEMVELAQPLPEYDILLSIPGIAETTATSIIGELGDIRRFQSANQINAFIGIDLRHYESGNFLAKEHITKRGNPYARKILFKCIHNIASANHTNPCHIADFYKKRKRQSQTTSTKLHTIASIHRLIRTMYYLIMHNKFYDYASTQNR

SEQ ID NO: 430127 - protein, 415 aa, unidentified
MEDLGLRALHRRVAGIDVHRMLHVVTVLIEQADGSMQRQTREFGGFRRDCRALAAWLAELGVELVVMESTGIYWKSVHAHLENAGIAAWVVNAHMIKHVPGRKTDMADSEWLAVLARFGLVRASFIPPKDLRELRLVSRYRRKLSSMCASEINRLHKILDDGGIKLGGVVSDINGVSARAMVSALIEGKPLEQLLGLARGRLQQKREDLAASLEGDLSARHLFVLGHIHDHVGLLQRELAEIDAYLLAAMQPYAWAHRLLQTIPGIDEIAAAMILIEIGDDMGRFGCAARLACWAALSPGNNESAGKRKSGRTRHGNSIIRFILCECANAARMTKSTLAAKYRSLTVRKSHKRAIVAVAHKMIRLIFVMLSRRQPYLDQSIDYAAISAKKNAPRWIKQLKIIGRWPTEKAAAAVH

SEQ ID NO: 430128 - protein, 322 aa, unidentified
MSVSNQRCVGIDVSKSTLNIAISSIAQPFTVPNEDGGFNQILKELKQNETQLILMEATGGLESGVAGYLQSEGFDVVVINPRQARDFARTMGYLAKTDQIDARVLLQMAKVINQHPEREKYIRPLPDVHRQLLAAMVVRRRQLTIMLTAERNRLHPSHPQNHECIRFIISVLKSEMARIETEMSAYISKNFSELSALLSAVKGVGSATVAVLLAEVPELGTLSRREISALIGVAPVNRDSGTMRGRRTVFGGRASVRTALYMSALVGTRHNPVIKEFYTRLVAAGKPKKVALTACIRKLLTILNAMLKNNEAWDPLYHQHAS

SEQ ID NO: 430129 - protein, 433 aa, unidentified
MNTHPPYDLILGLDRADKKADLCLIQTATGHRHSFTLDTSPEALCQWLAQLHQQYPHARLGICLEQPAGHLIPFLEAYPWITLHPINPVTLQKYREAFVTSRAKDDTKDAQYLAELLLTHADKLPVWAPQDSPTRVVQQLVAHRRAVVDQRTALCNCLIALLKQYFPQALTLCGQDLWRPLATAFLLKWPSLGAVQKAKPATLKQFYHLHGSRSAKLLEERLSLVARAVPVTDETAVVGSFVLRVQLLARQLQQVVRTIAEFDRQIAAAYATHPDHDIFASLPGAGPVLGPRLLAALGSQRDRFDSAASLQCYSGVAPVTKRSGGSCRIHRRYCCPKFHRQSFHEYAAESIFSSRWAGAFYLQQRQKGSAHQTAVRALAYKWQRIIFRCWQDRQPYQEARYEAALREAGSPLVALFDRVQLGKNPWLNPAKKT

SEQ ID NO: 430130 - protein, 411 aa, unidentified
MRLFAGDDWAEGHHDVEVMDEAGKVLVKRRLPEGVAGIAQLHELIGRHLGQDADEAEVIVGIETDHGPWVTALIAAGYTVFPVNPLQASRYRERHGVSGAKSDGGDAHMLADMVRTDSHQLRPAAGDSAEAEGLKVLARTHKTLIWERTRAVQRLRHQLREYFPAALEAFEDLAAPDALELLGKAPDPARAARLTRAQVSAALKRARRRNIPDKATAILAALRGEQLGQPPALTAAYAATARALLAVIATLNEQVKGLQGQVEENFGRHPDAEIYRSQPGMGAILGARVLGEFGDAPHRYADGKARRNYAATSPITRASGKKKVVAARFIHNDRLVDALNAQAFASLNASPGARAFYDELRVRGIEHNDALRRLANRLVGILHGCLKTRTLYDEATAWGHRQNHPQSSVAA

SEQ ID NO: 430131 - protein, 355 aa, unidentified
MKQEKYIGMDVHQATISVAVMDSSGKLVMECILETKAATILEFVRGLRGSLSVTFEEGTSAAWLHDLLKPHVTELVVCDPRKNALLKDGSKSDRIDARKLAELLRGNQLHPVYHGEHGLRTLKELGRSYLTLTQDVSRVMTRIKALYRSWAIPCSGATVYAPRYRAEWLAKIPQPGVRLRAERLYQQLDLLQPVRQEARRDLLSESRKHPAVKLLRQIPAIGPIRAAMLVALLQTPHRFRTKRQLWAYSGFAIETHDSGEYRYVRGKLQRNRERVTVRGLNDNHNHDLKNLFKGAALSASTRPGPLYDFYVALLEKGMRPTMARLTLARKIAAITLTIWKKGVSFDAKQLHRQAA

SEQ ID NO: 430132 - protein, 365 aa, unidentified
MPSVTSPAGAIHLGMDTSKNTIVVGVLLPGEQVPVADRIFNDEAAVRRLVSRFPDRGLLRACYEAGPGGYDLHRLLTSMGVACDVVAPSLIPKGGSDRVKTDKRDSARLARLHRAGELTPIRVPTPAEEAVRDLARVRAAVLSDRKRAQLRLTAMLMRHGRVWRNTYWTAAHRAWIAAQAFDEPALATALAHYRATLGTRETELACIESELAPWARRDPLAPAVARLGCYRGIAELTGLTLAAEVVDWRRFPSARAFMGYTGLVPAEYSSGARTWRGHITKAGSGPVRTALIEAAWAYRYQPAIGVTLRRRQEGAGPDTIARSWKAQRRLHGKYRRMVTSGKAAPEAATAIARELAGFVWAEMTS

SEQ ID NO: 430133 - protein, 386 aa, unidentified
MKKKVADSRTRGKGLDLLEGEEVFVGVDVHKKSYSVSLWSEGRGVLSRWVQPARVAVLSARLAPIQSHVVRVVYEAGPTGYGLYHGLCSQGFSVDVVAPSKTPSAPASSGKSDRCDADTLAFLASKGMLRTVAVPSAEEEADRQVSRRQKQVARDVKRAKHRIKSLLLQHGIAEPAGLEHWSRAAVEALRQLALCDGLRFTLDGLLSDLDHAQEQLGQARKKLQDLAESERHATPVALLRKVPGVGLLTAMTVRTEVVHPERFRTAEQVASFCGLAPWVSRTGSTTRKGPIVKAGNARVRTVLVEASWQWVRRDPGARRVYRHLVANTASRQKAIVAMARRLAILLWRILVTGEVYCPEAPPQETAAVADGSATPAPTLEALLTCS

SEQ ID NO: 430134 - protein, 463 aa, unidentified
MKSKKQAKQKNRPRNKQVDWKALDIVHPDAAGIDIGGSEHWVAISPDRDEHPIRCFDCFTADLQELADWLIAKGVRSVALQSTGVYWIPVFEVLQQRGLEVYLVNARHTKNLPGRKSDIEECQWLLKLHTFGLLNNSFQPTDEIRITRTLWRQRGGLAEQARSTIQRIQKVLTEMNVQLSNVLSDVSGASGMAIIHGILKGERDARVLAALADAQVKASKEVIAKSLEGNWRQELLFVLAQEVELYGVYQDKIAECDRQLQTQLRTMAPKVDLESNPLGPRPKGKRAQGNAPKFDLRTELYRLTGVDWTQVNGIDVTVAQSVIAETGVDLSPFPSEGNFTSWMGLCPANDSSSGRVIRKSTPHVASRAATAFRQAASSLIRSQSYLGAQYRRLRTRLGAPKAITAMARKLACLFYRLLRYGQQYVDKGMQFYEEKYRDQQIKSVTRRAQQLGLRVIQPKASLA

SEQ ID NO: 430135 - protein, 323 aa, unidentified
MSLPKLGIDVSKKTFKVALLRIDKIRQGTFDNNATGFGLLSSWLVKHGVTKVHAVMESTGVYGDALAEFLFDMDHQVSIVNPAQIHAFAQSELSRTKTDRVDAAVIARFARSHEPRPWQPPSAELRELQVLVRHREHLIKHRTQLSNRLTEGRLISSVAASLEKLIAAVDEEIKSVEGQIREHIDKHPTLKSDVDLLTSISGIANQTAVNLLAEISHLHDYKTSRQVIAYAGLSPRIKLSGTSVRGRPRLSKIGNPRIRKALYWPAITALKHNPTIRALGERLEQRGKHSLVVIAAAMRKLLALAFGVLKSGKPFDENYAKTC

SEQ ID NO: 430136 - protein, 341 aa, unidentified
MNVKTIGIDLAKNVFQIHGVDEHGKRLFNKQLRRAQMASFFANIPPCLIGMEACASAHFWANKLISMGHNVKLMAPQFVKPYVKTNKHDAADAEAICEAVTRPNMRFVPVKTAEQQAVLALHRSRQSFIKQRTAQANQIRGLLAEFGIVVPRGIQQLQRRLPELVEDADNPLPVLFRTQLSLLQHHMAYLFDVIATLDKQIEQCYRQNALCQRIGKIPGIGPVTASALIATIGKANNFENGRQLAAWLGLVPRQHSRGGKQVLLGISKRGDTYLRTLLIHGARAVLQSAKHKQDAVSSWANQLMARRNNNIASVALANKNARTVWALLAKEREYCAPIISA

SEQ ID NO: 430137 - protein, 436 aa, unidentified
MSKLFISVGIDIGADFSFMSIMLPDKTFIGKPVKITHNSIESLENAVQIIKKAEELHPMKPRIIMESTGIYHYPLYCYFSDKGFTVAIINPLISKSSTNINIRKVHNDSFDSKKLAEIGLKPDLKTSVLPNASILNLRNLVRYHYDLIDFRTIYVNKLSNVLRTVFPQYIEIFSKITSKTFLALLEKYTSPDKFISADKDKIITLILKTSRAGKTYAEKKYKEIIKAAEVAKELCSSLSLSSNSKLIIDYISFIKMYDEKIDENLAYISDLIKEDTKDTENREDTFVKQIKLLTSIPGIGFLSAVTLVCEIGDISNFKNPKKLFAYFGLDPSVHQSGNFTSRTGKMSKRGSRIARRTLYMIAVVNIATNRKKKPNNQVLYDYYQYKCLSKPKKVALGAVMHKLCNIIFAVLREKRTFVLTTAEEHRKKYLLKKKTA

SEQ ID NO: 430138 - protein, 446 aa, unidentified
MDVLSTHCAGLDVHKKQLTACRWVPDPTGQCVEGLTEIETFGTMTIELLGLVDWLTEAGITHVAMESTGEYWHPVYNLLEGHFTVLLVNAAHVKNVPGRKTDKADARWLAKLLRHGLLQASFIPPRGQRDVRDLTRYRTKLVQERAREVNRVQGVLERANIKLASVVSDVMGVSSRAILAALVDGHADPATMAELARGRLRSKLPLLEQALSGLVRDHHQQLLAMQLAHIDFLDEQIATLNTTIAERLSALTPPETVAVPVAADEPIAGSTPPVAATAPLTFDQAITLLDTIPGVDRRGAEMIVAEIGTDMSRFGTAARLAAWAGVAPGNDESAGKRRSGKTRKGNRALRTGLVQLAHSATHTKGTYLATLFRRLAARRGKQRAIIAVAHSILVSVFYILVRHEPYRELGAAHFDRLRHSQSVEHLTRRLEQLGYEVHLEPRPAAA

SEQ ID NO: 430139 - protein, 398 aa, unidentified
MDLPVYYELETNNGNRDYRIQIGGHYMNYNTVYVGMDVHKESFTLCSCKYEDEKASHYQRTPASYKNVLRYLAFLRTIYGEYTRFVCGYEAGCLGYSLYHQLENFNVECVILAPTTMLEQRSKRRIKTDKRDAEIIARSLAQHNYSPVHIPTETDNQTKEFIRMRDDHKAELKKIKQQILSFCLRQGYQYDGSGNWTAKHVKWLRSLKPAGLYKEILDEYLLTYTILTDKLNRLDQRIEELASKEEYKESVSKLTCFLGIKTHTALSVIVEVGDFQRFVSARKFAGYLGLVPGQHSSGDDRNGLGITKAGNTHVRRLLVESAQSYTRGKIGYKSRVLRSRQAGNSPQVINYADRANERLRRRYYKMVLKDGKKYNIAKTAVARELACFIWGMMTDNIY

SEQ ID NO: 430140 - protein, 389 aa, unidentified
MLLDHPSDGPTAIRTQFGAIFVSLELSRSNWLITSLSPGRGEKMSRHSIVAGDVAGLMTLFADLRRKAAARTGQSYPIVTIQEAGLDGFWLHRVLQQEGIESHVVDPASIATPRRRRRAKTDRLDGETLLRACLAYKRGEPRVCAMVVAPSPEEEDRRRLCRERRTLIEERITHVNRIKGLLFAQGISDYGPLRRDRRARLDALRTGDGRELPPHLRAQIGRELDRIELLLEQIKAVEAAQDTLLAAAKKPASEKAAPEPVAMLLALRGVGANFAAVLWSEAFYRSFSNRRQVAAYAGLAATPWQSGGIRHEQGVSKAGNPRLRTTMIQFAWLWVRHQPQSTLTRWFKERSQQGRKRAIVALARKLLVALWKYVTQGVVIEGAVMKPAA

SEQ ID NO: 430141 - protein, 414 aa, unidentified
MLSKYVEVEENRMNGPIVSIDVSKGESHYQGFKDLNVKYSNVRKIKHDKEGLNELLALIREMEKKLDEKVCIVYEATGVYHRVLKRFLDDNDIKQFIINPLLSAKTRKNDSLRSPKTDKLDPKSIAKTYYNQNLHSSIKSSDVYHELRELSRYYEDILVHIRKDKVSFRAQLDIVFPGYDKLYEDLYGAISLAVIEKYPHPELLDKKNVKTVSKVIQAKTCHRESISDAMAAKAIEFSKTVYSGCDKDDIEVEILKRFIVNLRIHLEESERVINEIIRLAQDLPNFIILKSIPGIGDNLAARLIAEIGDMSKFKKYTQLVAYVGIDPRINESGQDDGKHLHITKKGNKRLRCLLYLAVTCSIRLKRDDNKIKDYYIKKMQQSNPMSSKAAKIACVNKLVRIIFNMCKNGTVYQY

SEQ ID NO: 430142 - protein, 411 aa, unidentified
MDVLVERCCGLDIHKTSVVACLLVSPPRGEPVRAIRTFGTMTEDLLALADWLAGAGCTHVAMESTGVYWKPIWNLLEGDFDLLLANPRHIKAVPGRKTDVADAEWIADLLRHGLLQGSFVPDRPQRELRELTRYRASLVRERTAEANRLQKTLEGANIKLASVATDILGKSGREILQALVAGTEDAAVLAQLAHGRLREKLPELERALAGRVAPHQRFMLAQQLAHIDFLDAAIARVSTEVAARLEPVAEAVERLDTIPGIGRYVAEALIAEIGTDMRRFPTAGHLASWAGMCPGNHESAGKRRSGRTRQGSPWLRALLVQAAHAGARTKGTYLQAQYRRLASRRGKSRAAVAVGHTILVIAYRLLTDGTTYRDLGPTYFDERDRRHVEHRLVRRLEGLGYAVKLTPLAAD

SEQ ID NO: 430143 - protein, 351 aa, unidentified
MNSIDYIGFDIHKKTISFCAKAQDGRILDEGTIPARRMDLSAWAKRRGRPWWGAMEATLFTGWVYDHLKPLAQELKVAHPAMLKAIAASKKKNDKVDARKIADLLRCDLLPECYMAPGATRELRRVLRYRNLVVRQATRMKNRIAGLLMETGTLYNKERLHGKAYFSELLGSLQEIPASVIELLKLSRAQLEFFATIQKRLVKGLRADAGLRERVERLQSIRGVGEILALTWALEIGEVNRFPSIADAVSYCGLTSAQHNSAGQEHRGPISKQRNKHLQTILIEAGKLAPRYNPQLAAVQEGVLKRGNCNQATLAVARKLVAYLMAVDKSGKPFQVRVSAGEASKHGQPVG

SEQ ID NO: 430144 - protein, 319 aa, unidentified
MTLTSVGVDIAKLKFDVAVLLPNQKYKTKKFANTHAGCREFIHWLARFGDCHVCMEATGSYSTELATALSDGGYRVSLENPARIHAFSHTELARNKTDKSDAALIARYCALYQPAQWHPAPLSQRQLTALVRHLKNLEEMRQMEENRLEAADEVITGSLKEHIATLDELIKETKKKIRQHIDDDPDLRKDKALLESIPGVGDVLSTNLLAFAGNLRRFSSSKALVAYAGLNPRRCESGMWKGKSRLSKVGSRELRSVLYMPAVVAGRCNEVVKDLMRRLESRGKAGKERVCAGMRKLLQLAYGVVKSGREFDAEIPLAG

SEQ ID NO: 430145 - protein, 338 aa, unidentified
MHITTLGIDVAKNVFQLHGVDARGRAVVSRRVTRSQLVHAVGSLPPCVIGMEACGSAQHWGRAFEQLGHTVKLMHPKYVKPYVKTNKNDGRDAEAICEAVSRPTMRFVSIKTVEQADLQAVHRTRSLFVKHRTAVINQIRGLLAEYGLVIGQSPEKVRPALVRFLDDAESGLTACARETFSELYEQLQELDSRIERVTHRVERVYRAHPVCQKLAAVPGIGPLTATALVATVGRPQAFHNGRHLAAWLGLVPRQYSSGGKERLGGISKRGSRYVRTLLIHGARAVVQRAERRTDTQGRWLCALKHRKGTNVAAVALANKNARVIWALLAHDEEYRPPA

SEQ ID NO: 430146 - protein, 338 aa, unidentified
MKTFFGVDYHKRFSYGTIMSETGEIIKHGRFGNQPGSVARFLGEHGGDDCSAVLEATRNWCVMHDWLEELTGQVTLAHPLKVKAIAEAKIKTDKIDATILAHLLRCDLIPAAHVCSPAARVLKNLLRHRMFLVRLQTMTKNRIHVLLDRYPAIRAERPATELFTKMGVTWMKQVELPTYDRHILDSEVMLLEHLQAQIKQADGWLMQIGKKDPRVQRLMSIPGIGKSFALLLVCEIDDIKRFASPKKLHAYAGLVPSTYASGGRTFHGRITKAGNKYLRWAMVEAVWPAIQKDLELNQYYHRLAQRKGPNPAKVATARRLLTIVYRVLAENREYRCAA

SEQ ID NO: 430147 - protein, 347 aa, unidentified
MNSVGIDLHRKRSHVAVLDEAGNQVLSRRIVNDPGTFLSLLAEIGGESNIALEATYGWEWLADLLEEAGYELHLAHPLRTKAIASARVKTDAVDARTLAHLLRADLLPEAYIAPRELRDLRDLLRHRVALTRMRSSLKNRVAAILAKNGIAAPYSDMFGPSGLRFLQELELREPARRRLDSMLTLIADFDREIDQTSREIDARAKADPYVEVLCQIRGVGRYIAMLVIAEVGDISRFATARRLCAWAGLTPTVRSSDGRARLGHISRQGSPALRWALVEAAQQAGRGGGPLREAYERIRTRRGKQVAKVAVARRILTLCFYGLRDGEIRCLAPRAKARTQSSVAVTA

SEQ ID NO: 430148 - protein, 410 aa, unidentified
MEVIIVCCAGLDVHKDGVEACVRRLENGGGISQQTRHWGTMTRDLLAMAEWFRSEGVRQVAMESTGVYWKPIFNVLEDDFEILLVNAQKLKHVPGHKTDVKDCQWIAQLLQHGLLKGSFIPPRSQRELRDLTQQRTQLMGEHSRIVNRIQKVLEDANIKLGSVASDVVGTSGRLMLQALIAGENSPEKLADLAKLRLRNKIPQLEEALYGKVSDHHRWMLKLLWDQLASSEAFLVRLDERIEQLTRPQQPVLERLDAIPGIDRRVAEVLLAEIGVDVSPFPSDGHLASWAGMCPGNNESAGKRRSGKTTKGSRWLRQALVQAAWAASHKKDSYFQAHAQNLMRRRGRKRGLVAVAHSLVLVIYHMLKDATQYRDLGHDFLDQIRSEHLIKFHVKRLQQLGFTVAVTPIAT

SEQ ID NO: 430149 - protein, 391 aa, unidentified
MLALVDCCCGLDVHKDIISACILKGAPDEEPICIHAEFKAIQSDLRAMCSWLLENQCFNVAMESTGVYWRPVYEACEEFLGNYQCLMVVNAHHMRNLPGRKSDVKDAQWIATLLRHGLLEPSFVPNRVIRNLREYSRLHRSLVQERATCSNRLEKFLQAHGFKLSSVLSSILGVSGRKLLTTLSQKGILSTIDVSDAVDKRVKRSLDDIRASVTGRLDSSERSYLKLLLRKVDALDEEITDILGLMKDLAQPYKIQIDQLDSIPGIDVAAALTIIAETSATPQDNFDSAKRLVSWAGLSPRNDESAGKIKSRKITKGSPYIKAILCQVAWAAVRTRNSSFHDWFWTHQGKLGRKKAIIAVARRILMLIYKLLKSGEFYDPMVAKKPIQLPC

SEQ ID NO: 430150 - protein, 354 aa, unidentified
MSQNLNSAVAVIGIDIGKNSFHIIGLDERGAITLRQKWSRGQVEARFANMPPCLIGMEACVGAHHLSRRLKVLGHDARLMPAKYVRPYSKGQKNDFRDAAAIAEAVQRPTMKFVATKTADQLDLQALHRVRERLVSQRTGIINQIRAFLLERGVAVRQGQRFLRAELPRILATPPDVLSPRMVRVIEDLAGDWRRLDERVEGLSSEIEAVARQDAGCERLMSVLGIGPIISSAMVAAIGSGEVFSKGRDFGAWLGLVPKQTSTGDRTILGKISKRGNRYLRVLFVQAAWVVLIKPKSWERHGLKPWIEAAKKRLHRNVLAIALANKLARIAWSVLARGRNFEARTNTNATAQAA

SEQ ID NO: 430151 - protein, 386 aa, unidentified
MIYVGIDISKYKHDCFICKDTGEVIVENLSFTNNKKGFQQFLDLLKPYDNSNVHIGLEATGHYGLNLKLFLEKNNYSFMEFNPLLVKEFYKSLSLRKTKTDKVDAVVITQKLMSVPYKPNSKLFYHKYSIKSLTRLRENLVKQRSKYKVQLTNILDIIFPEFKPFFSNSLGITSLYILNKYKTPNKIANMRDFETLNKLSRGNFTYAKFVKLKDLAKNTIGESNDIFEIELSSILNLYKNIDDHIIELDKQISTIIKDLNPPTLSIPGIGVISCASIISEFGDVSRFSNAAKMLSFAGLEPGIIESGTMSSKGKMVKHGSGYLRYSLMNVALTVIRYNNTFYDYYYKKISEGKCHRVALSHVCKKLIRVIYILETKNIQFNSSLLK

SEQ ID NO: 430152 - protein, 388 aa, unidentified
MGDSIDVAHDPLCVGSLAKYACARSCRRACVAGPESVDPKGLSLSRSSEQVRCLPKPERLQGLVARTCKEGSRRMRIVGIDVSKDKVDAAIVSASARMSFTTSEQDQQQLLSWLDDHEVGKAVMEASGGYERRWARILHGAGIEVRIVDPKRVRHYAKAAGQEAKTDRLDAEMIALFGETFADQPGRPHDGDSEAVDQLVSGRARLKLLAVQLANWTEHEAPAELQQIYQELGGLLESRLGSLEKTIAERIGQTERLATRAEIIESVPGLGPGSAAGLIAWLPELGLVDNKAIAALVGVAPYADQSGSRDGQRSIRGGRRKLRNLLFLPVVGAATRNNPVLKAYYDRLIANGKEPKVALIACMRKLVVILNTMIARGEKWQPEKHIQS

SEQ ID NO: 430153 - protein, 405 aa, unidentified
MFVGIDWASTEHAVCVLDQTGKTVRAFRIPHSAAGFDDLVARLRRLGAPAGLPVALERPDGRLVDRLLEAGYPVVPVRAGAIKAWREGEVVSGAKSDAGDAKVIAEYLRLRHHQLRTLTPFSDATRALRAVVRARGELVRQRVAAINQLTATLDAFWPGAKAVFPDVEREIALAFLERYPTPESAAGLGEQRMAAFLTRHRYCGRTPAAELVARLRVAPAGLAGGAEATARRDAVLAFVGVLRALNQAIGDLDRSVIARLGEHPDSKVFASLPRSGQINAAQMLACWGDCRDAYDDPEAVAALAGIVPVTKQSGKHAAVSFRWACNKRFRNALATFAHNSRQASPWAAKLYADAIARGHDHPHATRVLARAWVRVIWRCWVDQVPYDPVKHAASQRLAEEEATAA

SEQ ID NO: 430154 - protein, 345 aa, unidentified
MEKTTRRLRKAQATIGLDLGDKRHTFCVLDTRGEVVNKGSMRNERNELAKLASAYPGALVVMEAGMHSPWTSRFLDSLGMEVVVANPRKTRTISQSERKSDERDALVLARLGRVDRNLLSPIVHGSEETQHDLLQIKLRDSLVRARVALVNSVRFTLKSLGYRVSNPSSERFHKLVVEELPESVRALIVHSVASIAELTARIKALEISIARLASEKYPQTIYLQQINGVGPITSLYLVLKIENPQRFTRTRNIGAFVGLGPKRDQSGETDKELRISKCGDRYLRRLLVSAAQHILGPFGTESALRDYGLRLAQDGTAKAKKRAVVAVARKLAVLLLTLWKSRQPY

SEQ ID NO: 430155 - protein, 311 aa, unidentified
MFSSVGIDVSSTTLAVHIRPEGLNFNVSNDLNGFSQLVEKLGEYQVSAIILEATGGYECNVLRALHDAGLPAYRINPSRVRAFAKSMGKQAKTDPIDAAVLAHFAEVLPPQRYTVMTPERALLRELLMQRDRFVQQRDDDKRRLKQAQSTSVCFRLERHIVYLKGEIKALELEIAEQAVKLNDDRVPRLLEVKGIGLVTATKLVALLPELGQVDRKEIAALVGVAPFNQDSGKHAGKREIWGGRSRVRRALYMACWIVIRYNQDFGARYAALRAEGKCAKVAIVACMRVLIIRLNAMLKAGTPWQEQVAHP

SEQ ID NO: 430156 - protein, 338 aa, unidentified
MDLYTGIDLHSNNGFYGILNEKGERIFQKKLPNELPRVLKILEPFKKDIKAIAVESTYNWYWLVDGLMDAGYPIELANPAGMTQYNGLKHADDKSDAFFLAELLRLHILPTGYIYPREERAVRDMLRRRMKLVQHRTSHILSFQSMISRQTGSGMPGNTIKKLKEEDIQDYFNDEYLILIGETNISVIRHLTEKIRRFEKEVQKRVKIKPEYEKIQTVPGIGKILVLTIMLETGPISRYAGAGNYASYCRTVKAIHTSNNKKKRNLNKKNGNKYLGWAYVEAANFMRRWCPEAKRYHQKKMARSKQVVATKSLASKISKACYYIMRDQVDFDVKKMFG

SEQ ID NO: 430157 - protein, 336 aa, unidentified
MSELATVGIDLAKSVFQIHGVDENGRVLVRRQLRRSQLLAFFQKRPRCLIGMEACAGSHDWGRRLQQMGHDVRLMPPSYVKPYVKRGKTDAADAAAICEAVTRPSMRFVAIKSEACSSVLVLHRTRDFLVRQRTQIGNAIRAHMTEFGIIAAKGAQNVDRLKEQLDLLPEVARMPVSLLFDQLAETNKRIERLTDEIEETYEQSETSQRLATIPGVGMLTATIIAATTPDVDNFDCARDYAAWLGLTPKPHSTGGKQRVGRISKMGNRYIRRLLYLGAMAQIMLRRRLKREPGSDWLSSMLNRKKAKVVAIALAHRMARTIFAVLRDGSRYEPQTA

SEQ ID NO: 430158 - protein, 409 aa, unidentified
MERQIERGCGLDVHRDTVAACVRVPGTRGERAQHVRTFGTTAAELLRLRDWLGAHGVTHVAMESTGVYWKPVFYVLEDACTCLLVNAANIKQVPGRKTDILDCIWIAQLLEHGLLRGSFVPPVEIRELRDLTRHRKVLIQERQRAANRLHKLLQDAGIKLASVATDILGVSGRAMLEALVQATTDPEVLADLALGKLRKKLAALRQALAGRFRPHHAFLVSQLLAHVDYLDEAIATVSGEVEVHLAPFASHVTHLETVPGIARRTAEVILAEIGVDMSRFPSDRHLASWAGLCPGNHESAGKHKTGKTRKGNQWLRMALIEAALAAIRTKDSALAARYRRVMRHRGHKKAVVAVAHAILRAIYHILTDHTPYRELGLDYYDRRHAHRVTRRAVELLERQGYRVVLEPAA

SEQ ID NO: 430159 - protein, 457 aa, unidentified
MSKRNKKAKSQNFEVAKLPQHLQHINVNAAGIDIGSERHFVAVPEGRDEQSVREFGTFTTDLRALAAWLKQCGVTTVAMESTGVYWIPLFELLEREGFEVKLVDARHVKNVSGRKSDVLDCQWLQQLHTYGLLAGAFRPADEICVLRSYLRQREMLTQTASQHIQHMQKALQQMNLLLHNVVSDITGVTGMKIIKAILAGERDPRVLARNRNERCQNSSATIAKSLVGNYREEHLFALRQAVDLFETYQAKIVDCDEAIIKQLEKQPNVSDDGPPTPEKQTQARDRLRGGTDVREVLYKKSGVDLFAIPGLAADTLLTLSSEVGFDLTPWKTEKHFASWLGLCPGTKKSGGKVLNKKTKRHPNRAAQAFRMAAASLNRSQTALGAFYRRIKSRNGGQHAVTATAHKIARIYYAMLTQGTTYVELGQQAYEQRYKERRLDHLKVRAKSLGFQLVPCAT

SEQ ID NO: 430160 - protein, 351 aa, unidentified
MVTIGADLHKRTHTVVAVDEHGRKLAERTVTATPAGHLTLLRWARERFAERRWALEDCRHLSRSLERDLLAAGETVLRVPPKLMAGSRRSGREPGKSDPIDALATARACLREPDLPSARLDGPERDIRLLVDHREDLVAERTRIEQRLRWHLHELMPGDEPPARGLDRRHVLDRLEVRLATLEGTVVRIAVELVARVRELTLGIDRLEREISGLTAAQAPSLLALEGCGPLTAAKLLGETAGVGRFRSAAAFARHDGSAPIPVWSGNETRHRLSRGGNRQLNLALHRIAVTQLQRPGRGRDYLEKRLLAGDTKTEAIRALRRRISDEVFRRMRHDETPRATASQVSLAPAA

SEQ ID NO: 430161 - protein, 430 aa, unidentified
MKSNTQNAKIEAITEKTLVLGIDVGSETHYARAFDYRGIEYSKKPFKFSNTEAGFVTFKEWILDLKERHEKDKVIPGMEPTGHYWFNLGKFLQDNEMKPVLVNPHHVKKSKELDDNNPTKNDRKDPKVIAGLVREGRYMIPYLPDGVYADLRTASNIRFQLQAELTRIQNRISRWFNIYFPEYKTVYGKPDAKSGILILKAAPLPEDILTLGIDGVNQIWRDAKLRAVGKARAKTLIEAAEHSVGSKEGAVAARMEIRMLLEDYESRSIRLQEVMTLIEGLVKQIPMAEKLLEIKGVGIRTVSGFLAEVGDISRFNNPKELQKLAGLALVENSSGKHKGETTISRRGRKRLRYLLFEVAMSLVTKNPEFRELHNYYTTRRLNPLKKMQSLMAIAAKLIRVFYVMLTKGVNYDPKKMVNDIKRPAVYLQTA

SEQ ID NO: 430162 - protein, 350 aa, unidentified
MPILEGKVDHVIGVDTHRDRHTAAILDRNGGLVAQLEIPSDQAGAEVLLGVVNERAPDRRCWALEGTGCYGAGLASFLADQGEWVVEVDRPKRPRGRTGAKSDVLDAIRAGREALSREHLACPRQRGQREALRVLQLTRSGTVKVSADARRHLKALLVTAPEPLRARLRRGTWVQQAQACAVLVAATTDPIEHRATVRALRLTAERALAAHLEARQLGKEMRVLVQAMAPALLAQPGVGPVTAAQLLISWSHRGRLRSEAAFAMLAGVAPIPASSGRVVRHRLNRGGDRQLNRALHTIVMIREAWHEPTKRYVARRTAEGKSRREIRRCLTRATARQLFRLLERQPATAG

SEQ ID NO: 430163 - protein, 379 aa, unidentified
MTRMTIGAATTDKGVSATIYIAIELSGSKWVIGVHTPLADKISIYRLTGGDAQGLLKLIAHVREKVERRLGRSATVLSCYEAGYDGFWLHRLLKAHGICNHVLDSASIQVSRRARRVKTDRIDAEGLIRVLMAYDRGERQVCAIVRVPSLEDEDAKRLHRERERLVRERVQHTNRIHGLLATQGIRTFKPMRKDWERQLEGVFTGDGRPLPPQLKMEIRRECRRLAMVLDMLKEVERERDTGVASEAKMGLLAKLQGVGPTFATVLVREVFYRAFNNRRELGSYVGLTPAPYDSGDVHRDQGISKAGNPRARTLAIEMAWLWVRYQPDSALSQWFRERVGVTTGRVRRIAIVALARKVLVALWRYLETGIVPSGAMLKT

SEQ ID NO: 430164 - protein, 355 aa, unidentified
MNTLNENSIVVGVDVHKYSHTAVAMNAWGEEKGSLTFSNNNLETYTEWLEQMGLKENIIVGLEDVNSYGIHLAEDLRKKNYHIRYVPAILTERERKSSTKRHKSDSVDAKRVGKVILTKYEDTLPAKESIAEERELDIAKSLDLLLMERKDLVKSKTILKNQLHGLIHQHYTESYRAICPRSFTKKAIRWFLDNLGGNATILAASITRRLHRLLFVEDQIHTISKEITEIGNTSAEAMALSIIHGCGIVTACAIVAEVITVKRFKNKHHFSMYAGVAPTPHSSGRKHKMHTNPFGNRQLNRAIHSIALSQIAIKGDPRGKEYYQRKLKEGKTKLWALRCLKHQIAKRVFQTLKCA

SEQ ID NO: 430165 - protein, 314 aa, unidentified
MAQTKCWVGIDVAQDSLQVYIRPTGNNFSVSNDSAGIDALVECLSKHNPELVVIEATGKLEALVIACLVHAGFTVARVNPRQAREFARATGRTAKTDAIDASVLAHYAEAIQPLARQLPDAEVQELADLMARRRQVVEMITAEKNRLKRMHASVLPHIEAHIKWLIGQKTDIEHSVEQLVKTSSVWREIDQVLRSVSGVGKIVSHTLLASLPELGTINNKQIAALVGLAPFNRDSGQMRGRRTIVGRAQVRTMLYMACVSAIRHNSTIKAFYERLIAAGKPYKVALTAAARKLLIILNAMTRQFILPKTANVAA

SEQ ID NO: 430166 - protein, 348 aa, unidentified
MPLYGGIDLHSNSNQSAILSEDRKRIMRRKVANDPDLILRFWEPYKPDLAGIVVESTYNWYWLVDLLQDNGYRVHLANPAGIQKYSGLKHADDNHDAFWLAELLLLGILPEGYIYPKELRALRDLLRKRQQLVRVRTALILSLQNIVTRNCGTKISAVHLKHLKEDRVQGYLQENEDLLLAGSANKTCIDALSRQILRIEAAVEKKLKLRLPYTHLLDLPGVGRILASTIMLETGPIERFAKVGCYASYCRKVNSRWTSNEKVKGHGNKKNGNKYLAWAFGEAAERARIFHKASREFYQRKLRQKKHPALAHGALAHKLARAAFYILRDNVPFDQEKMFGYPEEALDT

SEQ ID NO: 430167 - protein, 393 aa, unidentified
MRSAGIDIASEKHLVAVVDEKSNVLLKPKPFTEDSVGYEKLFQLLGDPNGLLVVMEATGHYWKNLFAALAAKGYVVALINPLRTHRFAGEDLERTKTDAIDALGLARFGAQKRPTPTRLPDSATEELRELVRLRDRLVQDLGDRVRELHRVVDLGFPEFTRYVRTLDSELATSILKEYPTAEAFVGVRPRALSNLKYDGRHFVGLELAKQLITAAAASVGRHHGKAYRVQVKYFCQDIEVFRSRIRELDRDIETKLGEHEVGTLLTTIDGIGTQTAARLVAVLGNPADFRDERALASYVGAVPGLKQSGKNVRTRSPLTPIGNAALRTALYMPTLTAVKRNPWLRAFYERLIAAGKLPKVALLAAMRKLLSAIYAVAKNRKPFVPRLAPQEAR

SEQ ID NO: 430168 - protein, 426 aa, unidentified
MTEGKVSQEPQFAALVGIDWADRKPVWCLQEAGSAKRETGELEHKVETVEAWVAELGQRFGHRPIAIAVEQVKGALVFMLNKYECLHIFPVPSTMSASLRNALYPSGAKDDPRDADLLLDLLLQHRDKLRRLSPDDEATRRVQNLVEERRKLVAEKTAQGNRLTGYLKIYFPQMLEWFEKLDMPLVCELLERWPTLEELQKVPAEELRTFFRQHHCHRELRERRILAIGRATPAIEDRPVVEANSAVVKVIVQLIRSLLQGIAELDGKIEEAAVVHPDFFIFASLPGAGAVLAPRLLAAFGSQRDRYSCADEVQTYSGIAPVTERSGKRKWVHFRWACPKFLRQSFHEWAGHSISQSAWARAYYQQQRDRGQDHHAAVRALAFKWIRILFRCWQDRVAYDENKYLGALARRGSTLSAVLTATATTV

SEQ ID NO: 430169 - protein, 355 aa, unidentified
MSNEKYIGLDVHQATISVAVMDCQGKVVMESILETKASTLLEFFAGLRGSLFVTFEEGTWAAWLYDLLKPRVAEVLVCNPRKIPLHKQGNKSDKIDARKLAERLRLHDLKPVYHGETGIRMLRELARSYLTIVKDHSRVMNRLKALYRSWAVACAGRDVYYRRHRSQWLEKIPQAGTRRRAEQLYQQLDMLQPLRQQARRELLAESRKHAITAKLRKIPSLGPIRSALAVALIQTPHRFRSKRQLWTYSGLGLETRDSGEYHFVKGQPRRRKKQATIRGLNKDYNHDLKGLFKGAATRASVKPGPFQEFYQRSLAKGIKPTMARLTLARKIAAITLTLWKKGEDFDINKLNSQAA

SEQ ID NO: 430170 - protein, 320 aa, unidentified
MRNTVGLDISKLTFDATAIVGNAEYSAKFDNDSKGLDQFSDRLKSLGCQNLHICMEATGNYYEEVADYFAQYYSVYVVNPLKISKYAESRFKRTKTDKQDAKLIAQYCRSAKESELVKRQKPTDEQYRLSRMTAAYAQIKSECAAMKNRHHAAKDEEAAKAYAEIIKAMNEQLEVLKEKIKEQTEKPNCKEGVKRLETIPAIGRMTAAVLFHHLTSSKFETSNKFAAFAGLSPQQKESGTSVRGKGKLTKFGNRKLRAVLFMLTMVAYRIRAFPDFIKRLEEKKKPKKVIIAALMRKLAVIAYHVHKKGGDYDPSRYKSA

SEQ ID NO: 430171 - protein, 391 aa, unidentified
MIYIGIDVAKDKHDCFITNSDSEVLFKAFTIFNNLDGFNDLYQKIESVMDDVTKVKVGLEATGHYSYNLLGYLIDKGLPTYVINPLHTNLYRKSLSLRQTKTDKVDARTIASMLMSDVNLKSYSDTSYHNEELKSLTRYRFDKVKERAKLKTSVSRLVCILFPELEKLVPTLHMASVYALLSEFPSAKHVDTAHLTRLTNLLSKSSKGRYGKDTAITFRDSARASIGSNMPAKSLELKHTIKLIQELDSEIDEIENEIKIIMDEINSPILSIPGINYRMGAMIIAEIGDFNRFDSPDKILAYAGFSPSTYQSGQLDGAYAHMEKRGSRYLRYALYNATKYVCHWDPTFAAYLAKKRAEGKHYNVAISHAVKKLVRVIYHLEKTKQQYIKAA

SEQ ID NO: 430172 - protein, 332 aa, unidentified
MKFDFFVGIDVSKNELDFSVVKAGVELFHFKGANNLAGIKAFVKMLKTKGGKLSNALFCMEHTGIYNNHLLQYCTKQKATVWLESALHIKKSSELQRGKNDRVDALRIAMFAYKNKEEVKLWEPKRYVIQRLKYLLGVRSRTVNVLKQLTTPLKEEEEFSDSNMNARKLNNGSIKILKKEIKNIEGEMLLLIKEDKELKRIHEQIVSVEGVGLITAASIIVTTNEFKDITEAKKFACYSGVAPFEYSSGSGIRGKTRVSKMANKTVKTLLHMAALSAIKIKGELREYFLRKVAEGKNKMSVINAVRNKLIQRIFACVKQNRKYEKNYIHSLA

SEQ ID NO: 430173 - protein, 368 aa, unidentified
MQSQTKITETTDFSNQNFYNGIDCHKKQWTVTTRLDGTYLKTYTMPPSAQALAKHLKTNYPNGNYFSVYEAGFCGTSYHEELCALGIKNIIINPADLPVSHKLKTNRTDFHDSRALAEFLEVGKLKAIHIFSVDHQELRSLCRLRGTKRKDTTRCKNRIKGMLMYYNITIPVQFQGKKCWSNRFVNWLKEQKLKTEEGTQCLHYHIAELEHQRSQLFSVLRGIREIMIQRFKKLWDLLLSIPGIGPLNAITLISEVGDMSRFATEAHLASFFGLLPSESSSDETIVVNGINPRCNKYIRSMLVEAAWVAIRYSPSLLCYYKKHALNNKDNNKAIIKVARKLAMIIRAVWLSGKPFEEGYVPVGKNKAA

SEQ ID NO: 430174 - protein, 393 aa, unidentified
MITRYFGMDTHKKFVMVAAVNEHQAVVQPALKVSMNNFKAWVAETLSAQDQVVIEVTANSWHLYDMLVEYAGTVIVANPYKTRLIAEARIKTDKVDALILARLLAARFIADVWVPSALVRQQRALASHRDALARQRTQVKNRLHGLLFRHNLSCPHPNLFTRNGRDWLVSLDLPATEQLSLAHLLRQLDLLEEQVADSEQMIAQLAAQDERIPYLLQIPGIGCFTAFAILATIGNIERFDSPKRLAAFAGLVPSRHQSGNKAYNGHITKAGAPILRWLMVEAARVAIRFDPHWRQVYDRIRQRRGDSIAVVAVARKLLVVIWHLLTHKTAYHHLQPQTFVSKLQNWAWRIGREQLPTSSSAEFVTHKLLQLGFLQLAQQLQTDRKGKLRVLAA

SEQ ID NO: 430175 - protein, 317 aa, unidentified
MEMSPIFVGIDVSKARLDLAIGRSGERESVVNDEAGIKTLLKRLGEIKPALIVLEATGGVERSVTRALASAELAVVVVNPRQVRDFAKATGQLAKTDRIDALVLARFAEAVRPAVRPLPDELTIELRALIARRRQITEMIVAERNRLSGASKSVRKRIDAHIRWLEAELDRADKDLDQSIRQSPIWQENQDLLKSVPGIGPVISRTLLAELPELGQLNRKQIAALVGIAPLNRDSGTMRGRRTIWGGRASVRAVLYMAALVASKRNAVIRAFYQRLRIAGKAPKVALVACMRKLLTILNSMIQHKTRWSENFSVQPC

SEQ ID NO: 430176 - protein, 360 aa, unidentified
MFTERTSVGLDVHARSVVAHAMDVQTGEIFKARLCPDPAEVTAWIKALPGPAAAIYEAGPTGYGLARTLLASDIRTVVAAPSKLQRPSGSRVKTDAIDAEHLSTLLRLDAYSAVTVPDELNEAARDLVRAREDCRSDLMRARHRLSKLLLRHGIVYSGGQAWVGAHDAWLKRQRFDSPLVQAAFDEAYDSVITITARRDRLDERIAAMAADSPWSDTVRRLGCLRGISTLTGFGLAVEIGDWTRFTGNSIGSFVGLIPSENSSGQSRSLGPITKTGNSHARRLLVEAAWHHQHRYVPGKTIRDRWDLASPAARARGDLGNRRLNHRWNQFKARKKANNVANAAIARELAGWCWSLAVLED

SEQ ID NO: 430177 - protein, 449 aa, unidentified
MSKNVSTQSGLPVVHARAAGIDIGSRFHVVAVAPNLTDEPVQTFQAFTADLVRMADWLVTLGITTVAMESTGVYWVPAFEVLESRGLDVILANAREARAVPGRKSDVNDAQWLQRLHACGLLRASFRPGRDIAALRVYLRLRERLVDYAAAHIQHMQKALTFMNLQLHHVVSDVTGVTGMKIIRAIVSGERDLEVLAAMRDVRCRASTETIRSALTGNYQPEHVFALRQALALYDFYQSRIDECDAQIEQVLVALTAGKPNPATPLPQPRHRTKQPSDLNFDLRPVLYQLTGLDLTQIHGIGPHLALRLIGECGTDLSKWPSAKHFASWLTLAPGCKISGGKVLSARTRKTTNRLAAHLRLAAVTVGRTSTALGAFYRRLAARIGKAKAVTATARKIAILFYNAMRFGRDYRDLGADEYERKYRERVIKHLHRRAAEFGYTLQQVVGVS

SEQ ID NO: 430178 - protein, 357 aa, unidentified
MTSIARSRGDIVVGVDTHKDNHVGVVLDGVGGRLANLTVSATPAGYARLVEWAGTYGRVVAYGVEGTGSYGAGLASYLRRQGAKVIEVNRPSRKADRRANGKSDTLDAEHAAREVLAGTSTAVPKTADGAIETLRLVKIARDTAVKAHTAAMIALKATLVTGGDDLRAELEHLTDYKLIVACAALAAEDLTSPAGGMRHVLGSLARRWLQLHEEIKVHSRLLKQLTKTTAPALIEAFGIGPDVATELLLAAGDNTDRIRSESAYAKLCGACPIPASSGRTTRHRLNRGGNRQANSALYRTVVVRMRWHEPTIAYVARRTAEGLSKREIIRCLKRYLAREVFLLLPAPVVDNRRLDAA

SEQ ID NO: 430179 - protein, 377 aa, unidentified
MSIVGGLDIHRKQLTFDYLDTASGEVRRGQICPADRAHLAAWLEGRFTGETADFAMEGCTGWRYVAEELAAAGITPHVGEPADTAALRGRKRHAKTDRTDSRHLRVLLADGRLPECWIPPSHVLECRALLETYHDLRTEHTAQAQLRGAVPPRRPPARRAEPAHRRGPGHLAVSRGRRTVAGRATADHGGPGHAAGAGGPPGRAAPPACRRPGSCRSPPPWTCSPPSRPGWRCCTQLRDAARHLTGAKVLAARLYGAGPVTALALTCWLAGEGRFSSSRKAARFTGLDITVWSSDRKGPPGRLSRQGPEVLRWCVYEAGKAHARRCAPDHAYYAQVKERIDGKRAAISEARKIIRQAVHILGELGDDALTMAPRPSR

SEQ ID NO: 430180 - protein, 328 aa, unidentified
MERETHNTLGIDISKMTLDVVLLRPGQDAQAASYANSAAGFKKLTKWLRKRNAGRVHACLEATGLYGDEVALFLHDEGHTVSIVNPARIKAYAASQLQRNKTDRLDAACIADFCRTQQPPAWEPPDPAWRELRALARHLLDLQDMRQQERNRLQAGIPSATVRHTLEAHIAFIQQQIDDLEQHIRDHIDRHPDLKRQRELLDSIPGIGSLTASLLIAEIGDLQRFDHSGQVAAFAGLNPRQRRSGSSVRGQTPLSKTGSATLRRILYFPAISARCHNPVIAPWCDQLAARGKTKMQVIGAAMRKLLVLAYGVLKSGQPFDPDFQMATP

SEQ ID NO: 430181 - protein, 345 aa, unidentified
MTQYKLIGIDTSKAVFTLHGLDHQDRPLLRINLRRAQLLVFFKKLPPTRIAMEACACSHHWARELIALGHEVRLIPPQYVKPYVKRGKNDRNDAEAICEAARRPGMHFVPVKSTTQQAQGMVLKVRETLIGQRTLLANTVRSHAAEFGVIAAKGLGQVGPLLAAIEQEIAIPSEAKDMASLLGRQLKELDARIKEIDVKLAAAHQANEVSPRLATIPGVGPVTALTLAVEINPEMFESGRHLAAWAGLTPKEHSTGGKQRMGGISRAGNERLRTLLVVGAMSVIRAATRPGSKQMTEWLRALLARKPRKVAAVALANKMARVAWALMMRGDVYQRPTIAVGAAAV

SEQ ID NO: 430182 - protein, 315 aa, unidentified
MNTIQRQINVGIDISKQSLDVALAETGEVFQVDNTAAGIRSLVRKLRAYTIARIVVEATGRLERGLLEQAVKHELPLVVVQPLWIRRYAGARGMLAKTDELDAMAMAQYGAQIEPEVRELPCDKILLIKDLLCRRRQLMRMRTQELNRCSIMPRVTQRSLRRVIKVLDSEVTKIEAQLDKSLDEVDHWHQRREVLLSAPGVGPQLMYTLLGELPELGQLTAKQISALVGVAPMNHDSGTWRGKRRIRGGRAQVRTVLYMATLCGVRHNPVLKAFYERLVAQGKHKKVALTACMRKFITILNAMVRDGTKWEEKYA

SEQ ID NO: 430183 - protein, 341 aa, unidentified
MGEVSTIGLDLAKSVFQVHGADASGAVLFRKKLRRHQVLTFFAGQPPCTVAMEACGSSHYWAREIGQLGHAVRLIPPAYVKPFVKRQKNDAADAEAICEAAQRPTMRFVAPKSEQTQATALVFRARDLLVRQRTQIINALRGHLAEFGLVVAKGPAHVSQLVRAVADPEEPIPEIARPVLQMLVETLHRLDKQIAGLDREVAQRAKENETARRLMTIPGVGPVTAVALAALAPPAETFKRGRDFAAWVGLTPLQHSTGGKQKLGATSKMGERTLRRLLIIGASAVVSWAARNGAPAGSWMARMVARKPPMLVRVALANKMARIIWALMAKGGTYQAPVAVV

SEQ ID NO: 430184 - protein, 327 aa, unidentified
MTLSIVGMDVSKHKLDIALLHEDQTKYLEIQNDLPGFQRLHNWLKANGCQKTHVCMEATGQYGYAATDFLYICGYEVSVVNPARIKAYAASRLKRNKTDKADALLIAVFCQREKPGLWSPPSPAFSALKALVHQLDDLMASKQQQRNRQEFSSCEPLVDAILHEHIIFLDSKIQILRLAICELISQDPQLKHYSDLLVSIPGIGEISAARLLAEIRDFHEFRNSHQLTAYAGLNPRQYQSGSSIHRKNMLSKTGNATLRRALYMPAIVAKTHNPVIREFCQRLSERGLSKMAVVGAAMRKLLVLAYGVIKTDSLFDPHFVQKEVVYA

SEQ ID NO: 430185 - protein, 383 aa, unidentified
MKKTKGTLSKNDTKKETVLHLAFELSETKWKLGFSDGNKMRFKGMAARNLGQLEEEIEMAKERFKLEGEIKIVSCYEAGRDGFWLHRYLLSCGIDNIVVDSSSIEVNRRKRRTKTDRIDARKLLQMLMRYRGGERKLWSVVNVPGVEAEDGRQLNRELEVLNKERTMHRSRIRGLLIQQGLEVSNPSGKGFFEELESLRTWDGRALAEDLKERVVREHERLRNVEDQMKLLRKEREIRVESMATPSLRMVEQLRSLYGVGKTSSWDFVMEMYGWRKFRNRKEVGAFAGLTPTPYDSGGSRREQGISKTGRGRVRGLSIQISWGWLRFQPQSKLSKWFWERFGHGGKRMRKIGIVAVARRLLIDMWRYLEYGVIPDGARVRPSA

SEQ ID NO: 430186 - protein, 418 aa, unidentified
MTATDTNSSILMVAIDISKHRHEVLIGVPGKKRRRRLTILNTLDDFQRLSASLSSYGLPVRIGFEATGNYHRALAHHLGQAGFELKLVSSVGLARTREALHNSWDKNDPKDAQVILHMLEIGAVQFFHDPIVVGTADIQELSKTHEIVSRSKTELWHRILTHYLPLYFPEAERFHRSSRTDWFLAFLEKYPSPHMISAMDRDAFIADAWDVVGRKVSKEQLLSDIYATAAASVGLPVQADSDAVRMFRLVLAEGRGLIRQRDAIEARAVELLSDLPDYQLLTTIPGIGPINAMTILAEAGDLRRFRHHRQFLKFCGMDLATVQSGMFRGQSRISKYGNARLRRTLWMAGQTAVLKRTNSFRDKFERYISKDRDNAHLRRKAYTAIAAKMARTLHAVVNHGEHYRPFFEGVSPGGRTSL

SEQ ID NO: 430187 - protein, 362 aa, unidentified
MKSMTGEKVIVGVDTHKHIHVAVALSWAGERLGDLTVAADPGGYEQLLDWAQAFGVVWCFGVEGCGSYGQGLVGALRRHDQRVVEAGRPDRRDRRERGKSDPIDAENAARAVLAGTATGVPKTADGTSEVIREIKIARDTAVKSRTQAVITLKTLIVTAPDELRHEPQPLSKAKLRDRCAALRPGKVDAPLAAAKHAIRSLARRWQHLEAEIKEHDRLLDTLTAQAAPALREAFGIGVDVAAEMLILAGDNPERIKSEAAFAKPCGACPIPASSGATQRHRLNWGGDRQANSALYRSVIVRMRFHPPTIAYVARRTQEGKTKREIIPCLKPYLAREIYHTLTQAPLTITPQPVPRKRAQIAS

SEQ ID NO: 430188 - protein, 387 aa, unidentified
MPQPNDLSRSLVALDQDSTIIAVVELSQSSWLVGGVLPGIERQPRKKLEPSPERLLAVLHRWRDEAIRAGCNITRIALAFEAGRDGFWLARWLAARGVEAHVIHPSSVAVSREHRRAKTDRLDTELLKRGFLGWLRGERGHCSMVRVPTLAEEDAKRPNRERECLVKERTRLVNRMKGALARLGIRNFRPTLRNAAEHLAGLYTPEGSPLPPNVAAELERDIARLGLVIGQIKQLEAARRQRLEEQPESRPHAMVRLLVRVVGIGTETADMLVNEVLSRPLRDRRAVARYAGLTGAPDESGAKRREQGLAKAGNARVRRGMIPLAWRFLRFQQNSALARWYQARTADRRAGTRKTMIVALARKLLIALWRFVTTGETLEGVVLRPAA

SEQ ID NO: 430189 - protein, 386 aa, unidentified
MKYVGVDIAKQTHYACVTSQNNNILTPPFPFENNISGFNLFLSKFKKFPKNDVVIGLESTGVYGENLMAFLSEQGYQVALINPIETAGARRKRIRNAKTDKIDSKAICKYLFQNDYRLLEPKELTTLELRGICRFRQSLKRQNARLKIQLVTHLDVVFPEYQTLFSSVHGKGSYAVLSEFSSPAVIAKTNIVKLENLLKTGSRGHFGRAKADELKALAKRSIGNKADNKDFQIRHAIAQIRLIESQLDDTESRLKELWNGIDTVLKSIPGIGVIDGALIYSEIGDIARFHKPDQLIAFAGLDPATKQSGNFRAESTKMSKRGSPYLRYALINAAWNVSLNNATFGEYYNLKLAEKGRHYKALGHVAGKLTRVIFKMLKDDIKFDLP

SEQ ID NO: 430190 - protein, 424 aa, unidentified
MNCNQNFKISQVTEGTLVLGIDVGSNTHYARAFDWSGLELSKVFKFKNSFEGFQSFVLWVNDLCCKYNKSKVIAGLEPTGHYWFSLGELLKENNITIAIVNPYHVKQSKELDDNLQTKNDSKDLKVIAKLVIDGRYSFPYIPEGIYGELRVADKLKNDITQQIISIKNKIHRWLSIYFPEYEKIYSSIDSKSGFLLLKETPLPKDIVELGSEGIVERWKQTKLRAVGLDKAKKLEEAAKKSIGCKNITSSARFEIKLLIEDYEYKQNQLNSITEELNKLCEKIPMIKEIAEIKGIGIATAISFVAEVGDIRRFKSAKQVQKYAGLALKENSSGKHKGLTRISKRGRKKLRTILFRATIPLIGFNKEFSSIYNYYIERKDNPLKKKQALTAICCKMIRIFFTILSKGIKYDETKMLHDIKRPVAA

SEQ ID NO: 430191 - protein, 355 aa, unidentified
MSQEKYIGMDVHQATISVAVMDGQGKLIMECLLETKAATIVEFIQGLHGTLSLTFEEGTSAAWLHDLLKPQVSRLVVCDPRKNALLKDGNKSDRIDARKLAELLRGNQLHPVYHGEHGVRTLKELGRSYLTITQDVTRVMNRIKALYRSWAIPCAGTTVYAARHRAEWLAKIAEPGVRVRAERLYQQLDLLQPVRLEARRELLAESHQHSAVKLLRQIPSIGPIRSALLVALLQTPHRFRTKRQLWAYSGFAVETHDSGEYRSVRGKLQRNRERMTVRGLNDNHNRDLKNLFKSAALSASTRPGPLRDFYVARIEKGIRPTMARLTLARKMAAISLTIWKKGVEFDPQQLHRQAA

SEQ ID NO: 430192 - protein, 386 aa, unidentified
MTQHSHVTTSNGLDYDRTLILAVEVSGRSWVVAAQVPGLRQKGVKQQLAPRADALMAAVEGYKRRAAAAGMAVERVIVAYESGGSGFWLARWLQQRGVEVYVMQPSSVPVDRRMRRAKSDRIDADMLLRTLLAWLRGEPRVCSMVPVPDEATEDARRPIREREELIRARVALVNRIEAVLTVLGAGEYNPLRRDCRERLGQLRTALDQPLPPHARAQIERLLDRLDLIRQQAADLEAQRDRAVEGETVGQAERMIQHLARVRGIGVQTATVLVHEAFVRRFRNARALGSYAGLTGTPYGSGGTHREQGISKDGNRRLRATLVELAWMWLRYQPGCALSRWFHDRLGGSRGRLRKVMIVALARKLLIALWRYLQDGAVPQGMELKPA

SEQ ID NO: 430193 - protein, 368 aa, unidentified
MERKSSKLYVGMDVHKESIDLAVAEEGGEVRHQGQIGGDMSALWRAVRKLESLGRELVFVYEAGPCGYGIYRGLTARGHTCWVVAPSNTPRRVRDRIKTDRRDSLKLAGLARAGELTPIYVPDVRDEAMRDLVRGREDAVAMQRQARQRLAALLLRNDVRYAGKTAWTAAHRRWIADLKLPQSAQRLAFEEYVQAVEEASARVQRLTRCIEQELAHWRWRPVVGALQGCRGIQLIHAVRLVAELGDLSRFSRPRQLMGYLGLIPGEDSSGEHRQQGAITKAGNRSARRALVEAAWAYQYSAKVSTLIARRQVDVPKAVLDIAWKAQVRLCARFRRLAARGVNRNKIVVAIARELAGFVWAIAQQVKPV

SEQ ID NO: 430194 - protein, 345 aa, unidentified
MEDGRAAYRLYVGVDIAAETFVAAWLTPGGKPTAPFTGEQTPAGFAALQGRLRAVAVPPAATLVVVEATGNYWVALAVALHEAGYRVAVVNPRQAHHFAKAQLRRAKTDALDARDLAQLAAALRPAPWVPPPAVYHEVRQRLVARDGLLAMRTQARNQRHALLQWPVVVAGVRQHLDELITDLDRRVAALEGEIAAVLQESAWAEALACLTSAPGLGLVTAAWLLVGTLNFALCAGPDALTAYAGLAPVPRESGRTIRGRPSIGHDGNARLRTALYMATLSATRYNPAIKAFYQRLRAAGKPHKVARCAAAGKLLHQAWALGSKQQRFDPNHGQPRPVDSPELAA

SEQ ID NO: 430195 - protein, 406 aa, unidentified
MEVIYPRCAGLDVHKQTVVACVRIAGDGSPLQQVRTFDTTTSGLLALADWLESFGVEHVAMEATGVYWKPVWHVLEGHFELVLANAAHVKNVPGRKTDVNDAMWLADLLAHGLIRASFVPPVAVQEMRALTRTRKQFVRERGAHVQRIEKVLEDANLKLGTVLTDIMGKSGRAVLQAIVDGQTDPERLLSCIGRVKASRAELLEALRGRISAYHRFMLKLHLSHIDALGQAIASIEKEVGLGLEPFRQAAKLLSTMPGLSSVSAHVVVAEIGIDMSRFATPGHLLSWACMCPRNDESAGKRRSTRLRRGGKWLKTTLVQAAWAAIKVKGSYLQAQFHRLRARRGAKKAIIAVAASMLTAAWHMLRDGTEWHDLGAAYFDRADAAKTANRLIRRLQQIGYTVHAVPA

SEQ ID NO: 430196 - protein, 413 aa, unidentified
MKPHSELTHFAGFDWAKDHHDVVVVDVQGCIAGEFRIEHSIAGWQQWKDQTAAFPHLGVAIETSFGAAVEQLLDSGVTVYPVNPMNAKRYRERKCSSGNKTDHDDAWALADALRVDGQGWRPLTVQDPVIAELRILARDEVGLIEERTALVNQLQQALHEYYPTALEAFDDWTSGGAWSFVEVFPTAEALIKAGKRKWDKFLHSHKLYRPQTYQNRVAIFEQADKWRPLASTVAAKSFLALTRCKQLRCLQLQLDAYRKRIEELFASHPDSGMFGSLPGAGPKLAPRLLSEIGSDRALYQDAQGLQCMAGTAPVSYQTGKIHKASIRRACNKHLRHAMHLFADKSRPQCAWAAVYYDALRQRRMTHAHAPRCLGQRWLKIIWKMWQNRTHYDPELHMRNQLAHGSWVFQIQSS

SEQ ID NO: 430197 - protein, 316 aa, unidentified
MKKASVEIFVGMDVSKSWLDVAVHEQEGAAFRTGNDDAGIASLVKRLKKLKPTLIVLEPTGGFEMLVVAELTQAGLPVVAINAKRIRDFARATGRLAKTDKLDAKVLAHFAAAVRPPLRNLRSEEEEPLTALLTRRRQVLDMITVEKNRLVTVRAKMRSDIQAHLLWLSKNLKELNKEIEDFVENSPVWKEKDALLQSVPGVGPVTSATMLGMLPELGKLNRQEIAALVGVAPINKDSGKKSGKRRIYGGRADVRSVLYMAVLSATRFNRLIKKFYESLIKHGKEKKVALTACMRKLLVILNAITRSQQPWRTQIA

SEQ ID NO: 430198 - protein, 347 aa, unidentified
MKKIVKQVAGIDVAQKELVVSFGQMDEAIDVKVFTTKTFINTAKGFKDLIVWVKKHATADITVRYVMEATGVYHEALAYYLSDNGFEVSIVMPNKISNFFRTVEIKTVTDKTASQVIARFGLERNLDKWDKPAKAFTDLKELTRERDQIIAERTLLKNQLHAEKAKAFPNEKSIGRIKKRIKLLSTQEKEIKTEIAQIIKQNKEVSKQVDLISSITGVGLLTATIVLAETNGFDLIRNKKQLVSYAGLDIREKQSGTSVKGKPRISKRGNRHIRKAMHFPALTAIKHDERYKAIFERTVSKHGIKMKSAVAVQRKLLEMIYTIWKTKKPYEKNYLQKGENQQENKAA

SEQ ID NO: 430199 - protein, 346 aa, unidentified
MKITTVGLDLAKSVFQVHAVDERGQLAQRRKLRRDQLMGYFAALPPCLVGMEACGGAHYWARRIAGFGHQVRLMPPQYVKPYVKTNKSDARDAEAICEAVRRPNMRFVPVKSVEQQAVLSLHRARQGLLQARTAQSNQIRGLMAEFGLVLPRGISQIRAGAAALLDASEDLPEVARQMFRSLLENFRDLDGRVQDLEKRIVAWHRSSQESQRIEQIPGIGPLGATALIASIADIKAFRSGRQLASWLGLAPRQSSSGGKERLLGISKRGDTYLRTLLIHGARSVILAESSKTKAPPNPWILGMLQRKHPNIAAVALANKNARTLWALLAHERNFQPGYVSSLPLAA

SEQ ID NO: 430200 - protein, 430 aa, unidentified
MKKRAYRSVSVKSVKVEEVQEELRTMGGKVGVDIGKDEFLVSLRYDDGSFERPWRAKSQEEQRELVWVLKQLHQVRPLPIGMESTGTYGDALRQALTDSGLDVRRVSNKASSDYAEVFDGVSSQHDAKDAAVIAELVAIGKSRPWPWQAPSPADEELSQWVEWLDIYQQQEVQWLGRLEALLARYWPEATSWLSLGRFTLLRTLAEYGGPAGLLGDKLAAKRLAKWGGPFLSPDTIAGLIQSARDTVGVRMSPLAQDQVKKYATQALRTQEEQRRAEAALARLAKTNQVIQAQATAVGLNTACVLWTTLGDVRDYDSGGAYRKAMGLNLKERSSGRFQGQLKITKRGPGRARRWLYYAAMRECQKPAVKPWYEAKKHRENNHGRKALIAIMRKLALALYQVGARGAKYESRKLFPGGPLQSCQPVPAASG

SEQ ID NO: 430201 - protein, 368 aa, unidentified
MQELITGFVGLDAHAESTAIAVAEVGRAAPRFVGTVGARLSELTKALSKLGAPQSLCVVYEAGPCGYALARELTSLGYRCEVVAPSRIPRRPGERIKTDRRDALNLAGLARAGELVPVTIPDERDEAIRDLSRARVDAVRARLKARQQLKALMLRHGQRYSGKTSWSAAHERYLARVSFAHPAQDIAFTEYRQAVGEGEARVQRLRESLTREVEHWRMHSLVSAVMTLRGLDLVAATTVVAELGDLRRFAHPRELMGYLGLVPSEHTTGSRRRLGAITKTGNGHVRRVLIEAAWNYRFPARISPALQMRQERQPPDIRAIAWRAQLRLNHRYRRLKARGLQHNKICVALARELAAFVWDIGRHVAPSP

SEQ ID NO: 430202 - protein, 267 aa, unidentified
MRTKETSKFFLGIDVSKLTLDISLMCVHDHQKQPIRYCRLDNSAQGMKQLERWLKQNAVLFSEQSMVVIENTGIYHRVLWDFCSKKGLPVYIGNAADIKWSFGIARGKNDKIDSARLCSYAQKHAEDLKASPALDPELIKLKDLMTSRNNLLTNLNSIRVYLKELKGVNNKSTQQTLESAYESALNGLKQSLAAVESELNKLISTNDAFKKTYDLLISIPGIGRLTAVYMICCTANFAGNITGKQLASYAGVVPFEHTSGSSEKPIA

SEQ ID NO: 430203 - protein, 414 aa, unidentified
MALVRWVGRAIGLDVHRDFCVVAICEDGKVRSAGRVPSTPEGLGLLAESLLPTDRVALEVTGSCWEVARLLEPHVQRVVVVSPDDTGISSARAKTDKLDSRTLASLLWKGELDAVWMPDERCRILRRRLARREQLMRTRTRAKNEIQAVLARRLQERPPFADLFGVKGRQWLAGLELPVEERESVDAGLRQIAFMDSEIAAVDRLIAQQALAWPEIRRLMTVSGVNLICAASFLAAIGEPSRFLTSRKLVAYLGLDPKVRQSGEAPARSGRISKRGSASARWALVEAAWSVVKQPGPLRAFYERLRARRGHGKAIVATARKLTVLFWCMLTRSEDYAHQRPALTNKKQRQLELTAGAPARTKAAAGIWSTNRAILHAERALAEQAEVSYKRMVTDQQAGRPSRKVGASATPERA

SEQ ID NO: 430204 - protein, 345 aa, unidentified
MQSMYYIGLDVHKRKISYCVKDSSGKIHSEGSILATRLDLDGWMKTLPQPWTVAMEATVFTGWIYDHLRPHAAALKVAHPLMLRAIAAAKKKNDRIDASKICDCLRCDFLPECYMAPTALRERRRTLRYRNLLVRQMVQTKNKIAVLLMEAGVSYNKQKLHKAGYFSDLIHTNPDIPDGLRPLLHLCRNTVVRLGKTEGALVRSLQRDQLLRERIERLMTIPAVGPITALTWALEVGDVARFSSIKKAISYCGLCAAEKSSAETVKRSPLSKQRNRHLQTTLIEAAKMAPRNSPALAMLYESEKQKHNANRATLAVARKLVTYLMAVDRRQTDFLLMEKQTRTAA

SEQ ID NO: 430205 - protein, 396 aa, unidentified
MKTVCGLDVHKSMILMCILKENGSKVIQEFSTLTRDVESMRGLMKEHGVEEVGMESTGVYWIPIWRILQGHFELKLINPYFIKQLPGRKTDVKDSEWIATTVQKELVRGSYVPGRRIQELRQFERRYVRLCEQSTRIEQEIDRQLHRCNIQLTNYATKIGGTSVIKVVKAIIAGEADPVQLEKHVHGRIKNKHKDKIAAALTGVISHTDRFIFGQNIREYDMILAQQEECLKEMGQYCEKYFQNELLLLCTVPGIQKLSAMIIIAELGADLKAFATAAALTGWAGLRPRNDESAKKIKSHKITKGNKYLRRILVQCAWAASRHKNCWLKTKYEQLCARKSNRKALIAIARKLLVIIWNVLSKQEPYHDFVPKIDPKQRQKKIDYHNKRLQELTVEM

SEQ ID NO: 430206 - protein, 354 aa, unidentified
MVEVAVSNRVVVGGIDTHKDLHVAAVLDLAGIVLGTESFATTRAGYRALLRWMRAYGEVREVGIEGTGSYGAGVTRHLHEAGIASVEVDRPDRSDRRRRGKSDTLDAENAARAVLAGRRTTTPKTKDGLVESLRVLRLTRSTAVKARRAALQLLRNHIVSAPESLRDQVRTLTRMQLIRTCAAWQPETTGFRDPLVATRIALRSLARRILELNDEVADLDDLIKPLVQELAPTLLQATGVGVEVAGQLLVTAGDNPDRLRNEASFAMLCGAAPLPASSGKTQRHRLNRGGDRAANSALHLAVLVRIRTDQRTQAYMTRRTADGLSKLEIIRCLKRYLAREVFALLRADRSPIPA

SEQ ID NO: 430207 - protein, 347 aa, unidentified
MRKVAYLSMDVHARNSVMGDMDGNGNFRGNRSFITCENNIINALKTIKAKKKYLVMEAGPLSYWAAQVANDHVTEVIISDPRENALIYNSSKKRDKVDTQKLCRLLRLGEFKAVYRPENDQRAIFKAAVQHYLDLRDQLIALKQKIKAMYRQWGVIDVFTDSVYSGTGRDKFLKQVKHRPIYLQLQRLYALLDATAAIKQEAQKSLQSLGRNYPEIKEFKKIPGMGTIGAHTFDAYIQTPHRFAKRSRLWKYCRLGVTDRSSDGKPLGYKRLDKSGIGELKALSYRAFISAMKGDNEVKRFYLNSLQRTHDRKHARLNTQRKILSVMLSIWKKGQPYRAELFLDPSI

SEQ ID NO: 430208 - protein, 372 aa, unidentified
MKQNIIHIGLDVDDTQYHGSAFNKGTGEVIDFKSRPTLKGLLQQLDRMARHFKGYKIKLCYEASYIGYCLQRDLISNDVHCDIVSPSSIPSPRGKAIKTDRIDAGYLAQFYANDLLTIVQPPDEEQEQDRDLLRSRQKVMQQRNQLRKHLQSVLRRSGLHYKAETGNKSHWTKHHYCWLVRTIDGLSGSLKVNLELLLSQLKALNEVLTEYGQQIEVLARSPRYQPAVQSLTCYKGIKNIFALTIITEIGDIKRFSHPRKLVSWIGMDIREYSSGGKHNHFGITKHGNRYLRTAIIEANQRGYRTARIGKDVKARRKDIAPELINIADRCLRRLNKKGNRLLLAGKHPNKVKVACAREMVGFVWESLNKAAA

SEQ ID NO: 430209 - protein, 403 aa, unidentified
MEQQSEHVIIGVDPHKLSATIEVVDQREQLLGSGRFTTDRAGYTAMRSYAKTWPDRVWAVEGANGAGRPLAQRLLEDGEQVVDVPAKLSARVRLFDTGHNRKTDAHDAHAVAAVAVRTKNLRVLQLDGELEALRMLTDRREALTRRRVQTVDRLQALLAELLPGQAKRDLTTGQAKTMLASVRPRDIAGKTRRRIAAEELAELIAVEAKIKRSTAELKAIVLARGSRLMDIHGVGPVVAARTLADVGDVTRFADRNRFASWTGTAPLDASSGEQNRHRLSRAGNRRMNHMIHIAAMSQIRLDTDGRVYYRRKRAEGKKSLEAIRCLKRRISDAIYRQLVEDAQRAAVEDLGTGPGGHCGATLQSSAVDLHPHIDTSDQPLPGPADQTLRPSLPAGKRSLEHTG

SEQ ID NO: 430210 - protein, 417 aa, unidentified
MKKHNNCPKKSEPTSKRAKSRGPVQRDPKEVLAELVGKLREKLDPRVVAASAGEEDSRGKVRPNLDRLTVGVDLGDQWSHYCILGLEGERPAEGQLRTTPRDITEFFEALNAARVVVEVGTHSAWVREVICSYGHEVLVANPRLMEGSKRRKRKNDRIEANKLARLGRVDPQSLHPMQHRSREVRQDLVVLRARDALVAARTELINATRGLVKSMGSRLPKCSSPSFAQKVEETVPVELRDALMPVVRMAAALSDCIQGYDEKIEKLGREKYEHTALLRQVKGVGPITSLAYVLTLENPDRFVKSRDVGPYLGLVSKQEDSGESQPQLGISKAGDTMMRRLLVGSAQYILGPFGPDTDLRRYGLRLCERGGKNAKKRAAVAVARKLAVLLHCLWVSGEVYEPLRQGMSATMTPAAAA

SEQ ID NO: 430211 - protein, 359 aa, unidentified
MQTQSKTLDFSGQNIYVGLDVHLRSWKVTIMTDELTHKTFSQPPDSDILHQYLRRNFPGGTYLSAYEAGFCGYWIHNRLLSLGIHSIVVNPADIPTTNKEKVQKNDKRDSQKIAKALRNGDLVPIYVPSSKTIEDRSLVRTRSLLVRDSTRTKNRIKSFLYFHGIKLPSPFENTKTHWSKRFLDWLESIEMKEDTAKQTLSVLISECKKLRATILTVTRSIRKLSQTEAYVEQEKLIRSVPGIGAITAMTMLTEIESISRFSNNDQFHSFVGIIPSTNSSGEEDKVGDISPRGHSILRSAIIESAWKAVGHDPALMKAFHDYCRRMEPNKAIIRIAKKLLDRISFVLKNKQPYTLCVVK

SEQ ID NO: 430212 - protein, 398 aa, unidentified
MLSIGIDVSKGKSTVCGMKPRGEIVYTPFEVQHTREGMSELVSLLRGSGEEVRVVLESTGSYHCPVVAALLENGIFVSVVNSLRMKRFCSQSIRRVKTDQIDAMQIALYGLAYWQELQPTRLPENTYRELQLLARQYYQMTSMLIKAKVDFNAICDQVLPGMQELMSDHAGRHKLSDFVLRYRHTTHILKMGETRFRKDYCKWAEKKGYRNHERMAALIFATAQNGIPVLPNAPSTQIVITEAIRVLHTVEASRDAILTQMQALAKTLPEYSLVREMPCIGDTLAPRLIAEIGDVRRFHSKRALIAYAGIDAPPYQSGKFSANNRHISKRGNRYLRKTGYEVMQSYVMHKPANDPIFTFIEKKRGEGKSGKLAMVAGLNKFLRVYYGKVTELYRSLPQ

SEQ ID NO: 430213 - protein, 338 aa, unidentified
MKVHILGIDLAKNVFQLHGVDRKGRPVLVRRVRREQLLKVLGELEPCLIGIEASTGAFYWQRQFEKLGHAVKIMAPQYVKPFVRRQKNDSNDAEAICTAVQQRNMRFVPKKTLEQQDIQALHRARQRLVNHRTALISQMRGLLLDRGIAIAVSATRARRLIPKILSAANDELTEMMREIVSSLYAFMLQIDEHIKAFDRKIAEIFKASDVCQRIAKIRGIGPKTATAMIAAIGNGSDFKNGRHLAAWLGLVPRQHSSGDRTVMMGITKRGSQHLRTLLVHGARAVVRTAVRKTDSRSVWVNELRQRRGYNRATVAVANKNARVIWAVLTSGEPYRAAA

SEQ ID NO: 430214 - protein, 354 aa, unidentified
MKRTTKYVALDVHQATTVASVRGENGRVIARTILPTEEPALLEFFGGMRGAIHVAFEEGTQAQWLYDLLVRRVARVVVCNRRGEREQGNKGDQVDADELSERLRRGSLRAVYHGSAHRATLKELTRLYRNLVEDSTRVMLRLKALFRARGIKTPGQRVYHPGHRAEWLTQLAERGARLRAEALYAELDVLRKLRPTAKAAMLAEARQDPAWAVLRSVPFFGPVRVALLLAIMQTPWRFRTKRNLWGYAGLAVVTKTTAEYVWEAGRPVRRRRAPLTRGLNRNHNPVLKDVFKGAATAAAARSGPFQDFYHARLAGGLSPELARVTLARKIAAIALRLWKKGERFDPTTLTQPAR

SEQ ID NO: 430215 - protein, 359 aa, unidentified
MHANTVAVDLAKSVFQLAVADRHWRVVERHRLTRAQFERFFVNREVGVVVMEACGSAHYWARRITSLGIEVRLLPARYIRAYVKRNKTDAADADAMLEAARCADIVPVKIKSVEQQALQALHRTRSLWMGTRTSRINALRGFCREFGISIAAGSRLGLEQISRVLADPQSEVPTLLRPTMSSLVEEVRLLEARITELERELSRLAKHSTACETLLSIPGIGLLTATAMVAATSGEVSHFKDARHFAAWFGLTPKEHSSGGTRHLGHISKRGDRYLRMLLTHGARAVLRAATVARRMGRPLDHLRTWALTVQQRSCHNKATCALANKLARICYAVLRDHEPYGATRLNHKLNRMAFEMPA

SEQ ID NO: 430216 - protein, 343 aa, unidentified
MQTVSTIGLDIAKSVFQVHGVDASGLVVIRRQLKRRYVLSFFEKLPPCLVGIEACASSHHWSRELQALGHTVRLMPPAYVKPYVKRQKNDMADAEAICEAVTRTNMRFVPTKTPEQQSGLVLHRTRHLLIRQQTSVINAIRAHLAEFGVIAPGGRKGVEELLRVIADPSDKRVSDVVRACLAALGSQLLGLKRQILDFDRMILAWHRSNPTSKRLNCIPGVGPLLATALVANVADPKVFRSGRNFSAWIGLVPKQHSSGGRAKLGSISKQGDRYLRSLFVAGALAVIRYAKLHGTKYRPWVAALLARRPTKVAAIALANKLARMAWAMMARGERYNYPAGLRV

SEQ ID NO: 430217 - protein, 376 aa, unidentified
MKQFNDIYVGLDVHKDTIAVAVARGLRTKPVYFGEIPNTPAAIAKLPKQLCPDGEVLNFCYEAGPCGYEVYHQLTKLGQSCAVVAPSLIPRMPGVRIKTDRRDALSLAKLHADGSLTAVWVPDKEQEGIRDLSRAREDFKQTETKARQRLGAFLLRNGKIFTGKSKWTVAHWRWMETLTFETPMQHIVMQEYVEALKEASRRLLGMEKQILLAVRGWSLEPVLNSLMAMRGVNTITAVTLLAELGDITRFDNPKQLMSYLGLVPSEHSSGGKRQQGAITKTGNGHVRRVLVEAAWNYRFVARKSRTIEMRAEKTSERVQAIAWEGQKRLCGRYQKLLSLGKLKQKVCTAVAREMVGFVWAIACEASGRVHGSRATA

SEQ ID NO: 430218 - protein, 356 aa, unidentified
MSHDVKYIGMDVHKEAIVIAVLNGSGKQVMETIVETKASSILQFIHGLRGELHVTWEEGTWAAWLYDLLQPQVEEILVCNPRRNALLKEGSKSDKVDARKLADLLRTGMLRPVYHGENGLRTLRELGRSYQTIGKDLTRVMNRLKAVYRGWGIPCAGTRVYAPRYREEWLGKLPQAGVRRRAELLYQQLDGLQALRREVRREFLAESRKHKAAKLLRQIPCIGPIRAGLLIALMQTPHRFRSKRQLWTYSGLGIETHDSAQYRYVGGQLQRSKKPQQIRGLNRNHNHAMKEIFKGAATRASCCTGPFHDFYAALLAKGMKPEMARLTLARKIAAITWTLWKKEERFDAEQLKTQAA

SEQ ID NO: 430219 - protein, 413 aa, unidentified
MKKNSNSQTKSGQKTKPTKARGPVHRDSKEVMAELVAKLSERLEPKNARENATERKPKDVAAPNRDRLTVGVDLGDQWSNYCILGLEGETLAEGQLRTTREDVAEFFRALAAARVIFEVGTHSAWVREVVVGCGHEVLVANPRLMEATKRRKRKNDRIDAHKLARLGRVDPQSLFPMEHRSTEVRQDLVVLRARDTLVQVRTQLINATRGLVKSMGARLPKCSSPSFPKKVEEALPAEVREALLPLVRLAEEVSDRIQVYDQRIEQLGREKYGHTKLLRQVKGVGPLTSLGYVLTLENPDRFGKSRDVGPYLGLVPKQEDSGDSQPQLRISKAGDMMLRRLLVGSAHYILGPFGPDTDLRRYGLRLCERGGKNAKKRAAVAVARKLAVLLHRLWISGEVYEPLRHGAPTAEAA

SEQ ID NO: 430220 - protein, 425 aa, unidentified
MARRKEDHFGPHDVYLGIDVGKSFHWAFALGAGGEVLIDRPLPNRQADVDALVAEAGAGALVVVDQKNNIGSLVVRRCRAAGVDVGYLPGKAMKQARDLFPGTAKTDRIDAEVIARTAMGMRGVVLPVAESDDLGASVSLLSSQLEYATRRATMARNRLHAVLLESDPAFEAACDLRGAWQLSVLAELGGAAGVCAAGKRRYRSLCGRLRARESARDALWEEAVASARSAFHPDAEDALVRSLASEVLAADAEREALQSDIASRLSGDETYRCLLTVPGIGVKTATALVTMVDVSLFPGDDRLASYCGLAPANSQSGTSIDSASSSRSGNKDLKNLLVFTCNSLVGTSNRFGRYYEQCRARGMRHNKALKAVARKRLGVIYAIMRDRVPYVEPASPVENSGQARPAEPQSPAAVENSVKILLTKL

SEQ ID NO: 430221 - protein, 274 aa, unidentified
MEYYVGLDVSLKQTSICVVDQTGSVVRESVVDSDPEAISVYVRSKAPGAVRIGLETGPTSTWLWTELKQLGLPVICIDARHAKAVLKMQINKSDRNDAIGIARIMQTGWFKEVHVKDIDSHSVRALLASRALLVKIKRDLENHVRGLLKNLGLVIGRATFNVFAVRAEELIEHRPELVAAVRPLLEARNAIERQVSELDRKVMKLARRDAQVQRFMTVPGVGPITALAFKATIDDPGRFARSRSVGVYVGLTSRRHASGEIDCAVIYLKQPGFC

SEQ ID NO: 430222 - protein, 353 aa, unidentified
MVLEGTTMEKIVYVGLDVHADTIAIAVADDGRNGEIRFHGVIENTADSVQRPTKRLVAANTRPTFCYEAGPCGYGLHRLISKLGFDCAVVSPAMIPRRTGDRIKTDRRDAEMLARLWRAGELTPVWTPDEEQEAMRDLIRTRKQFLDALKIAKQQLQSFLLRHGLRYNRPTYWTKIHWRWINDLRKFRFPHQQLAFEELKRAIRQIEERISTLDQAIEDAVKDWRFGDLVDALRSLRGVNTTIAATLAAEIGDISRFESPRQLMAWLGLVPSEHSSGNTVRRGRITKTGNALARTMMVEASWSYRHPAREGHPYLKRCQHQPQEIKDIGWKAQTRLCKRYRDLSKPENRNLVF

SEQ ID NO: 430223 - protein, 422 aa, unidentified
MNAQEADVYSIYVGIDWADKKHDVCICPRDSDTREFDVIRHCAEAIDAWVKDLYQRYGGRIAIAVELSKGPIVSALQKYDFIDLFPVNPSTLAKYREAFQPSKAKDDPTDAELAVDLLLRHPEHFKVLKPQSTEMRTLATMVEQRRRLVNDQGRITNRLRSALKQYYPQVLEWFEHIDTPLFCAFVKRWPTLTQARRARANTLKQFFHEHHMYREDVVERRRRAIKSASPLTLDEAVIVPYRMQVLVLVEQLELMLKAIGQFDDEIAKLASQHPDYALFQPLPGAGPSLTPRLMVAFGEQRERFSSAGDIQKLSGIAPVTERSGQKHWVHWRLQCPTFMRQTFVEWAAQTINKSYWASIYYRQQRDKGATYQAAVRSLAFKWIRILYRCWQTGVAYDESRYLKALERRGSPLVKQQKILESA

SEQ ID NO: 430224 - protein, 373 aa, unidentified
MRKRTSSRQNPKPAVKVKRLRQSVTIGMDLGDKNSRYCLLSNEGEIVREGEVATTKAGMTGTFGRIGRARIAIEVGTHSPWVSRLLQSFGHEVIVANPKQVKLITESSRKDDRLDAQTLARLARIDPQLLRPIQHRSEKAQSALMVIRVRAALMAVRTSLVNTVRGLTKSMGERLPKCDADQMGVLQAASLPPKLRQVLEPLLKEVESLTEKIKDSDREIEQIARKDYPETALLQQVGGVGTLIALTFILTIEDKDRFQKSRDIGCYVGLRPRRSDSGQSQPQLRITKEGDPYLRTMLVQGAHYIISRRGPDTDLKRWGLNLAKHGGKRGKKRAVVAVARKLGILLHRLWVTGEVYEPLRNHNVRQEQKKVAA

SEQ ID NO: 430225 - protein, 343 aa, unidentified
MTKIITIGVDLAKNVFQVHGVDASGAVVLRRQLRRVAVEKFFAQLPACLVGMEACGSAHHWARVISRYGHEVKLMPPAYVKPYVKRNKNDGRDAEGICEAVTRPTMRFVAVKSVQQQAALAVHGTRSLLVRQRTMAANALRAALSELGIVAPQGYEGLRELMARLEKPSEEIPEMMRDALLVLARHWQALDADERVLEQQIAKAARCDRDARRLMEAPGVGPIISSTVLAKVPDAKVFRSGRDFAAWIGLTGKDHGTGGKHRPGRISKQGDRVLRALLISGASAYLRQQKARGITDPWLRDLLARRPYKVAMVAFAAKTARIIWAMLVKGEHYRDRASVSAAA

SEQ ID NO: 430226 - protein, 423 aa, unidentified
MIPAVIERCAGIDVGKKFLVACVMTGPAKEMAVAEVRKFGTIRPELEALRKWLQSEGCTHIVMESTGVYWKPVLNVLEDDPEYSPKILLANPQQVKAVTGHKTDPHDARWLAHLLRHAMIRPSFIPSRAIRELRDFTRRRKQMIGAAAQERNRVQKILEDANVKIGDVLTDVFGLSGQLMLEALVKGLDGKEQPSAFDIAQLARGHARKKLDQLRSALEGHQMRNSHRILILHAMRHMAFLAEETDALDQDIVTLLREANLIEAYELLQTIPGIKSQAAATILAESGPDMNQFPTGAKFSSWSGVAPGNNESAGKRKRAPAMKGNPHIKTALVEAAWSAARTKRSEFEDRYRRLAPRIRHKRAIVATAHLLALRVHQVLDSSTAYQPKAGTLTPLAVKRLVRHHTHRVNYFQCWLDNEERGPA

SEQ ID NO: 430227 - protein, 335 aa, unidentified
MQVYGIDLSKEKFDVNFKDLDGKEKRQQVKNKVVSISKFLHTLPCEAVLVAEHTGAYGDLLVYLSNQLNINIALVSGYTIKHSLGLVKGKSDPIDARRIREYGERFFDKLKFKVYDDETIVELKTLYSLRAQLVKARKSLRTGEHGRSQVPMQSIAANKHIKNSLLALDNEIDSLDDEIEHLIKANKATRENYELTISVIGIGPVIGTDLIIKTGNFQIIDTAKKASSYAGVCPFSNTSGKMVGKSKTSPFADKKLKSLLYMGAKSAVKHNQEYRLYYQKKKLEGKPHYLIMNNVSNKILRTIYSVVKSKKPYRQDFICRDPREKNINSSHEKVA

SEQ ID NO: 430228 - protein, 323 aa, unidentified
MEQYVGLDVSQEQTSVCVVDGGGKVIWEGKCTSTPEAIAATIRTRAPEVVRIGLESGPLSAWHWHELHKLGLPVVCLDARHVKAALALQLNKSDRNDARGLAQIVRTGWYREVVVKSVDSHLVRSLLTTRAQLVRRRVDLANQIRGTLKPFGLIAGKGGGRSFAERVRALVAGGPLQEVAGALLAAWQAIGEQIAVLGRRLVAVARQDEAVRRLMTAPGVGVLVALAYVSVVDAPERFAKSSSVGAYIGLTPRRYQSGEADYTGHISRCGDKLLRTDLYEAAGIILHRVSRWSVLKAWGTRLARRIGTRKATVAVARKLSVTC

SEQ ID NO: 430229 - protein, 418 aa, unidentified
MNSMEITAVGIDVSKSKSTVAIRRPGGVIVARPFDISHSNHDLEKLVSILKTTGGDIRVVMEHTSNYWKPIALTLKNAGFYVSVVNAMLIHDFSDNSIRKLKTDRADSLKIANYALTFWNELPPFNDEDETRLVLREQSRMYERLASTATSLRNGLIALADQTFPSIDQAFGHAIKNAEGHEKWVDFFSIYWHRDCVLRLSIEKFTESYRKWCLRRNYKFRTNTAHKLYSLAQDAVPTLPKNNGTKALVLQACKSLNAVYEAKQSTQEEMNRLASLLPEYEVVMQMEGTGPITGPALMAEIGDVRRFKNKKALVAFAGIDAPPFQSGNFESKSRHVSKRGSPHLRRTVFLVANIILTLSHKDNSVFCFMDKKRAEGKHYYVYTIAGSAKFLRIYYARVTEYLRVQERPVAASCPNGNS

SEQ ID NO: 430230 - protein, 364 aa, unidentified
MKKNSRRVMKVAADGQEWTAGIDLGDRWSHYWIGNAQGDTIESGKTKVTAESLSAHFPASRRMRIALETGTHSNWVRTHLESLGHEVIVANARELRAITGSDRKSDPEDARKLALYVRVDRRILRPIQHRSMEAQQDLTILRAREALVRARTLLINAARGLAKTLGHRLPSCHSRHFAARCREALPPALQGSVGKLAEQIESLTQQLEGMKTEIQTVAAERYPETTRLQAVHGVGPITALTYVLTIEDPGRFNKSRDVGSFLGLRPRQSQSGKRDPQLGITKAGDGRLRSLLVECAHLLLRKSAPDCRLKRWGLRLCERGGKNSRKRALVAVARKLGVLLHKLWVTGAEYDPLFGCPEAERSAA

SEQ ID NO: 430231 - protein, 343 aa, unidentified
MAYFAGLDVSVKETSICIVDDAGNIVREARVASEPEALLQVLTKTIYRFKRVGLEAGPLSQWLFSALAEAGLPVICVETRHMRAVLKAQINKTDRNDARGIAQMMRVGLYRPVHVKTLRNQKLRVLLTHRKLLQSKAIAIENDLRATLRNFGLKVGMVGTAKFEARIRELVENLPDLAVLVEPLLIVRRVVREQLGILHRRVLAVVRDDEVCRRLMTIPGVGPVVALTYRVTVDVPARFRNSKTVGAVFGLTPAKYQSGENDRTGAISRCGDEMMRMMLYEAAQSMLVRSAKWSWLKAWAMKIARHRGMKKAIVALARRLAVIMHRMWVDGTEFRWTREVAAA

SEQ ID NO: 430232 - protein, 313 aa, unidentified
MAQIPLFVGIDVSKHRLDVHVHPTGEAFDVTNDRAGLKDLAARLERLDAIQSVCLEATGGLEAPALKRLSQAGLPCRLAAPDEVRAFARLSRQRAKTDRLDAAVIARFASVIEGRPHQPSRQRDRLAGAVRLRGQLVEMAAALKTQLSQMTEAPLVRLAESALRALERRIARVEALIEARISGDAELARRVRLIRSIPGLGKVAAWTLTARMPELGALSPGAAAALLGVAPYDHQSGGGARRKRIRGGRADVRKVIYMAALVAPRWNPALAAFRERLLAKGKPKKLVVVAVMNKLIRIANAVVARGTPWVPDA

SEQ ID NO: 430233 - protein, 423 aa, unidentified
MKIVYPTCCGVDVHKTFFVATIITTEGIEPKYKKRRFSTFNNQILEFKAWLLENGCRDVCMESTGKYWIPVSNLLEDSINVTIANPKWVRAVKGCKDDEKDSKWIGDLFRIGIVPGSFIPSKDVRIIREHTRYRFKLVSCKSSEKNRYQNVFTVCNVALDAVVSDMFGKSASSITDYIVNSDTYDPKHCVSLLQRSLKKKADEVVASIEGFQMEQSQKNRAKMVREHYDYLVDHIRKLDNAIDGLAEPFEPSINLLCTTPGIKRTSAINVLSEIGADMSQFESSKKLCNWAGLAPGNNQSAGKKKSVHITRAGVYLKPALVEIAHAAVSDKKNPYYAIKYERLYKRRGKKRAIIAIARMILTAIYHMLSTGEVWNPIDLNQVDMPPELREKEVQKSLRRAANLLIAHGLVSPDAINTPDSVSA

SEQ ID NO: 430234 - protein, 349 aa, unidentified
MSAKSNSEIAVIGIDIGKNSFHIVGLDRRGAIVLRQKWSRGQVEARLSNLPPCLIGMEACVGAHHLSRKLTSLGHDARLMPAKYVRAYSRGQKNDFRDAEAIAEAVQRPTMKFVATKTAEQLDLQALHRVRERLVRQRTGIINQIRAFLLERGIAVRQGLRFLRAELPRILATPRDVLSPRMVHVIEDLAGDWRRLDQRIEGLSSEIEALARRDVSCERLMSVPGIGPIISSAMVAAIGAGDTFSKGRDFAAWLGLVPKQISTGDRTILGKISKRGNRYLRVLFVQAAWVVLIKPKSWDRHGLKPWLEAAKKRLHHNVLAIALANKLARIAWGVLAHGRAFEAIRIQAA

SEQ ID NO: 430235 - protein, 328 aa, unidentified
MHFFGIDVSSDHLDTVLIDADGTALRPPRRYPNTTRGILRLLADLPEPHSTVVLFECTGVYGKRLEALLPGRVAMLCPANPKVVKNAALSMTATKTDTVDAKAIAEAARCLYQSKREVLDRYNLDEPPNADLECWLTEYDRLRKAMVRLKQQREVLRHHPAAVAKTLRRRYTRDLERLQRQQNEARREIDRLADSEMVRLIASIKGIGTLTAAAVARRIRSIDRFESADKLKAYLGRYPVHKASGKRAGRARMAKHGDRLIRHLLFNCAKSAARWNPACKALYDRLIEKGHNAVYAWNAVMRKLVQIIYGVLKSGTPWNPEFGLTGNG

SEQ ID NO: 430236 - protein, 417 aa, unidentified
MLVGGVAVVLFVGDDWAEDHHDVEVQDHTGRGLGKARLPEGVAGIVRFHELIAGFAGEDTGAEQVLVGIETDRGPWVAALVAAGYRVFAVNPRQVARYRERHGTSGAKSDAGDAHALADMVRTDAHQLRPVAGDTALVEGIKVVARAHQTMIWERHRHMLRLRSSLREYFPAALEAFDDLTAPDTLELLGAAPDPARAARLSRSRITGALKRARRRDVEVKAERVQSMLRVDHLAQPPELVAAYAATTAATVAVITAFTAQIVSLQGQVQACFGRHPDAGIYRSQPGLGEVLGARVLGEFGDDPHRYQGARARKNYAGSAPITRASGKKTVVLARFVRNQRLAGPLQWQAFCALRASPGARGYYDRLRARGAGHQAALRQLSNRLVGILHGCLKTRTCYDEHTAWGHHQPRDQQAAA

SEQ ID NO: 430237 - protein, 411 aa, unidentified
MKLFCGIDWAEAHHDVAIIDVDGQLVAKKRITDDPTGFAELIETLTTAGDSADEPMPVAIETPRGLLVASLRATGRPVYSINPLAVARYRERHSVARAKSDHADAMTLANILRVDAPLHRRLPADTELCQAIAVLARAHQDAIWARTKAHNELRSVLREFFPTFLNMFVSRFPLGIASPEARAVLAIASTPAAAARLSVTRIASALRRAGRSRNIDQTAAEIKAELRKPQLRQPVLVENAMGIQALALLAALDTACTSVEDLGQAAAESFQKHPDYGIITSFPGLADSTGARVLAEIGDDRARFADARALKAYAGSAPITRASGRSISITHRRIKNDRLAAAGWIWAFAAATHCPPAGEHYRRRREHGDRHAAAQRHLFNRLIGQLYHCLQHQQTFDEAKAFKRPISATAA

SEQ ID NO: 430238 - protein, 342 aa, unidentified
MNYTGIDLHKNFSQIHICDEQMKECSIRLNNDETLIRNFFEPLKNNCKVAVEATGNWYWLVDLLQGMDIDVLLANPLQTKAIAYARVKNDPVDAKTLTHLLRTDLLPTCWIPEREQRNNRDMLRARVTLVGIRTLCKNIVRGTLNKFNIKLPFSNIWAGAGRAALEKVSLSIPYCEFINHLLVHIEHLTPQIDYWEKKIHEQIPLAEDAHRLLTVPGIGDIWALTIFYETGPIERFPRAKRYVSYAGLVPKTRGTSDKYWNGHLCKQANMYLKCAYIEVATAALRSRDTDRRMVSYYHRVMKRKGKSVAKVAVARKIATVVYHMLKEKIDYATCMERNKMAG

SEQ ID NO: 430239 - protein, 414 aa, unidentified
MDIVHTHCAGLDVHKKTVAASIIVPDEKNGLQKETRTFGTMTCDLLALSDWLMGYGVTHVAMESTGEYWKPVFNILENNFEVLLVNAQHIKAVPGHKTDVKDSEWIADLLRHGLLKASFIPPLGQRELRELTRYRSTFVRERATLVNRVQKVLESANIKLASVATDVMGVSGRAMLEAIVQGHSSPAEMAELAQKRMRQKRDLLAKALEGRVKPHHRFVLTELLCQIDSLDETIERFNKQIEEYCHPFEEAVVLLDTIPGVGREVAEIIVSEIGIDMSRFPSADALASWAGVAPGNNESAGKRRSGKTTKGNQALSVALNQAAHGASHTKDTYLSAQYRRLAARRGKKRAIMALMHSILVIAYHLIQRSEPYCDLGGDYFDKRRPEATAKHLVKRLEQLGYSVSLQQPAICPVA

SEQ ID NO: 430240 - protein, 409 aa, unidentified
MPTPTIDLAGPVAGIDTHTDTHTVAIVTETGKHLATDTFPTTSNGYQQVTEFLSAYSVVAAGIEGTNSYGAGLTRHLIGHGHVVFEVLRPTRALRRRDGKSDPVDALAAARQVLTGQALSIPKDTTGPVESLRMLQITRHQLVATAAKLLTLIKSLLVTAPVTVRQRYATMTTTTLVMTLSRCRPPADVTDPVNGTLTSLKSLATTYNMLRAQCDELDNKITDLVEVINPAMTQIFGCRAVTAAELLVSLGENPQRIRSQAALAHLWGVAPIPASSGRTNRHRLNRGGDRQANAALHRIVLVRMRHDERTRDYVQRRIKEGLSKKEIMRCLKRAIVREIYQVLCLGRPVRQSSGLRSDEFRALRSKKGLSQTQVAKKLGCAPARISDIETGKRRLSELKLTYEEFLKTA

SEQ ID NO: 430241 - protein, 388 aa, unidentified
MNVVADKSEPLTAIHTDLGAIFVSLELSRSSWLITSLSPGGGEKMSKHSVSGGDFAGLMERFAQLQQKARLRTGQSFRIIVVQEAGLDGFWIHRALQNEGIESHVVDAASIATSRRRRRAKTDKIDGETLVRALLAYKRGEPRVCAMVNVPTPDVEDRRHLCRERKALTAERVRHVNRIKGFLFSQGVSGYQPLRRDRRQRLEELQTGDGRALPQHLKALVNRELDRLELLLKQIKTVEAARDALLAVEQTAKPAPAAMLLDIRGIGPEFAAVLWSEGLFRHFENRRQIAAYAGLAPTPWQSGAVDREQGVSKAGNPRLRTTLIQLAWLWLRNQPRSALSVWFHERVSRNGGRLRKTTIVALARKLLVALWKYVTTGVVIEGVTMKVA

SEQ ID NO: 430242 - protein, 327 aa, unidentified
MQGQERLCHTGPSANAPQVYAGADVCKDWLDVYLHPIGRALRLANSPSGLRQLKRELAGFQPVLVVMEATGKYHRLAQRSLHDSGFAVAVVNPSRPRFFAGALGFQAKTDKIDARMLALYGEAINPRLTPPCPQNLEDLQELVGARSAAVAERIALNNRLGAARTAFLRTELSRLIKKADTHIARLEKEIERLIAADPVLLRRRGIIQSIPGVGPVAAIAMTTGLAEMGSCSNKKITLLAGLAPIADDSGDSSSPRHIKGGRGQVRTAIYMAAVAAARCNSDFKALYRRLIAAGKKPKVALTAIMRKLVVLANTLITENRIWTPVRP

SEQ ID NO: 430243 - protein, 393 aa, unidentified
MFIVGVDIAKRSHEATVIDDNGSKIKKPFNFKNDSSGFHSLLSVLESISLDPDDFIIGMESTSHYWLALYSGLRKKGYTVHVFNPIQSNALREMYIRQVKNDDRDCFVIAEVIRFGRYSEGGMPPSNIYELREMCRARFFMVDAVADLKRKAIALLDQVFPEYETLFTDIFGLTSSELLRNCSTPEEIMAIETDRLCEIISVPSRKRFGMKKAEEIKSLAENSFGIVQEFDAFGCLIKQYMEHIRFSEQQIATLDERIAALYSSFDTYLSTIPGVGPVLGATILSEIGDISRFSSAAKLAAFAGIDPTVKQSGEFVGTRNHMSKRGSPYLRRALWQASTIAVRCDPVLKEFMAKKRAEGKPYMNAVGHVTKKMANIIYAVLRDNKPYYTRNNI

SEQ ID NO: 430244 - protein, 369 aa, unidentified
MAKSTPLYVGLDVHKDSIAVAHATGGRAEPPVFVGEIGTRQADIDKLIRRLQGKAPALRFAYEAGPSGYGLYRYLTGKGLACDVVAPSLIPRRPGDKVKTDKRDAVELARLLRSGDLTAVYVPTEEDEAIRDLCRARDAARVTLKDAKLRLKAFLLRLGRHYVGRADWNAAHKRYLAKVVCPTPAQQIVFQEGVRAVDEQVDRLARIEAELRELAPHWLRYPVVEALQALRGVQWVVALTVVAELGDLTRFDNPRQLAAFVGLVPSEYSSGASRRQGGITKAGNGRARRVLVEAAWAYRHPAKVSLHIQQRIDQLPKALQDLGWKAQVRLCKRFRRLVARGKHPNVVVTAIARELIAFMWAIARAMPHA

SEQ ID NO: 430245 - protein, 429 aa, unidentified
MTTQFISVGIDVGSDFSFMSLALPDQTYIGKPFKIIHEKHDSLENAIEIIKKAEEQHNLKARIVLESTSFYHYPLFYYLTDRSFDTVVINPIISKNSTNMNIRKVHNDKFDSKKLAFIGLNRNLKTSIIPEKAIISLRNLIREYHNLVDERSKKVIKLSGILKISMPEYEHIFSKITTKASLALLEKYPCAKDILAAKKSTIIALIKKTSMSSNSYAKTTYDALKSTAQSAKTFGCYLPSNSLQIRTLIKFIKIYDEAICNIFNEITSLIKENSNKKFIKQIHLLDSIKGIGFISAATLMCEIGDFSVFRSPKQLVAYFGIDPSVIQSGNFKGSEVKMSKRGSSLARRILFIAAISSIGLTRNDVPNNEVLRTYYLEKCKSKPKMVALGAVMHKICFIIFSVLRNEKEFVIITPEEQIANYKQKHNKVA

SEQ ID NO: 430246 - protein, 344 aa, unidentified
MSITMIGLDTAKSVFQIHGVDETGKTEIRRKLARNDLISFFKKHELCTVVLEACGAAHHWARILTGLGHDVKLIAPEAVKPFVKKGKKNDAADAAALCAAASRPDMRFVPAKSLEQQGILALHSARSLLVKQQTMLANAMRGLATEFGLTVPKGIGKLEELAVLVEEDETFPMKARQAFTGLFDQCKALTESIMTFEAEIVAHARHDETARRLATIPGIGPITASLIAATVGDISMFKSARHFAAWLGLVPRQHSTGGKTRLGRITKTGNREIRKLLVLGATSMVYRAPQWNSAAGLWFRGVLERRPVRLATVALANKMARIAWALMTRNEVYQAKGRVAAAAA

SEQ ID NO: 430247 - protein, 355 aa, unidentified
MSQEKYIGMDVHQATISVAVLDSRGKLIMGSILETKAATILEFLQGLHGSLSVTFEEGTSAAWLHDLVKPHVTRLVVCDPRKNALLKDGSKSDRIDARKLAELLRGNQLTSVYHGEHGMRTLKELGRSYLTITKDLTRVMSRIKALYRSWAIACSGTSVYAPRHRAEWLGKIPEPGVRLRAERLYQQLDLLQPVRQQARRDLLTESRKHHAVKLLRQIPSIGPIRAALLVAQLQTPHRFRTKRQLWAYSGFALETHDSGEYRYVRGKLQRNRERMTVRGLSNNHNPEVKNLFKGAAISASTHPGPLYDFYLALLEKGMRPTMARLTLARKIASITLTIWKKGADFDATQLHRQEA

SEQ ID NO: 430248 - protein, 345 aa, unidentified
MEHYAGIDVSLESASICIVDDKGSIVREGKVASEPAALVKWLKDVGVELTRIGLEAGPLSQWLFAGMAKAGLPVELLEARHVRAAFRTMPVKSDRKDARGIAQLMRVGWFRPVHCKSLPAQAVRALLTARKLMQSKQHDVELSLRGILRNFGLKLGKTTPRTFEGRIRELVAGQPILQAVADALLAARAVLARQFASLDELIHKTARHDARVKLMMSAPGVGSIVGMAYVAAIDDPTRFRSSKGVGAHFGLTPRKYQSGETDVTGRISKTGDAGVRALLFEAAHIVLTKPVKHAGALKRWAMAIARRAGQRKAKVALARRLAVILHRMWVSGTPFDASKTAASAA

SEQ ID NO: 430249 - protein, 394 aa, unidentified
MKLVGIDVGKNSHHFCVMDKETGEFNVTPSSFPNNKEGFDFLINSLKPYSKKSILTGMEDTGHYHVALLKFLLSNGYTVALITPKTTDLTRKMEGGITKNDKLDTITICDVLDTPERKKQYRITKVDRFDLYEQRQLTRHHHNLKEELNVYCNRLQKSIDLVFPEFNTLFSSKYSIVYMNLLKTFGSAEAIASTDIRTIRKCFEIKGRGNRISLTPEKLKECAKNSIGISSEVETIQIKHLVSQITLIKEQIAEIDKKIEEFSITNNSPILSIPGISHFSGTSILAELGDIGNYSKPSQIIKFAGVAPYHYESSQYNAQHTGITKKGSKYLRKTLYQIILTVINNNPVFKKYYLLKISQGKGHRCAQGHCIRKLLRIIYHLLETGQSFDPALLR

SEQ ID NO: 430250 - protein, 387 aa, unidentified
MDPILECCCGLDVHKDMIEACIIQGFENPKKLQQQFLTTPAELQRFNEWLSAADCRYVAMESTGVYWRPVYESIESYFGGDCFLLVANAHQMRNLPGRKSDVKDAEWIATLFQHGLLDPSFVPERTIRDLREFSRTYKNAVSERSRCINRLEKFLQTHGFKLSSVLSDITNDSGIRILTTLSEKGSLSVDDVEKARSRNTKHSATEIQSAVCGRLTADERFLLADFLEQYQVISRHIEKILNKMKSMVEPYQKLIEQMDSIVGIDITASILILAEISDKPQAYFANSAKLCSWAGLSPRNDQSAGKIKSKKIMPGNPYLKSVLCQCARIAVRARKNNFSVWYWSHRAKVGDKKCIIAVSRKMLSTIYYLFANNVFYNTDVALSHLRI

SEQ ID NO: 430251 - protein, 355 aa, unidentified
MRSTAIQYVGIDVHQATLVCVVKDEAGQTTIESKVATRREAIESFVRGLGGRVRIAFEEGTQAQWLYELLRPISERVIVCDPRKIATKGNKDDQRDAERLCELLRLNALQPVYHDHADQKLKELVRCYEALVDDSLRVMLRIRAIYRSRAITVKARSVYHPARRSEWLEQITDGGGHFRAEQLYIQLDHLLELRRRARTMVLRQACNQRAYRLLRTVPGIGPLRAAEIIAIIGDPHRFRTKRQLWAYAGLGVITRSSGEWIADSRTGRIRRSSRPPLTRGLNPNFNRPLKKIFKMAAHDVTGRPGELDQRYERMIARGMRPEMAYLTLARKIAAIVLAVWKKGVSFDPRLIAQSV

SEQ ID NO: 430252 - protein, 326 aa, unidentified
MQGKEASEQDTKGKSNAGIDVSKSWLDAHVLPAGATLRVANTREGIRKLKRWLMPFDVALVVIEATGKWHRDVRRSLHAAMVPVAVVDPFRVRMFAKACGVLAKTDRLDARVLAQFAAVMAPAVRAPASEVMEELAELVTARASAVAEQTALKNQLSTATGTFLKRQLGRRIQRLAKDIAALEREILKCIQADQGLARRYAILTSITGFGPVVATTLIACLAELGTCSRKQIGMLAGLAPVADESGQRQGIRVVWGGRPNIRRVLYLAAITAARFDPDMKAFFNRLIAAGKPAKLAIIAVARKLVVLANILISEGRMWQPHSPKHA

SEQ ID NO: 430253 - protein, 373 aa, unidentified
MPKYSTAFGMDVHLRSTTVCALDADTGEAVTRRFPGNPWGEIAGWMDGFPGPSLAAYESGYLGFAPQRELAGLGVECVVAAVSKIPRSAADSASKNDRNDAARMAKAILAHDISPAWVPSPEVEGIRDLAGAYDGATARLATAKQRLLAFLARRGFVYGGTTPAGNPRKYWTYDFLRWLDKVRPEDDGGVRALAALRNEVEAAAEARADLLSEYRAAVDAGPIAAEVAALQSIKGCAFALAAAFSAEVGDFTRFRSGRQVTAYFGLAPSQRSSGDSVRLGGISGAGNALVRKLAVEGSWCYAAARHQPKLMPRDTGVPLEIRMHGRKGSERLLRRREEMLARGMPAAKANAATAAELVRWLWALGMMCREGAE

SEQ ID NO: 430254 - protein, 353 aa, unidentified
MHTHQNSSNPVATIGVDIGKNTFHLVGLDKRGAIVLRTKVSRSQLERRLANVPCCLVGLEAGCGSHHIARQIRALGHDARLIPAQYVKPFLKGHKNDYRDAEAIAEAVQRPTMNFVAIKTSEQSDLLSLHRVRSRLVGQRTAVINQIRGFLIERGITVRQGPAPLRKALPAILSSPADVLSPRMVHLIADLSEDWRRLDERIQVVSTEIETLAENDGSCQRLMTVPGVGPIISSAVVAAIGNGSGFSQGRDFGAWLGLVPKQESTGDRTKLGKISKRGNKYLRTLFVQAAHVVLVRRPAAAMLGLWPWIERAAKRLAHRNLLAIALANKLARIAWAVLARGRDYEPRITTNAA

SEQ ID NO: 430255 - protein, 416 aa, unidentified
MKRERKTREVRYMGLDIHKHYITVGGMNAEQEIVLRPRDVVMERFKTWAESNLRKTDEVVLEATTNTWDVYDTIVSLVKRVVVAHPAEVKQIANARVKTDHQDVIRLVRLLIAELVPEVWVPPLEVRELRAMISYRWRLVKMATAIQNRMHSLLHRHNIQAPDGKIDVGANRAWWEQLQLSALETLRLKQELKTLRMVREHIVDVEKELGRLSTSERWGSQTVRVMQLPGVGVIVTMTILSAIGDIRRFESPKKLVGYAGMGAGVHDSGQKHREKGITKFGRKELRWALVEASWQAVRSNPRWRAQYDELCKRKHPNQAIVAIARKLLVTLWYLLSKQESYTGLSDEDLAYKMLTWAWHLDRRALNGMSNQQFAKYGLIQLGRGEHLTRIVKGGQPRRIAAKEEVLALKPELYLKQ

SEQ ID NO: 430256 - protein, 337 aa, unidentified
MYTLYVGIDIAAERAMVAWQVADTGEWGTLEIAQQRSDYARLARQLRQHATPAQTLVVMEATGLYWLALADYLYEQGFVVSVLNPLQARRFAQLQQQHAKTDVIDAHLLARYARQLQPAPWTPPPAIYYQLQQRLSYRQDLVEMRTQQRNRLHALKHNPHAEPAIEQRLRRHLEYLDNEIKALDAELKALLTQNHPWAEAARRLRTLKGFGLITIAWLLVATQCFAFCQTPEQAAAFAGLVPYPRHSGSSLRAKRSVGRAGHSPLRTALYMATLAAARYNPSAKTFYQRLLARHKPNKVARVAVARKLIHIAWAMVVKERDFDPDYALSCSTMPIPT

SEQ ID NO: 430257 - protein, 349 aa, unidentified
MTEQRRFYAGECVYVGVDVHKETYTVTCVCHKQIVKTATVQAEPAGLAASLLRWFPGATLYSAYEAGFSAFVLHRVLTTAGITNIVVNPASIAVAANDKVKTDRRDAKKLAIDLADGRLRGISIPTEAEELARLLPRTRAQIVEHRATIARQIKAKLHQFGLIAPSSRRMISHRYLREIAAWSLAPELRVRLTLLAEQWRFATRQLIEIRRLLQEQAAAQAELEKVYRSVPGIGAVVARTLATELGDMTRFANERALFSYTGLTPSAYSSGASVRRGHMSRQGSGRVRHLLIETAWRALPRDRVLQEIFDRIAATRGKKRAIVAIARRLTGRIRACFRQGTTYAVGTYA

SEQ ID NO: 430258 - protein, 447 aa, unidentified
MVPDGRQVEVDEHEQIVERVAAIDVAKASGMVCTRVPHPTTAGKRLTRVWEVAATTNAIIELADQLAGQGIERVVVESTSDYWRGFVYLLEARGLSVWLVNARDVKQVPGRPKTDKLDAVWLAKLNERGMLRPSFIPPAEIRQLRDYTRLRSDLTQERARHVQRLEKLLEDALIKLSTVATDIMGASGRDMVEALIAGQRDPKVLAELARGRMRGKRAALVQALTGRFNDHHAELARMLLDQIDALGVQIDRLTSRIEELIGAIPAAQPPSEKASHTGEDTYQPALPAVSRLDEVPGIGVKAAQVIIAEVGLDMGQFPTPAHLVSWAKLSPRTIQSGATHRAGTTGKGNPYLKGVLGGAAAAAAKTNTFLGERYRRLVKRRGKLKALVAVARSILVIVWHLLADPTARFHDLGADFYTNRTDTDRKTRNHIRQLQALGFTVTLTPAA

SEQ ID NO: 430259 - protein, 405 aa, unidentified
MNAVGIDVSKGKSMVTILRPFGEIVSSPHEVRHTSDQIDDLIAKIRSLQGDTRIVLEYTGRYHEPIARWLTDAGLFVSAINPKLIKDFDNDSLRKVKTDKADSVKIARYTLDKWHKLKQYGFMDELRNQLKTMNRQFGYYTKLKTAMKNNLISLLDQTFPGANTFFDSPARSDGSQKWVDFVDTYWHVDRIRSMSLSAFTEHYQKWCKRKGYNFQPDKPEEIYDSIRNIIPVLPKDDVTKFIVRQAVTQVNTASAAVEELRTRMNDIASQLPEYPVVLAMKGVGTSLGPQLMAEIGDVTRFEHKGALTAFAGVDPGKNDSGTYSQKSVRTSKRGSASLRKTLFRVMDCLIKTMPQDDPVYAFMNKKRSQGKPYYVYMTAGSNKFLRVYYGRVKEYLSGLSEMAEK

SEQ ID NO: 430260 - protein, 413 aa, unidentified
MDVLHPRCCGLDVHKSSISACILLREAGRVQKHQRRFGAMTQELQELAEWLRQFGVTQVAMESSGVYWKPVWNILEGQFKVVLANAQHIKNVPGRKTDQKDAEWIAQLLQYGLLRASYIPCEIIRDLRDLTRMRACLSQEASRISSRIQKVLEDANVKLASVATNVLGKSGRAMLEDIITGEDDPEHLASLALGHLRVKIPQLRLALEGKIRSHHRFLLRRLLDQVQFVEHEIALLDERLEDIGGQRPELAQAVERWDTIPGVDRVAAWALLAEIGDNMAQFPTAEHLASWAALCPGNHESAGKRLRGATRQGSPWLCRMACQCAWAAARTKNTYLTSQFRRLAARRGKKRAIIAVAHTLIVIGYHLHKNQSNYEDLGGNYFDRIHSDGLKRYLVKRLEQLGHKVTLEPIEAA

SEQ ID NO: 430261 - protein, 313 aa, unidentified
MCLHVSSNDRNGPRLRGCRWKKLLHEVASCISVGTGEDEKEARRCMSPRLPTFAKNKGAKVGQPAILDFIQGLRGTLHLTFEEGTHSAWLYDLLARRVARVVVCNPRQNALLKAGNKSDRSDARKLAELLRAGLLSPVYHGESSTRTLQELVRSYAALTEDTTRVMGRVKALYRSQAIACAGKKPYGRRHRPEWLSKLSQPGLHRRAERLYEELDALQGLRRAAKRELVMESRKHAAAKLLRTVPLLGAIRAAWLIGRVQTPHRFRTKRQFWAYCGLALETRSSADYRFQDGQLVRAKKPVFIRDSTATTITI

SEQ ID NO: 430262 - protein, 373 aa, unidentified
MKKRSNSQPSQKRTMKAKRTQESVTIGADLGDRSSRYCMLSGDGEILREGQVPTTKAGMTATFGSWGRVRIAIEVGTHSPWVSRLLAGLGHEVIVANPRQVKLITESTRKDDRLDAQTLARLARIDPQLLRPIQHRSEKAQTALMVIRVRAALLAVRTSLVNTARGLAKAMGERLPKCDADQMGVLKAESVPAKLRPLREPLLKEVESLTEKIKDSDREIEQIAREDYPETELLQQVGGVGPLIALSFVLTVDDKNRFQKSRDIGCYVGLRPRRSDSGQRQPQLRITKEGDPYLRTMLVQGAHYILSRRGPDTDLKRWGLRLAERGGKRGKKKAIVAVARKLGILLHRLWVTGEVYEPLRNQNLRELQKKVAA

SEQ ID NO: 430263 - protein, 326 aa, unidentified
MDYFAGLDVSVKDTSVCIVDGTSQIVREAKVASEPDALLQIMRNPAYCFKRIGLEAGPLSQWLFSALGEANLPVICVETRHMRAVLKAQINKTDRNDARGIAQMMRVGLYRPVHVKTLRSQKLRMLLTHRKLLQSKAIAIENELRGTLRNFGLKVGMTGWTRFAARIEELVADMPDLAVLVEPLLVVRRVLREQIAVLHRRLLTIVRDDEVCRRLMTIPGVGPVVALTYRATVDVPARFRKSKSVGAVFGLTCSRDQSGERDRPGAISRCGDEMMRAMLYEAAQAMLLRSAKWSWLKAWAMQIAKRRGMKRAIIALARLHSHSCIL

SEQ ID NO: 430264 - protein, 326 aa, unidentified
MQCFLGIDVSKAKLDVALLLANGKFKSKQFANHAAGFAALVQWLLGHVPDGHAWAHACMEATGSYHEALACFLSDQGLVVSVVNPLLVKRFAEANRLRNKTDGGDAKCLAQFCQTSRPERWQAPSISVRALQALVARLDALQAMRQAECNRLEVAHSAVAGSVRQVINDLDGAIAQVKAQIASTIDDDPDLKKRAGLLHSIPGLGDKTIPQLLAYIGRPERFKSVKALMAYAALTPLIRQSGTSLDSRRGTHPMGHQELKRSLYFPAMVAARYNPLVAAFWNRLKAQNKPGKVVVVACMHKLLAIAYGVLRSGKPFDPNHLKQITT

SEQ ID NO: 430265 - protein, 354 aa, unidentified
MLIIGCDYHPSFQQIALVDTDTGEFQERRLEHSEEAEKFYRGLGGQGMKVRVGMEASGQAHWFERLLGELKFELWIGDATEIARKRERKQKTDRQDAQHILRLMLKDDFPQIWIPSWENRDLRQLLWHRHRMVQARTRIMNQLQAVALNEGVRCKKRLWREKGREQLESFRLAPWASRRRHDLLELLDRLNPRIAALSQAIEQEVEKCPEAQRLQTHPGVGPLTALAFVLIIGKPDRFQCGKQIASYLGLVPLEDSSGNRRRLGHITKQGNSLLRFLLVEAAQVTARSLPEWRSKYVHLTMRRGRKIAKVAMARKLAVRLYWMMRKEWDYEQLKKFGSHAGQPEHRDGVKQNIE

SEQ ID NO: 430266 - protein, 317 aa, unidentified
MSLPTASFVGIDVSKQQLEVAVRPSGETWSVAHDEAGLSALVAQLRALAPALIVLEATGGWEVALASALAAGPLPVVVINPRQVRDFARSTGTLAKTDRLDAQILAQFAEVIRPQPRALPDAQAQELAALLQRRRQLVEMLTAEKNRLTLASRRIRPQLQAHIEWLHKQIAQFDEDLRQLIRASPLWREKDDLLRSAPGVGPVLATTLVAALPELGTLTRRQIAALVGVAPLNRDSGTLRGRRSIWGGRAQVRAVLYMSTVVAMRHNPVVAAFYQRLRAAGKAPKLALTACMRKLLTILNAMLKHHTRWAPVLAQHA

SEQ ID NO: 430267 - protein, 374 aa, unidentified
MKNVSIFVGLDVHKESIDIALVEDDRNSAVRYFGTIGGDLADLEKAVKKIRKAHPEVSLHFVYEAGPCGYGIYRYLTKAGHECMVVAPSMIPKRSGSRIKTDRRDSIMLASLHRAGELAPVYVPREEDEAMRDLVRGRQDAVKAGRVSKQQLKGFLLRHGIKFTGKGDWKQTHMIWLAGLAMPIPAQQIVLQEYINTVKDCTARIARLTSQIQEVLPSWELAPVVRALQAMRGVSLQVSVTTVAELGDLKRFDNPRKLMSYLGLVPSEHSSGGSRRTGSITKAGNGHVRKALVEAAQTYRLKARIGKELLARQEGLPKQICDIAWKAQIRLCSRFRKMEARGKKHQTIICAIARELCAFMWAIAKEVKPITACN

SEQ ID NO: 430268 - protein, 438 aa, unidentified
MHRIGYVQKRALVAGLAVLGIDPGKEKHVGQLLNPEGLPLGKAFTVPVSHAGYTETLWKELATRLPAHDPAHLVIAIETACNLWNTLAAYLHDQGYTVLLVSPLTTHHARPLHNHDFSRTDPRDAFLIAEQAYRGHFDAYRVFDDQLETMHQLSLAYYKLAKDKQRVRQRLRSLMEMYFPEYLQAFDLESKTSLYLLERAFLPHHFLEMDLQTEARQIGARSRQKHGLKTLQRLQAWAATSIGVPARPREEALRLVLDGWLAELRTLHAQIAQLQKVLIQQAQSLPVFQILVSIPNLAPWLVALFIAECRGLDANTHYKQIEKFAGTNLRLADSGNYNGPRRISRLGNRRLRKVLFQMTVQTAKVVPQVRRRFLQRQLQKGAYRKSIIAASSQLLRLIHALIKENRIYQPVRKWNRQLAPLEKAYAEKKAAAKLRAAA

SEQ ID NO: 430269 - protein, 458 aa, unidentified
MNERQSSGTKKKGSGTRDMRVWEQVNENAAGVDAGAESHFVAVPEGSCKGPTERKFSTITRGLYELADWLAECGVTSVAVEATGVYCTPLLEVLDGRGFDVVLAKPSSLKSVNERQKTDMKDCRWIQVLHTFGLLRASYRPTQEVAEYRTYNRHRQDLIGQASTAIAHMQKALTSMNVRLDQAVSDVTGKTGMAIIRAILADERDPQVLASMRDERCAKSEAAIAESLTGKWADHYLFELDHAVKTWDHLQALIAECNRKLEEHAAKFTKKASRQSIPAPRRIEHVRKNVLNFQAREMFFEVFGQDLTQIDGISTGTLSVLLAEIGPNVDAFKSEKHFASWLRACPGMNQSGGKNRSGKNRQTTNRLWTALRIAAQTLSSSKSALGTFYRRKRAHLGPEKAIHAAAHKLARMIYFTIKHQRPYVDPGPDHYLEKHRNTILKTMEKRARQLGYTLVKAA

SEQ ID NO: 430270 - protein, 347 aa, unidentified
MKHYAGIDVSLNSSNVCVVDESGKVVREVKVPSEPVALIRCIKSLGVRVERIGLEAGPLSQWLYGALRESGLPVELLETRHVKAALSAMPVKTDRNDARGLAQLMRLGWFRPVHCKSMAAQEVRALLTARKLVQSKLYDIEMSLRGILRGFGLKVGPTTSRSFAARINHLTADHPSLEMVAEALLSTHAAALCAFKNLEKNVRQISRADTRVRLLMSTPGVGPVVALTYVSAIDDPKRFTSSKPVGAHFGLTPKKYQSGETDINGRISKVGDSSVRAVLYEAAHIILTRPIHGGALKSWAMRLAKRAGMKKAKVALARKLAVVLHRMWVSASTFDFEKANRCTRAAA

SEQ ID NO: 430271 - protein, 353 aa, unidentified
MTSEKYIGLDVHQATISVAVLDSSGKLVMESILETSAATILQFFAGLRGRLLVTFEEGTWAAWLYDLLKPHVAEVLVCNPRKLQNQGNKSDRIDARKLAEWLRGGQLKPVYHGENGVRMLRELARSYLATVKDVTRVMDRLKAVYRSWAIPYEGRDVYSARHRAQWLAKIPHAGPRRRAELLYQQLDALEPIRKQAKRELLQESRRHTATGRMLQIPYVGPIRAALLVAIIQTPHRFRTKRQLWAYGGLALETRISGEYRYAKGQLQRSKKRLAIRGLNKDHNHDLKGLLKSTAMQASTRPGPLRDFYQALLAKGMKPTMARLTLARKIAAMVLVLWKEGASFDAEKLKSQAA

SEQ ID NO: 430272 - protein, 381 aa, unidentified
MKNTIVHDEGAASLEAAVKKVKLSGSIIKIGLDVHARLYVAVAQYDCLLPKPVRRLGPSEFVPWVKQLLRAGHTVHVVYEACGFGFGLYRELKAAGAHCYVIAPRKLDEQCTRVKTDPRDATTLCQRLSRYLDGNTRELAVIRVPTEGEEQARHVSRQREQLVCLRQKLEAQGRSLLVNHSLPSPAHWWKNQTWSRLLKLLPGWICLRLEVHRPVLLGLEQQIGVLSAQLEATAPADVPAGVGKLTTVIMTREICSWERFTNRRAISSYTGLCPGEHSSGSKRVPGSVTKRGNPRLRAALVECAWRMVRFQPNYPPVKKRLAILAKGAHATGAQRKKAIVAVARHLAVDLWRVHTGRCSAAQLGLKTAETLIVRGEQKAIF

SEQ ID NO: 430273 - protein, 288 aa, unidentified
MGTPSYEGKQVYMGLDVHREFFVASCICDGVVVKRCRMPGTAEAVISLVSKEFSGASVRAAYEAGYSGFWLYRKLVAVGIDCIVVHAASIEVSSRDTVKTDKRDSLKIAQQLAAGRLRGVRVPTEEAEQRRLLTRTREQLMNKKRRVMVQIRMRLHYFGRFPESIQRRVKLQDVEDILVGLEGELQRTIGMLRDEWVELAKRIKEIDRLLVEQAKEDPLDAVYRSVPGVGPLISRILSAELGDMSQFRNERALFSFTGLTPSEYSSGGHICRGAHFSPRQHSIATHVG

SEQ ID NO: 430274 - protein, 413 aa, unidentified
MGRAARRLHPSFAVADPIVEQLMSKLNDLSRSLVPLNPDTTLIAVIEMSQSSWLVAGIVPGIERQPLKKLDVDKDALLKLLHRWRDEAVRAGRDITRIAVAYEAGRDGFWLARWLRAQDIEAHVIHASSVAVSREHRRAKTDRLDTELLKRSFLGWLRGERDHCNVVAIPTLEQEDAKRPNRERESLVAEHSRIVNRMKSVFALLGIRGFNPKLKSAADRLQSLRTPEGEPIPPHAIAALKRDMERRQLIRDQIRQIEQTRLESLQLTPKTGPHAMVCLLASVVGLGVGTADMLVHEVFARNMRDRRAVARYSGLTGSPDESGAKRREKGLSRSGNARVRRGMVELAWRFLRFQKDSALAQWFRTRTEHAHSTRKTMIVAMARKLIIALWHFAKEGVVPDGVVLRSPNLRPAR

SEQ ID NO: 430275 - protein, 403 aa, unidentified
MNNVVGIDVSKGKSMVSVLRPFGEVVAKPFSVGHTGSELKELADYLKSLDGETRVVMEHTGRYYEPVARFLHDEGVFVSAVNPKLIKDYGNNTLRKVKTDKADSRKIARYGIDNWAELRQHTPMDTIRMQLKTLNRQQSLYSKTKTMMKNNLIALLDQTYPGVNALFDSPVREDGSQKWVDFATTFWHVDCVRNMSLTAFAERYRKWCKRHGYNFSQSKAVEVHAGAQDLIAMLPRDALTKTMVRQAIDALNAISASLERLKAEMQALAAQLPEYPVVMAMHGVGDSLGPQLMAELGDVTRFTHRNAITAFAGVDPGADQSGTHEAKSTRVSKSGPPELRRALFLVMDCLLKTQPQDDPVYRFMDKKRAEGKPYLVYMTAGANKFLRIYYGRVKEYLASLEGN

SEQ ID NO: 430276 - protein, 354 aa, unidentified
MNTTQNSTKSKIVKVIGVDLAKDHCDVIGYDENGKICLRLDGCSYAKLREILSNLPQAVVLMEACKGSMFHARSIADLGHEVRLVKGADVKALRNINHKNDLRDAAYIAKLYFVPGTTYVYIKSQQQQSLQFLQNEYKSLQELRIQAGNQIHAGLEEFGCPVRKSSKFIKTRMVAHLEKHAELIPEDVMASFKRRREIWLNLLQQEEEAKRRLEQVAATDANAKRIMTVPCVGPQTAVGLLVHVGVDFGRFKNSRQFAASLGLVPKQNSTGGNNTLNHITKCGPKSLRSNLVQCAQLVLMYAEKWKGNFGDWVRKMRDSGKKHGVIVCAIAAKLARIIYRLMKDKVDYTPILSC

SEQ ID NO: 430277 - protein, 337 aa, unidentified
MNKMIIGIDVSKNDLDVAFWQNDKSFFLGKYPNNQNGFQTIFKDVETKRQKYNADTVLAVMEPTGGYEQHFAYFAFSKCWEVSLPNPGNVRNWIKGIGKRAKTDKQDAMMLAHFGAVQQQHLWKPLPDDVAELESMLDRLDDLNEILRSEQNRLESQQNRQICHQLSQKSIQDNITYLQKQIEILDDAIKNHIDTHTHLKEQVKNLKTVPGVGNKISPHLLVAMHRFGVLTDGNGTNKAIVAYYGLDPQPHESGKSVYKRPNISRQGDRHIRHLLYMGALGGIRGNNPLQAFYQRLLGRGKKAKVAIVASARKIIVWCWAVFRQGCSFDFSRFGYVR

SEQ ID NO: 430278 - protein, 440 aa, unidentified
MLQALPMLDPLAAFVDVGSEHMHVSVGGNRPAVFGTVTSQLHALRDWLLAQGVHSVAMEATGVYWLPLYGVLESAGLEVRMVNGRQTRNLPGRKTDMADSQWGATLHMHGLLHAGFVPPADIRRLQDYLRLRADHVAAAATCVQLMQKAFERMNIKLHDVISSLAGVSGLAVARAIVAGERSPEALVALCDVQIRRKKAQAVIEALRGSWADEHIFALAQALQSWDHYQKLIAECDARIATVLPPHDDTQPPLPRTTRQSSVNAPDIARLREILAQMCGGRDLTKLPALSSYGVLQLIGEVGTDLSAWPTEKHFTAWTGLAPGSHDSGKRRKGVRRGRNRTGRLFCMMAQSLIRSRDIALGGFYRRLAARRGGLVATKALARKLAAWFWRVMVKGDDYVEQGLARYEEQVRQSKERALKRLARELGRELVPLSAVDHATA

SEQ ID NO: 430279 - protein, 352 aa, unidentified
MRKKCSTVSFKSQVIYCGIDVHKKSWKVCTRHCGMQLDNFSMNPDPQKLTEYLKRNYPEAEYRSVYEAGFSGFEAHRTLCNLGVKNIVINPADVPTSGRERNYKNDSIDSRKLARELENGSLIGIYIPERENLILRDLTRRKEQVTGNITRIKNRIHSHLNFNGVEFRGWSGSSLKMMESEAEKRFDFALLSALRELRFHREERLRVIRSEHDCLKRLKREEIQKHLESIPGIGFDTAVVLQAELWDMKRFKGKDQLNSYVGLAPHLVGSGEHETVKSSGNRKKKLLHSRLIEAAWRAVRFNREYSAKYGAMIGKGICPQKAISIVAKKLLLSIRAVWLQNREYQVLLPKTK

SEQ ID NO: 430280 - protein, 385 aa, unidentified
MQKLNDLSRSPSPLDPDGTLIAVIELSLSSWLVAGIVPGVERQPLKKLAVDESALLKLLHRWREEAAKAGHRIKRIAVAFEAGRDGFWLARWLSARDIEAHVIHASSVAVSREHRRAKTDRLDTELLKRSFLGWLRGERDHCKMVAIPTTKDEDAKRPNREHESLVREQSRIVNRMKAALIRLGIRGFNPKLKKAAERLDGLRTPEGEPIPPNTLAELRRDMVRRRLVSDQIRQIEDARLERLKQAPSDGPHAMVRLLARVIGVGVETADMLVQEVLSRSMRDRRAVARYAGLTGSPDESGRKRREKGLTRSGNARVRRGMIQLAWRFLMFQKDSTLAQWFRARTESARGTRKTMIVALARKLLIALWRLVREGVVPDGVVLRPA

SEQ ID NO: 430281 - protein, 370 aa, unidentified
MQFIGIDLHTNKFTCSYRDEDSPPDARKGKRTETFELTGQGFAAFYGTLTDETYVLVEATITTFAFVRLIQPLVKEVIVANTYELKQISLARVNTDKIDANILSRIIKMQVLGREHAVSPVVVPPVEIQELRGLFTTYRLYRKQTTQIKNRIHSLLKEKLYGFTQEEIFDRKSREKIRNRENGSALSFQLNELFDLLEFTEARIEPLKGQIMAQAEPYMREIEILTSMKGVSVFIATAVIADIIEVNRFKNSKTFTSYLRSAPRVSNSNTSVSIKGTNKKGRKMSATLLTQSLNHVLNASPKLNRWYMRLTKYKKAGLVRTGLRRRVFAEMYQMLKKGEYHYARDEQNHDAKLLQYRRFLKKRKNLLETA

SEQ ID NO: 430282 - protein, 356 aa, unidentified
MLYLGIDQHARQITISLRDDHGDILLARQVSTHPEKVNAFFQQLTRERLRDGEPFVAVLEVCGFNDWLIRMLQDYRCHRVILIQPEDRKKCKTDRRDAAALSELLWVNRERLLEGQPVRGVRQVEIASPTDQEDRRLTTLRKDAGGARTRLINKVKQILRRHNLQWQMPTKTFPTVAAVAWLKGLALPEIDRLEMDHLLADLEQAEKRLKDLGRVIARRCAASEGVKVLSSMPGAGGGFTALALACRVGRVERFPRARSLANYWGLTPGCRNSGESDQRLGRITKAGSPTARWLLAQLVHKVLRRDARLREWFRRVKRRRGPTVARVAVMRKLATIMWHMLSKRKTYAECRAPAAA

SEQ ID NO: 430283 - protein, 385 aa, unidentified
MDQSSILYVGLDVHKDSIDIATADPGRGGEVRHTGSIGGDLAALDQALRKLISKGHRLHVVYEAGPCGFVVWRQLHAQGIDCEVVAPSSIPRRSGDRVKTDRRDAMLLARLARSGDLSAVRVPDAADEAVRDLVRAREDAVRECRNARHRLKALLLRNGITYAGKSAWTAAHLRWLATLKLPHAAQQIGFQEYLHAITEATARIGRLEQALRDASSDWSLKPLVHALQALRGVQLIAAITLVAELRDFLRFENPRQLMAYVGLVPGEHSSGPKRRQGSLTKAGNSAARRMLVEIAWHYQHGPRVSPIIATRHAGLPRAVTDIAWKAQLRLNAKFKRLLARRVMKNKAVVAVARELAGFVWAIGREVQTSGWQGIEPEPAGSSTAG

SEQ ID NO: 430284 - protein, 340 aa, unidentified
MRQLYAGCDLHGNSNLIGIVDGEGKRVFKKKLSNDFSLVRDTLKLFQEELVGIAVESTYNWYWLVDALMGEGYKVHLANPAAIQQYSGLKHADDKHDAFWLAEMLRLGILPEGYIYPKEERPVRDLLRKRGHLVRLRTSLILSLENIISRNFGRKLPANRVKGLRKDRVTPLFEGNEDLALAGKVSKETIDFLTHQIRQIEGVVEKRIQLKEAYRYLLTLHGVGKILGLTIMLETGPIGRFETVGDYTSYCRKVPSQWISNGKRKGSGNRKNGNKYLSWAYAEASDFARRLHPESRAYYNRKMQQSNPAVAHSALSHKLARAAYYIMRDQVAFRPEKLFG

SEQ ID NO: 430285 - protein, 379 aa, unidentified
MYTKSKSQDYNELGVILSIGLIDRNRKHLSTLLALKNGVRTVGGSKRSNHNPVQHLHYYLIIFIGTKMARTVFIGIDVSKETLDISINNKHQRIENVETAISEFIKSKMANVFVKLCVVESTGGYKKLVIKLLREHNIAVHRAHPNLVYAFAKACNHFAKTDKLDAKLLEKYAEFITKNDEVVEYIVSQKQEELKELRAVERNLNDEVHGNKCRLHKVTGKAREYIEKQIEFAKKQLEQIRQDIEDIINSDPDLKEKSKLLTSYKGVGRKTASILLIEVPELGRLDNKEIACLVGVAPKTSESGRKVSKAQIIGGRFYARKALYMSAVVAMRHNKKMKVFYQRLVDSGKAAKVALVAVMRKIIICLNAMIKNNNFYLDV

SEQ ID NO: 430286 - protein, 358 aa, unidentified
MQRNKISFKGQKIFIGIDAHKKNWDVAIAPEIGIVKRHPQKASARELFEFLRKHYPDGDYLAVYESGFSGFATYYALKEVGINCMVIHAADVPTTQYEEVMKTDRIDSVKLARSLKAGLLRGIYIREKENIDDRAVVRIRRTIQKQLSGYKARVVHMLHSNGVSLPERFEKPGSRWSGAFIKWLKEDVTLLSASRTSLDLLLRQVETIRLTLLEATRKMIELSQTDRYKQKFDLLMTVPGVGVAISMCILTEVYDVRRFHNEREFAAYLGLIPTSHSSGEKIIHGEMTFRGNKQLGPMIIEAAWVAVCRDAGLGSLYRHYKERMKPQKAIVRIARKLSNIIFAVLKNEIKYVPYHWGN

SEQ ID NO: 430287 - protein, 349 aa, unidentified
MTMLAEHVEVVIGVDTHRETHTAAVVIAATGAVVDQATVCTAPAGYAELVAMADRHSSSRAWSIEATGSFGRGLTRFLLERGELVIEIERPVRAVRRSGAKSDPIDAIRAGREALSREHLAEPRAEGHRAVIAVRMTARRSAVEAHTVTQRQLHALVITAPDRLRARFVKCSTKTMIATAARLRIDARGDLETRHHTRVMRDLARRCLALQAEAKTHEDAIRDVIMEWRPDLLEQRGVGPIVAANVLCAWSHPGRCRNDAAFASLAGVAPLEASSGLTTRHRLSRRGDRQLNRALHVVAMSRLLYDPETQAYAARRRSEGKTDREIKRCIKRYVARQLFRQLENPPITT

SEQ ID NO: 430288 - protein, 345 aa, unidentified
MQLHTIGIDLGKTVFHLVGLNLRGEVVLRKKFSRKQLLHFTVNLRVELIGMEACGGSHFLGRALREQGHEMRLMPAQYVKPYVKTNKSDYIDAEAIAEAVGRPKMRFVPIKTDDQLDLQSLHRVRERWVMRRTAVINQIRGLLLERGITVRQGRGHIDAALPGILEDACAKLSGALRALLAQLKLELDHLQMRIDEADAMINKAAGENEACRRLVAIPGIGPVTATAIIAAIGNGAAFKTGRGFSAWLGIVPGEYTTGGKQKLLGISKRGNSYLRRLFVQGARAVLQQSAKQSSGLRTWLAQLTTRVHSNVAAVALANKLARMAWAVLAKNEPYRPPIVVGVATA

SEQ ID NO: 430289 - protein, 351 aa, unidentified
MRTSQKITGIVTTIGIDIGKNTFHLVGFDRRGAIILQQKVSRGQLERRVANIPRCLIGMEACSGSHHIGRQLAETGHDVRLIPAQYVKPFLKGHKNDYRDAEAIAEAVQRPTMHFVTIKTPEQMDLLALHRVRSRLVGRRTGVINQIRGFLIERGITVRQGPMPLRKALPEILSSDTGALSPRMVGLIADLAQDWRRLDERIAAVSAEIEALAEQDDSCQRLMTVPGVGPIISSAVVAAIGNGTGFKQGRDFGAWLGLVPKQESTGDRTILGKISKRGNKYLRTLFVQAAHVVLERRPSAAMRGLWPWVEQASKRLHRNMLAIALANKLARIAWAVLARGGTYQPRITHAA

SEQ ID NO: 430290 - protein, 382 aa, unidentified
MTIIVIKKEAVMKRIIVYAGNDVHQDFIEVAVYRADESEPFIEKRLLNDRGLVQKFYKKLAEEYDVRACYEAGGCGYVFYRWLKDVGAGCDVIAPSLIPKRSGDRIKTDKRDAKKIGRLYRAGELTRIHIPSEEEEANRALVRLREQILKETNQSRQYILKFLQLRGYRYEGAHWTQQHELFLKKLNFGNEHEQFTFERYLSMLEFKKIELREIESRIHKLSTSNQYAEAVSKLRSFRGIDVLSAMTIITEVIDFKRFGGAKDFMGFLGLVPSQHSSGESRWLGPITGTGNRRLRRVFVEAAWHYRHKPAVTKRLEARQEDISIEIKEYSWKAQQRLSKKYWRLVNHKNKNIATVAVARELSGFVWSLMTREAGFSRQTVQN

SEQ ID NO: 430291 - protein, 372 aa, unidentified
MHEYSELFIGLDTSKAKISVAVAEKERNGEVRFFGDISAEPTSVASMVAKLAKRGAKLHFCYEAGPTGYDLYRQIIALGHACQVVAPSLIPKRPGDRVKTNRRDAVSLARLHRAGELTAVWVPDEAHEAVRDLVRARERAHDALKKARQQLQSFLLRHGRIYPGRTPWTRTHFRWLAAQSFTHPAHHIVLAEYIQAIEDAAVREDRLTKQVAEVTVSWAMAPVVEAYQAMRGIAFIAAVTFVVEIGDIRRFETAPQLMAYLGLVPSESSTGERVKRGGITKAGNRRARRVLIEGAWTYRYPARVSQAIQARLDGLPRSVREIAWKAQIRLCARYRRLITTGKLKTVAVAAIAREMAAFLWAIGQEVSPTAQA

SEQ ID NO: 430292 - protein, 341 aa, unidentified
MKITTVGLDLAKNVSHVVCCNQAGKIVRKRMLRRAELLHYFSQLESCLVGIESCASAHYWAREISQLGHTVKQIAPQHVKAYVRGNKTDYNDALAIAEAVVRPEMRFVRTKTQMQQDIQALHVLRKKCERDRTANCNEIRGLLYEYGIVIPQGIHHIYKQLPALIDKKTENGLSDLFKELLAQHYRKITELQTHLDVYTRKIHELSKNEVCQRLQSIPGIGPMIASAYYQHVGNGSDFNNGRAVSASIGLVPKQHSSGGKHHLQGISKRGDGYLRTLLIHGARAVMRVSVNKDTPLADWIRRIARTRGKNKAAVALANKLARIGWAIVKQGSRYNAELATA

SEQ ID NO: 430293 - protein, 423 aa, unidentified
MRFIGLDVHRDFCEVAIAEGGGVRLAGRVRTEPAALALFAQSLGVDDQVALEATGNALGIARIIEPHVGRVVLANPKAVKGITRAGAKTDKIDARTLAKLLAGGFLPAVWLPDEQTRILRRRISARAQLVRQRTRAKNQVHATLIRNLKGKPPVSDLFGLRGRRWLAAQDLPADEQETIAACLRQIEFLDGEVELVERALAEQVLASAQMRRLLTLPGVNFVTAAALLAAVGDIRRFPTARQLVSYLGLDPRVSQSGTEPARHGRISKQGSGETRHVLVEAAWHATRTPGPLRAFHQRVAARRGGNIATVAVARKLAVIAWHMLSRGEDYAFARPSLTREKIRKLELATGAERQKGKRIGVFATKEQHDLDKQLAAQAELAYRRLVQDWQPAIKGTGAAPGRASRRPSSGQAARQETAPPPAL

SEQ ID NO: 430294 - protein, 419 aa, unidentified
MKTPGDTSFTAFIGIDWADTKHDICIQAAGTERREFSRLSHKVEAIDDWAQSLYQRFGGPMAVALELSKGPLVYALQKYDFFVIFPVNPSSLAKYRETFTPSGAKDDPTDAEFVLDLILRHAEHFAPLKPQSVEMRTLVSLVEQRRCLVDDRVRTTNRLRNTLKQYYPQPLEWFDRIDTPLFCAFIERWPTLVQVKRARRTTLQSFFHQHNMRRTHLLEARLTSIKAASSLTLDAAVITPHRLQALVLVDLLRVTLVAIKRFDEAIAELAPQHPDYELFSPLPGAGPSLAPRLLVAFGEQRDRFKNAAELQKYAGIAPVTERSGNKHWVHWRWQCPTFLRQTFVEWAAQTINKSYWAGLYYRQQRNKGCNHQAAVRALAFKWIRILYRCWVTRTPYDEAKYLKALQERGSPLLKMAEAA

SEQ ID NO: 430295 - protein, 353 aa, unidentified
MVILAIDLAKAKSLFCWYLVPEGSHELRTVPSTPRAFHEALVERKVDRVVIEVCDMAGWIKDLCDRLSIRLQIANGNTEGWRWRNVKVKTDKTDVLKLASLSASNQLPLVSLSDRETRQWKSLILYRQKLIERRTRIKNRIHAILVGEGRAMRAGRDTWTDESLSALRALARPIEECSKHELWLGQLWMELEGLDHLMEQVSALDRKLNELGRGDHRVIRLQTIPGVGPRLSELVVAVMDDPKRFKSVRQVSSYAGLTPRRYQSGMMDRSGRISKAGCGKLRKLLLEVAWGMLRHNVRGQSVFQRISKGQKTRRKQAAVALARRILCWCWAMLRDGTDWRDPGTRAGTPGVVT

SEQ ID NO: 430296 - protein, 402 aa, unidentified
MNSVGIDVSKGKSMIAVMRPFGEVVVSPFEIHHTDSELCELAKLLRSLPGETRVVMEATGNYHLPVAWLLNDSGFYVSVVNAMLVHDYGNNSLRRAKTDKKDAIKLANYGLDHWLTLPKYVPEEDTRLMLKNCYRQYQQYSKVQTMLKNNLISLLDTAFPDVNRLFSSPPRADGSEKWVDFVASFWHCECVCGLSEKAFISKYRKWCKKHGYNFSKDKALDIYASACGNFDVMPKTETAKLLVEQAVSQIRATSAALAALKQEMQSLASSLPEYPVVMKMFGVGPTLGPQLMAEIGDVRRFHSKKALVAFAGIDAPPYQSGQMEVFSRSISKRGSPSLRRTLFLVMGVYLQQSPQDEPVYQFMDKKRSEGKPYRVYMMASANKFLRIYYATVKAYLDSLEQN

SEQ ID NO: 430297 - protein, 374 aa, unidentified
MTTEQKRQTLFIGVDVHKDTHTAVGVSSFGEKLFEITVGNYQKDFRLLAEKVELVSSKETLSPYFGLEDCSGFGERLSGFLLDSGYIVVHVPPILVDERRKNETHPEKSDSLDALGVAKVMLTRSDKLLPYTLTPEAKQAKQIKEVSVDREFLVSERTRLKNQLHTLLHRLWNTEYRSKFKDPFSLKALRYWKGKTPKSADAFLIRSMKRKVGRLLDLHFEIQELENELESLLKKSGHTIQTASGCGIVLAAAIVGEIGDINRFHSPAALAKYAGCAPRECSSGKTKRWRKTRSGNRRLNCAFHRMALSQISRMGNPAAQKYFKRKVSEGKSKSQALVCLRRQMVNIVWMMMKHKTEFRLPAESLAQAGYPQEN

SEQ ID NO: 430298 - protein, 346 aa, unidentified
MAYYVGLDVSVKETSICIMDDKGVVAARTDISTDPDLITNFISKHAPDVERVVHESGILAIWLTRELEKRGVPIICIDARLAHKALSGRINKSDQGDAEGLAQLARTGWFTQVHIRSEASERVRVLIGARERLIRMRKDLEGHVRGVLKVFGVCMTSVGTGKLRRDFRDQLAAAADTDPAIALLSETFIPLHKTLCIARDALDDQVRMMARESELARRLMTVPGVGPIVALAYIATLDDEKRFRKSVDVGAFLGLTPKRHQSGEVDWSGKISKCGDCDMRRLLYSAASTLISCTRKPSRLKEWATKLVERKGHKKAAVAASRKIAVLLHCLWRNETVFEPGMGGAS

SEQ ID NO: 430299 - protein, 444 aa, unidentified
MAMQVPQPVAAEEHDVILARVAAVDVAKATGKVCLRVPDPCDASRRATSVWDVASTTGSIMELGAFLAAAQVQRVVVESTSDYWRPFVYLLEAQGLQVWLVNARHVRQAPGRPKTDKLDAVWLAKLTERGMLRPSFVPPAPIRQLRDLTRARHDLSGDQTRCKQRLEKLLEDALIKLSVVASDLFGVSARMMIEALISGQRDPHALAGLARGRLKAKHGALVQALHGRFDDHHAHLARLLLQQHDLIQAQITELTTAIEAAITAIEYPHPPPAHDQPDQPPPLPVVARLDEITGVGPEIAHAIIAEVGLDMSVFPTAQHLVSWAKLSPRTRQSGAKTHHGKTGKGNPYLKAALGQAAASTARTDTFLGQRYRRLAARRGKAKAQVAIARSILTIVWHLLANPHARFHDLGPDHYLQHIDKNRKTRNLIRQLEALGHQVTLAPTS

SEQ ID NO: 430300 - protein, 346 aa, unidentified
MRFYTNQHKYYCGIDLHTRKMYICILDEKGEIREHRNLKTDRDAFLKAITPFREDIVVAVECIFTWYWIADLCHNEGIPFVLGHALYMKAIHGGKAKNDKIDSQKIAVLLRGGMMPMAYVYPAKMRSTRDLMRRRNHLMRKRSELFAHIQNTNSQYNLPDPFGPIARHRNRDGIAGQFEQPSVQKSIAVDLEMIRTYDGILLQLEKSIIKPANNHDPVSYALLQTIPGVGRIIALIILYEIENIRRFASVQDFASYSRLVKCAKESNGKKCGSSGSKIGNAHLKWAFSEAAVLFLKGNDPAKKYLDRLTKKHGKSKALSILAHKLGRAVYFMLKNREAFDQNKLLN

SEQ ID NO: 430301 - protein, 341 aa, unidentified
MDKELYIGVDVSKQTLDLAYYDGESIDWKNAHIKVSNNNAGFKKIGSWVAKVSKRFDIVLFCMEYTGLYTQNFRLWLEEKHYIYRMVEPRKMHRFEPDLDDDQRSLDRIKTDELDAFRIAIYCEQNHKKILRNPSKLPSPVYFKLKRLLAERKQNTKQSVLYKQQLHDICAYDTDLSVERKKLLLKNMQENQKAIDKEIDSYMNEDTSIRKNYNLLTSIPGIGRIIALETIVLTENFTAISNPRKYACYIGIAPFKKESGTSVRKKTGVSKKAFSEAKADLSIAVLSAIRNNPSIRDYWIRKRKEKCGGIVLNAIKFKLVLRMFAVIKRGTPYVETDAYKN

SEQ ID NO: 430302 - protein, 350 aa, unidentified
MIIIGADYHPGFQQIAFVDTDTGEWQERRLEHREEAEKFYRDLAAQGTRVRVGMEASGHARWFERLLGELQFELWVGDAAEIRTKRVRKQKTDRQDAELILRLLLEDRFPRVWVPSWENRDLRQLLWHRHRMVQARVRIMNQLQAVALNEGLRSKKRLWRDAGRAQLESFLLAPWASRRRHDLLELLDRLTPMIAGLTEAIEQEVGKCPEAQRLQTHPGVGALTALAFVLIIGRADRFPCGKQIASYLGLVPLEDSSGQRRRLGHITKQGNSLLRFLLVEAAQVTVRSDAEWRSKYFHLAMRRGRKIAKVAMARRLAVRLYWMWRKEWNYEQLKNFGSHAGEPGNRDGVR

SEQ ID NO: 430303 - protein, 344 aa, unidentified
MGEVSTIGLDIAKSVFQVHGVDVAGAVLIRKRISRTKVLEYFGALPSCLVGIEACPSAHHWGRELQALGHTVRLIPPSYVKAYLKRSKNDANDAAAICEAVTRPSMRFVPIKTKEQQTALMLHRTRQLLVRQRTMLSNAMRGHLAELGIVSAKGRNGTAELLGIIADGADSRISAAVRSILDVLARQYGAIGTEIASIDKSIMALHRACEASRRLAEIPGVGPVGATALVAEIGDWNTFSSGRSLAAWIGLVPKQHTTGGKDRLGSITKQGNRYLRWLLVVGAMAVIRYARKHGTQKRPWLARLMERRATKVAAVALANKIARMAWAIMVRGEKYKEPKLALAA

SEQ ID NO: 430304 - protein, 342 aa, unidentified
MAIVAGFDVHRAQITFDALDTETAEVTRGRIDSTPAAIRRWLARLGSDEVHVAVEACTGWLFVCDALAAAGATPHLAEPVETRALRGRKRRPKTDREDARWLRELLAEGRLPEAWIPPEHVRQWRSRARLRHTLIGERTQWMQRIQATLFHHGIHGTPEKLRTGEGREFLERIEIPQDARERIAIALAMVDAIEAQIAPLERELRRLARRQTGCKALMGLYGMGELTSLVTLCELGDVTRLSASRKAVRLAGIDIGVHRSDRRARAGKLTRQGSPQLRWALYEAALSACRPSSPDHADYLALKARGLSHTRASLTIARKLARRSYHVLHQLGPAALDPIPTS

SEQ ID NO: 430305 - protein, 391 aa, unidentified
MSMNFVGIDISKYKHDCCIISAADQQIVSKFTVKNDKDGFEHLLTTLNSLSNPEDIKIGFESTAHYALNLELFLENAHHSFMEVNPVLIKEYKKSTTLRRTKTDSVDCESIARWLMTVEYKPHSKGFYHSYSLKSLTRLRDRLIRQRSFYLVKITNVLDHTFPEFKPFFNERLSKTAIYLLENYGSAEKMAHMNSASYDKLRCASRGKFSIQQFLRLKELAANTVGVNNSIFDIELNSLLTLYNSLCKEIKTLEAEITKLIEEVHPHYMSIPGIGPISAAVIYAEYGDISNFSNPGQMLAFAGIEPGINDSGTESHGGRMVKQGSSQLRYVLLNACLPLIRFDITFATYYAKKRAEGKKHRVAITHVAKKLIRVIYALERQDVDFNVQKLR

SEQ ID NO: 430306 - protein, 339 aa, unidentified
MRLYVGIDLHSNNSVLVILDEHDRIVYERRLPNQLPIILAQLAPHRESIEAIAVESTFNWYWLVDGLMEAGYTVKLVNTAAVKTYDGLKYAADEHDARHLAHLLRLGILPTGYICPKEERAVRDLLRKRAQLVRCRTAQILSIQNLVSRNSGKKISTNDIRQLDEEAIGQVCGGDGHRALAMQSNLAVLRCLDEQIRGLERVVLARARLKPAFKKILTVDGIWNILGMTIMYEAGAMERFAKVGQFASYARCVGSSRWSNGKKKGEGNRKNGNKYLAWAFVEAAHFAVRYNERIRRFYQRKKAKTNGVVAVKAVAHKLARACYHVLKDQVPFEEERAFA

SEQ ID NO: 430307 - protein, 408 aa, unidentified
MADKIAGIDVHKKVLMVVVMDARMPESKPERRRFATMPAELRRLSTWLKQLGVEEAVMESTAQYWRSVWLELEPHMCLHLAQAFSNRAPRGRKHDFKDAERLVRRLIAKELILSFVPNGEQRIWRNLTRMKLQLVRDRVRLQSQIECLLEEMRIKLSVVVADLLGSSGLRILHALVNGETDAKSLALLGDDRLKCTEEQLIEALTGESHPMHRQMLALELERLRLLDEQIAKLNNLIAQAMKPHQDTVIRLAEVPGLGIDSAQQIIAEVGVTASTFPSAAEFTSWVGTCPGNQESAEENSSSRSAKGNKYMRRVLNQAAHAVARSKGTHFQAVFRRLLPRLGYKSAVWAIAHRLCRLVWKILHGGIRYVEQGTGVEPKLLIYRAQSLAKQLRKFGYNVQITPANRAPA

SEQ ID NO: 430308 - protein, 339 aa, unidentified
MKQEVVTVGLDLAKSVFQVHAIGRDGTVLVRRKLRRAEITSFFADLPSCLVGMEACASAHHWARELRGLGHEVRLMPPAYVKPYVKRGKTDAADAEAICEAVTRPTMRFVAVKTVEQQAVLMLHKSRDLMVRQRTMLINALRGHLAEYGVVTGVGAGGVTALLKALHEQQDKLPVHARSALHALAAQLRALSSEVDRLEAQILAWHRADETSRRLATIPGIGPITASAISAAVPDASLFQSGRQFAAWLGLTPRANSSGGKERLGGITKQGDGYLRRLLVVGATAVMRMARKDAARQPWLAQLLERKPTKIATVALANKTARIAWAVMSRNEVYAAPAA

SEQ ID NO: 430309 - protein, 372 aa, unidentified
MGHHTEAFVGIDTSKSRNAIAIADGGRGGEVRYLGEFPATEAAIRKLVAKLAAKYRDLTFCYEAGPTGYGLYRLLKSLGHECLVVAPSLVPKKAGDRVKTNRRDAVSLAKLLRAGELTAVWVPDERHEAMRDLSRARQAVKKDLQGKRQQILSLMLRLGRIYPGKTTWGPAHMKWLMAQKLEHREQRITFEELLDGIRQESERVERLEKAIREAVPEWSLAEVVAALQAMRGIDLIAAVGVLAEIGDLSRFQNPRELMGYLGLVPSESSTGDKVKRGGITKAGNGRARRILVEAAWSYRYPPRVSREKQPKVEAAPRRVREIAWKAQTRLCGRFRSLERKGKRRTVIATAVARELSAFIWAINCELMAHRQA

SEQ ID NO: 430310 - protein, 368 aa, unidentified
MSTLRFVGLDVHKDTIVIAVANEGQSEAVTLATIPHDVTKLVKQVSKLVDDKKHLRVCYEAGPTGFGLSRRLKAAGINCVVIAPSLVPQQVGIRVKTDRRDARRLAHFLRSGDLVEVWVPDEKTESLRDLERSRDDAKNAERVARHQLDKFLLRNERVYRDGRSWTQKHSDWLKQQKMGDPCKQCVMDDYVKAVDDATERVKRLSKDIELFVRGTALEPLIRAFMAFRGIKTLSAVVIAAEIGDLRRFTTARQFMAFLGLVPSEHSSGKSIKRGALTRTGNVHVRRILIEAVQHYRHRPTLSAALRERQEGISPEVISISWEAQKRLCKRLNYLIEQKKPRNKVIVALARELAGFIWAVGQVSKPLAA

SEQ ID NO: 430311 - protein, 407 aa, unidentified
MVVLYERCAGLDVHKKEVVACAREQGRKVERELRRFETTTKGLLELLEWLVERGCTHVAMEATGVYWKPVWHVLEGHFELVLANAAHVRNVPGRKTDMNDAAWIADLLAHGLITASFIPPTPIQELRDLTRTRRQLVRELGQHTQRIQRVLEDANIKLSSVISDVLGMSGRRILDAIVAGEDDPEKLRGLGSERLKCSREALCEALRGRATAHHRFLLRQHLATIDHLQRTVEEFDAHIARQLEPFRSEIERLMTIPGVQEIAAASILAEIGFDMSSFPSAAHLVSWAGLCPRMDESAGKRRTTRLKKGAPWLKPVLVQCAWAAARTKGTYSQVQFLRLKGRRGPMKAIIAVAATLLTASYYILRDDVTYHELGPDHFVKRDRSRVAQRLAHRIRELGYEVTIRPAA

SEQ ID NO: 430312 - protein, 391 aa, unidentified
MLICGIDIGKFRHEACLIDETGKQLAKTLSFTNTTDGGEKLLEYFTRHNPDNHVIVVGMEATGHYYLSLYCFLFDKGYQVNAINPIQSDAIRNLFLRKTKNDAKDSFLIAETIRIGRFSPTPLADEDILSMRQLCRHRMDLVDYIADQKRKIIGVMDRIFPEYQHIFSDMFGKTSTELLQKAVTPEELLAIPTTELCELLKKHSRGRFGEVKAEQLRDAAKSSFGITIATNAFAMQLRQLLEMIALLENQLVELEEEISEYLRKMDTYITTCPGIGDILGAVILSEIGDVSRFAEPKKLVAFVGVDPSVKQSGEFVGTQNKMSKRGSPHLRRAFFLAAGVAAFRDPVLSAYYQKKRAEGKHHYVAVGAVSRKLICIVYAVLRDKKPYVPNC

SEQ ID NO: 430313 - protein, 403 aa, unidentified
MSKESVTVFGGVDTHKDVHVAAVVDERGRILDTAPFEANSKGYAALRKWLESFGTLAKVGVEGTGAYGAGLARYLADHGVEVVEVNRPNRQMRRQRGKSDPVDAEAAARAALNGEATVVPKSHDDSVESIRVLRIAFCSARDTRTRLALQIRDLIVTAPAALRESMPSRTKERVEHCAGFRPKDPREPQEATRLALKTLSRRYQDLSEEMAELTKILDQLTKEANPALRAAKGVGADVAAILLVAAGTNCERLRGEAAFASMCGVSPILASSGQTNRHRLSRSGNRQANNALWRIATVRMSCDEETKVYLAKRTAEGKTKRDVTRCLKRHIVREVFWLLQNPAYEEVGPQLRATRKSAHISLQAVSDDLGVWPTKVSRIERGLEHDPDFVERYEAWLTNKTAA

SEQ ID NO: 430314 - protein, 434 aa, unidentified
MTTDSAAVRARKGKIMKPWIEITHYAGFDWARDHHDVVIVDRQGQIVADFRLEHSWAGWQQFRDKVRNYPALAVAIETSQGAAVDQLLQRDCTVYPVNPLSAKSYRERKAPSGHKTDRLDGWSLAEALRMDGQQWKALQPLDPLTQQLQLLCRDEIGLIEQRTALVNQLQQALVEYYPAALQAFEDWTEPFCWDFILQFPTPEKLALAGRRRWEKFLHTQTLWRPETASKRLEIFQNARQFCGSAAVTSAKSLLAVSLANLLNALQLQLEQYRQQIEALFKEHPDHDLFGSLPGAAQRLAPRLLGEIGGPTHRFEDTASLQCVAGTAPVSFQSGQIHRVRLRYQCNKVLRHTVHLWAQCCLRVSPWAEVYYRQKRAEGKSHACALRCLGQRLLKILWKMIQTRKPYDADLHARHQKQHGSWVLALMKTEAKAGE

SEQ ID NO: 430315 - protein, 395 aa, unidentified
MFIVGIDVAKRSHEVCMITSDGQTVQRPFSIRNNCTGYNLMLEKIRKHTNIKSQIVFAMESTAHYWLALFTRLRKDGYHVILLNPIQTSAMRDMFIRKIKTDAKDSFIIAELIRFGRYAESNVAQDRLLALKELCRNRFYLVDMAGDLKRKLIALIDRVFPEYEAQFDTIFCKSSVALLKKYPTPQKLSNAHLDKLTELLWNSSNGHFGEWKARELRELARNSFGVEDCDGAYSTLILLMLDQIQSLSGKADALEKEISRLFQSFDTTVTTIPGVGPIIGAVILGEVGDISRFSSADKLAAYIGVDPSVNQSGEFQAAHAHMSKRGSPYLRRCIWMASQVAVQRDPMFRAYYEKKAAEGLKYMTIIGHVTRKMTAVIFAILRDHKVYEPVLPTAA

SEQ ID NO: 430316 - protein, 340 aa, unidentified
MKHIGMDLHSTTTDICVRNGVGRIVLLRRIETTPKELVAFIHGVSGEKRVAVEESQMADWVSRLLAPHVKEVIRSQPRHNRLISGSEDKCDEKDAEALSELLFMNRLKPVHHPPAAYRTLREGVIAYWIASRELTRAKNRLKAFFLHNGWHQVGRAVYCLRDREKNLQAIEKRGWNVGLAKLHYEQLDHCRRLKAKHVRMLREMFKPMRHQVKCLASIPGIGPIGAYTLLAYLEDGRRIPNKRKLWRYAGLSLRRHESNDKGRQGASHSGNRMVKQVLMSAAITVVSRQKDNALARYWEAGIRQNVDAKRMRRNLARKIAVIAHLLLRSNQEYRDERVMV

SEQ ID NO: 430317 - protein, 342 aa, unidentified
METVYVGLDLGSSGFQQVAIKTDGSIKVNRGFTTSEANLRAAFADQHGEIHVHLEAGELAPWAASVIAPLVTRVVCSHPKDNAWIAKDADKCDRVDAYKLAELLRLNRFKEVHYAPDQPRRNFKQLVQHYDELTGQQARLKIKIKARLRMQGVIVTGERLFSSKGRQEVLARVEARDLRTAIEQLYEVLDQSVAAQEQARLLMLRAAQAFPEIKLLRTVPGVGPIGSCRFSAYIHTPNRFSSKRKLWKYCRLSVSHRSSNGKPLRRPRLDRSGCGRLKDVSRKAFDVAVRSRHDNGFKRTYLRALETTHDKTHARLTVQRKIVSTLRAMWITRTPYCDELSR

SEQ ID NO: 430318 - protein, 492 aa, unidentified
MVLGHVSDIGEPVTAGIPFERVSTTTNPYRRGIPTTMMEDAVTRRKRQFELAYPNAAGIDIGSASHYVAVPSDRADDPVREFKSFTEDLEALADWLSACAVDTVAMESTSVYWIPLYELLESRGFVVYLVNARHVKNVSGRKSDVLDCQWLQQLMSYGLLSGAFRPHDEICALRCLTRQRDMLTKCQSQHVHHMQKALAQMNVQLTNVISDITGLTGQNIIRAIIAGERDPATLAKLRHERVHASEAEIAKSLKGNWRDEHLFALKQAMTLCDTYSAAIADCDHQIQGQLERLYRHEAPAEPERKRGRRRDPMQFDLRTALLRTCGVDLTRINGVETTTALKVIAEVGPDLSRFKSAKHFASWLGLCPGTKISGGKVLSGATKRTANRLAQALRMAAFALSRSKSALGAYYRRLAGRLDKAKAITATAHKLARLIYTMLTKGTEYVDRGQDYYEERYRQRVIHHLNRRAAALGFALIAVEPPPQNLLRKSAT

SEQ ID NO: 430319 - protein, 338 aa, unidentified
MKITTIGLDIAKSIFHLYAVNKMGRLVKKKQLKRKQVLAYMANLEPCLIAMEACGGANYWAREFIVLGHEVKLIAPQYVKPYVKGNKNDYNDAEAIAEAAQRPNMRFVPIKSVEQQDVQNFHRQRERIKKERTALVNQIRGLLAEYGVVINQGVAAVRNLLPEILEDAENGLTARSRELFAELLEELWALDQRHERGGQRITSLSQENAVCRRLDEILGIGPITASATYAAAGDGKDFVNGRHYSAWLGLVPGQHSTGGKTTLLGISKRGNAYLRTLYIHGARAVLRHSTNKTDRFSLWAQAVLARRGHNRACVAVANKMARMAWVIMAKGETYRVAI

SEQ ID NO: 430320 - protein, 443 aa, unidentified
MAVRKRELAVLFPNAAGIDIGSAKHYVAVPPERCEQSVREFESFTADLASMAEWLASCAIDTVVMESTGVYWIPVYELLESRGFTVYLVNARHVKNVSGKKSDVLDCQWLQQLMSFGLLAGAFRPDGEVCALRALVRQRETLIAGQAQQIQRMQKALTQMNVQLVHVISDIAGKTGQDIVRAIVAGERDARKLAQLRNYRVHASEEQIAKSLLGNWREEHLFCLAQALRLFDTHQQLIDEADAKIEALLAHLQRHALGAIKPDKNKGRAKHAPRFDVRAALVRWAGVDLTRIGGIDVCTALKVLAELGTDLSKFKSAKHFASWLGLCPGTRITGGKRISGVTKRIANRVAQALKLAAHGLHRSQCALGAYYRRMAARLGAGKAITATAHKLARLVYAILTTGEEFIERTQDHYEDQVRSRTIRYLQKKAASMGFNLQPNAVCP

SEQ ID NO: 430321 - protein, 456 aa, unidentified
MKIPQSTIRLLTGRLVKILLYREVSTMKSNTQNAKIEAITEKTLVLGIDVGSETHYARAFDYRGIEYSKKPFKFSNTEAGFVTFKEWILDLKERHEKDKVVPGMEPTGHYWFNLGKFLQDNEMKPVLVNPHHVKKSKELDDNNPTKNDRKDPKVIAGLVREGRYMIPYLPDGVYADLRTASNIRFQLQAELTRIQNRISRWFNIYFPEYKTVYGKPDAKSGMLILKAAPLPEDILTLGIDGVNQIWRDAKLRAVGKARAKTLIEAAEHSVGSKEGAVSARMEIRMLLEDYESRNTRLQEVMVLIEELVRKIPMAEKLLEIKGVGIRTVSGFLAEVGDISRFNNPKELQKLAGLALVENSSGKHKGETTISRRGRKRLRYLLFEVAMSLVAKNPEFRELHTYYTTRRLNPLKKMQSLMAVAAKLIRVFYVMLTKGVNYDPKKMVSDIKRPAVYLQAA

SEQ ID NO: 430322 - protein, 336 aa, unidentified
MTIIRIGLDTSKHVFQIHGVDENEKPVLRRQLRRSEVEKFFAQLPPTRIGIEACGASHHWARLLRGLGHAVLLMPPQYIKGYVKRGKNDAIDAEAICEAMSRPTMRFVPVKTAEQQAALTMLGVRDLLVKQRTMLMNALRGHAAEFGVAAAKGPNKIVELLQRLATGEGVPALAREMLGMLASQLEAVNGKLKAIEARLMAWHRQDQTSQCLATIPGVGPIAGVSFALKIPDARAFRSARHFAAWIGITPRENSTAGKHRPGKISHEGDESLRRLLVLGATAVIQRAKRGRVSPRLLGLLARKPKKLAAVALANKMARVIWAMMISGEVYRRPQEA

SEQ ID NO: 430323 - protein, 397 aa, unidentified
MYIVGIDIAKRKHEAAVIDGEGAVIIKPFSFTNNCSGYNRLLAMLAKAKLPLDEVSFAMEATGHYWLALFTRLQKEGFRVQVINPVQTNSIRSFYIRQAKTDPRDALLIAEVIRFGHFSESTLHPENIYELRELCRGRHAIVSMQADVKRKVVALLDQVFPEYETAFTNLLGDTSMAILQTCPTPKELSEMPLEELCHLIEVSSHKRFRMAKAQELQALARNSFGFAMAGDVFSTMIRLYAKHLDFLKQQVREMDRKIAEIMDTLDTPITTITGIGPTLGAYILSEIGDINRFSSSAKLAAYAGIDPTMRQSGEYNGVRNRMSKRGSPYLRHAIWLATSSAVLHDPALKLYFQKKRDEGKPYMASVGHACRKMVSIIYAVMRDNKAYTPYIPNEISA

SEQ ID NO: 430324 - protein, 344 aa, unidentified
MEITTIGLDLAKSVFQVHGVDATGQVVIRRSLRRAQMLPFFTRLPSCLVGMEACGTSHYWARELIKLGHQVRLMPPAYVKPYVKRGKTDAADAEAVCEAVRRPTMRFVPVKSPEQQAALSMHRTRDLLVKQRTQLVNMIRGLLAEFGIDIPKGLERALLMARRIVDGEAPDVPMEAAKIVGTLSQQALDIHIRLREVDRDLLVWQRGNDVARRLMTIPGIGPVGATALAASITDPHQFRSGRQFAAWLGLTPLQKSSGGKERLGRITKMGDKYLRKLLIVGMTSLVRRARYNPKTVDPRLADLLARKPVRVATVAMANKTARIVWAVMARGETYCAGHRPALAA

SEQ ID NO: 430325 - protein, 320 aa, unidentified
MMAQNELVVVGLDVAKDKVDACIRSLSQRQTFPSTVEGRRALIAWLRKHEVGKAAMEASGGYERDWAKALREADIEVRIVDPKRVRSFARSAGRLAKNDAIDAEMIAWFAETFGEAPGQAYDAAREKLSQIMNARQGLLELQTNLQNRGEHAGPEPVQKMQARLLKQLALEIDKLEAAIAVLIKATPHLAERAEIIESVPGVGRITSAGLIAAMPELGQVSNKVAAALLGTAPYDDDSGRRRGERHIKGGRRKVRNLFYMACLGAATRHNPVLKAFYRRLIAKGKEPKVALVACMRKLIVILNTMIARRQKWDPSLSVLG

SEQ ID NO: 430326 - protein, 395 aa, unidentified
MFIVGIDVAKRSHEVCMITSDGQTVQHPFSIRNNCTGYNLMLEKIRKHTNIKSQIVFAMESTAHYWLALFTRLRKDGYHVILLNPIQTSAMRDMFIRKIKTDAKDSFIIAELIRFGRYAESNVAQDRLLALKELCRNRFYLVDMAGDLKRKLIALIDRVFPEYEAQFDTIFCKSSVALLKKYPTPQKLSNAHLDKLTELLWNSSNGHFGEWKARELRELARNSFGVEDCDGAYSTLILLMLDQIQSLSEKADALEKEIFRLFQSFDTTVTTIPGVGPIIGAVILSEVGDISRFSSADKLTAYIGVDPSVNQSGEFQAAHAHMSKRGSPYLRRCIWMASQVAVQRDPMFRAYYEKKAAEGLKYMTIIGHVTRKMTAVIFAILRDHKVYEPVLPTAA

SEQ ID NO: 430327 - protein, 407 aa, unidentified [sequence omitted]

SEQ ID NO: 430328 - protein, 391 aa, unidentified
MTILVGIDVAKDKHDCFIMNSEGEVLAKSFTILNNKEGFDFLYKKIQSVSSSDKIKVGLEATGHYSYNIIGFLLNKDLATFILNPLHTNLYRKSLSLRKTKTDKIDSKTIAMMLLSDVSLKSYSDISYHNEDLKSLTRYRFSKVEERAKLKTSLSRLAQILFPELEKLVPTLHMTSIYQLLEEFPSASAIASAHLTRLTKLLSKASKGHYNRETAIKIREAAKNSIGSNMPAKSLELKHTIKLIRALTIDIGEIEAEISKMMDKIASPITTIPGIGNNMGAMIISEIGDFSRFSSPDKILAYAGYSPSTYQSGKLDNCYAHMEKRGSRYLRYALFQATQRVCHLDSTFSAYLAKKRAEGKHYYIAISHAVKKLVRVIFHLEKTKQAFLKAS

SEQ ID NO: 430329 - protein, 341 aa, unidentified
MQITTIGLDIAKNVFQVHGIDAAEKVVVRKQLRRGQVLKFFAALPPCLVGMEACATAHYWARELTKLGHEVRLMPAKDVKAYVKRNKNDAADAEAICEAVRRPTMRFVRAKSAEQQGRLMQHRTRDLLLRQQTQVINALRAHLAELGIVAAQGREGLKQLLAIIAAEKDARLPIDARASLIVLAAQLQALHTMIGSIERRLIVQHRANEASKRLQSIHGIGIIGASAIAATVTDPNAFRSGRDFAAWIGLVPRQDSTGGKQKLGPISKQGDRYLRRILVVGAHSVLRRAKQNPEKYPWLTQLLARRPFKVVAIALANKMARIAWALLASGGHYRPARLAAA

SEQ ID NO: 430330 - protein, 346 aa, unidentified
MLYVGLDLSRKRLDFCLLDELGERVEIGAVPPDADGLRGFTARVGRFGEPVRAAIESMNGARFVRDQLELAGWTVEIADAAKVKGLAPLACKTDRIDAWVLAELCRRDLVPAIWLPNVRVRAERERARFRLHLVRHRSSLKQRVHAVLLAHGQPCPVSDLFGVRGRRLLERLALPEPWAGTVAATLRLIDDLDREIAACERELQQLGADHPYVPLLRTIPGIGWVLAYTIAAEIGDINRFASSSKLAGYTGLCPRVYQSGDSDRRGPLAKQGPKYLRWALIEATSHACRHPAYRARYQRTKQRLGKQRGAKVAQVDLARRLAEAIWYMLSRNQPFAPKGATNPLAA

SEQ ID NO: 430331 - protein, 472 aa, unidentified
MANRTKSRPDLKVLPMLPHESIYIGVDIGKFQHVAGFVSKTLLERHRHFESCPSFIFEQSREGFRVFVERIRAYCPLEQCFIVMEQTGHYHRPLLQYLLELDISAYVMHVQCREGGMLKTDKRDALRLANHLYNQLALGVQVTNKLQVIRRAVPPSEAALQLKGLMRHRYELATEATQRKNKLTAICDELFPELTQVLKNPNSSIALDLREKFPTPQAVATASPVTLREVRRGSRPSEVQLEQLQSLAAQSIGIKDVARQRSLILEQGLLIKELRLMQEHTERLDQEVAQIVERSREGQILLSIPPISPMYAAAILATIGHIANFEDAAHLKSYFGWAPERAQTGVSFDRTSLTKGGSREMKKIMYLVAWNAIKTETEWARLYKRLVPRLCSYDERTQAYKGKGKALAHVIGRLIRLIYALLKQDDETLRHLAPGTPPPEPVLYDPELHKHHRSGHYHPLKKKLPENRIVQI

SEQ ID NO: 430332 - protein, 408 aa, unidentified
MEVIHERCAGLDVHKETVVGCLRVRERGQVRREVRRWATTTAELLKLGDWLRQAGCTHVAMEATGVYWKPVWHMLEGEFELLLANPAHIRNVPGRKSDVNDATWIADLLAHGLIRASLVPPGPIQELRDLTRTRKQLMREIAQHKQRIQKVLEDANVKLASVVSDVFGESGRRMLKALSAGQTDPRQLAALRDGRLSASRETLAAALQGKVTAHHRFLLSQHLRMIDYLEQTIRDFEGQIEVVIAPFRAAVACLVTIPGISATAAHVIIAEIGVDMSRFATVAHLRSWAGLCPQLNESAGKIMSRRLRHGAPWLKTVLVQCAWAATRNKHNYLYAQFVRLRARRGPQKAIMAVAASILSIAYYLLRNQVPYRDLGALYFIRADQERTAQRLARRIKELGYEVQIRKAA

SEQ ID NO: 430333 - protein, 312 aa, unidentified
MENKVYVGIDVSKDKLDLAIRPDGQEWSEGQDDASLERLVRKLKDIAPALVVLEATGGYEARVAALLATAGIAVSVVNPRQVRDFAKSTGKLAKTDRLDARAIAHFAEAIQPQVRYVSDEEGREIAALMSRRKQLIEMMVAEKNRMHTCLAKLLPKLKAHIAWLKQCLEELDKDIQDKIQNSAIWHEKDDLLRTVPGVGKVVSFTLLAGLPELGVLDRKKIAALVGVAPLNRDSGKYSGRRGIWGGRGDVRSALYMATLSATRCNPVIKSFYQAMVARGKLKAVALTAAMHKLLTILNAMVAQSKPWCPPIA

SEQ ID NO: 430334 - protein, 345 aa, unidentified
MLHAGLDLSRKRLDFVLRDASGARVLTGAVAPDATGLATLVARVAGYGQPVRAAIESMTGARFVHDQLEAHGWDVAIADAQKVKGLAPLACKTDRIDADVLAQLSWRDLVPAIWLPDPRVAAHRERARFRLHLVKQRSRLKHRIHAMLLTFGIPCPVSDLFGRRGQALLATLPMATPWREHLTMALTLIDELTRHITALERELRRQGAQHPDVPLLTTVPGIAWILGYTIAAEIGDVRRFATADKLIAYTGLCPRVYQSGGRDHRGRLSKLGPRYLRWALLEAAVHAARHPVYRDRYRRLKQRLGTRRVKVAQIDLARRLAAAIWYMLTRRQPFAPHGASDALVA

SEQ ID NO: 430335 - protein, 343 aa, unidentified
MLHAGLDLSRRRLDFHLLDEHGESVEVGAAPPDADGLCGLAARVGRHRQPLRAAIESMNGARFVHDQLELHGWDVEIADAVKVKGLAPLACKTDRIDAWVLAELSRRDLVPAIWLPDPTVRAERERARFRLHLVRHRSSLKQRVHASLLTHGKPCPLSDLFGLRGRDLLAALQLPEPWACDVAASLRLIDELNREIAAGEAELRRLGADHRYVALLTTIPGIAWVLAYTIAAEIGDIARFPTPRKLVGSTGLCPRVYQSGASDRRGPLSKNGPRYLRWALIEATTHACTHPLYRERYSEPGNGSASSAAPRSPRSTSPAGSPRRSGTCSPTTAPLLRQAPRPP

SEQ ID NO: 430336 - protein, 424 aa, unidentified
MGKKKSSPGGLAALYGRVCGLDVHKKLVVACVRILDAKDGTVQSTLRKFGTMTADLLELRQWLAEHQVTHVAMESTGVYWQPVFNLLEGHFQVWVVNAQHIKKVPGRKTDMRDAEWIAQLMQCGLLKPSFVPDRQQRELRDLTRQQTKLVQQRNAVDNRIQKVLETANIKLGSVASDVLGASGRKMIEALIAGEKDVTMLADLAQRQLRGKIPELQRALEGELTEHHRYLLRQLLGQYDFLEKEIASVSERLGAVAPPSFRVAVEQLDVVAGVGERGARALLAETGTEMSRFPTHKHFASWAGQCPGNHESAGKRKSGKTPAANRHLDAVLTEMAHAAVRTKNSYFKSQYHRLAGRRGKKRAIGAVKHSLLITAYFMLRDNKPYQDLGVDYFDKLNPQQRIRYHVRKLQELGQEVELSPVADAA

SEQ ID NO: 430337 - protein, 355 aa, unidentified
MNSVRYVGLDVHRDTISVAVLDESGRLIMQSVLATKASAILDFIHGMRSIVHATFEEGTHAAWLYDLLASKVAKLVVCNPRKNALLKLGSKSDAIDALKLAELLRAGMLSPVYHGERSALEVQQLARSYTMLTEDTTRVMNRLKAVFRGQAVGCAGKKLYAKRHRDGYLAELGTGGLRRRAECLYQEFDALQQLRHVTKRELIVECRKHAATKWLQSVPFLRPVRAAVLIGRVQTPHRFRTKRQFWAYCGLALETRDSGEYRMVNGQVERRKKPVLIRGLNWNHNHAMKGVFKGAATSASICDGVFREFYLGLLNKGMLPEMARLTLARKIAAITLKIWKKGEAFDSEKMKIQAA

SEQ ID NO: 430338 - protein, 397 aa, unidentified
MYIVGIDIAKRKHEAAVIDGEGTVIIKPFSFTNNCSGYNRLLAMLTKAKLPLDEVSFAMEATGHYWLALFTRLQKEGFRVQVINPVQTNSIRSFYIRQAKTDPRDALLIAEVIRFGHFSESTLHPENIYELRELCRGRHAIVSMQADVKRKVVALLDQVFPEYETAFTNMFGDTSMAILQTCPTPKELSKMPLEELCHLIEVSSHKRFRMAKAQELQELARNSFGFAMAGDVFSTMIRLYAKHLDFLKQQVREMDRKIAEIMDTLDTPITTITGIGPTLGAYILSEIGDISRFSSAAKLAAYAGIDPTMRQSGEYNGVRNRMSKRGSPYLRHAIWLAASSAVLHDPALKLYFQKKRDEGKPYMASVGHACRKMVSIIYAVMRDNKAYTPYIPNEISA

SEQ ID NO: 430339 - protein, 394 aa, unidentified
MAFKIFRKNCCGLDVHKTWIYACMGITDTNGRTEYKQARFSSFTKGLQELADWLAKYDCNDVCMESTGKFWIPVFNILEKTCWVTLAYPKYTKPQKGNKTDHKDAKWICDLYMCDMVNPSFIPPPDIRQLRDLMRYRSKLTNIMTSEKNRALNCLTVSNLKLDDVFSDVFGKSSRSVIRYILEHPGETFQVAPFIDRRCKHPVEEIQAVIDGTISHQQAVKLRECLQHLDELEVHKTNVEKEILCLVQQYPYQLELLQTVPGFSGNIMTAIALISEIGADMSVFPSAKHLVSWAGCCPRNDQSSKKVKSTRISRAGVYLKPLLVQVAIQPFTANADKLSAAGALEIRCQICDGRFLSMWAALFIFLGCPLPPCPKDLHVHNGRIVILASVAWIF

SEQ ID NO: 430340 - protein, 421 aa, unidentified
MRWIGLDVHRDFCEVAIASEEAVRSAGRIPTRVASLELFAQSLAASDVVAIEAPTGADTIVSLLQAHGLRVVVANTRKLKGISDARAKTDRLDARLIARMLRSGLLDEVWTPDEGTRTLLRLTNPARAARAPPTRTKNEAHGVLARNLCDRPPVTDTFGKAGRRWLAGLELPVDERLTLDGRLRQVDFLDAELAALDSEIAKQARAWPEVLRLMTVPGVNVQTAATFMAAIGDIRRFSSPRKLVRYLGLDPRVRQSGSTSARHGCISKAGASEPRHMLGEVAWKVTLIPGPLRAFFERIRARRGPQIAATTTARKLAALFLAPAHPRRGLRLRPPSNDPQQDPPPRATRRRAAAEGAQGHRRRQVESRLRRRARALTPAEAAYRRLVSDWRSSGPPRAGAGATPGRASSGPSKGKAARQTP

SEQ ID NO: 430341 - protein, 419 aa, unidentified
MFKIHRRNCCGLDVHKTWIYACVGITDANGRTEYKQARFSSFSRGLHELADWLAKYGCKDVCMESSGKYWIPVFNILEKTCFVTLAHPKYTKPQKGNKTDRKDAKWICDLFMCDMIKPSFIPPPNIRHLRDLMRYRVKLTNCLAGEKNRAQNCLTVSNLKLDDVFSDVFGKSARSITNYMLEHPGEHFDVAPFVDRRCKHPVEEIQAAVDGSISQEQAVKLREILRHIDEIQAHRRNIETEILSLIAPYQMLLKLMQTVPGFSADPMTSIAVLSEIGGDMSVFPTAKHLSSWAGCCPRDDQSGGKRKSIRISRAGTYLKPLLVQVANSIVQSDKYPECKDRYRRIKARRGHKKAIIAVCRMLLTAMWNILSKLEPYSPKGFLTGHTPNHSKTITKEQGLNLLRARGYVFKDDTPLMVPD

SEQ ID NO: 430342 - protein, 410 aa, unidentified
METIVKRAAGLDVHKAQVTACVRIPGRGGARTQEVAEFQTTVRGLLSLLDWLKAHRVTQVAMEATGVYWKPVWAILEDEFDCLLVNARHVKQVPGRKTDVSDAAWLCQLLEAGLLRRSFVPPKPIRALRNLTRYRKAQIGERQREANRLHKILEDTGIKLDCVATDILGASGRAMLDALVAGTTDPQVLAELAKGKLRAKIPALKEALVGRFDRQHALIVSAILAHLDFLDEQIQLLSDEIEAQLAPFARAVELLCTIPGVQRRTAESVLAEIGTDMSRYPSDRHLASWAGQCPGNDRSAGKRRSGKTRHGSKWLDTALTEAAMAATRTNDVYLAAQYQRLRPRRGHGRALGALKHSILCACWHMPQTGKLYREAGGDYFSRRDPERATRRLVAQLERLGHRVTLEAAAA

SEQ ID NO: 430343 - protein, 345 aa, unidentified
MLMVSGVVGGVDTHADVHVAAALDQNGGLLGIESFPTDGAGYRSLLSWLLGFGPVVKVGVEGTGSYGVGLARHLHREGVVVVEVDRPNRQKRRRLGKSDPIDAEAAARAALSGEARVTPKWRDGTVEQMRVLMIARRSARMQRNQTLNQLRQVVICGPDEVRVRFKDRYKTGLVSEAAAMRSRKGNDPIVFTTNMVIRGLARRIKDLNDEMHTLDRALTELISQTSPSLLACHGVGVVTAATLLITAGDNPDRLNSERSWAHLCGVAPVPAGSGKTTGRVRLGHGGNRHANAALYQIVLTRMSSDPETRNYVRRRRAEGLSTREIMRCLKRYVARQTFKHLPRAA

SEQ ID NO: 430344 - protein, 411 aa, unidentified
MRRIRDRVAGLDVHRDSVTACVQLFDGREVEVDKQRFATTAAGVRALGEWLAEREVTLVVLEATGVYWKPVFYPLEGLFEELWLVNASHVKNVPGRKTDMSDAEWLADVAAHGMVRPSFVPPPPIRALRELTRYRKTQITARGQEIQRLEKLLQDAGIKLSSVASRVWSKSARAMVETLIEGDTSPETLAELAKGRMRAKFPALLEALENRWEPHHSAVARRIVAHIDFLDESIASLSAEISERLRPLEAAVTLLCTIPGVNTLTAEVIVAETGADMARFPSAPHLAAWAGVAPANHESAGKRRPAGTRQGGRWLRNALIEAAKAAARTNDTYLAAKYRKVARRRGPNKATVAVAHAITVAVWHMLTTGQPYQDLGGDYFDRRRDPQRQAQHLVAKLAQLGYTATLEPTAA

SEQ ID NO: 430345 - protein, 355 aa, unidentified
MSSEKYIGLDVHQATISVAVVDSQGKVVMESILETKASTLLEFLAGLRGSLFVTFEEGTWAAWLYDLLKPHVTEVLVCNPRKNAALKQGNKSDQIDARKLAERLRLHDLKPVYHGETGVRMLRELARSYLTVVKDLSRVMNRLKALYRSWAIPCAGRDVYYGRHRSQWLEKIPEAGTRRRAEQLYQQLDLLRRLRQQARRELLGESRKHALTAKLRQIPSLGPIRSALAVALIQTPHRFRSKRQLWTYSGLGRETRDSGEYHYVRGQVRRRKKQATIRGLNKDYNHDLKSLFKGAAPWASVKPGPLQEFYQRSLAKGIKPTMVRLTLARKIAAITLTLWKKGEDFNIHKLNSQAA

SEQ ID NO: 430346 - protein, 364 aa, unidentified
MKSTTLWVGLDVHKESISVAVFEDARSQGRPVVRIPNEPTQIRKVFSRLKKEGEVRACYEAGSCGYEVYRQLAAMGIACDVVAPGLIPVRVGDRVKTDRRDAEKLARLFRAGELTSIRVPTEAEEALRDLIRCREDAREDVLRQRHHVLKFLLRHGRVFRDTKHWTLAHWVWLRAQRFDQPLAQTVFTEYLATLEKTLARVTVLDQEIAKQAEKEPYAALVGRLRCLRGIDTLSAMALIAEICDFARFEHPRALMAYLGLVPSEHSSGGKQRRGGITKTGNSHARRIFVEAAWHYRHGAARSATMKARWKDQPQAVVDHAYKAQERLHRRFFRLTSRGKPSQVAIVAVARELCGFVWAVARAAA

SEQ ID NO: 430347 - protein, 369 aa, unidentified
MGEYSEAFVAFDVAKIKHAVAVAEGGRTGEVRFLGEIENREGPIERTVKKLAGRYGRLHFCFEAGPTGYGLYRQLQALGHDCMVVAPALIPKRPGERVKTNRRDAVTLARLHRAGELTGVWVPDAVHEAVRDLVRAREAAADDLRRKRQQFLSFLLRHSRIYSGSGHWTLAHRRWLANQAFEHAAQQIVFQDGIDAIEDAIARLRRLEEQLVAIVPSWSMAPVVEAYQAMRGASFLVAVTFAAEIGDVRRFDNPRQLMSFLGLVPAESSTGDTVRRKGLTLAGNRRARRALVEAAWTYRYPARVSETLRARLEGLPKAVRDIAWKAQIRLCARYRRLRATGKKLPVVVAAIAREMAAFLWAIGREVAPG

SEQ ID NO: 430348 - protein, 257 aa, unidentified
MIIPAKRKVVGIDVSKETLAICHLAEEKLQHLETENNRLGFNQLVKQGGTDSLYVMEATGIYYLQLAYYLYEQGAPVAVVNPVIIKRYIQMHLGKGKSDKKDAQWIMRYGEQNQVAYWQPEEKIIVECRQLGQVIEQLIKQKTIVINSLEAPERQPVKSQLAAKSLKQTLQTLEKQIKQLEDRLLENLEKAFTKEIKLLSSIPGIGKITAGRLLLFAGGFRNLNNYRQVIAKAGLSPREYTSGSSIRYVLPRWGQLN

SEQ ID NO: 430349 - protein, 352 aa, unidentified
MLATAQTAIAVVGIDIGKNSFHIVGLDDRGAIVLRQKWSRNQVEARFANMPPCLIGMEACVGAHHLSRKLNALGHDARLMPARYVRPYSKGQKNDFRDAEAIAEAVQRPTMKFVATKTADQLDLQGLHRVRERLVSQRTGIINQIRAFLLERGVAVRQGLRFLRKELPSILAAPSDALSPRMVRIIEDLAGDWRRLDERVEGLSKEIEAIASRDAGCERLISVPGIGPIISSAIVAAIGAGDVFSKGRDFAAFLGLVPRQISTGDRTILGKISKRGNRYLRVLFVQAAWVVLIKPKSWERQGLKSWIEAAKKRLHRNVLAIALANKLARIAWSVLAHGRHFEATKFGRAIAQ

SEQ ID NO: 430350 - protein, 411 aa, unidentified
MASQLQRAVGLETLLVAIDPAKVTHRVWLATGARGLIGEPVSLPAFREGVDQLARLIAASGVASELVIGVEATGSLHRPWVAELERRFPGRVRLLAPSETKAARAQLGSRRFKTDDRDCAALVWLLRQGLGRLPEPPALEGLLGAVRHRRQLVDELKILRQRLHGQLNVLCPGLSAPQGHGRVLDLLQPSGQAVLACAAAFAGRPASVRSLLARAPGRLSRNSASYWAQRWRRCLPPPSDAELRAERLTLDLERLQVLLRALAAADAQTAALLAQTDGQVLTSLPGVAVVRAAAFAAHSLPIERYPSPEHLYSATGLAPASYESGTLSRRGGISRQGLAEHRDALMAIAWGLSLSAPTFRERARELRGRGFAPMQARVALARHACRLCYALLRNQQPYDEARYRHGRRRGR

SEQ ID NO: 430351 - protein, 349 aa, unidentified
MKIIGCDLHARQQTIAMVDTETGEITEKTLSHEGNAMREFYAALEPPVVVGIEATGAMQWFLELLEELGVECRVGHPAKIRAAETRKQKHDRRDARLLLDLLLMKDRFPEIWMPSTEQRDLRTLLRDRHQWVRMRARLQHTLQAMALNHALRRGPALWSVAGQNALQALPLPPYSSQRRTELLRLYVQLQKRIQALDKEVDVQARQRPQARRLLTHPGVGAVTALATEVFLGDPNRFDTGNQVASYIGMIPCEHSSGKRQRLGKLSKEGNSLLRYLWTEATMHAVGKDPELKRCYRRKLIHKGMGKARIAAARKLGIRLWIMMRDQIDYAEFCRRGRLRQEGESPCGDA

SEQ ID NO: 430352 - protein, 358 aa, unidentified
MIEEDGIRHVVGGVDTHKDLHVAAVVDERDLVLGTRCFATTRQGYRQMLGWMRSFGELRRVGIESTGSYGAGLLRFAQQAGIEVLEVTTPDNQDRRRRGKNDDLDAQNAAHAAFAGKRTVTPRSRDGMVESLRVLAACRKTAVAARRVALQMIQNTVVCAPDGLRDTLRAMTRMQLIRTLAAWRPDLSAYRDVEAAYRISLRSLARRYLELHDEIADLDAMIGAIVDELAPDLIARNSIGHTGAAQLLLTAGDNPERLRSEASFAALCGVSPIPASSGKTVRHRLNRGGDRHANSALHIIAIGRLRTDPKTKAYVAKRVAEGHSKLDAIRALKRYLAREVFGLIARRQKEINQTRIAA

SEQ ID NO: 430353 - protein, 350 aa, unidentified
MLIIGCDYHPGFQQIAFVDTETGEFGERRLTHRAEAEQFYRTLKERSLRVRVGMEASGHARWFERLLSELQFELWIGDAAEIRTKRVRKQKTDRQDAQLLLKLMVEDRFPRIWVADAENRDLRQLLWHRHRLVQMRTRVMNQLHVVALNEGVRRKKALWRPAGRSELESLVLAPWALRRRRDLLDLFDQLTPKIHEVTRAIEEEVEKRPVTRRLMTHPGVGPLTALAYELVIGTPERFHNGKQIASYVGLVPSEESSGDRRRLGHISKQGNSLLRFLLVEAAQVTVRSSAQWRSKFFHLAMRRGRKIAKVAMARKLAVHLYWMWRQGWDYGQFEKFGSHAGEPGNRHGAQ

SEQ ID NO: 430354 - protein, 343 aa, unidentified
MDHSAGLDVSVKETSVCIVDDTGRIVREVKVASEPEALLSVLTNPGYHFKRIGLEAGPLSQWLYSALAEAGLPVICVETRHMRAVLKAQINKTDRNDARGMAQMMRVGLYRPVHVKTLRSQKLRMLLTHRKLLQSKAIAIDNDLRGTLRNFGLKVGMVGKVKFEARIKELVENLPDLAELVEPLLVVRRVLREQFVIQHRRLLAIVRDDEVCRRLMTVPGVGPVVALTYRATVDVPARFRKSKAVGAVFGLTCSKYQSGESERSGRISRCGDEMMRVMLYEAAQSMLLHSKKWSWLKAWAMQIARRRGMKKAIVALARRLAVIMHRIWVDGTEFRWTREAAVA

SEQ ID NO: 430355 - protein, 307 aa, unidentified
MFVGIDVSKDRLDVHLRPSGEAFAVSRDGAGIAALVDRLGPLAPALVVLEATGGFEITVAAGIAGAGLPLAVVNPAQIRAFARATGRLAKTDRLDAGLIAHFAEAVHPEPRPLASEAAQGLAEMVARRRQLVEMIGMERNRHRTARSPKVLRGLAGTLKALEAALAAIDREIEDEVRGSPAWRAAEDLLTSVPGIGPITARTLIAELPELGSIDRRRLAALVGVAPVNRDSGAMRGHRAIAGGRADVRRVLFMAAVTAIRWNPPIRDLYLRLRARGRPAKAALVAAMRKLLTILNAILRDGKPWRNA

SEQ ID NO: 430356 - protein, 430 aa, unidentified
MFTLKKADLLSTLFVGIDISSRENVVAVMDFESTKPIASFAVPNNEPGAEEMAKKISTFITPESGLKKLVIGLESTSFYGVHIANYLSTCRELMPFHTEVYCLNPKSIANYKKSYIGLSKNDYIDAFVIADFARVGRITTKPWRGCQYLALQRLTRHRLHLVKALTREKTYMLSNIFLKFSEFTMLDTEEQPFSNEFGATASAVLTEFLSTEEIVDMSMEKLVEFICEKGRNRFPDPQKTAKLLQVAARNSYRLDKCLYEPLTVAIASSFTMISTYNAEIKKVNKAIEKTIKGLNTNAFLSLQSIPGIGPVMAAGIMAEIGDITVFKSQESLAKYAGLVWRENQSGQFKADDTSMSKAGNSYLRYYFLEATSHIKLHCPEYREYYSKKYAEVKTHQHKRALALTARKAIKLIFGLLAKNQLYSRNRVGQA

SEQ ID NO: 430357 - protein, 322 aa, unidentified
MHSLNIESKNFVGIDVSKHTLDVWDGHHQQFTQIANDEKGIKSLVKVLRKNKDPHVICEATGPYHQQLQALLAKATIKLSVINPYRIRKFADACGILSKTDKIDAKVITLYGEKFNPEETQPLTQIQSKLRELVSFRRHLVESRKVLSQRTPGFQVPEIQKLMSKQKVLLDSQIKQIQTKIKTLIDSCPFMKREFEILVSIKGVSLVTAATTLCEMPEFGTLEPKQAGALSGTVPFNRDSGLFRGRRRIKGGRKQFRDVLYMAAQSACRYNPDMKKIYDRLVEQGKAKKVAIVAVMRKMAILMNRLLMENRLWSEQYAVDSQ

SEQ ID NO: 430358 - protein, 459 aa, unidentified
MTKRKKKSPVSATPLDTLKQLNLNAAGLDIGAEEIYTCVPADRDEQSIRVFGTFTTDLYALADWLEACGIETVAMESTGVYWIPVYEILEDRGFDLCLVNARHLKNVPGRKTDVLDCQWIQQLHTYGLLRASFRPPEEICALRALARHRDNLIRYRSAHIQHMQKALQMMNVKLTQVVSDITGVTGLSIIRAIVAGERDPQVLAGLRNPQCAKSEAEIAKALQGNYKPEHLFVLKQALAQYDFYLEQIQECDAELEAMYAALPPSDDQVSPPPKPRGSKPRKNQAHFDLATALYQMTGVDLTAIDGLDALTVHKIITETGVDMSAWPTVKHFTSWLCLAPYNDKSGGKVLRRGSKKTQNRANTAFRIAAQSLSRSQSALGAFYRRMRAKHGPAKANKATAHKLARIVYHLLKYREPYVDPGESHYEQQYRERVIRNLKRRAARLGMELVSTSAQAPVVS

SEQ ID NO: 430359 - protein, 438 aa, unidentified
MPNNVIFNFDELFISVGIDVGADFSWMSIVLPNQQFVGKPYKILHNSMDSLASAVSKIKEAEEMYSLESRIFLESTGIYHYPLFCYLRDKGFNCSVINPIITKNSTNINIRKVHNDRFDSKKAALVGLKPDLKVSLMPSDLALNCRNLCREYYDLMDSRNAYMNKLIDELRMVFPQYLGIFSKVTIDTSLILLETYTSPSAFINADKQEIIDLIRSTARFGLTYACNKYNAIIQAANDADEFGYILDSNIKRIRLYIGFIRKYDEEINSILESMHELAAANEDTDFVKQIRLIETFKGAGFLSAMSLMGEIGDFSAFSKPKQLFAYFGLDPAVKQSGKFEGTKIQMSKRGSAIARRVIHTLTLQSISASRTGESKNPVLLDYYLKKCESKPKLVAMGAVSHKVCNMIFAILRDSKPFEIITPQEHIKKYNAAKCDVAA

SEQ ID NO: 430360 - protein, 361 aa, unidentified
MLYTGVDLHRRLIVVCTVDNNGSIIARSRMKTDPALVSDYFRRWPDQHRAVVECTTGWYWFSDLLRSLGVDVVLAHAKYLKAISYAKVKTDAVDALTLAQLLRMGYIPEAHQLPPEYRAMRDLLRQRMVMEHKRTNIIQRVTSILAQFNITDLPSSPYQPGFSDFLNQCSIPEQYRMTLMMYHLECVQTSEHRKQLEKYFKAQLRPTPAVQLLMSLPGIGDITGSIIAMETGDIHRFADDKHYCSYCRLVPGAKDSGGKHSHRSGSKDGNQYLKYAFTESAIKAMRFYPEIKHFASRLERRSSKAIARTVVAKELAKISYYVLSRQEEFKTFKGIEINKLRNWPRSRKPVRITGGITPPSV

SEQ ID NO: 430361 - protein, 420 aa, unidentified
MEDWSGGGSYFCHVRIGGADMDERKGFRWFLGIDISKETFDACCISGQGEKQFSISTSMDRKGFEELIKQIASLSVPQESVLIGMESTACYHVNLYSFLISLGYPVIVINPLLISNFVKLQLRKTKTDKKDASVIAQFLLLNRDSLGRTVGSSDFSDIRDLSRQRESLVDQMTSDKIEIKRLLTMTFPELEHIACIFTKSMLRLLCQYPSAASIRQAKRSKIARILIPGSYGKQTDASVERIVKVAETSIGTASPAKEVILKQKVSLLMQLEQHLQELTDILTEQCKGKMRRDMDILTSMRGIGKKTAMNFLIEVGRDVKEFESHKKVIAMAGLDPALYQSGKIDRKGKITKRGNRHLRRVIWVMTTKVIQFNVRFKQYYLKRIQDGLPYKMAVLATAHKLIRIMFAMLTNETQFNESMN

SEQ ID NO: 430362 - protein, 358 aa, unidentified
MTQVKKLDFSGATIYCGVDVHKKSWRVNIQDSEFELEDFTQNPDAVLLHKHLTKRYPGASYKIGYEAGFSGFSMQRTLSQSGCQCWVVNAADIPASDKDKKQKQDKADARKLCAYLQSKKLKGIHIPDAAWEHARTLVRTRERIVNNQTRCKNRIWQLLHFSGLPVPAQQQEGKYWSKRFIDGLQKMDCGGSVHLQQSLQLHIKDYLQTRLLLLEATRAIRGLCREQHYAGDIKLLRSIPGIGEINAAVMLFELQDVTRFKRFDYLCSYVGLVPDTSDSGETKRTKGITHRHNYYLRTALVESSWSVVRKDPALLMKYKEYCRRMEKNKAIIRVAKHLLSRINFVLKNKKEYVTGVVA

SEQ ID NO: 430363 - protein, 369 aa, unidentified
MKNGSTLHVGLDVHKDSIVVAYASADGGDPVHLGAIGTRQCDIDALVRKLQSTGARLVFIYEAGPCGYWLYRYLTQKGLACLVVAPSLIPRKPGDRVKTDKRDALTLARLARSGDLTPVYVPQVADEAIRDLARAREAALGDLNDARYRLKALLLRNDIRYTGRANWGDEHRRWLARFVFPTPAQQIVFQEYVRTVTERTELLRRLEAALLEQATTWRMSPVVEALQALRGVQFTVAITTVAELGDLTRFDRPPELMKYLGLTPSEYTSANRRRLGGITKAGNGHARRVLVEAAKAYRHRAKVSEQIQARQQQLPKAICYIAWRAQVRLCGRYRKMLARGKHPNTIAAAIARELVGFMWAIAKEQPLVA

SEQ ID NO: 430364 - protein, 352 aa, unidentified
MTWVGLDLHKRYITACAMSDAGVIVAEHRRLPADDVALIGWLAALPGPVTVAMEATLYWAWLHERLTTAGYAAVAAHPYQVKLIWQARCKTDPIDARKLAELARTNLLPTVWVPDAEVLARRKLLRGRAYLVRLRMRMKNRLHGYLTAENCRCLVTDLYGKAGRAWLHAVVLPEITRVQVDLLLELIDAVDARVKRLDQRIRKTVARDAAAERLQTVPGIGPFGALLLLAEIGRIDRFASSHQLAAYAGLVPSTRSSGSKTSHGTVDGAGSPWLKWVLIEIVQTLKLAPGPIGMQYQKLLRSKGKAKATVAAARKLCCYLYWMLQNSWSYEEWLQQHEGWGVRPEQALVSVG

SEQ ID NO: 430365 - protein, 417 aa, unidentified
MEDKASASPCRYIALDIHKYYSVVAGVDREGEEVLRACRVEHLDLENWALKHLLPTDRVVIESTTNAWHVYDLLEPLVGEVQVANPIKVKQIACARVKTDKKDTLILARLLAANLVPVVWVPPKHVRELRQLISHRRRMAGMHTQVVNRMHSVAHRHHLNHPKGKDFQPKNTGWQRDESLSRLEKMQLELDMETREHLEKQIERMTRELGRMSHEEPWASEMLYLMQIPGCGVVTGMTILAAIGDITRFETPKALASYSGLVPGLEQSGVKLRGKGITKEGRRELRWVMVEVAWRAVKADPHWKKYFEELKRRMHPNQAIAAIARHLLTMVWYVLTRHEPYSHYSPERIAYKYLTWSWALDEDQRQRMTRPQFTRYYLMRLGIGDELRRVALNPKFPYRLASVEEVLELKPELRPPD

SEQ ID NO: 430366 - protein, 461 aa, unidentified
MRNNRKSGDSPGSTRPIEGLPIVRAKVAGIDIGSERHWVCAPGLEGSGREVGDFGATTPELVRMAEWLKERKIESVAMESTGVYWIAPHEVLEKNFEVLLVDTRQLARVPGRNKKTDPSDCEWIQRLHSCGLLNGSFRPQEQVCMLRTLVRDKANLVAESADWVRRMQKSLDQMNVRVHRAVSELNGVTGMAIVRAIAAGERDAQKLAQLRDRRCRQSEQEIAEQLSGHWREDHLFSLRQSLQMYDAIAERITAYEQEILRKLADMKVEEHGGAPVPPVKNLQKAKAIKKRGQEPMRQALYRMSGVDVTQIDAIGVETVEVVLSEYGPDLSRFPTEKQFVSHATLAPRVRKSGGKPLKHKKRNSASTRVAAAFRMAVLSLRHSETALGAYYRRLARRIGADVAVFATARKLATLIYRLLRWGQPYVDEGAEAFEKRYRQQHIKGLVARAKELGYQLMPTTT

SEQ ID NO: 430367 - protein, 347 aa, unidentified
MKVLIGVDPHKASVAVAVIDEAVGEFVERASFPQNRAGLRALERWAQRFPERRWAVENAGGLGRHLAGRLSVAGESVVDVPPKLSARIRVLSTGNARKNDGLDALATALAASRNERLAPVDPEAASEVLRLLSERREDLVAERTRALNRLHGLLRDLVPGGVGGTLSARRAARILRGIRPQEGASARLRRRLASEILRDVRTLDRKIADLNERIEAEVEASGTTLTDIFGIGPILAAKIIGTVGNVVRFPTKAHFASYSGTAPVEASSGEVVRHRLSLAGNRKLNNALHLVAVCQARSDALGGSYYRKKMAEGKSRKEALRCLKRRISDAVFRSLVADMQAPSCSAA

SEQ ID NO: 430368 - protein, 346 aa, unidentified
MNQIIRIGMDTSKHFFQLHGVDTAEHPVLRRKLRRKEMLAFFAKLPPTVIGMEACGASHYWARVLCELGHTVKLIAPQHVKPYIKRNKNDGRDAEGLCEAMSRPTMQFVPAKTAEQQAALMLAGMRERLVGQRTQLSNAIRGYAAEFGLIAAKGLDKIEPLLADIAADEALPVLARELFAMHGREYAQLQAELKNIDARLKAWHRANADSRRLAQIPGIGPIVATALIMKVPDPRLFPSGRHFAAWIGLTPKDHSTAGKTRLGKITRAGDERLRSVLVAGATAVIQQAKHGRGHPLPWLLALLKRKPPKLAAVALANKIARIAWKLMTTGESYDGMRMPGASAVAA

SEQ ID NO: 430369 - protein, 471 aa, unidentified
MRISVGIDIAKEIHWVTAIDADGVVRIDRKLLNTPSDIAALGDELTALHGTVRIGLDVIGGIAGLAEAMLARAGFALVHVPGLAINRARQGTVGGENKSEPRDARTIAGQVRTRSDLRPIEPAAQLDLEIRLLVSRCSDIVQAQTQRLTSMRDLLVGIFPGLEACLDLKTSATWRSDCEATGGGVTGGGPLHLLTRYVTHSELRAAGKKRLVRHLHAAGGLPNVDALADRAPAAAAEQTIVAPAERMTARLMHELAAEALVSRARLNELDRELEALLGLHHRLLAIRLRSSRWRSHRRAAALILSLPGMGVVLTAELIAEADNLSRFRSADALASAAGMAPVLRQSGRMHFLRRPNGGNKGLKRLFYQSAFCSLNHDDSRTFYDRKQREGKRHHHAVIALARRRVNVLWSVIHPRTPFSIWLQNIRLTNRSGCRAGAGWRRMPACCGAALPASLSPCAAGAGCDGGGPGSA

SEQ ID NO: 430370 - protein, 373 aa, unidentified
MNALAVGWDVHRRFSQVSVQELLADGELRIVERKRLEHDDRVAMAAWLGKLPASTPIAIEGAFGWQWVADWLSELGLSPHLGHPPAIRVLAKNEAKADRVDADRLGRFWLRGIFPESYLSTPEVRQLRERLRHRQALVALRVQVKNRIQALLHRAGVLHDLSDLFGKRGRVLLDELKLPEASRAVLDDGLALLDALGAQIAALEAWMLEHLAEDAIVRLLLTIPGIGLVLAHVIRAEIGQLSERFANAKRLASYAGLAPLSDDSADRHGRRHIGHACNRTLRWALVEAAGIALRLGACPSKLRKLYDRLTRQGHVNKMQGRVAVARELCELVYVIWKKGEPYHDPTSPASTSSRPLRPRAKRSVASSRARRPQ

SEQ ID NO: 430371 - protein, 384 aa, unidentified
MKQNQETLRIKDNIKEAILHIAFELSHLKWKLAFSNGEKMRTVTIEARDLDKLHAEIEKAKQRFGFEGQIRVVSCYEAGRDGFWLHRYLLSCGIENVVVDSASIEVNRRKRRAKTDRIDVRKLLHKLLRYHGGERLVWSVVNVPSEQAEDGRQLHRELEVLKKERTMHRSRLKSLLIQQGIVAPNPSSRKFLIQLETFRRWDGTELPADLKSRIIREHGRLRMVEEQIYTLNKERENRVAAADNMSMQQVAHLMTLVGIGMNSSWKFVMEFFAWRDFKNGKQIGALSGLTPTPYDSGSSLREQGISKAGNERVRTLAVEMAWVWLRFQPQSKLSQWYLKRFAEGGKRMRRIGIVAMARRLLIDLWRYLEHGVVPEGARLVNIVK

SEQ ID NO: 430372 - protein, 392 aa, unidentified
MSKITMIGCDLHDRSMTLKVAVDKDNAIKKTFDTADVPEMIAWVNEFAERNQAPRIVFAYEASGQGFGLYDTLTEAGIECYVLAPTHLAQSAHRRKNKTDDKDAQMILDEVRGYLLGGRKLPKVWVPDPQTRDDREPVRMRLELAQQRTRIKNQIRNLAKRNKLSFPAWFTRSGDWSKRSVQWLRDVAGGQAAELGSGARSALGTLVNLHEKICEELRSLDRAIAALAKSDRYASRFRKLMLMPGVGTLSAMTFLTELGDLDRFANRRQLAAYLGLVPQVFESGERDDRKGHITHQGPARVRHVLCQAAWAALRCSEKWKTTYDNIKRGMKKRSKIAIVAVMRRLAIAIWHTARSPEVDGLLEEIDQQKTSARAQQKGAAPLEDSINNHATP

SEQ ID NO: 430373 - protein, 409 aa, unidentified
MRYYLGVDWADQTHAVWVGDERGTKITARTVPHTAEGMIEWGRELDEWRAQGIELWAAIERPEGRVVDFLLDHGVLVYPVNPKALDRARDRFRQGGAKSDPFDARVLAEVLRTDHPRLRALQPSSEAAQELKLLTEDCQRQIRQQTRLVNQLTATLKAYYPRALEVAELTTALARDFLQAYPTPAAVVALTERQWQRWARAHRLSEARTQELWALLQRPQLPVPAHVVRAKARLMQALVTELEPVVTVVEAYRQAVEDFFAAMPAAQWIRTLPFGEHGVTAPTLWARLGDAPGRWESFHHLQAQAGSVPVTVKSGKQHVVHFRFACDKALRYVVDQVAFLSLRSSEWARPYYDAQRARGHSHREALRALGAKWVKILFILWERQVPYDEPHHLATMARQQQRQRPKQIA

SEQ ID NO: 430374 - protein, 381 aa, unidentified
MRTTVLHNEQGTTPERVLFMAFELSEKTWKLGFTTGPGQKPRERGVAARNQARVLQEVAQAKQRFGLPESAPVVSCYEAGREGFWLHRFLQAQGITNHVVDSSAIEVNRRQRRAKSDGLDLRKLLSMLLRFHHGEREVWRVVHVPSVEAEDQRHLHRDLESLKQERASTTARIKGLLSSQGLRLTTLNKLPEQLDALRLWDGAPIPSGLRHRLLRVYAHHQFLSEQIAAVEAERRALLETSHEASLEKIRQLMQLKGIGINGAWLLVMEFFGWRDFKNRREVGGLAGVTPTPYQSGESAREQGITKSGNRHVRWMTTELAWSWLRYQPESALSCWFRERFGSGGKRLRRIGIVAVARKLLIALWRFLKSGVLPEGAVLKEA

SEQ ID NO: 430375 - protein, 368 aa, unidentified
MRMDVTGFVTFIGVDLHKCTVTLRAVRADGELLGQLKCDTKCIDRIAEWIEALPGPKWLAVEACPFVEWFIDRFTPCVDRLDIADATELAMRRGKRRKNDPNDALDIALRLARGECPLGYIADPQLMQLRKFGRHWRQLSRSLAKAKQGMKSMLNAANIRGPQFDGPRAHRWFLTFGGLLQPAQRLAFGNYLDQILLIERQREILRRELLTAARSPQFAATEKLLRTTPGIGPIWALVIASEIGPFDRFPNADALEFWAGMTADLKESAGRTQSGNITKAGSATLRWALCQAAVTLCQSDAKQEATRQRFIARMPRAKANVVMGRRLLRTLYAMVRDGKPYQCGERRDRTKAANKAKAKRRGRALQPA

SEQ ID NO: 430376 - protein, 371 aa, unidentified
MKKDTIFVGLDVHKNSISVALADAGRDGEIRYYGVVDGDLESVHQVARKLQSTGATLRFVYEAGPCGYVLYRSLTSKGFECIVTAPSKIPRKSGDRVKNDRRDALTLARLHRAGELTPVYVPTEEDEAMRDLTRGREDATKALRVAKQHLLAFLLRHGHRYSGKTYWSKAFWNWIADIKMPHRAQQIMLQEYVHAVHEQCERVQRLTDQIRELVPQWQLAPMVKALQALRGVSLIVACTTLAELGDLTRFPKPKQLMAYLGQVPSEWSSGDSNHRGGITKTGNSHVRRALTEAAHAYSYPARESRVLLKRLEGLPQPVQQIAWKAQVRLCARFRSLMAKGKMRNKVVSATARELSAFIWSIAQELQPKSQA

SEQ ID NO: 430377 - protein, 350 aa, unidentified
MLADEVDAVIGGDTHRDSHALEMAAPNGGTIGTLAIGNDETGYADAIAWITQNSPGPRVIVGLEGTRSYGVGLTRALQAAGFLVLEVEQPRRADRRRGKSDPIDAHLAALQVLRMPADRKALPRSDGDREALRILLIARREMTTVKTQQINRLRALLLTGDDADRELCRGPMSDAHLQLIARRRGRLDDTKEQQIRRGEARRLALAIRQATSELAANKKQLAELVASFAAGLLDKFGVGPVSAAQAIVSFSHPGRCRNEAAFAALAGVSPLQASSGRTVRHRLNRGGDRQLNRALHDIVKTRWRDCPRTHAYIAARRAEGKSDPEIRRCLKRYVARELFRALTAARVDNT

SEQ ID NO: 430378 - protein, 366 aa, unidentified
MHVQGREPVNSLLSLIPLLQSIMPNIQFKDIDPESKPVLFAGIDVGAEELILVIRKNGKPFDPQKFANTPADRTRLVKKLVKLPGIIVCLEATGVYHFDLSLALHDAGVLLMVVNPKAAHNFAKVLMKNSKTDAADANTLAEYAARMDFVPWTRPSNETIALRSFARRIDALTRQKAAAKNHLHALTATSETPKAVLKDVKLAITQLEKRIDSLTAGALILISKHPDLERILALLIGIKGIGNTSAIALMGELLLLPPDLSHREWVKFAGLDPRAFDSGKSVHKKTRISKAGNRHIRSALYMPALSAKQHDKHVKAYFQHLMDNGKTPLQGVCAVMRKLLHAIHGMLKHNEPFDNTRFYAIPASAE

SEQ ID NO: 430379 - protein, 379 aa, unidentified
MNKTQVIQKDNSTKEVNLYMAMELSDKKWKLAFSDGSKERLKVIDSGEIADLWKEIANAKEKFGLDEDTQVISCYEAGRDGFWIHRYLLNKGIENNVIDPASVEVDRRKRRKKTDRLDAKKLLMSLMRYMWGDKQACSIVRVPSVKDEDERQLHRELESLKKERTRHSNRIRSLLISHGVRIDNPGRSDFKEYLEGIRLWDGSGISKNLKDRLKREHDRYSQVGAQIKELEKFRKELIRDDESESMSRVRQMLKLKGIGIESSWLLEKEFFGWRKFKNRKEVGSLSGLSPTPYSSGSSNREQGISKAGNRRVRAMIVEISWGWLRYQKESKLTKWFNERFANGGKRMRRIGIVAVARKLLIDIWRYLEHGVIPEGAIVA

SEQ ID NO: 430380 - protein, 411 aa, unidentified
MEVAVITAVGIDVSKSKSTVAVRRPGGEIALRPFEVHHTNSDLKKLASTLKKLGGDIRIVMEHTSTYWRPIALTLKEAGFFVSIVNAMLIHDFSDNTIRKLKTDRADALKIANYALTFWDTLPPFNNEEETRLLLKMQSRANERITATATALRNGLIALADQTFPGVNIAFAPNTKNANGHEKWVDFFLRYWHKDCVCQYSMEAFTESYRGWCKRKNYKFRTDTAHKIYLLAQEGVATLPKCESTKMLITQACKSLNAVCEAKQSTQLEMQRLAAMLPEYEVVMQMEGAGPITGPALMAEIGDVRRFKNKKALVAFAGIDAPPFQSGAFESKSRHVSKRGSPHLRRTIFIISNIILTRSNPENAVYCFMDKKRSEGKHYYVYTVAGSAKFLRVYYARVTEFLRSQPSSDAC

SEQ ID NO: 430381 - protein, 363 aa, unidentified
MKIMTGIDLHSNNALCGLMDESGRRLVHKKLPCELPAILQLLEPYKDRIVTVAIESTYNWYWLADGLQDHGYPVVLANPARMKPYDGLKHTDDVSDAYFLTELLRLGILPTGHLYDRKHRPVRDLLRRRLLLVRQRTSLILSFKSLNERTLGQRVPLARVKTLSAEEARARFTEPADRLLSGQQIELMGQLQQAITKIEEHVLGVAGEWSSYQRLQELPGIGKILGLTIALETGDAKRFAGAGNFASYCRCVKSLRQSNGKKKGENNRKCGNRYLAWAFVEAAHFACRYDERCRRFYDRKAKQTNPIIATKALACKLAKAAWHVMKDDVPFDADRVFGPGRKEAFGETGREPAKGSGRQSPQD

SEQ ID NO: 430382 - protein, 458 aa, unidentified
MYRELKPLRQALSTELKASMPPLGPGVEPEQLLQTYLDRLTMYVGCDVADKTLTLIALDADGEELKHLCDVPNTPDGFERIWEWMEGLRCQHHLRITLLAMETSGIYYWAWWDYLAGRPNLARVLYNPRTTEHMTEVLSKRVRTDLVDAYALAEQVRLGSTPEVVPTEDSDLLTARFCSRAARDLAQRINDHKNQMRSFVRAYNPAVGRAFPGAKFHHPAVYALLQQYLFADELVDAGVDAITTILEDNWRSAFGRDQAQQLVDLCRQTLTRPIGRQVIQQRVRYLTNDILDAQKQKKYFLKTGYGLIKCRQEAKLLHDSTGAGVSNTLALVSEVGDIHRYPSGAHVASFLGLTTSKHISGTTLFHSKRITKQGSPNGRYAAVNMAWHLSLRVPKYQAMYKRIKSRKPPRKGHFVALVAIARDFVTNVLYDMWRYQRPFFLEVEDYRAYRKTHPRSDD

SEQ ID NO: 430383 - protein, 395 aa, unidentified
MEFLKYGLGIDMAMEKFDACISIIDKLQQVMIRAQCSFTNNKKGFDAFIVWVTKNTKLAIPAVYLMEATGIYYEQLAWFLHNKNCSVSVVLPNKAKKYKEALGLKSKNDRIDAKGLAQMACKQNNTTWKPLSSNIYFLRLVTRQIQSIAEQSTVLKNQLHSLQYGMYRDKAIEKMYTRQLDLLQKNKKSLELRVEQIIECDEILKKKFNNIGKIKGLGLQNLAVIVAETNGFTAFENVAQLVSYAGYDVVENQSGKRSGKTKISKKGNHRIRRCLHFPAFNMIKYEVPPFKNLYERVHAKNKIKMKAYTAVQKKLLEFIYILWKKDEAFNPNYQDKKSRDVESVPSFASVPAEPSIAGGDEEKKLKFIKQKITPAITRVTQDKHPSKYRRMPSFA

SEQ ID NO: 430384 - protein, 489 aa, unidentified
MSTASQQPAGRKARKIHAKALKRKARGSQRQQGEGNQPRSELRITNPDAAGIDIGSQVHYVAVPEGRAERSVRSFGAYTAQLDELVQWLKECGVKTVAMESTGNYWIGLYQKLEAAGFEVLLVDARQAKHVPGRKSDVQDCQWLQQLHTYGLLRAAFRPEDSICRLRTLERHRKNLVEAAGMFVQHMQKALNEMNLHLHHVLSDISGYSGLAILDAILAGERDPRKLASLADYRVKKSQAQIEAALTGDYRPELLLVLNQSLEGYRQIQQQLAQCDLAVEKQLAQIADCTNPSQDSAPKQPSPDWASSKRGKTKAKDALEVSLAGHLKRILGVDLTTIPGLNVVAILTLVSEIGTNMAKWRNEKAFVSWLGLNPNNKISGQRVLSSRTRKVVNRAATTLRLAAMVLGHTNTPLGSFYRRKRAQLGAPKAITATARKLGCLIYRLIKNGQGYQETDLQVYELKYKQQILNSLRKRANSFGFDLVEVPKAA

SEQ ID NO: 430385 - protein, 396 aa, unidentified
MAQIWAGTDIGKTHHHCVVLDSEGRKLLSRRVLNDEPELLSLLADVLALEEDVLWAVDVADGMAALLINVLLNHGQQLVYIPGLAVNRASAGYRGMGKTDAKDAVVIADQARMRRDLAVIRADDEHAVELRILTDRRSDLSADRTRKVNRLRGQLTGIFPALERVLDLGNVGPLILLTGYQTPAALRRTGRSRLETWLRNRKVRGADTLAQAALEAAERQHTTVPGEKMAAQVVHTLAKEVMGLNEQIAEIDKLIAARFRDHDLAEVIASMPGIGPLLGAEFLAATAGDMSRFPSADRLASFAGVAPVPRDSGNISGNLHRPRRYHRGLQRVFYTSALISIRSCEESRRFYERKRAEGKRHTQAVLALARRRVNVLWALIRDGQCFHRGLPVTAAA

SEQ ID NO: 430386 - protein, 312 aa, unidentified
MMNATDVFIGLDVSKDTLDVAVRPTGEEMSFANTEDGIGAMRDFIQPFSPRLVVLESTGGWEVVAVSALAAKGLPVVVVNARHVRNFAKATGLLAKTDKLDARTIARFAEALKPEVRPLKGEEAQRLDALLSRRRQLLQMSTAEKNRLVLASRWTKKDIQAHIEWLGKELGKVNREIQKLIKKSPLWRERDEILQSAKGVGPAMSMTLISDLPELGTLSRKKISALVGVAPMNRDSGKYRGRRIIWGGRGQIRVVLYMAARAAIRFNPGIREFAERLKKAGKPYKVVVTACMRKLLTILNAMVKNRTRWQAA

SEQ ID NO: 430387 - protein, 382 aa, unidentified
MERTLVTSIHVIRKSGGTLYAPLVLQDRRVAEGPPEPFPERLPTLNSCWERSTTTDSANKDRSATMTDTYVGVDVSRAWIDTFCPLTNQHQRLTMDPAILDTFAAGLSSKGVVVVLEATGGCERALLHALTIHKVGYARVNPRQAREFARATGRLAKTDAVDARMLADMGEKFALKADDPIDPQRARLADLVARREALIGYITKEKQRLGTTVDLFIKDDIATTLTFLKTRLAALTKEIAAHIKSATQLAKLDAALQSAPGIGPVVAATLVAGLPEIGTTNRRALASLAGLAPHACDSGIRRGSRHICGGRAQIRRALYLAAFIASSRDPVLKEFRAKLSNQQRPFKAIIIAVARKLLTHLNAMIRSGQPWSNQINAELTPA

SEQ ID NO: 430388 - protein, 380 aa, unidentified
MQSISTAGVTSTVLVAIELSVSTWLVAARVPGSEKPQLHRINGGDTPALFALISSLRERVSRSLNTAVSVICCFEAGRDGFWLHRLLTAHGVANHVLEPTSILVNRRARRAKTDRLDAVGMLRVLAAYLLGDRQSCSMVRVPTHDEEDAKRMHRERETLVQEKLRIENRIEALLFTQGIRKRPSLRSWERDLAVMRTGDGREIPNHLRAELNRLRRRLIMVLELIREVETERDEVINAKPQDQLCCKITALCRIRGIGENFASVLTREVFYRSFDNRRQIASYVGIVPMPYQSGSMDRDRRISRAGNPRARTTMIQLAWLWLRYQPGSELAEWFRQRVGTLAGRTRRIAIVALARKLLITLWRYVETGVVPANVAIRAEA

SEQ ID NO: 430389 - protein, 455 aa, unidentified
MRKKIKRAIPVRYHDGLSQLRPNAGGIDIGASEVWVDVGHKDAEPTRMFETFTADLNRMGDWLKSCGIETVAMESTGVYWIPVCQILESKGIEVYLVNARQAKNVSGRKSDMLDCQWLRMLHSYGLLPASFRPAKDIGVLRAYMRHRQMLIEYAAAHVQHMQKALTQMNLQLQHVLSDITGWTGMKILRAIVAGERDRMRLAALRDVRTKANEETIAKALEGDYRAEHLFALKQSLELFDTYQKQIASCHEQIEQHLKSLATKADSTELQAARKVKKKRRNQAEFSIREQAFRISGVDLTQIHGIDETAALSLIAEIGVDMNAWKTEKHFSSWLALCPNHKISGGKILRRSTRKSANRAREILQLCAQSLLNSHSALGAYCRRMCGRLGKPKGIVAAAHKLALLVYRMLKFGHQYTDIGQERYEQQYKQRFLKRLARKAHDLGFQLVPSPENQVP

SEQ ID NO: 430390 - protein, 353 aa, unidentified
MKLTIGCDAHRHYSQFAILDGRGQLRKEARVDHAPGNIVEFLKEFAEGTPVALESVGNWYWIADEIEAAGCRPLLTHAAKAKVMMGNVNKTDKLDAKGLATLLHLGSLPMVWLPPAEIRDERELHRTRMAMSKLRTALKNRIHATLAKYALNTSEHSDIFAGDGKAWLKTAITKLPSETGRCVVQELALLDELQGQIGTLEGRIRERIVLTPSMQLLKTLPGIGDILAIVIEREIGSIDRFATGGQLTSYAGVVPTVHSSGGKTHYGHMRKPSNQYLKWAFIEAANVVVRHRRHPAWQTKYVSQVYEKVCRRKGHAIAVGAVARHLAESAFWVLKKSEAYHPPAVRQGSPKQV

SEQ ID NO: 430391 - protein, 416 aa, unidentified
MNEVKCWFVGVDWASESHRVRIADCCGKRLGERDFAHGGAGLAEMAAWLTGVAGAEPSAIHVAIEIPHGPIVETLLERGFNVYAINPKQLDRFRDRFSPAGAKDDSRDAEVLCDALRTDMRAFRRLALAEPLVIELREWSRMTDDLNGERNRLCNRLREQLWRYFPAMLELEQDLGAEWFLDLWELVPTPDKAMRIRETSIARILKSRRIRRVSAPEVLTVLRKPPVTVAPGTIEAASAHIRVLSERLRVVNRQLKDAHRQLDRLCGLLAEPTESEPGQANEQRDAAILASLPGNGRIVLATLLAEGWEALQRRDYHALRTLCGAAPVTKRSGKSCIVTRRLACNPRLQNALYHWARVAVQHDPRSRAKYAALRLRGHGHARALRSVGDRLLNVACAMLRNGTQFNPSLESQKSAC

SEQ ID NO: 430392 - protein, 347 aa, unidentified
MKNTVIGIDISKKSTDWCLMQGTEVVSYHHVDNEIVAIESQLQELMDMYLIDRCELMVCAEYTGHYIYPLAVACQNKQVDLWLESGYNIKCEARKERGKNDKEDSRRIAEYGYKNRLDARYYNIPAQEFTILNSLLAEREDYVLARGKYEGQLKDQKNYSDPILYKAKAKRLGKLIRQYDKLIYETEQELEKLMKENETMGHQAALLETIPGVGRLTAMKMIAATKGFTLFENGRQFCCYAGTAPFAYTSGTSIHSRHKVSQRADKSLKAMLHICAVTVARRCKSNHFTEYYQRKVDEGKNPMTVLNAIRSKLVLTMFAVIRTDQPYSSEIVHNYVEKFSLKPIATS

SEQ ID NO: 430393 - protein, 341 aa, unidentified
MKNLFIGVDFSKEKVDVAIIFADGLTETAPRVFNEFKTTVSGYKQLVKWVEQNSYGIDSSLWLFCGENTGDYSKGLCNFIYGKGYDMWLENAKSIKDASGLRRLKSDRADASMIAEYAMRNYDKAVMYEPLSESLAQLRELFLYRQMVVRHRCSFQVRRGEKRLTMEKSPVKTMISQSGRHIVSELNKEVEKIDKRIAELIKSDEELTEVFTIVTSVPGIGTQNAVCLMVYTDNFRRFNYDSRKISCYYGIAPFGKDSGTSVHSDPHVHYMANRQIKAMLTQAALAAVNFNPVMARYYMRLVERGKKKQVALNNVKNKLVHLVTAMVRNRQTFTPEYKISA

SEQ ID NO: 430394 - protein, 381 aa, unidentified
MTETTMSAANLASGTVTSTTPTTGATSRAPRLTIGIDLGDKHSHLCVLDGEGTIVEESRLQTRPEAFRQRFGGISPARIAIEAGTHSPWANALLAELGHEVLVANPRKVRAIYDNDKKSDRVDAEQLARFARMDPKLLSPITHRGMATRADLAVLRSRSALVDSRTQLVNHVRGSIKPFGVRLAACSTLTFARKAAWKIPRELRPALVPILRTIAELTARIVKFERRIEQLAAERYPETTRLRKVDGVGSITSLTFVLTLEDPRRFAKSRAVGAFLGLRPGRSQSGKRDPEMHITKAGDRDLRRLLVQSAQYILGPFGKDCDLRRFGLALAARGNKSAKKRALIAVARKLAVLLHRLWLSPMDYDPLRHAEGRNLPRRRRA

SEQ ID NO: 430395 - protein, 318 aa, unidentified
MNKVAIVAIDLGKLTFHVHEQDDHGHPLLRKKFKRVELLQHLANLEPCIVVMEACGGAHFMAQEVAKLGHSPKLIAPHLVRPYVKSNKNDFADAEAICEAGSRPTMRFVPVKNQTQQALAMLNSVRDSLIKDRTATVNRIHAAFLEVGISLTPGYKSLKDIPALLEASSFHGLIRKLVADLYEHYLYLNLRIKVLDKEVDCQAAEVGDGKQFKCGRDYSASIGLVPKQHSTGGRTVLLGISKRGDRNQRRLFVQCAQTYVNRLDRQEGKLADWARKLLASHRHRNLVVCALANKFARIAWSIAANHTVFDAGPSAMNA

SEQ ID NO: 430396 - protein, 381 aa, unidentified
MTRATRSHQYSGEARRVLYVAFELGVSEWKVGFTPDLGTKPRVRVMPARDLRRLTREIAEAKKWCGLPAGAPVRSCYEAGRDGFWLHRYLTAETIDNLVVDSASIEVNRRLRRAKSDRLDARKLVAMLVRYHAGEQKVWSVVRVPTVEEEDRRQLHRELRTLKQERTRVTNRMKGLLANQGIRLPKGQDLGDGFEEVRVWDGSPLPAGLRARLQREWAHAQFLHGKILELERERQRAIEHGRGAAVEKVRQLLRLKAIGPSGAWVYVNEFFGWRRFRNRKEVGAAAGLTPTPYQSGDDSREQGISKAGSRHIRAVAIEMAWCWLRYQPGSRLSRWYQERFARGGARARKVGIVALARKLLVELWRFLEHGVIPDGAELKAY

SEQ ID NO: 430397 - protein, 370 aa, unidentified
MKKGLLYVGLDVHKMSVDVAIAEAGPAGEVRFYGRIGGDLEALDKVTRKLQAKGAELRLAYEAGPCGYQVYRHLTARGLKCLVAAPALIPRRPGDRLKNDRRDALALARLLRAGELTPIKVPDEDDEAMRDLTRAREDAICVERRARQRTVAFLLRHGRVYQGKTTWGRGHWAWLLRQVMDHPAQQIVLQEYLDAVREASARVLCLTGQIRDLVPQWRQAPFVTAYQALRGVSLIVAATVVAEVGDLDRFNNPKELMAYLGLVPSEHSSGASVRRGRITKTGNSHARRVLVEAAWAYRLQARVTRHLLKRQEGLPECVRQLAWKAQLRLCARYRRLLARGKARQTIVIALARELAAFLWAIGRAVAPTTA

SEQ ID NO: 430398 - protein, 344 aa, unidentified
MEGYVGRQFVGMDLHRRRSVLVRMTPEGDVLERVRISNDVDRLAAVIARAGDSPEVVLEATYGWYWAVDALRDQGAVVHLAHPLGVKAFEYRRVKNDERDATDLADLLRMGRLPEAWIAPPATRELRELVRHRAKLVGLRSHCKAEVHAVLAKCGIQVLMSDLFGVKGTELLDRLDLPAPYASRIRSQRRIMELLDFEIDHFAGMVRGRLAADPGYVAVQTIPGIGPTLGALLVAEIGDVTRFTRPEQLTCWAGLTPKHHESDTHVHRGRITKQGSRLVRWAVVESVQILPKTTRVGQIRDQVAARRGRNIGVVAAARRQLEYVYYALRDHHVRAPLRSHATAA

SEQ ID NO: 430399 - protein, 435 aa, unidentified
MAMRRRDEEVVFPNAAGIDVGASSHWVAAPRDATEDPVREFGPMTDDLNAMADGLLASGVDTVALESTGVYWIPVFEVLEQRGLKVWLVDARQMKYVPGRKSDIQDCQWLQKLMSLGFLRAAWRPEGDVCVVRAVARQREVLLAEQASWVQRIQKSLVQMNIQLTEVLTDVMSTTGQAIIRAIVAGERDPKALAKHRDRRVKASAEKVTKALTGNWRDEHLFVLCQALAMYDDIARHLTECDAKLQALLRARGQRRVDLGKVPRTGSKLREEFDARQILANWAGVDLTRINGLGLTAVMKILSEPGPDLSRFATVKHFCSWLGLCPGTKISGGKVLSANTKRSANRVRQTLKMAAMSLSRSNSALGAFYRRLCSRMDKPSANTATAHKLARMVYFMLTRGEDFVDQGQQRQRSIAALKRRAAASGFDINPTPVPA

SEQ ID NO: 430400 - protein, 361 aa, unidentified
MAVLTMADLEVLVTGGVDTHKDTHVAAALDQLGRVLGTEAFPATAAGYRSLLTWLNRFGPVTVVGVEGTGAWGAGLARHLAEHDVKVIEVRRGNRQHRRRHGKSDPTDAISAARSVQSGEERGTAKAANGSVESIRLLQVARRSALKARSQAANQIHSIIDTAPEELRSRFHRLPVAQVVATAARFHRSPAIDSPHDAAKCALRHLARRWQTLTDELAELDEQLEVLTVATAPTLVALNGAGTQTASVLLVAAGDNPDRLNSPASFVALCGASPLDASSGRQQRHRLNRGGDRQANAALYIIVISRLRWDRPTQDYMARRLAEGKTRKEVIRCLKLYVARQVHQAICHDLNPDRQPATIGR

SEQ ID NO: 430401 - protein, 343 aa, unidentified
MVTVTRFLGLDYHQDSVQVCVMDAEGNTLTNRSVPNSWRCIGAVVGGTVLPAEFVAVRASIECCSGAAHLAEELIEQLGWSVTLAHPGIVSRMKQNPEKSDWADAHILADLMRLGYLPRVWLAPTEIRQLRSLVRYRYQQVKQQTRLKLRIRALLREHRIPKPKEFGAWSLMWFAWLKCLELDDVTRFLMDQYLEELRQVQRKIADAKKLLFARTRNDALIAKLLKLDGIGPITAITMRAEIARFDRFDTGKQLARYCGLTPRNASSGKRQADAGLVKAGNTQLRMVIIQAAQRLINFNPHWGHFAARLMQRGKPRNVAVAAVANRWIRRLYHQMQPEQLVVS

SEQ ID NO: 430402 - protein, 388 aa, unidentified
MNYIGIDISKYKHDCFILGDFGEVLNAGFSFANDAKGFSELLQIISEYDRNYTRIGFEATAHYALNLKLFLEKNGFSFMELNPVLISKFTKGQTLRKTKTDKLDARIIAQYMEQVAYKPHPTSFYHNYSLKSLTRLRDALVRQRSRYLVQMTNVLDCVFPEFKPFFGKRFSVTALYILTHYGSPEAIANMNSRSFDILRRKSMGNFTMDKFVQLKQLAANTVGDFNAIYALELDTLLELHSQLDSKIRGLEVEITRIITEINPPSLSIKGIGHLSAAVIVSEFGDFKRFSSPDKMLSFAGLEPGYFQSGTSAYTGRMVKRGSGILRYTIFNCCRVVRLHNEVFATYYYKKINEGKPHRVALSHLAKKLVRLIFTLETTQTAFDPAKLR

SEQ ID NO: 430403 - protein, 339 aa, unidentified
MNEVITIGLDLAKNVFQVHGVDAEGAVVIRRQLRRGQVLPFFKKLPSCLVGIEACATAHHWARQLIALGFEVKLMPPHYVKPYVKRNKNDAADAAAICEAVTRPTMRFVAVKSTEQQSVLMVHRTRELLVRQRTMVINAMRGHMAELGIVAPVGVPQVKKLLDIIADGDDDRLPPVARTCLESLARQFVSLHEEIIAAEMRIHAWHRSNEVSRRLETIPGIGAITASALAASVSDPSVFRSGRELAAWIGLVPRQNATGGKARLGRISKQGDRYLRWLLVAGAMSVIRHAKRRGTHLPWLADIIDRKPTKVAAVALANKNARIVWGILMGGGSYRMAAR

SEQ ID NO: 430404 - protein, 338 aa, unidentified
MNKHSILFIGLDTHKEFNEVAYIEEHRGAQPVHLGRVSSSKVAVQKLVRQFESKYSGATLHFVYEAGPCGYWIYRLITSLGHCCYVVAPSLIPKKPGEKIKTDKRDALKLAKLLKSEDLTPIYVPEPEDEAVRDLSRAREVAMKDLKDAKYQLKALLLRNNINYKGTANWSQKHLRWLTEIVLPHPAQHIVLQEFLHTITERISRLERLDNELTHHVHQWRYYPVVKAIQAMRGVRLLVATAVVAELGDLSRFDHPRKLMSYLGLVPSEHSSGGKRHIGAITKCGNGRARRLLVEGAHTYRYAANISTDMQKRQEGLPKDIIDMRGKHRLGSANAIKK

SEQ ID NO: 430405 - protein, 419 aa, unidentified
MTKKSQNSTLIQIVHPICCGLDVHKDKISACLITVDDNGKEQHEIREFSSFTQDLQKMKTWLIGNNCPVVAMESTGVYWHPVYNTIEDTIEVVLVNARHIKNVPGRKTDICDSKWLAGLLRHGLVKGSFIPPEQVREWRELSRLRKIYTESLADYKRRVHKLFITANIKIDSVVSDLFGLTGLNLINLLCKNDEVTLEKVQECTKGSLKKKIPELYLSLHGYFKDHHRFQLIGMMEAIEMFQRQIEQINSRLEILTRDHENLLERIDEVPGIDKKSAQSVLGEVGVTLDEFKSMVAFVAWAGLCPGNNESAGKRKSGRNAVRNHPFKTILIQIAWAAIKTKGSYYKAKYYQLKARRGAKKAIVAIAHRIAKAIYNIIKNGDRYKDLGEEYLSKPNKQRMLKNLAKKADELGMKLVPCEG

SEQ ID NO: 430406 - protein, 344 aa, unidentified
MKHYAGLDVSVKETSICIVDETGKVCRELKVASHPEDLLRVLQDPAWNLVRVGLEAGPLSQWLFNGLAEAGIPALCIETRHAKAYLKAQINKTDRNDARGIAQMMRVNLFRPVHVKTLASQKRRALLTARKLLQEKAIAIENDIRGLLRNFGLKVGVASAVMFEQRIRELVEGMAELGELMEVLLDARRKLREQFSKLHRKLLSIVREDEVCRRLMSVPGVGAVSALAFRATIDVPSRFRNSKAVGAVLGLTPAQHQSGESNRIGRISLCGDGMMRTLLYEGAQSILTRSVKWSWLKAWAMKIAKNRGLKRAIVALARRLAVIMHRIWVDGTEFRWTKEEAVSA

SEQ ID NO: 430407 - protein, 313 aa, unidentified
MLYVGIDVAKNKHDVTALNVPGKTVLKPLTFSNNKAGFELLDLSLRQLNQDCLIALEDTGHYAFNLLNFLHEQGYKVYTYTPLLIKEFAKSLSLRKTKTDKKDAHGIALKLLSDPNREQFQHDNRQVELKILARHIHRLKRKQSDWKVQYTRCLDIIFPELDKIVGKHAECTYQLLTRYPNPQKRLEAGFDKLIEIKRLTASKIQDILSVAPRSIGTTSPAREFEIIKHYKRLIDKAETCVNDLMAEFNSVITTVTGIENRLEAVILAEIRNIHAFDNPAQLQAFAGLDSSIYQSGQIDLAGRMVKRGSPHLR

SEQ ID NO: 430408 - protein, 346 aa, unidentified
MEQFVGLDVSQAMTHLCVIGGDGKIVWQGKCLSTPEAIAETIRSRAPDVVRIGLESGPLSTWHWHALKAMGLPVVCLDSRHAQATMSGQVNKTDKNDAHGLAQIVKAGWYKEVGVKSLASHTIRSMLGARAQLVGMRVEVTNQIRGILKTFGIVLSRRTGEPFERLVEEACRDNDGLLNRTVQSLLCVHSCLKEQIRHLDRQLMGCARTSAVCQQLMTIPGVGVLTALAFVTAVDDPTKFVKSSSVGAYFGLTPRCYQSGEIDQNRGISKCGDSLVRTYLFEAAGTLLTRVEKWSALKTWSLRLAKRSGMKKAKIAVARKLAVIMHRMWVNGSSFQWSAAEPAATA

SEQ ID NO: 430409 - protein, 400 aa, unidentified
MNAVGIDVSKGKSTIAVMRPFGEVVASPYDVGHTESELKELARFLKSLPGETRVLMEYTGRYYEPIARYLHQAGIFVSVVNAILAHDYSGNSLRKVKTDKIDAVKLANMAIDRWLQLVEYVPEDEIRQTLKICNRQYNQYNKLKTMLKNNLIALLDQTFPNVNKLFNSPARKSDGHEKWVDFALKFWHCECVCGISERQFKDKYERWCKRNGYHYSADKAEDIYAEACGNVGLLPMCESTKVLITQAIIQLQAIEETLAAVKREMQKLASALPEYGTVMALYGVGEVLGPQLIAEIGDVSRFKSKKSLIAFAGIDSPADQSGQVDNKSKAITKRGSASLRKTLFQVMSVILQNSPDDDPVYTYLDKKRSEGKPYKVYMIAAANKFLRIYYARTKLALVNT

SEQ ID NO: 430410 - protein, 389 aa, unidentified
MKIYVGIDIAKLNHFAAAISSDGEIIIEPFKFTNDADGFQLLVSKLESFDKNSLIIGLESTAHYGDNLVRYLVTELYQVCVLNPIKTCQMRKNNVRKTKTDKVGTYVIAKTLMMQDNLRFVSFFDLDMMDLKALGRFRQKTIKQRTRLKIQLTTYVDQVFPEIQYFFKSGLHQHAVYALLKEAPSPKEIASMHMTHLANLLKVNSHGHFTKEQAKELRVLAQKSVGANDSAISIQITQTIQQIELLDSQLEKIEAEMTDIMKFNDSVIMTIPGIGYINGGMILGEIGDIHRFSNPNKLLAFAGLDPSVYQSGNFQAKTTRMSKRGSRVLRYALVNAAWNVVRNNATFKAYYDAKRAEGRSHYNALGHCSGKLVRVIWKMLTDNVEFNLK

SEQ ID NO: 430411 - protein, 313 aa, unidentified
MSAPLVYVGMDVAKATLDLHVPTQPQPHTRQFANDTRGHRALARWLQRFGPVQIICEATGGYERIAVVALQSTAIPVAVVNARQVRDFARAQGRLAKTDRLDAAVLADYGRCLQPSASAAGSEAQRRLAELIARRQQLQRVRRAEGNRLEHLSQPEIRRQLQRHLVALDRQLEQIDAWLSEMLREEESLAQKVARMCLVCGVGRITALVLLATVPELGTMNRREAAALVGVAPFNRDSGPRRGYRAISGGRAAARQALYMAGLVAAFTNPRLKQFYQRLVAGGKAHKVALVAVMRKLIILLNHILQDPTFQPT

SEQ ID NO: 430412 - protein, 356 aa, unidentified
MNHVNKLNFTGQQIYVGMDVHKKSWSISIYTDQSEHKTFSQPPEVGVLVNYLKRNFPGAAYKSVYEAGFSGFWIHDQLQELGVQCLVVNPADVPTKDKERAGKTDRVDCRKLARSLRNGEIDGIYVPSRPKAEDRSLLRTRYSMVKKQTRCKNQIKSILCFYGIHIPDEVASSHWSKRFIAWIESTRMERASGDMALKVHLSELTHIRQIIAELNRAIRSLANTECYRNNVRILKTVPGVSTLTAMTLLTELYDINRFKTLDKLCGYVGLIPNTDSSGETDRKTGITDRRNAHLRRIVIESAWTAGRKDPALMLAFNELCKHMTKTKAIVRIARKLLNRIRYVLKNQQEYVPAVVQ

SEQ ID NO: 430413 - protein, 356 aa, unidentified
MTSNIKYVGMDVHKQSISIAIRNAAGKIVMECVIETKASIILQFFDGLRGDVQVTFEEGTSAAWLYDLLKPHVSKLVVCDPRKNKSMREGNQNDKIDARRLAELLRLDHLTPVYHGEHGLRTLKELVRSYLTVTKDLARVMTRVKAIYRSWAIPCTGKQVYARCHRAEWLGKITEPGVRRRAEFYYQQLDGLRVLRQEVRRDLLAESKKYKAWKRLCEISAIGPIRAAVLLGILQTPHRFRTKRQLWNYGGLAIEMHSSADHRCVDGQLERSRKNVLVRGLNRNCNHDLKNLFKGAAVMASSKPGPFADFYAALVAKGMRPEMARLTLARKIATIVLIVWKKGASFDTQYLKPQTA

SEQ ID NO: 430414 - protein, 321 aa, unidentified
MDKEFKRVFNKRIANKLPLILATLKPFQNQLKGIVVESTFNWYWLIDGLMDAGYDCLHLANPAAMKQYEGIKHTDDQHDAFFLAQMLILGILPQGYIYPKEDRPVRDLARKRLFLVRHKTSHILSLQSLIARCSGQRVSANDIRKFTVEDLQQLLEQEYIVLSAQANLDTIVFLKQQIRQLEKAIKNKVKLSKSFQQLMTVPGIGLILAMTIMLEVGDIGRFPEVGNFASYSRCVSSQRLSDGKSKGHGNRKNGNRYLSWAFTEAAHLSRRYNECFRSYYNRKVAQANTSLATKALSNKLARICYYIMRDQVPFREELQSH

SEQ ID NO: 430415 - protein, 417 aa, unidentified
MSEYAALVSIDWADQQHAICLLDPSTGEREQSIVKHTPQALQEWALALRQRFAGQPIAVCLEQSRGPLIYALLQYDFFVLYPINPATLAKYRQAFSTAHGKDDPSDADYLLDLLEHHRNRLRPWHPDDEKTRTLRLLVEQRRRLVSDRTRFSNRLTALLKGYFPQVLGWFEDIRTVLVCDFLERWPNLSALQRARPDTLNKFFRSHHSTSNSTNQRRLHEIKSALPLTKDLAVMTSSVINVKVLVAQMKTIIAAISEYDRHIEALCQTHDDYHLFAALPAAGAVHAARLTAALGSDRSRWPSADELVRFSGIAPIIERSGKQFRIRWRYFCPKFFRQTFHEYAAQSIQDSFWARAYYSQQRAKGKDHHAAVRALAFKWMRVIWKCWQTRTPYNEVIYLESLRKKGSSLLKFAAHYQA

SEQ ID NO: 430416 - protein, 368 aa, unidentified
MKQVLHIGIDVDDKAFHIAGYCEATGEILEARCKPNKGALLKKLELWEKKDFELQACYEATYIGFSLHRFLKSKGIKNKVIAPSLIPEKASDRIKTDRIDSRKLAIYLAKGLLTEIYIPDEEDESRRDLIRSRSFVVEQRSDLKRHILSALRRYGLDYKSETEGKQYWTKIYIQWLEVKVKTLKKYARLNVEYLLTQYEQLNDLVKSYDEELEKISQEEKYKTKVKALSCFKGISTLTALALVTEIGDIKRFPHPTKLTSYAGLDIREYSSGGRERKYGITKMGNRRIRTAVVEACQIQVNHLYISKRLRAARADQPKEIVDIANRCMKRLKKKSEGLRLRNKPNNKIKVACARELLSFTWEALTLVA

SEQ ID NO: 430417 - protein, 347 aa, unidentified
MRFYTQQHSHYCGIDLHARTMYLCILNQVGAIVLHRNMKAEPDSFLKAIAPFRQDIVIAVECIFTWYWLADLCAREKISFVLGHALYMKAIHGGKAKNDKIDAHKIAVLLRGGMIPEAYVYPEGMRSTRDLLRRRMHLMRQRAELLGHIQITNHQYNLPEIGKKISYRVNRDGVAERFADPSVRSNVTFDLKRIGFYDDLLHQIELETLRHAKQHNANTFHLLDSVPGVGKILALVLLYEIHDISRFPSVQDFASYCRLVKSKKESAGKLYGTSGPKIGNAHLKWAFSEAGVGFLRNNPEGQAYLARLEKKHGKAKALTALAHKLARAVYHMLRRKEAFDMKRFMNR

SEQ ID NO: 430418 - protein, 360 aa, unidentified
MIVQGTSVGLDVHALSVVAHAVDEETGKVARARLCPDHGEVLGWLHQLRAPVRVTYEAGPTGFGLARAITEAGMECLVAAPSKLQRPAGDRVKTDARDAAHLARLLRLGEITAVRVPEREIEAVRDLVRAREDARADLMRVRHRLSKLLLRQGIVYSGGTPWTCVHEEWLRRHRFDDIHLKAAFDHSFDAVLAATAARDRLDEQIMVVAASPRFADPVNRLGCLRGISALTGLALTVEIGDWSRFCGSSIGAYVGLVPCEYSSGNSRVQGSITKAGNTHVRRLLIESAWHHRKSYSTSGPTLRARWAKVDPALRARGHAGNRRLNKRWRSFTERGKNPLVANVAIARELAGWCWSLATMH

SEQ ID NO: 430419 - protein, 345 aa, unidentified
MEPMYYIGLDVHKRKISYCVKDSGGKVYAEGSLPATRMDLDLWMKTLPRPWSAAMEATMFTGWIYDHLKPHAAALKVAHPLMLRAIALAKKKNDRIDANKICDCLRCDFLPECYMASTAIRERRRTLRYRNLLVRQMVQMKIKISSLLMEAGVSYNKQRLHKAGYFRQLLATNSDIDEGLVSLLRLCRETVVRLGKTESALVRSLQRDSLLMDRVERLMTIPAVGPITALTWALEVGDARRFSSIKKAVSYCGLCGEEKSSANTVQRTPLSKQRNKHLQTTLIEAAKMAPRNSPELAMLYDKEKQKGNANRATLAVARKLVAYLMAVDRGQRNFQLMETSDCIAA

SEQ ID NO: 430420 - protein, 367 aa, unidentified
MKKLTTKMMQETLNKHDGRLTVGLDLGDRSSFYCVLDETGDVLLEQKVSTTPKAINEIFGAMPRSRIAVETGTHSPWVSRLLSELGHETIVAHARSVRLIGESRRKDDRLDAMTLARLVRIDPQLLCPVKHRSAEAQADLTVIRARAALVRTRTMLVNAARGLTKSYGERLRGCNARGMNPKSAQDLSPELKYALEPMMHQIESASERICQYDQMLESMARNRYPEAERLKQIKGVGTLIALTYMLTLEDPYRFRKSRDAACYVGLQPGRRNSGQSEPQMHISKEGDPYLRALLVQAAHHVLGPWGVDSDLRRWGMKLAEHGGKRGKKRAVIAVARKLAVLLHRLWVSGDMYVPLRPDGPVTLPAVA

SEQ ID NO: 430421 - protein, 350 aa, unidentified
MKKPAQHLIAKVPRKRSKVELTIGIDLGDVWSHYCTLNQEGEVVDRGRFRTTAKAIEKWFAHVPHARVAMEAGVHSIWISEQLEQLGHEVIVANVRELRAISHSDRKSDDVDAEKLARYARLDPEILRPISHRTVEQQEALTLIRARELLVRLRTAAVNAVRGLTKACGHRMPASCTKCFAQRGQAAMPPGLKLALGPILAQIAEMTLKIKQYDREIQRMTQTEYAETQPMMTIHGVGHITALTFVLTLGDKTRFGRSRNVGCYLGLRPKRSQSGERDPQLGITKAGNAYLRSLLIECANHILRPHGRDSALRQWGLHLAARRGKQAKNKSVVAVARKLAVLLLHLWTTQ

SEQ ID NO: 430422 - protein, 322 aa, unidentified
MSVSNQRCAGIDVSKNTLDIAISNIAQSFTVPNEDGGFNQILKELKRNETQLILMEATGGLESGVAGYLQSEGFDVVVINPRQARDFARSMGYLAKTDQIDARVLLQMAKVINQHPEREKYIRPLPDAHRQLLAAMVVRRRQLTIMLTAERNRLHPSHPQNHESIRFIISVLKSEMARIEAEMSAYISKNFSELSALLSAVKGVGAATVAVLLAEVPELGTLSRREISALIGVAPVNRDSGTMRGRRTVFGGRASVRTALYMSALVGTRHNPVIKEFYTRLVAAGKPKKVALTACIRKLLTILNAMLKNNEAWDPLYHQHAS

SEQ ID NO: 430423 - protein, 328 aa, unidentified
MNASELIFVGIDVSKDTLEIAFDDKGKTRQFGNDETGIAALLADIKAAQSAAGDVGAVVLEATGGFERVAAVVLCGAGLPVMVVNPRQARDFAKAMGYLSKTDAIDARVLSHFARTLYGSERRADLLMRLPDAQQEQLHACIVRRSQLIGMRVAEENRLALCHPTQRKSIAAVCKVINRQIADIDRDIDARLKKHFAAKLALLADFKGVGVVTKACLMAALPELGQLSQERIAKLVGVAPLNCDSGKHKGKRFTWGGRAEVRCALYMAVMSAVRYNPVIKAFYDRLLSKGKLKKVALVACMHKMLTILNAIMKSGKPWDANHFSIKMA

SEQ ID NO: 430424 - protein, 355 aa, unidentified
MNKIKTNFEGQTIFVGMDVHKSSWNLGIHLNDMFVKNVHQKPNPHVMANYLKQHYPGAHYKSVYEAGKFGFWIQRQLTALGIECLVVNPADIPKSQKDTLQKNDPRDARNLSIRLQSGVLSSIHIPDEQQEADRVFFRHRKRIWKDLCRCKNRIKGVLAFSGIDIPAQYDNASWSHNFINWLKEVDCKQQSRRRALDYMIAQMEFLRKELLSISNAIRKMMREQRYKTNYYLLRTIPGIGPLTAASILVEIGDVKRFETFYRLNSFVGLLPMEHSSGQSENKLSLTVRKHRQLRSDLVESAWTARRTDPAMALYFQEQIKRKDSKIVIIKIARKLLNRIRFVLINQQPYEFGIVK

SEQ ID NO: 430425 - protein, 354 aa, unidentified
MMIIGCDYHPGFQQIAWVDSETGELQERRLGHREEAEEYYRELAAQGMKVRVGMEASGHARWFERLLGELHFELWIGDAAEIRSKRIRKQKTDRQDAQLILRLLLEDRFPRVWVPSWENRDLRQLLWHRHRMVQTRTRIMNQLQAVALNEGLRRKKGLWREAGRKQLESFRLAPWASRRRRDLLELLDRLNPTIAELSQAIEGEVEKCPEAQRLRTHPGVGSLTALAFVLIIGRAERFQCGKQIASYLGLVPSEESSGERRRLGHITKQGSSLLRFLLVEAAQVTVRSDPAWRSKYFHLAMRRGRKIAKVAMARRLAVRLYWMWRQGWDYEQMKKFSSHAGQPGTGDGVQLNTE

SEQ ID NO: 430426 - protein, 356 aa, unidentified
MADKPIVGIDISKEWLDLCTSQAVEVERIANTPEAVAAWLERTGPGLIAFEPTGGCERFVSAAARERRIPFLRVHPNDVVAFRQSRGIKAKTDAIDARLLLAFAGDRLARRELRTSVLGDERLRALAARRRQLVETLQAEGCRLGAAALPAVRNSIEAVMAALRHSLDALEAELAAVIAANPQTAELARLLQTICGIGPVVATALIADLPELGLLSSKQIAALVGLAPYTRRSGKTQFRETTGHGRVGVRRALFNAARATLRHPSPFKDFFDRLVSDNRRPGKVALTAVMRKILITANAVACDRQPWRGLRHTTPPPGAVGTLCQPHGEQTGHRPGRVKAAAALRAVARSASLDAA

SEQ ID NO: 430427 - protein, 329 aa, unidentified
MNYIGMDVHKRFTYAVVKDEQGNKIAEDKFDNNENNFANFLQIYKPEETKIVMESTGVWEYIYEILEAMKYEVKLANPVKTKAIAYAKVKTDSVDASTLADLLRANLVAESYIPPKNIRRLREITRLRKIAAKQRIQTENRLHALLTKRGIFLPKKTLCKSSFEFLKEKKEYPIDEYLEIIEYQRQREKEIEKRIEKIAENNKEATILVSFSGIGPIRAVEVIAEVGEIDRFPMADKLCSYAGLVPSIKQSGSSLRFGRLMQQASKSLKHAFVQIAWSLVRTKESNRLQEFYKKLSKKKGKQKAICATARKICCVVHAMLRKNEEFRYS

SEQ ID NO: 430428 - protein, 312 aa, unidentified
MNEIIVGIDVSKNTLDIYVHPLQKAMKFKNNQSGIDEMVQKLQKLTPKLVVLEATGGYSYLVTVGLSAAGIPFSLANPRQVRDFARAMGKLAKTDTIDAQVIALFGEKMPLKCYELPPADIQAIKELVKRRRQLIEMQTSESNRQEYTHSSEVAKSIQAILDAIKREIEKIDNETDTLVKSSKTIQEKDNLLQSIPGIGKNTSRVLIACFPELGTLNKRQVASLIGLAPINRDSGIFRGHRSIACGRPFVRTALYMSTLSAIRCNSKIKNFYKRLIANGKPPMVALTACMHKMIIFTNAIIRENKPWCITNP

SEQ ID NO: 430429 - protein, 409 aa, unidentified
MDVIVERPGALDVHKEQVTACVRASDEGGRRVAHVEQFKTTVRGLLVLRDWLKAHAVTQVTMEATGVYWKPVFHVLEDDFELVLVNARHVKQVPGRKTDVCDAAWLCQLAEAGLLCASFVPPKPIRALRLLTRYRKAQIGERQREANRLHKALEDTGIKLDCVASDILGVSGRAMLEALTCGTTDPSVLADLARGRLRAKIPALREALEGRFEPVHALLIGAILAHLDFLDEQIERLSEAIEVQLAPFGPAVELVCTIPGVAQRSAENILAEIGLDMSVFPSDAHLASWAGQCPGNDQSAGKRRSGRTRKGSKWLNDALKNAAMAAVRTNDSYLQALYQRLRPRVGHARAIGAVKHSIICACWHMLSTGEVYRDLGGDYFRRRDPERQTRRLIAQLERLGHTVTLQEVA

SEQ ID NO: 430430 - protein, 421 aa, unidentified
MGKLIERCAGIDIGKRFLVCCVMTGAAHEEPRSETRRFDTTVPGLKRLRNWLNEERVTDVVMESTGSYWIPVFNLLEGHVRVVLANPEEVKNRKGHKTDRKDAGHLADLLRHNHVKSSYIPAEPVRQLRDLTRRRVQLTQDATRERNRVQKLLEQVNVKIGSVLTDVFGVSGLHMLLALLDGRAAPEEIAGLARGSAKRKTPQLIEAIEGNRMSDHVRFLIRGCLRHLACLEEEVEELDTEILRRMQLFTFQKAFTLLQTIPGVGQLSAATILAETGPDLDAFPTIEQMASWAGLCPGNRESAGIQKGPQTTHGNPYLCTALVQCAWAVTRKRDSVFRSRFQRLAPRRGEKRAIIAVAHHMLIILYCMLKRGVPFLGAEHAPKQRRRERRAHHHLRCLRRLGFSVEIRLSSESTPPGTISR

SEQ ID NO: 430431 - protein, 339 aa, unidentified
MEEVSTIGLDLAKRVFQVHGVDRTGAVVVRRSLRRGAVLGWFSKLAPCLVGLEACGSAHYWARELRQLGHEVRLIPPSYAKAYVRRNKNDAADAAAICEAVSRPSMRFVAIKTEEQQAAAGLHKVREMLVKQRTMLMNQLRGLMAEFGIVVAQGPGHIRELLLILEDRADQRVPELLKQGLRLTASSLQSVQEQEEAIDKQIVGWGRRNRTCRHLITIDGYGPILSSAMAAIVTTPEAFASGRDFSASLGLVPRQNSTGGKMVLGPISKRGNGYLRRLLVNGAMSVLSSKRAKQDPWLMKLMATKRRKVAAVALANKMARIGWAVMMRQEDFRPRQITA

SEQ ID NO: 430432 - protein, 331 aa, unidentified
MKKVIETVGIDVSKLTLDVHLHKVGQHQQFSNDQAGFKKILAWLKSKGIKPDDILICFEHTGWYCVLLGYFLSQKEICYCCINPIEIKRSMGLKRGKSDKADAKEIAYYAWLRRDDLKPTKPPATNLIELQRMMSLREQLVKQATALKNLRCGMEQLTGKNSSDFSVVQISETIDHLEVQTRKVEKAMEALIKSDEDMQANYKLSKTVKGVGLVLAVQLLLHTHNYTRFSSWRQFSSYCGLVPFPYQSGTSINGRSKTHPISDRKMKSLLSMSAISAIQHDKELKMYYSKRVAEGKPKMLVLNIIRNKLVSRIFATVNRGTPFVELSQFIA

SEQ ID NO: 430433 - protein, 417 aa, unidentified
MEVVHPRCAGIDVSKQDAKVCIRIQGSNGRKTSSTVTTWGSMTNQILALRDHLAAQQVTVVIMESTSDYWRPFYYVLEADFEVLLVNAREVKNVPGRKSDVSDAAWLADLGAHGLLRASFVPPEPIRQLRDLTRTRTHITRERTREVQRLEKLLESAGIKLSSVATDITGVSGRLMLQALIDSNGTADPAVVADLAKRRMRSKVPVLTEALNGHFTAHHAFLTLLFLDRIDGHTKDIELLSERIDGLMTPFLPARELLESIPGFSQTVAEVFIAETGGEMRQFPTPEQLASWAGASPGSNESAGRVKSTKTRPGNRYLKGALGVAALNQARSKSKKTYFSAKFRHLAPTRGPMKAIVAVEHAMLTAAWHMLTNAEFYRDPGADFYTRHDPTKTKARAVKQLEALGYGVTLQPAAQAG

SEQ ID NO: 430434 - protein, 448 aa, unidentified
MSKEKLKMDIINPNAAGIDIGSRSHFVAINQEHADVKEFGVYAQDMKALVDWLLENNVKTVAMESTGSYWQNLYAELQNSSIEVILTNGKFTKNIKGKKTDVLDCMWIQRLHTLGLLSGSFLPDLQTEYLRTLVRHRGNLIQTTSKASKRMSQNMRLMNLRLDVVVKDIVGLTGLNIINEICNGETSGEELAKLRHGNCKKSEEEIAKALQSNNRQDYLFVLKQELKKYQDAQQLILECDAEIKKLLDEFIDQDHVKKSLYIDKKAHKRINKNTPKNIDLNLMAYQYFDGIDLYAIEGFSHGTVLTLMSELGEKGILKFQNAQHFTSWLRLAPNNKISGGRVLSSRTPKGSNRLKIALRQAANAIGNLKDTHLSNFFNRVAYRKGRSVAVSATARKLATILWNMLFKNEQYSPPTIYEYLDQKRKRKVLELQKQIANLDARMSKVRIA

SEQ ID NO: 430435 - protein, 331 aa, unidentified
MKKFYIGADVSKKTIDCVFYDANMEKMKSSYIKISNDKDGRDALIKWIKEHKIVKKDAIVCMEYTGKYSYDFAQLLDKKDMDFVLIPALKIKGFFTGARGKSDKVDAIRIATYAYRFQEEIVPANLKDDNLMHLRDLMNDRKLAVKHAAAYKSIMTEYTDKRSSSRYKRAAKMVAEYKKQISAIEKEIKKMINKDEKMKKNYELLTSIPGISLVNAVNLIVFTGNFEFFEDSRKFASYCGVAPFEYSSGTSVNRGTHVSRMANKMLKSDLSQAAKAAINFDPWLKGYYERKRKEGKSSGCVLNAVKFKLICRVFAVVKRGTPYVNTMKYCA

SEQ ID NO: 430436 - protein, 355 aa, unidentified
MNSIKYIGLDVHQSTISAAVLDREGKFIQQAILATHANAILDFFAGLRGELHVTFEEGTHSAWLYDLLVRRVSKLVVCNPRKNALLRAGNKSDQIDARKLAELLRAGLLSPVYHGQNSTQTVKQLVRSYSALTEDTTRTMGRLKALYRSQAIACAGQKPYGRRHRQSYLEQLPNRGVRRRAERLYAQLDSLQQLRREARRDLIVECRKHADTKILRQVPLLGPIRVAVLIGRVQTPHRFRTKRQFWAYCGLALETRSSADYQMVNGQLQRRSKPVFIRGLNLNHNHDLKNLFKSAATSAAARPGALHEFYENLLRKGIKPELARLTLARKLAAITLHVWKKGERFDVNYVKPQAA

SEQ ID NO: 430437 - protein, 316 aa, unidentified
MESQRPFVGIDVSAQRLDVAVLPHGAHFTVPYTDDGIASLVRRLQDLAPQIVLLEATGGYEIQVAYAMSEASLPVVIMNPKILRHFAKSTGKLAKTDKLDAQVLAHYAQAIQPPVRPLKDPEQHELATLMSRRRQLQGMIVMEQNRRRTSTPKVRHNIDQLLAYLRQLLKDLDREIHEFIRRTPLWHEKQEILRSTIGIGPKVSASLIADLPELGILPGPQVTALAGLAPMNRDSGQYRGKRMIQGGRPAVRQALYMAALVASRHNPVIREFYQRLRQAGKPAKVALTACMRKLLVILNAMLKNHTLWEDRLPVAA

SEQ ID NO: 430438 - protein, 341 aa, unidentified
MSEVSTIGLDLAKRVFQAHGADASGKVVFRKRLRREQVLAFFAGRPACVVAMEACSSAHYWAREIGELGHTVRLIPPAYVKPFVKRQKNDTTDAEAICEAAQRPTMRFVSVKSEAAQANAVVFRVRDLLVRQRTQAINALRGHLGEYGVVVAKGPSHVAKLIAHVEDPAADLPEAARTVLRALTASLQFLSERIDLLDREVARRAREDKEVRRLTTIPGVGPVIATALAALAPPADAFRRGRDFAAWVGLTPSQHSSGGKQKLGATSKMGERTLRRLLIIGASSVVQKAIKHGTRSGSWLGRMLARKPRMLVIVALANKMARTVWALQATGEIYRAPVVAA

SEQ ID NO: 430439 - protein, 367 aa, unidentified
MFIERTSLGLDVHARSVRAAAIDTVTGEVIERRLSPAPEVVLGFVGELARDHGPVLVTYEAGPTGYPMARALLAAGHRCQVAAPSKLLRPSGDRVKTDARDAMLLARLARNDDITAVTIPSIAQESARDLVRSRDDARRSLMAARHRLSKLLLRHGHVYDGGQAWTGRHDAWLRRTRKEQLSGGGGGTLAAFDDGYDAVTHALARRDRLDAAILAMAADSEFTAVTRRLCCLRGISTVTGFALAVEIGDWHRLTGGSIGAYLGLVPSEHSSGGSRSQGGITKTGNSHARRLLIEAAWHHKPVYRPGKTIQDRWVLAPAAAAARGDAGNRRLHHRWTVLSAHRKRHTVANTAVARELAGWCWSLAVME

SEQ ID NO: 430440 - protein, 340 aa, unidentified
MTIVMGLDQHRAQITAEWVDTVTGEVSRSRVAPAHRESVRRFLARFEGRELEVALEATTGWRFVVEELQRVGAWVHLAEPAETAARRGRKKRAKTDRADARLLRELVMVGRLPESWVAPEHILDLRARVRLRHTLIDERGQWQQRIHAVLYHHGCPHHHGIGLLTGTGREWLSSLELPATAREQVTVALQMIGAVDAQLAPMDKELRAYARRQPGCKALMGLYGIGHLTAVTILAELGDARRFSSSREAVRYSGLDITVHQSDQRRAPGHLSRQGPPALRWALYEAAQSVHRTSSPDRDYYLQAAERLGGNRACLAVARKLLKRSYHTLRELGDGALQPA

SEQ ID NO: 430441 - protein, 356 aa, unidentified
MQRYIGLDVHAASCTIAVISEHGKRLKDVPVETNGQALVEAIRAIPGGKHLILEEGTQSAWLYEVLSPHVEEIVVASTEGRRGQKNDKTDAYDLAENLRVGSVHKRVFKSPRQFSMLRELARTHAMMARDVVRVQARLKSVYRSRGVSTPGASVYGQKERDQWLKQLPVAPRATAMRLYDQYDVLLDLKDKAEAALLKELGKHSIARVLQTAPGLGPIRVARLLSIVVTPHRFRTKRQFWSYCGLGIVMRSSSDWVRAVDGRWMRAQVQQTRGLSRQYNHPLKDVFKGAATTVITQVKKDPIYTLYERLTESGTKPNLARVSLARAIAATVLRMWKDEEEYKPQRYRTQILTDRDA

SEQ ID NO: 430442 - protein, 314 aa, unidentified
MIILGLDPHPTTHTAVALDSRGVVLDSLSVKNGADSLHQLWLWSVQFEEHCWAIEGAGNRYVAPLLALLFARNQLVYHIHPSLTSQYRARRGKKKNDLVDAENVARVLLANPKLPPYQLSTQRTRLQELSRTRDKLAQQRKANQMMLEALPDTTTASLSTALQAVLTSLETALKELEHVMATLVAQVAPTLLTLQGIGVVLAGTVLAEVGDIKRFETVHHFASYCGAAPVERGSGKNTRWCVNVSGNRQLNTVLHLMALTRLRCDERTKTFVTKKEQEGKTKRAALRALKTHLARELYRTLQTSHVGGPIPAPS

SEQ ID NO: 430443 - protein, 341 aa, unidentified
MTIKRIGLDLAKQLFQLHGVDQQDQVVLRKQLRRNQMLAYFSNLPPCLIGIEACSSAHYWARELQKLGHTVKLMAPQFVKPYVKSNKNDAKDAEAICEAVSRPTMRFVAIKTIEQQDIQALHRIRTELVHQRTAKVNQIRGFLAEYGMVVERSVEKLRKALPMLLEDGENGLSFYFRALLQGLQQDLITLNDRVSDLDKKIKLLASSNTSANRLQQIRGIGPVTATALVSAVGDGKQFKRGRDLSAWLGLTPRQHSSGGKECLLGISKRGDSYLRTLLIHGARAVLKVAGHKDDPRSRWLQNLCTRRNKNIAAVALANKNARIVWALLTQETDFIPEGKPA

SEQ ID NO: 430444 - protein, 414 aa, unidentified
METVYRSVAGIDVHKKMLAVVIRRQPGEQAEYQKRKFGATCAEIQHLEVWLRAQGVSEVVMESTAQYWRPVWYGLEPHFRLHLTHPLKTRAPRGRKSDFRDAQRLADRWSAGDLEESFIPGSEQRAWRWLTRTRVQLKKKLGVIHSHVEGLLEQGGIKLSAVVSDLFGVSGWAMLEQIAQGVTDVEVLAGEARGALRKKERELKQALAGQLEPVYRLLLRQHMDQVRLLRRQVEEINQSLAEAMQEHLAALHRLSKIPGVDLYAAQELISEIGPKACAFASAEQFASRVGVCPGSQESAGVNYSARSAKGNRYLRRLLCQIAWAAIHTKDTFFAGLFARLKPRVEGKGAAWAVAHRIAKIVWLVLHQEVEYQEKGSAPPNERTLVRKFKRLLKEFGSLGLDVRALLDQQLPAPA

SEQ ID NO: 430445 - protein, 378 aa, unidentified
MKNDIRFVGLDVHAETITAAVVEPDGEMRFLGTIPNRPEAVRRLVKRLGPATRLKACYEAGPTGYVLYWQLTGLGVHCDVIAPTLVPQKPGDRVKTDRRDAEKLAVLYRGGHLTPVWVPDQAHEALRDLVRAREAAKSDQLRARHRLQKFLLRHGRRPPQGIKAWTQKHVDWVRREVHFEPLAQEVVLLDHLAEVEHARERIAHLERAIDTAVAAAPEPMRAVIAALQALRGVAQVSAATIVSEVGALSRFPRPRQLMGYSGGVPREDSSGERTRRGSITKTGNAHLRRIVGEVAWSYRHRPAIGPALRKRQAGLSPEVKEIAWKAQHRLYGRYRRLIGKGKTKQQVVTAVARELLGFIWAIGVHIEQHHGTAARRAA

SEQ ID NO: 430446 - protein, 318 aa, unidentified
MAEAVFVGIDVSKAELAVALRPSGESFTVAHTGAGIKQLVARLEKLHPTLVVVEATGGWQRQVVAGWWSARIPVAAVNPGWVRSYARGRGLLAKTDRIDARLLALFAEREQPEPRAPLDAETQALQELATRRDQLVEMRVAEVQRLHRASPALHKELRKHIAYLAGRIKQLEDEIDKSVRRSEAWRRKREVLRSFPGVGKVFSLTVLSKLPELGTLSGKAAAALVGTAPVPADSGRRRGVQVIRGGRYQVRRKLYMCALSAVRWNPVLKRFYEQLLARGKLEKVALVAVMRKIIVMLNAMLKRDTLWSEPCAGLSAKD

SEQ ID NO: 430447 - protein, 385 aa, unidentified
MDITTLGIDLAKSVFQLHGVDADGVVVLQKKLRRGALLNFLGKLEPCLVGMEACATSHYWAREIAALGHEVRLIPPAYVKPYVKRQKNDAADAEAICEAVTRPNMRFVPAKTEEQQSVLVLHRSRDLLMRQRTMILNAIRAQLAEFGIIAAQGPRKVTELLRRLNGPDSFGLPALARSALLALGAQLEHIAEAIRNMERQLMTWHRQNAASQRLETIPGVGIITATALAASVPDPAVFKSGRQFAAWLGLVPRQNSSGGKDRLGRVSKMGNGYLRRLLVVGATSVTRRAETNHTRTGAWVRSLLERKATRLVTVAIANKTARTAWALLAKGETLQGRAGRLTEGDTCGNQVSPRKNARANVSDDDRTEPLLGHPEVLSGRQSPFF

SEQ ID NO: 430448 - protein, 370 aa, unidentified
MKHAITYVGLDAHKKDIYVAMLVGHDRVPVTWQLPNEPQAIRRLVRKLEREAAGPIQCCYEAGPCGYALQRQLTTERVSCQVVAPALIPRKPGDHIKTNRRDARKLAELLRAGLLTEVAPPTAADEAVRDLARARDDAREDLIRARHRLSKLLLRRGVYFPGVQRAWSEPHRRWLRTLTWEHAADRRVADDYLLAIEQLEARLQELDAALLEVAQTDPYRQPVAWLRCFRGIDTLTAMVIVAELHDFRRFHSARALMAYLGLVPSEHSSGEHPRRGRITKAGNAFVRRVLIEAAWHYQHRPGVGRALQRRRAGQPARVIAIADRAQQRLCRRFRRLVLERKPTPKVAVAIARELAGFIWAALQESRPLAA

SEQ ID NO: 430449 - protein, 332 aa, unidentified
MHYIGMDVHAKVTMICILDENGKVLQERAIHGSLRELVAAIRHIARPFKICYEASCGYGWLHDQLARYAKQVVVAHPGKVRLIFTAKRKSDRIDARKLAMLLFLGQVPRVHVPCESRRQWRALIEYRHRLVARRTAVKNMLRALLRSLGLKSPRSLWSRKGRQWLSEQALAGGDALRREWLLEELDDMTGRIRRVERELDRIADADAGVTVLRTIPGVGIRTAEAVVAYMDDPARFGRNKSVGCYFGMVPCEDTSVKSRFGHITREGPPTVRRLVVEACWQGIRRDAGLRAYFERIMRNDIQRKKIALVATAHHLLRVMHAMLRTGESWRAA

SEQ ID NO: 430450 - protein, 455 aa, unidentified
MPRKRTEDRPELKPVNVGAAAIDIGSRMHMAAVNPVCTDVPVRSFGTFTQDLHDLADWFKACGVTSVAMESTGVYWIPVYEILEQCGFEVILVNARYAKNVPGRKTDVSDAAWLRQLHSYGLLRGSFRPDAEIATLRAYLRQRERLVEYAAAHIQHMQKALMEMNLQLHHVVSDITGATGMRIIRAIVAGERNPDVLATYRDVRCHSSIETIRAALVGNDRDEHVFALSQSLELYDVYQAKMLDCDRKLEVLIAALSNKGAKPVGKLSKPRIKTKQVNTPTFDVRTALYGVLGVDLTEIHGLGPSLALKLVGECGTDLRAWPSAKHFTSWLCLAPGNKISGGKVLSSRTRRSSSRAAALLRLAATTVGRSDTALGAFYRRLSSRAGKSKAVTATARKIAVLFYNTLRHGMSYRDPGADHYEQQYRTRVLANLQRRAKSLGFVLQAIPGDADPAVS

SEQ ID NO: 430451 - protein, 346 aa, unidentified
MDHVGIDVHKRESQICIETEDGEVLEHRVRTDRERFAAVFGGRPRARILIEAMAESEWVARCLESLGHEVIVADPNFAAMYASRSRRVKTDRRDAVTLADACRLGAYRHAHRTSERQREVRAELAIRECIVRTRTKYIALTGALLRREGLRVRSGNADHFLSRVAEVETDDGLRVRMQPLLRLLAELQGEIKAADRRIAEVVQNDPVIQRLCTVPGVGPITATAFVATIDTIDRFAGAHQLESYLGLVPSERSSGEKQRKGRITKAGNSRLRYLLVEAGWSVLLSRKASTEELRAWAQRIALRRGMKTAIVALARRLAGILYAMWRDGTTFEPRRREESTAEAMRA

SEQ ID NO: 430452 - protein, 387 aa, unidentified
MIAHYIDEKFQKEFTIQNNKNGYNYLLNYLNRVNQPKLIFESTGIYSRAMVRFCRVNQINYIELNPLEAKFKTSSLRSWKTDQSDAHKLAQIAPFLNDSDSLNNTNDDIYFELRERARFHLEFENEQNRLKVEIIEILHQTFPGLEKLFKNRYSMIALNIAEIFTHPDFVQQNDMESIISTILKSTDKGLSQRKAESYGETLFKLANDSYPNVNSSSFLVKKAQLLIQKLKKPIGQLSQLDKEMIQLAQELDCFEIIYSIPGIGDLTAAMIIGELGDISRFKSNKQLNAFVGIDIKRYQSGGTHYRDTINKRGNKKARRLLFLVIMNIIRGQHRYNNHIVDYYYKLRKQPNEKSHKTAVVACINRLLKTFHYLIMKHKLYDYEMSPH

SEQ ID NO: 430453 - protein, 351 aa, unidentified
MPRRTNAAPVTIGIDPGKNTFHLIGLDARGGIVLREKVARDRVVARLSNMAPCLIGIEAGMGTHYVTRELLAIGHDVRQVPPVYAKPFRQTHKNDFRDAHATAEAVQRPTTRCVPAKTDEQLDLQALHRVRYRLVGQRTAVINQIRSFLLEHGITVRQRLHWLRHALPDILAQRTDVLSPRMIRILADLAEDWRRLDDRIEAVTSEIEALSKNSEACRHLMTIPGIGPIISSAMVAAIGNGTAFTRGRDFAAWLGLVPKQMSTGDRTILGRITKRGNRYLRMLFMQAARVVLIWPSKWMKHSFGPWLAAAAQRLHHNVLATALANKLARIAWSVLAQDRTYEARVLGTGAT

SEQ ID NO: 430454 - protein, 344 aa, unidentified
MNYYAGLDVSLRTVNICVINDQGDFIAETKVDSEATDVVAYLDGLNLDVLNVGLEAGTMTQFLTYGLQSAGFEVVCMEARQVKAALSAMRNKTDKNDARGIAQLLRSGWYSPVHIKSMASHRIRLLLSSRKAVLSKCIDLENEVRGLFKVFGIKLPPKLGHGSFDPAVRDIIETDVTLSESLLPLLDARLVLYHCFRKLDNRTRHMAHADVVCQLLMSAPGVGFVTALTYKAGVDDPTRFKHSRTVAAHFGLTPRRFQSGEIDIEGHISRCGDRDVRSTLYTAANALMTRSSKWSSLKAWGMQLAKTRGHRRAVIAVARKLAVILHRMWIDDTQFQWGSEGARS

SEQ ID NO: 430455 - protein, 355 aa, unidentified
MDSKKYIGMDVHKESISIAVMNGAGKIVMECVIETKASMILQFIDGLRGDVQVTFEEGTSAAWLYDLLKPHVTKLVVCDPRKNRSMREGNQSDKIDARRLAELLRLDHLNAVYHGEHGLRTLKELVRSYLTITKDLGRVMSRVKALYRSWAIPCTGKQVYTSRHRAEWIGKIREPGVRRRAEFYYQQLDALRLLRQEVRRDLLAESKKHKAWERLCQIPSIGPIRSAELLGILQTPHRFRTKRQLWTYCGLGIETHSSADHRVVEGQLKRAKKQVEVRGLNANCNHDLKNLFKGAAVVAATKPGPFEEFYAELLAKGMRSEMARLTLARKIATIVLIVWKRGVSFDAQHLKPQTA

SEQ ID NO: 430456 - protein, 362 aa, unidentified
MSNSTTWVGMDVHKENIVTVSISGDSGTVMTRWETPNTAKGKERLAGRIAGLGKARCVYEAGPCGYDLRRFLDGKGIPCDVIAPSLIPTKPGDRIKTDRRDAEKLARMHRMGELTAICVPTPAQEALRDLVRAREDANEDLVRCRHRLQKFLLRRGRRFEGKSWTREHWRWVRALTFDDANAGTVLAEYVLAVDQQLERVARLDARIEEEAQNPGIAPTVARLKTLRGVRTLTAMTIHSELIDLSRFASPRDLMSFIGLVPSEYSSGGKQRRGSLTRAGNAHLRRVLVEAAWHYRHPPHRTGETIRKRREGQPPDVIETARKAEVRLYRKFTRMVMRGKRTTVAAVAVARELAGFVWAIGRI

SEQ ID NO: 430457 - protein, 414 aa, unidentified
MEDILDCCCGLDIHKESIIACILKGPIQKGLKPRSEIREFGTQLTDLMSLKRWLEGQDCHYVAMESTGIFWHAVYAVLEDALLDEMHLLVVNARHMKNVPGKKTDMRDAEWIATLLRAGLLKGSFVPEQDIRDLRQLTRYRKALIRDITSQKNRIEKLLQSNGFRLSSFLSDIFGSSGIAIMEQLVQVGSISSQSLGACLKGKARQKASEILSSMNGNLSEPQRKLLKMQLEHLEDLQSNLLEVEKEIRFGFSKFQVPIELLDSIPGIDQTAAYAILAEIGQDMAAFPTAQHICAWAGLAPGNHESAGKKKKQQVTQGNTYLKTMLCEVAWVIASHKKQYLSGWYWRLKQRIGAKRAIIALARKLLVIIYTMLKTNQPFNEQKFQERKDASEQRRVNRMVNELARLGYAVSLAA

SEQ ID NO: 430458 - protein, 410 aa, unidentified
MEVLYPHCAGLDVHKQTVVACARHMVNGTVTREVRTFRTTTKDLLALSEWLAGQGCTHVAMEATGVYWKPVWHILSDGDFTLVLANAGHVKNVPGRKTDVNDATWLADLMAHGLIRGSFVPDIQTQELRGLLRTRKQFVRERSSHVQRLQKTLEDANIKLDGVISDIVGLSGRRMIEALIAGESDPEALAALAHRQIKASPAALREALRGRVTNHHRFLLRLHVQHIDALDAALNAIDREVDIHVESFREAVLLLTTIPGVSDLSAQVIRAEIGGDMSRFPTVGHLISWAGLCPRNDESAGKRRSNRMRKGAPWLKTTLIQCAWAAARKNGSYLQAQFHRLRARRGAKKAIGALAASILTAAYHMLKDGTLYHDLGPDHFDRRAKTVQTRRLLTRLQRLGYAVQITPLAA

SEQ ID NO: 430459 - protein, 344 aa, unidentified
MDHFAGLDVSVKETSVCIVDDTGRIVREVKVASEPEALLQELAKSAYRFKRIGLEAGPLSQWLFSALAEAGLPVICVETRHMRAVLKAQINKTDRNDARGMAQMMRVGLYRPVHVKTLRSQKLRMLLTHRKLLQSKAIAIDNDLRGTLRNFGLKVGVVGKVRFEARIKELVENLPDLAALVEPLLIVRRTLREQFCILHRRLLAIVRDDEVCRRLMTTPGVGPVVSLTYRATVDVPARFRKSKSVGAVFGLTCAKYQSGEVDWSGKISRCGDEMMRVMLYEAAQSMMRSKKWSWLKAWAMQIARRRGMKKAIVALARRLAVVMHRIWVDGTEFRWTREQAAVAA

SEQ ID NO: 430460 - protein, 328 aa, unidentified
MYLCILDGQGEIVLHRNFKAEPQAFLKAVAPYRDDLVVAVECIFTWYWLADLCAEQGIAFVLGHALYMKAIHGGKAKNDRIDAHKIAVLLRGGMLPQAYVYPKAMRATRDLLRRRNHLMRKRADLLAHIQNTASQYNLAPLGTRVDRKSERAKIPAHFPDPVVHRSVTLDLELIAHYDTLLKALEQELALMAKGHDAFAYHLLRSIPGVGRILTLVMRYEIGSIERFARVQEFLSYARLIKAQKSSAGKVHGHSGKKIGNAHLKWAFSEAAVLFLRANPDGHRYLERLASKHGKGKALSILAARLGRCVYVMLKRRVPFDRATFFAQS

SEQ ID NO: 430461 - protein, 369 aa, unidentified
MEKDTTYVALDDSKRKIVVGILRSGDTQPELREIANDPRQIRRLFERLKREGPVAACYEAGVSGYDLHRQLIALGVAGAVIAPALTPRRPGQRIKTDRRDAAKLVRLFRAGELTAIHVLDESEEAVRDLVRCRDDIRRDVLRWRHRVLKLLARHGRACLTGKNWSRAHWQWIREQRFDLPPLQRAFEATLFALEQALAGQAELDKELEAVAATASYREPVGWLRCFRGIDTLSAIILLAEVVDFQRFRRPRELMAYLGLVPSEYSSGASQRRGALTKAGNSHARRILVEAAWHYRHRPTIGRALASRTHGQPDEVVAQAWRAQQRLHRRYRHLVGHGKRTPVAVAAVARELVGFIWAAMTRHESRRAAA

SEQ ID NO: 430462 - protein, 315 aa, unidentified
MESMYNAVAGVDVHQQKLTITTLVGNNSKKITKTTWECGTYTDDLVEAGKKIKSLGVTEVAMESTGVYWRPVYNIWSKMGINITLGNAYHIKNVPGRKTDIKDSDWLAQLHGNGLIRPSYIPKEEFRKLRDLTRHRGNLEKDIIDVKNRIQRALEDGNIKLKSAISNVFGVAGRKVLMAIIEGEKDPEVLAKLVDTNVKAKKEVIRKSLNHTLDEINLFLLKNMYSQLLYLEHLAQELEKKINDMMAPYDKFIKKLDEIPGIDKITAQIIIAEATTDMENFKDAKAFAAWAGVASGNHESASKKKEQNVARGIPF

SEQ ID NO: 430463 - protein, 397 aa, unidentified
MSCTANQPGPIQIISPCELRTMFVSFELSKRRWLLTLLSPGSDKMSKYTVAGGDWNTLIALLMQAKEKAEVRIGQPVRMMAIHEAGLDGFSVHRMLEKNGVESHVVDPASVAVPRRKRRAKSDRIDGETLLRTLMAWKRGEPRVCSMVVPPSPEDEDRRRLSRERQTLITERIQHTNRIRGMLMAEGIADYDPLRRDRRERLDALRTPDGRAVPRNLKARIVREIERIEVLMRQIGEIEAERGALLRTKQEVGAEAVPGTCRENPAVMLMRFKGIGSEFATMLWLEAFFRRFGNHRQLSAYVGLAPTPWKSGKIDREQGISQAGNPRLRTIGIELAWMWLQHQPDSALSRWFRARVGAERGRIRRIAIVALARKLLVALWRYVTQGVVPEGAVFKAA

SEQ ID NO: 430464 - protein, 428 aa, unidentified
MRSVAGYGCVSGVSTGRCHYRSEEGDVRVTPLRERSWIGVDIGKTHHWVCALDDEGTTLLSVKIANDEAEILALIAAVRELTGEVVWAVDIIGAPSALMLALLAQAGQSVRYASGRVVATMSSAYTGEGRTDAKDAYVIAEVARLRRDLAVIDQDTDLVRNLAVLTGHRADLIADRVRMINRLRDLMTSVFPSLEREFDYASCKGALVLLTGYASPQRIRRIGQTRLVAWLRQRKVRNYAGVAARAVTAARAQTTVLPGQDIAESIIAELATNILALDERLKSLDAQIAETFDQHPQAAVIRSMPGFGPFLGASLLVGAGDLRAFPSAGHLAAAAGLVPVPNDSGRRSGNLHRPKRYSRPLRHVFYLSAQTSMMRAGPNRDYYLKKREHGRTHSQAVIALARRRVDVLWALIRDNRTWAQSPPVARAA

SEQ ID NO: 430465 - protein, 350 aa, unidentified
MSEISIIGLDLAKQVFQVHGADKTGRCVFRKQLKRREVLDFFAGLSPCIVAMEACGSAHFWAREIKKLGHEVRLLPPAYVKPYVKRGKTDRIDAEAICEAASRPTMRFVPVKTVEQQSLTALHRSRELLVKTRTMLVNALRAHLAEFGFIAAKGIGKLPDLIKIVSEAPAAALPEMARTPLSGFLDAIALINAQLDDIEKQLRAWHNANQQSKRLETAPGVGLIGATALCALVPDPALFKNGRHFAAWIGLTPRLDGTGGKTRLGRISKAGDRTLRRLFVLGATSLLKSLANKTTALALWAQALLARRSRRAVTVALANKLARVAWAIMAREEAYRPHCAAQLPMPAVRP

SEQ ID NO: 430466 - protein, 312 aa, unidentified
MNQTPVYIGIDIAKDTLEVAAPGLKLPARWSNTPAGHRRIVQSLMRLGQPVHVVCEATGGYERSLLEALWQAAIPLTLTNPLKVRRFAQSKGVLAKTDKLDARILAEYGSATAARPTPAPSPVLSRLNEIVARRNDLKALRLAETSRLLHLRDKVLLRMTRMHLRQIQEQIAAMDALLRQCVEADQEVHAKIQRLCQIKGVAFTTAVTLLATVPELGQLNRSSAAALVGVAPFCVDSGAMRGRRFITGGRPAARNALYMAALVASRHNPILRDFYQRLLSRGKPPKLALTALMRKLIALLNLLLKNPSFLPL

SEQ ID NO: 430467 - protein, 343 aa, unidentified
MQAITTIGLDIAKSVFQVHGIDAAGNVIIRRQLKRRYVLPFFEKLPSCLIGIEACASSHYWSRELQALGHTVRLMPPAYVKPYVKRQKNDAADAEAICEAVTRANMRFVATKTSEQQSCLMLHRTRHLFIRQQTAVINAIRAHLAEFGIVAPVGRRGVEQLLDVVADCSDKRLPDLARACIAALGAQLQMLKAKILEFDRLIMAWHRSNETSKRLDDIPGVGPALATAVVAGVGDPNAFRSGRDFSAWIGLVPKQRSSGGKDRLGSISKQGDRYLRSLFTAGALAVIRYAKIHGTQHRPWLTALLARRPTKVAAIALANKIARMVWAMMVKGERYKEPAALAA

SEQ ID NO: 430468 - protein, 306 aa, unidentified
MLSAAPCVGIDVSKATLAVAVGEEGRVRRFDNTPAGHRALARHLAPLAPARIVLEATGGYESRVLRHLAALRLNAVRVNPRRVRDARVLARFGARMSPELRPLPAPEQEELRELVRRRRQLVRTRATENNRLETTASPGALRSIRRMVSAIDKQIEQMEAEIAGLIAAHERLKRKVEIVDSIPGVGLVTAAILVAGLPELGELSRQAMASLAGLAPFNDDSGAREGQRSIRGGRPHVRTALYMTTLSAARHNPAIRATYARLVGNGKPPKVALTACMRKLLTVANALVRDNQLWTHRSPNESEPTA

SEQ ID NO: 430469 - protein, 316 aa, unidentified
MLYVGIDIAKNKHDVTALNVPGKTVLKPLTFSNNKAGFELLDLSLRQLNQDCLIALENTGHYAFNLLNFLHEQGYKVYTYTPLLIKEFAKSLSLRKTKTNKKDAHGIALKLLSDPNREQFQHDNRQVELKILARHIHRLKKKQSDWKVQYTRCLDIIFPELDKIVEKHSEYTYQLLTCYPNPQKRLEAGFDKLIEIKRLTASKIQDILSVAPRSIGTTSPAREFEIIENIKHYKRLIDKAETCVNDLMAEFNSIITTVTGIGNRLEAVILAEIQNIHAFDNPAQLQAFAGLDSSIYQSGQIDLAGRMVKRGSPHLR

SEQ ID NO: 430470 - protein, 454 aa, unidentified
MQKQDSYDYFVGIDCAQNKHDFAMKNNQDKFLIKKGHFSNTLQGYEKFLNTVLSKCLNKDKILFGMEVTGIYGTNLYERLKSDGYHVVMISPDSVKNYRDYKRLNKTDKIDSACIAELLLNGDAQIVHVEKNGYTDLKAYIRRRNALKVTCTQETNRFLAKVCLYFPDLLKVFPSGRATLKAIFSIYPTPYSIIEADFDELVSVLQKASKNKFGVDKANELIHAARNSIVVRKSISDGELYNIHSLIDSIDSLESEIRNLEKIIDSKAEEFSAYHVLLTLTECGKITAATIVAEIGDISRFHKASQIVSLAGLYGDNSKSGSSVNKRGKISKKGSRYLRHAIYMVAEFARRNNPIFKAYFTRKKNGDRTKHTLAVNAVANKLCKVIYSLMKNQSTYIIQYRDLAKLSESTQNEFFQNAETDFSAKTRRKKYLYEDEYGELHEFVFKSLKTALIE

SEQ ID NO: 430471 - protein, 357 aa, unidentified
MSKRITTEGGLTIGLDLGDRFTEGRVLDEWGAVVEAFRVRTTEPALSSRLASFPPSRVVLEVGMHSPWVSRVVVRLGHEAIVANPRRVRLIAENDSKSDGVDAELLARLGRVDPVLLKPIVHRGEQAQRDRILIQARDGFVRARTQLVNQVRGFAKALGTRVPSSSTEAFPKRVRETVTKDLFPGLETLLDTIEQLTTTIRQMDREVERLCQERYPETKLLRQVPGVGPITALYYVLTIEDPSRFAKSRSVGAYLGLRPKQRDSGEQKPQLRITKAGDALLRRLLVSCAHYILGPFGGDTDLRRAGLRMAERGGSAAKKRAIVAVARRLAVLLHRLWVTGAAYEPLRREAAQAAQAA

SEQ ID NO: 430472 - protein, 349 aa, unidentified
MIYMGVDVHKSYLEIAQVDDEGKLRSRSRVVNTPESIDELAGSLDPGVKVAMESCSYFYPLYNRLEDAGVEVKVAHPLKVRLIAESRIKSDKIDALVLAQLLRLDYLPTSYIPPRETRHARDLLRHRISLVRQRTQVKNRVHHLLEKNGVKTDTLGYSDLFGKGGLQCLRSVELPKLERRILDMDLDLLGYLNQVLKRSDAELARIAWDNHQARLLMTIPGVDYFTALLLLMEIGDIGRFPRPGRLCSYVGLVPGLHQSGERTRMGGVSGPGNKRLRWAMVESARVAVRHDERMRGFYERVKRRRGDGKAVVAVACKMLKVIWFMLTRREAYQSRNEGRYGVKLKSLRT

SEQ ID NO: 430473 - protein, 347 aa, unidentified
MEYFAGLDVSLETVNVCIVNPAGDILLEKKIAAEPAAIIHLLKSFGSPFKRIGLEVGPTSSWLYGELRAAGYGAVCLECRHVKAGLSAMRNKTDRNDARGIAQLVRLGWFRQVHVKSEEAQRTRMLLVNRQQLLTKALDIENSVRGSLKVFGLRIGVVARRGFEARVLELVADDPIVLAVTKPMLRVRRALLEEFERLDRLCQQLARRDPVCRRLMTVPGVGVVVALTYRTGVDAPERFSKSRDVGAHFGLTPKRYSSGQTDYDGRISRCGDEMVRTALYQAANVLLHHGRWSSLRSWAMRIAKRGSVKGAKVALARRLAVVMHRMWTDGTDFRWSDTSRMTAPTAA

SEQ ID NO: 430474 - protein, 403 aa, unidentified
MNAAGIDISKGKSMVSVMRPLGEVVAKPFTVCHTGSELKELADYLKSLDGETRVIMEHTGRYYEPVAQFLHDAGLYVSAVNPKLIKDYGNNSLRKVKTDKADSKKIAKYGLDNWGELRQYASMDIIRYQLKTLNRQHALYSKMKTAMKNNLIALLDQTYPGVNALFDSPAREDGTQKWVDFAASFWHADCVRGMSQTAFTERYRKWCKRNRYNFSSDKAAEIYTGAKDQIAMMPKGDLTKRLIRQAIDSLNTVSRTVEQLKAEMLKLASQLPEFPVVMEMHSVGDSLGPQLMAEIGDVTRFVHRGSITAFAGVDPGANQSSEREAKSVRTSKSGPPELRRTLFLVMDGLLKSMPQDDPVYQFMDKKRAEGKPYLVYMTAGANKFLRIYYGRVKEYLASLETAD

SEQ ID NO: 430475 - protein, 363 aa, unidentified
MAKVRSWAGLDVHARSVLAASMDSGTGELRVRKLSGETSEVVDFCASLPGPTRVAYEAGPTGYGLARALLAAGVDCVVAAPGKIERPAQDRVKTDQRDAERVLRLLMIDALHAVRVPSNEEEALRDLVRAREALRGDLMRARQRMGKLLLRHDIRYEQNASTWTRSHRAWLAKVRFAERGAQATLLDYLGAIDALEIRRDALEATLSELVADSAWAPTVARLRCLRGIDTLSAVGLCAEVGGDFHRFQRPKLLMSYLGLVPSEDTSGETRRQGAITKSGSQHARRLLVEAAWHYRKTPSLGTTLQRRQEAQPAAVIATAWKAQQRLHRTWRRLDTERGKRRTIVAVAVARQLVGFVWAIATTD

SEQ ID NO: 430476 - protein, 341 aa, unidentified
MKKNLFFIGLDIAEADFAASIYKTPDKPIVTKEAIPNNPEGFDLLLLWLKDHHIDKTNCRICMEATGVYSQAIAYYLLSAGFPVSVEPPLKVKRAFDPVGHKTDPADSKQIAEYAYRFQDELTSWQPKDEILEKIRQLLSVREQFTKQKVALKNAIQAYARQRVQVILIKKAHQETLAQIEKQIARIDKELAKLIKQDPQILQKASHLKSIPGYGMLLVAHLLVITENFTKIQNFKRLAAFIGIVPYQHQSGSSVSKRAKIRHFGPGPSRKLLRLAAQSVATHDVTFRRYYLRKLAQGKAKALVLNNIANKLLKVACAMIRNNTRYIKEHRSIHPMYLKSA

SEQ ID NO: 430477 - protein, 341 aa, unidentified
MDREKETSWAGFDVGKNSFVAALDYHSENVRSKITALPSHEFKRTPEGLEQFFRWVKKIVPNCDIRIVMETTGCYSQHLTDWINQLHPEVSVTIENARNIHAFIQSLNLPHKTDKLDAQAIARFGTERQPNPTNRPSKTILTIRELSRERTALIKARVDLQNRRDTLTSPIVRRINAQTLATLTTQIEKIDKEIKACVVQDEELLSEVHIMTTMPGVSFISAYSILAEIGSLKQYTAKELSSLSGLAPRILESGSSVHSSYLSRRSSGRLRQILYLDSVPGVPKIPALQEFHQRLISKGKKKMTARCACMRKMLLMLRSMVIHNTPFNENFQEIHQKGLDF

SEQ ID NO: 430478 - protein, 387 aa, unidentified
MTSTCALVQPATPDYDNTLVLAIELSNVSWVLAAQVPGLPRVKARRSVKPRVEALMAAIDGYRDRAREVGHAVERVIAIYEAGWSGFWLARWLGQRNIEVHVVQPSSIPVDRRARRAKSDGIDAELLLRSLLAWLRGEPRVCSMVPIPTEADEDARRRIRERGELVSERVSLVNRIGAVLATLGVSDFNPLLRNRRQCLEELRTGLGTALPPHARAKVIRMIDRLELVLEQISELDRARDAVLEEEAPDKAGRMIQELVKLRGIGVQSATVLVHEAFVREFANGKALGSYAGLTATPYSSGGKEREQGIDKAGNRRLRTVMVELAWLWQRYQPGAAQVRWFRERVSGTGARMRKVMVVAMARKLLIALWQFATQGVLPEGAIMKPAS

SEQ ID NO: 430479 - protein, 389 aa, unidentified
MHYCGIDIAKRKHVVAVLDEKGEIVKAPFSVDNSHAGFEQLRDALSAIPGQVTVGLEATGHYWLALYEYLTRLPYPVVVFNPLQIHAYRKSGLRKVKNDRSDAIWIADFVRIGNRQPTTQAMPQLLQLKELARFRMHLTQQIGDLKRKVLGVLDRIFPEYETAFSSVFLASSRELLARATTPQEIAEFDLGELAELLRRSSFGRFGQAKAEALQNLARDSVGVSFLADAARVELHCLLSQMDLLEVQRDRVDEALGQLMASLPQYITTIPGIGPVSGAAILAEIGDVSRFPTVEKLVAYAGIDATVYQSGEFEGTHRHMSKRGSPYLRLALWQAAFMAIQHDPELRAYYNRKRAEGKAHGTALGAICRKLLARIYVVLKEQRPYIPRAA

SEQ ID NO: 430480 - protein, 336 aa, unidentified
MSLYCGIDLHSNNHVVVVINEEDKRLYEKRLPNDLAETLKALEPFKDQLISIIVESTFNWYWLVDGLIDHGYNVELANPTACSQQYSGLKYSDDKHDAFWLAHMRRLNILPTGHIYPPELRAVRDLLRRRLQLVGMRSMELTSIQNQVWRSTGNRIKTGDIKLKNFTIPYLEGLLLQAAQANLTLYRTLEYEVKQIEKTVLKEIDLSPEFKVLKTIIGVGDILGMTIMLETGDINRFATMGNYSSYCRCVKSVRISNNKVKGKGNSKSGNKYLSWAFSEAAHFTVRYDDRAKRFYQRKTSKTNGIIAIRAVAHKLARASFCMLKNQTEYDSKLAFG

SEQ ID NO: 430481 - protein, 399 aa, unidentified
MVSIGIDISKGKSTVCFLKPYGEVLHKPFEILHTESGLNHLSELIISLNEDVKVVMKATGSYHVPVLMYLKERGIFVAVVNPLVMSKYANQSIRKGKTDKLDSIKIANYGLDYWFRLVDYAPTTSIYEELKVLNRQYLSYLSMRVHAKQALTNLLDRTMPGIKTQLMNRSDVPDRDKLCDFVKEYWHFDNVTNMTEEQFIVSYNNWAKTNRYQASSVKARKIYIIAQDSVPTLSSCILSTKLLVLEAVHVLHVIDTTLVLLLSQMRTLVKSLKEYETVMAMPGVGEILGPRIIAEIGDVRRFHSASALVAYAGLDAPPFQSGTYMAGKRSISKRGSSTLRKTGFEIMMYLKSVKPCQDNAVYLFMLKKESEGKPLRVAKIAALNKFLHIYYARVKEIYN

SEQ ID NO: 430482 - protein, 316 aa, unidentified
MTEAQSYVGIDVSKGYLDIAVRPTGQQWRGSNTEEGLGQLVERLHGLSPSLVVLEATGSLEVPVAAALGTGGLPVAVVNPRQVRDFARATGKLAKTDRLDSQLLALFADRVRPAPRPLPDPQTRELNALLARRRQIVVMLVTEQNRLGTALPSVRPGIQEHIAWLEGKLGELNDGMGKLLRESPLWREKEDLLRGVPGVGPVLTLTLLAELPELGTLGRRQVAALVGVAPLNRDSGTLRGKRTVWGGRAKVRAALYMAALVATRFNPVIRAFYQKLLAAGKPKKVALTACMRKLLTILNAMLKYHTPWQADLAFIS

SEQ ID NO: 430483 - protein, 481 aa, unidentified
MSQQEKRSKPLGEEKTRAGKGKRGRKRKGMCLEDRPILEVNAAGIDIGAREIFVAVPPDRDEHPVRVFSTFTEDLEKMAQWLASCGITTVAMESTGVYWIPLYDVVEKHGVKACLVDARGMKNVPGRRTDWHECQWLQFLHSVGLLRAAFRPEGDVCAVRSMMRHRTELVEMTNQHIQHMHKALTQMNVQIQHVISDLTGLTGLAIVDAIIAGQRDPAALAKLRDPHIKASEETIRKSLVGNWRAEHLFTLQQSRESYQHYQEQISDCDEAIEKMLMAFAPRVDPAARPLPPDRKRKQRGRKKKNVNPKTGFDLRTESYKLFGVDLTQIPGLMAMVLMLFSEVGRDMSRWPTAAQFVSWLALCPDNHISGGRVLWRGMRRVHNRAGDLFRMAAYSLHHDQTPLGDYLRRMKSKLGPAGATTATAHKIAIIFYTMVNKQIEYDATLWAQRDAQREKRFEAKLKRQAQQLGYKLVPIEEKPAA

SEQ ID NO: 430484 - protein, 350 aa, unidentified
MIIIGCDYHPGFQQIAFVDTDSGEWNERKLGHREEAEQFYRQLKVRGKKVRVGMEASGHARWFERLLTEVQFELWIGDAAEIRTKRVRKQKTDRQDAELLLRLLIEDRFPRIWVADGENRDLRQLLWHRHRLVQMRTRIMNQLHVLALNEGVRRKKALWRPAGRAQLQSLVLARWASRRRQDLLELLDQLTPKIQELTRALEQEVEKRPVARRLMTHPGVGPLTALAFELVIGTPERFGCGKQIASYVGLVPSEESSGDRRRLGHISKQGNSLLRFLLVEAAQVTVRTDPDWRRRFLHLAMRRERRIAKVAMARKLAVRLYWMWRKEWDYEQMRKFGSHVGEPGNRQGAS

SEQ ID NO: 430485 - protein, 414 aa, unidentified
MEVVNARCAGLDVHKKLVVACALTSDVVKADGQPKPVLERFGTMTGDLQALARWLAERGVVQVAMESTGVYWQPIWNILEEHGGFELLLVNAHHIKAVPGRKTDVKDAQWLAELLRHGLVRASFVPDRAQRELRELTRYRTALIEERTAHVNRLQKTLESANVKLGAVASDVTGVSARAMLARLVGGDEDPAAVADLAKGRLRAKLPELERALAGRFGEHHRYLVPRILAAIDFLDGEIADLDERIAELERPFADAVERLDGIPGVGRRVAETIVAEVGGTVHRFPSAQHLASWAGVCPGNHESAGKRLGGKTRKGNAPLRRALVQAAHAASRARQTYPGAQYRRLAARRGKKRAAVAVAHTILVIAYHLLARNTSYTDLGPDHFDRRDADAIQQQLVKRLERLGNKVTLEKVA

SEQ ID NO: 430486 - protein, 325 aa, unidentified
MSMDDFQVCMQQVMEDNRVVIKGSRKFSNTQKGYEEFLSWEARKLKTEMPVVYVMEATGVYYENLAVYLHEKGKFVCVELANKTRHFAQSHNLKTKTDKVDAKTLAMYGVERRLEQWEPMSPQYKELRDVCREKLSIQKELNRAKNQLHAMSHSNNTSEHVKNFKDKQIEFYDQAILELKKEIRRLVKMDPELERKLNIVQTIPGVGLDLAVVLACETNGFKLIKNIRQLVSYAGLDVEFKQSGLYNGKTRITKKGNARIRQALYMPALAAIQWNKPIKQLNERVCERNPTMKKKGVVAAMRKLLILTYTLWKKEEEFDTEYQWI

SEQ ID NO: 430487 - protein, 349 aa, unidentified
MTIVEDRPVITGGVDTHADLHVAAALDPLGGLLGVQEFPATATGYAQLLDWLGGFGPIALVGVEGTGSYGAGLARHLAVAGIRVVEVDRADRQDRHRQGKSDPLDAVSAARAAQSGRASGAPKGRDGAVEAIRALMVAKRSARAERTQAINQARALIVTGPDELRARFAGHRPAQLVEAIASLRPRPGDVPGYATRVALRELGRRAQFLDAQLDRLDELIGPLVTARAPGLLALHGVGPDTAALLLIAAGDHPERLRSESSWAHLCGAAPIPASSGKVSRHRLNRGGDRQANHALWRIVITRLGSRPGHPATRAYVERRTKEGLPEKEIIRCLKRYVAREVYHQLRDGA

SEQ ID NO: 430488 - protein, 472 aa, unidentified
MVQPETKKKRRRPCQERRPCQEPAEEMPVLQPNAAGIDIGSRSHWVAVPADRDATSVREFSSFTGDLHRLADWLASCGITTVAMESTGVYWIPVFEVLEERGFEVLLVNAAHLRNVPGRRKSDVLDCRWIQRLHSFGLLRGSVRPDEPIVELRAYVRQRARIVQDAGRHIQHMEKALLEMNLQIQHVVSDLTGVTAMRILRAILAGERDGNKLAEMRDRRCRQPKERIAAALQGNYKREHLFVLEQALAAYDLHQSLLAQCDQRIETLLAELQARNEGPTEPCPPRRHGNPTHNQPRFEIQSPLHRLCGNVDLTQIPGLAPATALIVVSEIGTDVSRWPTEKHFTSWLNLAPGTTITGGKLISARRGPSKNRAGQALRQAAVSVGRTQTALGAFYRRIALHRGAAKAAVATARKLGVLVYRALKHGMAFVESGLAAYERQQNDRLVHHLQKRAAALGYKLLPAPAEAPAGAT

SEQ ID NO: 430489 - protein, 341 aa, unidentified
MEYFAGIDVSLEESSVCVVDGTGKIVREAKVASEPEVLAAWFAESGLKFTRIGLEAGPLSQWLHAGLTAAGVAVILIETRHLKAALGAMKVKTDRNDARGIAQLMRMGWFRPVHVKTLPAQEVRALLIARQLLLRKLRDVELGIRGLLRGFGLKVGKVSTGKYEARIRELAAGHPMLEPVTAAMLQARASLRAEYAKLHRMLLRIVRADAVCRQFMTAPGVGPVVAVSYRTAVDDPTRFRKSRDVGPYFGLTPSKYQSGEVDRTGRITKVGDAMVRTALYEAANVILTRVTRFSSLKAWALRIAKQRGVKRAKVALARKLAVVLHRMWVDGTDFRWRKAPA

SEQ ID NO: 430490 - protein, 413 aa, unidentified
MTNEQKSTKGRVIVALDIAKSSHDAAIQLINGKRLNTKIPNTKDGYQTLIERCGVTSDRIDVGFEPTADYHRNIAYWLADAGCDCYLVSSLPCARAREMLHNTWDKNDRKDASVVLYLMNQGISEPFHDPLVSGVMDIQELSNTYHQLQKARTLLLHRLFNHYVTLYFPEMKQYFNSSRAEWFCRFMLKFPTPASICRYRKSTFIKRAWDVVGRKVNKESFLSHLYDQASQSIGLPVALDSVAVDTFRLQLVRFADITDQRATLERQADGFLSDRSDYQRLRSIPGIGPILAMMIIAESGDLRRFKHYRQYLSFSGFNLAAQQSGVSKGQYRLSKRGNSRLRYAFWLAATQAVKSKENSFREKFRRYIAKDPDNKDLRRKARTAVAGKMARVAHALVKTDRDYQGYYEFSRGT

SEQ ID NO: 430491 - protein, 410 aa, unidentified
MEVLYPHCAGLDVHKDTVVACVRHMANGSVRREVRSFKTTTKELLALSDWLVGEGCTHVAMEATGVYWKPVWHVLSDGDFTLVLANAAHVKNVPGRKTDVNDATWLADLLAHGLIRSSFVPDEQTQEMRTLLRTRKQLVRECSRHVQRLQKTLEDANIKLDSVISDIVGLSGRRMIEALIAGETEPGALAAMAHRRIKATPDQLEAALRGRVTRHHRFLLQLHLQQIDAVNAAIDQIDQEVDACVEPFRATVRLLTTIPGIDELSACVILAEIGRDMSRFPTAGHLISWAGLCPKNDESAGKRRSTRMRKGAPWLKTTLVQCAAAAARKKASYLQAQFHRLRARRGAKKALGALAASILTSVYHMLISGELYRDLGPHHFDHRAKAVNTRRLVMRLQNLGYAVQIIPLAA

SEQ ID NO: 430492 - protein, 349 aa, unidentified
MIIIGCDYHPSFQQIAFVDIETGEFQEQRLVHREEAEKFYRDLAAHGKVRVGMEASGQARWFERLLAELNVELWIGDAAQIRAKRVRKKKTDREDARHILQLVLEDRFPRIWVPSWDNRDVRQLLWHRHRMVQMRTRIMNQLQAVALNEGLRCKKRLWRENGRQQLESFPLAPWASRRRRDLLELLDRLNPTITELTQRIEQEVEKYPVAQRLMTHPGVGALTALTFVLVIGNAERFRSGKQIAAYLGLVPEEDSSGESRRLGHISKQGSGLMRFFLVEAAQVTVRSDPEWRSKYFHLALRRGRKIAKVAMARRLAVRMYWMWRQQWDYEQWKKFGPHAGKPGTGVGVQ

SEQ ID NO: 430493 - protein, 341 aa, unidentified
MHNRQNYLYVGVDLHKEQHTAVIINCWQEKLGEIQFDNKPSAFSKFLLEVETYVSDGLSVVFGLEDVGGYGRALAKYLVDHEQVVKEVNPALSFLERKSQVMIQKNDSWDAECVARILVNKFNQLPDAKPNDLFWSIQQLVSRRNALVKAQSALKNQLHIQLNHHYPSYKKFFSELDGKTALAFWQQYPSPSCLEGTNIKRLTAFLLDVSNNTCSIKKASDILKLVKEDGHTMKEYQETRDFLVRSIVRDIEFKKTEMKYIERELKQLVNLLDYQLETMPGIELVTASALIAEIGDVRRFSNANKLARFAGIAPVYFGSGGKVRHIKANKETGHYTLYFII

SEQ ID NO: 430494 - protein, 311 aa, unidentified
MKKEITFDQVIDRGCGIDVHKSVIAATIRGFGIKETTKTFSGFTESIEEMRDWLKEEKITHVAMESTGVYWKPIFNILEEDFDIILVNARHIKNVPGRKTDKKDSKWIAKLLLSGLLKASFIPPKPIRELRDLTRYRRKIVGQVAAEKNRLQKILEDANIKLSSVVSNMSGATATKIINAMIDGEENIEELLKFRHGKMQSSIEDLAASLKGKLTEHHKFMLTTIKESIQEKKSLIEKLDIRIEQHLKANELILDSELLQTIPGVGKDATAGILAEVGNNMNQFPNEQHLASWAGMSPGSNESAGKKKAVE

SEQ ID NO: 430495 - protein, 343 aa, unidentified
MESIYYIGLDVHKKSIAYCIKTVIGKIVCQGMVKAERRALHQWLMDLPGPWVGAMEATMFTGWVYDFLKPYAVELKVAHPAMLKAITAAKKKNDRADAEKLADLLRVNLLPECTMMSEELRELRRILRYRNMIVRTASKMKNKISGLLMEVGAVYDKRKLHGKKYFGQLLERVEDVPESVKDLLKLSRTNMELFEAVQKKLLKTLRKDSLISKRVELLRSISGVGEVMALTWVLEIGDPKRFSNSRQAISYCGLCSAQHESAGKEHRGPISKKRNKYLQSMLIEAANLAPYWNPQLAMVHEKELTRGNRNRATLAVARKLVIYMLAVDRRGKPFMTEKGSLVA

SEQ ID NO: 430496 - protein, 342 aa, unidentified
MHIASVGIDLGKTTFHLVALDDRGKVVIKNKFSRQQLLAFTANLPASLVGIEACSGAHFIGATLRDQGHDVRLIPAQFVKPFLKSNKNDFLDAEAIAEAVARQNMRFVPIKTDEQLDLQALHRVRDRLVHRRTALINQIRGFLLERGIVFPTGAANLRNRMAAILEDAEQNLTPRMRRVLAHLWREWKELNAEIDSVSEEIDTIAENDPACRRLRQIPGVGPLVATATVAAIGNGAAFRKGREFAAWLGLIPRQHSTGGKPRLLGISKRGNVYLRRMFIHGARAMLLRVKYDTGRLGQWAHELDLRAPRNKVVVAVANKLARIAWAVLATGNEYRNAAIATQ

SEQ ID NO: 430497 - protein, 376 aa, unidentified
MEHNSEAFIGIDTSKLKNAIAIAEGGRDGEVRYLGEIETTDAATRKLVKKLATKYRKVTFCYEAGPTGYGLYRLITSLGHECSVVAPSLVPKKPGDRVKTNRRDAVGLAKNLRAGELTAVWVPDTRHEAMRDLSRARETAVDDLKSKRQQISSLLLRLGLHYPGKKTWGKSHRNWLASLKLDQREQRIVLEELFGAERQAQERVDRLASAIIDAVPEWSLAKIVTALKAVRGIDLVAAVTIMAELGDLSRFASPRELMAFLGLVPSESSTGDSVKRGGITKAGNRRARRILVESAWSYRYPPRISRDKLAKVAAAPEPVRAIAWKAQTRLSSRYRALIKRGKRPTIVATAIARELCGFIWAIHRAVTAPGGRQLVS

SEQ ID NO: 430498 - protein, 417 aa, unidentified
MDSVFAKVAGLDVHLKVIQCAVRSRQESGKLFKQVRSFGTMTRDLRALADYLQALGVTHVAMEATGVLRKPVWNVLEGRFTLLLVNPRHLKKVPGRKTDVTDAEWIAQLLQYGLLRGSFVPPRSLRNLRDLTRQRAQLADEHTRVANRIHKLLEDTNIKLAAVATDVLGKSGRKMLRALLKGQENPDQLADLALGRLRKKIPQLKLALEGNCTEHHRYLLGRLLGHLGYLERQTREFGQRIRHRLDELVLASALERLDRIPGINRITIENVLAEIGVDMTVFPDEHHLASWCGMCPGNEESAGRRLRSRMRKGNRWLRRALVEAAWAASRVKKSYLRAQFRRLAPRRGKKRALVAVAHSLLVIIYHVLKYNVEYRDLGPDYFDRLEPERLRRYLVKRLQSLGYDVTLSPRNPDDRAA

SEQ ID NO: 430499 - protein, 482 aa, unidentified
MKAKQKEPTEKSTGQSSQLNWRQMNRKQRRDLERKIQSADLTLQLVHPDAAGIDIGNESHYAAVPPDRDSQPVQHFGCTTAELRAMADWLKQCRIRTVAMQSTSVYWIAVYDVLEQAGLEVYLVNARETKNLPGRKSDVQESQWLMKLHTYGLLRNSFRPPQEIRMMRTYWRQRNDLVRSAARHIQRIQKTLTQMNMQLANVLSDVSGVTGQAIIKAILAGERDPQKLAAFRDPRVKASEKDIARSLEGNWQEDLLFVLKQEQATFEFCRKQMAECDRQLEQYLQKMEDRSQGATLPEEKRKDRLQKKKGNQPQFDLQQQLFRMTGTDLTQIDGIDVMTATTILSEAGWDMIKWKDEHHFVSWLRLAPDNRISGDRIIGKGRLPTSNRVTVALKLAASNLRTSQSYLGAQFRRLRARLDTPVAIKAMAAKLARLIYRMLRYGTRYVDHGSRHYELQQRTREIRRLKLKAATLGFHLVQSTAA

SEQ ID NO: 430500 - protein, 319 aa, unidentified
MLVGIDVAKGELVIAVRPSGERWTVANDERGVRTLVDRFRTAPPELIVLEATGGYELLCVAALAGAGLPVVVINPRQVRDFAKATGQLAKTDRIDADVLALFAERVRPDVRALPDGAAQELDALLARRRQLLEMLQAERNRLGQVFGRGKQSVKKSLKGHIAFLERELKIADTDLGTMVRSSPAWRERDDLLQSVPAVGRVLSFTLLAELPELGHLSRRAIAKLVGVAPLSRESGTWRGRRFVQGGRAPVRAVLYMSALVATRRNAVIQAFSQRLLAAGKPKKLALVACMRKLLTILNTMVRTGQRWSVEAFRHDAMPA

SEQ ID NO: 430501 - protein, 344 aa, unidentified
MEPMYYIGLDVHKRKISYCVKDNSGRVFAEGLLAATRLDLDLWMKTLPQPWSAAMEATMFTGWIYDHLQPHAAALKVAHPLMLRAIAAAKKKNDRIDARKICDCLRCDFLPECYMASTAIRERRRTLRYRNLLVRQMVQMKIKISALLMEAGVSYNKQRLHKAGYFRELLASNPDINEGLRALLRLCRETVVRLQKTESALVRSLESDPLLMDRVERLMTIPAVGPITALTWALEVGDVQRFPSIKKAISYCGLCGAEKSSGSTVQRTPLSKQRNKHLQTTLIEAAKMAPRNSSALALLYDQEKQNGNANRATLAVARKLVAYLMAVDRGQRTFQVVETSNIAA

SEQ ID NO: 430502 - protein, 372 aa, unidentified
MASIIYVGMDVHTTNFTFCCYTADSDRGFAVAQTEPDYRQVIKYMERVQKQRGEECKFVCGYEAGCLGYSLYHQLTRCGVDCVILAPSTMHQEKGKRIKTDRRDAENIARCLAFSLYSPVYVPTTEDDAVKEYIRMRDDIKADLKRVKQQIIAFTTRHGFAFDGKSYWTQKHLKWLETLVFEHPLYKETLQEYLILYYMLDEKVAVYDTRIEEMSHLEHYEENVQKLCCFRGVAAHTALSLLVEVGDFQRFRSAKHFAAYLGLVPGEHSSSDKQIRTSITKAGNTHLRRLLVEAAQSYNRGAIGKKSAALKARQGGNPAEIIAYADKANERMQRKYYRIAFKSRHNIAKTAIARELACFVWGMMTGNISNAA

SEQ ID NO: 430503 - protein, 344 aa, unidentified
MRIKPIGAAVYGIDLGKNTFHLVGTDSSGNTLQRVTLTRANIFTFFSNAPQAVVRVEACPGSQWLARRLGALGHVVRIIPAQFVKPYVKSNKNDLIDAAAIAEAVTRPSMRFVQVKSTEQVELQSMQRIRKRLVRTRTQLINQMRAFCLEFGIPIRHGVGSFKAELPQILADDKNDLTPCMRDILVGLSAELTGLEDRITLMTRRIEAIAASSALAMRLTSIPGIGKLTATAIISAVGNAQQFSKARDMAAWLGLVPAQYSTGGKTTLRSISKRGDPYIRRLLIHGARSCVLHLDRAKDRLGAWISALEARMHSNKVVIALANKLARVAWVIMRQPGTLYLQPG

SEQ ID NO: 430504 - protein, 339 aa, unidentified
MSESYAGQQFVGMDLHRRRSVLVRMTEAGERLETIRIVNDAERLAAVIARAGEAPEVVLEATYGWYWAADALAAAGASVHLAHPLGVKAFSYRRVKNDERDAADLADLLRMGRLPEAWIAPPATRELRELVRHRAKLVAIRAQLKAEVHGVLAKRGVSVVMTDLFGLEGTALLDRIKLPAPYRARVESLRRLLADLDFEIDVFTKLARVRLATDPGYVAVQTIPGIGPVLGAVLVAEIGDVHRFAGPAQLASWAGLTPKHHESDTTVHRGHITKQGSRLVRWAVIESVQILPKTTHIGAVRERVGERRGRPIGVVAAARKQLELVYWAIRDHHVRALPG

SEQ ID NO: 430505 - protein, 315 aa, unidentified
MANLKKSKSIINVGVDVGKYELDVCIHEKQIHWQDENSEAGIKRILKRLSHYQVERLVMEATGRYEFELAQAAHKKKLPVCIVKPLRVRRFAGAIEQSAKTDKLDAKLISEFAFKVKPKITPEKSKNLLAIKDLISRRRQLMTMRTQEMNRTQIMAKTIETSCKRIVRYLDQEIKRIEIRLSKHVEEQAEWTDKQEILKSAPGVGDTLVYTLLADLPELGSLNRKEISSLVGVAPINRDSGKMKGKRRIQGGRHSVRTILYMATLSATRCNPVIKAFYQQLVAQGKHKKVAITACMRKFITMLNAMVRDKCVWAY

SEQ ID NO: 430506 - protein, 320 aa, unidentified
MSDSSVMIGIDVASEHLDVVAIGAAIPLARYGNDPEGHSALAEALVAIEAALVVMEATGGYEAALACALQAAGLKVAVINPRQARDFARSMGRLAKTDRVDAQTLAELAATLARRPDAERFLRPLPDAVQQDLAALVTRRRQLLTMLLSERQRLRLAVAVVRPSVEAVIEMIRKQLDDIEAQMTDHVHRHYAELDTLLQSAGGIGPVASASLIADLPELGRLNRRQIAALVGVAPYAKDSGQHRGRRRIAGGRFELRRALYMATLTATRHNPAIRAFYERLLAAGKLKKVALIACMRKLLAILNAMAKTHTKFDPVHTHA

SEQ ID NO: 430507 - protein, 451 aa, unidentified
MAKRKEKLERRSMVLEPDAAGIDIGAEEIYVAVPPDRAEESTRRFSSFTCDLHALADWLGQCRIQSVAMESTGVYWIPLFQILEERGLKVYLVNAHYLKSVPGRKSDVSDCQWIQYLHSVGLLRASFRPPEAICAIRTLWRHRGSLLEMAAEHILHMQKALSQMNLQLHHVLSDITGTSGQAILDAILSGQRDPVALAHLCHRRVQSPRDKVAQALVGDYRPEHLFTLRQSLEGYRYYQKLILELDQETARLMQALPSATEHPMPPRTKATAYHRQGNDPRFDLRSELYRIAGVDLTDIPGISAATAQVMLTEVGTDVSRFRHASAFASWLGLCPEKRISGGKVLSCKTRLVKHRAATALRMGANSLCRAKGYFGEFFRRMRAKLGTAQAITATAHKIARILYHVLLTKEPYSETVFHRCDEQAQQRAEMRLRKQAARLGFQLLPIPATGE

SEQ ID NO: 430508 - protein, 350 aa, unidentified
MKICTIGIDLGKTVFHLIGLDEQGKVIAKKKCSRSQLLAYTANIPAALIGMEACCGSHHLGAALAAQGHQVRLIPPQFVKPFVKSNKNDYNDAEAIAEAVQRPRMRFVPIKTNDQLDLQALHRVRDRLVCRRTGIINQIRAFLLERGITFRAGRVYLRSHMAAILEDAELNLSPLMRGLLEQLWEEWKITESRIEEVTDQLEVIADQDTSCKRLQSIPGVGPLVSTALVAAIGNGSAFAKGREFSAWLGLVPRQISTGGKPKLLGISKRGNSYLRRLFIHGARAILIRERKKYAFGGWMTQLESRAHANVVAVAVANKLARIAWAVLVKGENYRQTPTFSVSNCEGNMAA

SEQ ID NO: 430509 - protein, 340 aa, unidentified
MKQLYVGIDLHSNNNYLAIINEQDKRIYKHRWPNKSDVILAELEPFKESIVGIVVESTFNWYWLVDILMDEGYKLHLANPTAIQKYKGLKYSDDSHDAFWLAHLLRLGILPEGYIYPKAERPIRDLLRKRGHLVKLRTSLINSLQGIIYRNCGYKLNVDKIKQSKENHVRPILSGQYDLELSGEVSKDTIDYLTRQIHKIESAILKKIKLRDSFKKLQTVPGIGKILALTIMLETGSIKRFSNVGNFSSYCRKVPTKWTSNDKKKGKGNSKSGNKYLAWAFSEAAEFARRYDKSIMAFYNRKAAKTNRMVAHSTLAHKLTRATYYIMRDNVEFECQKLFA

SEQ ID NO: 430510 - protein, 363 aa, unidentified
MKLYVAFDVHSRSSVIAAVDEDGKRVAAGKVRNDPEAVVEMVNGLIGEVEGVVVESTYNWYWIVDALMDAGYRVHLANPSQVKKYEGLKHSDDRDDAFWLAEMLRLGVLPEGYIYPKQERPVRDLLRKRGHLVRLRTSLILSLESIITRNYGISTSAKDIRAVTEDRVTPLLEGNEDLLLAGRKSKAVIDFLTENITDIERVVRIRIQLRDQYKKLLTIMGVGQILAATIMLETGPISRFGRAGDYVSYCRKVPTEWSSDGKRKAKGNRKNGNKYLAWAWSEAGNAAIRHYQCVRRYYERKAQKSNQPVAHNAVDHKLARAGYYVMRDGVVFDPERVFGKLGRPTRRSVGVKPSVMIGSPPQL

SEQ ID NO: 430511 - protein, 340 aa, unidentified
MEVATIGLDISKHVFQVHAVDAQGQVTGRQRLRRSEIVSFFFSLPPCLVGIEACATAHYWAREIQRFGHDVRLIPPAYVKPYVRRGAKNDAADAAAICEAVTRPNMRFVPIKSVENQGFLMLHRARGLLVRQRTMTACAIRAHFAEFGIIVGQGRQRVDGLVELLDDEEPALPANARTALAILVNQLKELDLQVDAIERELAQIQRVNPMAKLLSSIPGVGPITATALAATVPDPSMFRSGREFAAWLGLTPKQNSTGGKDRLGRITKRGDSYLRHLLVIGARNVVRYPKARSRVGGGWIEALLERHRPMVVAIAVANKLARIIWAMMTTGEFYRAKAAG

SEQ ID NO: 430512 - protein, 386 aa, unidentified
MMVIGVDPHKSTHTATAVDPHTNRAVASLRIDASLADYRRMLAWARQFEHRRWAVENAEGLGRHLSSWLLARGEKVVDVPTTATARVRQLSRGGGRKNDQIDAAAAASVAALQGESRPLEPESVTDALALLDESRTNLAQSRVRLVNQLHALLRELLAGGAPRDLSASTAAALLRRIRPAGDVERVRKQIAAGLITQIRSVDALLKSNAAQISERVAASGSTLTGTVGIGAITAGRLIGRTGRASRFPTSASFANYAGAAPVEVASADKARHRLSRSGDRQLNAALHTVAITQIRTPGSRGHAYYNVKIAEGKTAREARRCLKRRLADYIWRTMITDERRVAASPGGHLGATLKSSATGSAPTASSSDKSLPGPARPDSTTPNSAA

SEQ ID NO: 430513 - protein, 402 aa, unidentified
MGDFAGLDWGSTRHAACVVDEHGKVVDRLAVRHDAEGLDWLIAGLRRLGPAGTLPIAIERPSGIVVAALAAAGHPVVPIPPNAVKATRPRYRAALLKSDAGDAYSLADMLRTDGHRFRPLAASSDALKALRALVRGRDDLVAARVALANQLRGVLESFWPGAAAIFADIDSPIALAFLRRYPTPESAARLGERRLAGFLAQESYCGRRSAAELLARLRAAAPGRAGEAEAEIKGELVRALVGVLAELVARLAKLTARLEPLVADLPDGRILMSFPRAGRVCAAQMLAEIGDARERFPTEAQLAAEAGLCPLTKASGKSHAVTFRWACNKRLRSAVTCFADNSRHASRWAADIDARARARGCDHPHAIRILGRAWIRVLWRAWCDGLPYDPTRHRGAQAHAAA

SEQ ID NO: 430514 - protein, 370 aa, unidentified
MGPAVEPQLREAPVMNEGSCVGLDVHARSVVAGVIDVGSGEVRSLRVPPGPEATVAWLKTLPAPVRVVYEAGPTGYGLARGCAEAGISCVVAAPSKIRPAADRVKTDRRDAERLARLLRLGEITSVRVPGPEEEAARDLVRAREDARGDLMRARHRLSKLLLRHGAVYDATAWTRAHDAWLRKQRFQSGPLAIVFDECYGRMLDAKTRRDSLDVAIAELAASEPYVDVVERLVCLRGVSTLTAFALTVELGDWNRFRPESLGAFLGLTPSENSSGERRRQGGITKAGNSHARRLLIEAAWHQRSAPRLSVTLERRRTGKSLAVRAQADRSARRLHGRWHALEARGKPRLIVVVAVARELAGHCWALATME

SEQ ID NO: 430515 - protein, 350 aa, unidentified
MNYIAFDCHRRYTFARVEDASGRRLWEGRIPHRRGIFLEFLEGFEPSTPRALETIGSWYWVVDEIEARGLRPRLVHARGAKVMMGMIDKSDKLDAKGLNILQRTGTLPEVWIPSGEIRDRRELPRSRMLLVRQRRRLKQRVLSNLAKYGFVVSEVSDPFGRKGREILKRMIAELPPETRRITLMLLEEIEHLEGRIEEIEGRMREVFSSSEEVELLQSIPGVGFILAVVIALEVGDISRFGGPERFVSYCGLVPRVEQEGSRVRYGRMRKEANRYLKWAFIEAANAVALNARRWPERHASRLPQRIKQRKGHGKAVGAVGRHLAEAAYWILRKGEPYRDPGLRALGARGA

SEQ ID NO: 430516 - protein, 347 aa, unidentified
MTTEIASLVTSVGLDIAKTWFQAHGADGEGKPVFRRKLRRDQVLRFFKDLPATTIGMEACSTAHHWARQLTGLGHRVRLIPPQYVKPFVKRSKTDTADAEAICEALRRSGIRDVAVKTPEQQGSLMLHRARDLLVRQRTMLTNALRGFAAEFGLIVPQGAWNITKLRELLHGANTSVLPDEARDTAQMLFGQLDELGHKIELLDRRIMAWHRSNEVSRRLASIPGIGPINATLIAATVADAAQFRSGREFAAWIGLVPREHSSGGKQRLGGISKRGNPYLRRLLIVGAHAVLRWTRRGKGMQTAWLLGLIERRPANVVAVAIANKMARIAWALMARGGEYRSATVAA

SEQ ID NO: 430517 - protein, 368 aa, unidentified
MTSILYIGMDVHTTNYTLCSYTLETQQSFGRVQVEPDYKQILKYIEKMKEAWGDDIEIVCGYEAGCLGYSLYHSLTDHGVNCIILAPSTMASTPNERKTDMRDAEKIAKCLAHGTYSPVYVPTERDEAVKEYIRMRDKHKASLKCIKQQIIAMCYRYGKQYTKQSHWTQAHLAWLKSLRFNDPILQETFEELMIQYYQAAEKLDHYDKRILELSGEEEYVEKVHKLVCFNGVREHTALSAIVEIGDFNRFPSADRFAAYLGLVPGEHSSSTNVRRTGITKRGNSHLRTLLTESAQCYSRGQIGKKSMALKNRQEGNEPAVIAYADKANERLKRKFKRIAFSRPHNVAATAVARELACFIWGMMTGHII

SEQ ID NO: 430518 - protein, 338 aa, unidentified
MQLYGGIDLHSNNNVVALTDETDRMVYRKRLPNDVETVLAALAPYRNAITGLVVESTYNWYWLVDALTEAGYRVHLANTAAIVQYSGLKYSDDDTDAAWLAKLLRLGLLPEGYIYPKAERAVRDLLRRRQRLVQQHTANILAVQNLFSRNRGRAISANEVRRLTPESVAELVVDPNLALAIQSTVLAMRGQQAAIELLEGEAWRQTKATPTWRALQTVSGIGRILGLTIALETGPIERFAGVGHDASYCRCVGSQHVSNGKQKGKGNTKNGNKYLAWAYVEAANFAVRYNPQIKRYYQRKRAKTKGVVAIKAVAHKLARACYHILRDGSAFDVNRAFA

SEQ ID NO: 430519 - protein, 352 aa, unidentified
MMIIGCDFHPRFQQISFLLEETGECGQRRLMHTAEAEQYYRSLCGAKVRVGIEATGSYGWFRRLLSELGHELLVGDATQIRASNPRRQKTDKRDAEHILGLLVEDRFPAIWQPPAENEQLRQLLLHRSRLVRLRTRVTNQLDGMAKNEGLLVPGGWSVKRRKAIEALPLPGWYGERRKDLLALLDRLEERIAPLDKAVSQAAANNAEACLLMTHPGVGPVVSLAYVLTIGNWQRFPRGKQVGSYLGLIPAEESSGDKRRLGHISKQGNTLVRWLLVEAASTAQRYDPSWHRQYLRLSMTKHHGVAKVAIAHKLAVRLYWMLRSGEDYQHVRERGSHARQSECPGGRSKRPIE

SEQ ID NO: 430520 - protein, 405 aa, unidentified
MEKGRKRRSTANLPLVHRNAAGIDVGDTIHAVAVPEGRDTKCVRSFGAMTCDLQEIIEWLSKCKIDTVAMESTGVYWKPLFTMLIAAGFEVYLVNSRQIRNVSGRKNDEDDAVWIQKLHSFGLLKSSYLPGDEQEALRALVRYRRTLTSDCNRFVLRMQKTLELMNIKIHTVIRDITGKTGMAIVEAIINGERNPENFLQYVDKGIKADDTTILNSLEGNWRSEQLFILAECCNSYKYYRERIAVCDTEIENQLRTYQEACHPKTEINLNERSKKQATKNKPKFNTSSYLKAIYGVDIMAIYGISDILALEILSETGTDMDKWATAKHFVSWLNLCPNNKISDGKMISSMLMKKKPNVASQAFRNAANAVQRSDNWLGDYFRRMKAKGGNKYAAVATANKLATVF

SEQ ID NO: 430521 - protein, 411 aa, unidentified
MRLFVGDDWAEDHHDVEVMNEAGKVLVKRRLPEGVAGMARLHELIGEHLGEDADGAEVVVGIETGHGPWVAALVAAGYTVFAVNPLQASRYRERHGVSGAKSDSGDAHMLTDMVRTDSHQLRAVAGDSAEADGVRVLARTHKTLIWERTRQVQRLRYQLREYFPAALEAFDDLDAADALELLGKAPDPARAARLTRAQVSAALKRARRRDIPGKATAILAALRGAQLGQPAALTAAYAVTVRSLIAVIIVLNEQVKALQGQVEENFGRHPDAEIYRSQPGMGAILGARVLGEFGDDPHRYADGKARRNYGGTSPITRASGKKKVVAARFIHNDRLVDALNAQAFASLNASPGARALYDELRARGIEHNDALRRLANRLVGILHGCLKTRTLYDEATAWGHRENLPQSSVAA

SEQ ID NO: 430522 - protein, 404 aa, unidentified
MEVFVGHDWAEDHHDVHLEDLEGRKLAAARLPDGIAGVARFHELVAEHVEDPSEVVIASETDRGLFIGALVAAGYTVLSVNPMSTSRYRERHSTSGAKSDPGDAKVLADLARTDRHNHRPIAGDSEQALAVKTLARAHQSLIWTRQRQTNQLRSTLREFYPAALEPFESLHHNDAVAILSIAPDPATGRGLSASKIAAALRRGGRQRNFQRRVADIQTALRSEQLQAPPLVADAMGTVVKSLAVIIGQLNVQIDELETGLADSFEQHPDAKIIRSLPGLGMILGARVLAEFGDDPNRYVDAKSRKNYAGTSPITRASGKHRVVLARYARNKRLGDAIHQWAFAALSASPGARDFYDQRRAAGDGHHKALRALGNRLVGILHGCLRHQSIYDEHLAWGHRTQLAA

SEQ ID NO: 430523 - protein, 314 aa, unidentified
MKDITTFVGIDIAKKSLDVATLPATTPRTFFHDTKGRKELLNNLPQPETCLVVIEATGGYERLLVAELLTAGHLVAVVNPRQVRDFAKALGILAKTDRIDAAVIARFGQQVKPRPLAEVHEKQSELDQLVTRRRQLVDLRTAEKNRMGMAHSKSVKRSLQLVIDTINKEMKRIEKNILALVESDDEWKGKSDIMNSVPGVGPVTTTTLIAEFPELGKINRSQAAALAGLAPFNRDSGALKGKRTISGGRRTVRNALYMAALSARKHNPVIRQFADRLENQGKAPKVILTACMRKLLVTLNTMLKNNTLWNPQII

SEQ ID NO: 430524 - protein, 410 aa, unidentified
MEVLYPRCAGLDVHKQTVVGCIRVTQGGEVRHEVRTFKTVTSELLALSAWLSEGGCTHVAMEATGVYWKPVWHILSDGELELVLANAAHVKNVPGRKTDVKDAEWLSDLLAHGLIRGSFVPDRQTQEMRTLLRTRKQLVRERGGHVQRLQKTLEDANIKLDSVITDILGVSGRAMIEAMIAGESDPDQLAGLADRRLRASAEDLREALRGRITSHHRFMLRLHLDQVDAIDRAIGRIDEAVRADLDSFRSAIELVKTMPGLNDVSAQTVLSEIGIDMSRFPTDGHLISWACLCPRNDESAGKRRSTRMRKGAPWLKATLIQCAWAAARTKDSYFQAQFHRLKARRGAKKAIGAVAASMLRAIYHMLKNGTVFQDLGADHFSRRNKTASARRLVTRLQGLGYAVQLVPIAA

SEQ ID NO: 430525 - protein, 362 aa, unidentified
MMDPRPGDVIAGVDTHTDTHHCAIIDHLGRPLDDREFPTTGPGYDDLAAWAASHGRPAAIAVEGTGSYGAELTRRLSAAGHTLIEVNRPDRSARRRHGKSDPLDAYAAARAALSGRARAIPKDRTATAGALRPLHNLRTMLVTQRTQTVNQIHALVTTAGQELRASLRGLSTARLIRACAALEPDAAPAADPDTVVRYCLAEQARHYQDLSARITDLGHRIDTLTAEAAPRLRALSCVGPQSAAQLILTTGDNPDRLSGEDAFAHLCGTAPVPASSGRRDRHRLNRGGDRAANKVLHQIVIARMRHDAATRAYVQRRLKQGLKKKDIIRCLKRYVARQVYKAHIRPAPDPAPTSTNTYTQAA

SEQ ID NO: 430526 - protein, 399 aa, unidentified
MLAVGIDISKSKSVAAILNQDGSMHTSPFEFHHTQPELDAFIKYILNSNQSATILMENTGHYHYPVLKAFQEAGLPVCIVNAYQIKKFGDMDLRKAKTDKKDAVRIARYALEKSYSLVPYTSMEQKYEDLRFLARQYNQRMLTLKTNKVFLLNLLDETMPGITNILPLTTRTPETSLSVLFINRFKSYDRIKKMGKNRFLDAFEKIARKSRNRQTKTYGLAIYETVLYNITTRGENEYTLGAQDQCLELVCESQKAADSIILKRQTLAETLPEYAVLRSMAGVGDRLGPLILAEIGDIRRFHSGKALNAYAGNDAPPYQSGTFESHNRHISKRGNAALRKYCFEVMQALKLTQPQDDPVYLFLLKKEQEGKPYNVAKMAGVNKFLRIYYARAMETLKQQ

SEQ ID NO: 430527 - protein, 341 aa, unidentified
MKKISFFIGLDISKADFAASIYQTPRESIVTKEAIPNDPKGFNLFLLWLKDHHIDKTNCHICMEATGVYSQAIAYYLLFQGFPVSIEPPLKVKRAFDPVGHKTDPVDSKQIAEYAYRFQDELTAWQPKAEILEKIRQLLSTREQFTKQKTALKNAMHAYSLQRVQVALINKAHRETLAQIEKQIARIDKELSKLIKQDPLISQRANHLDSIPGCGMLLAAHLLVITENFTRIQKHKRLAAFIGIVPYQYQSGTSVSKKAKIRHFGPGPSRKLLRLAAQSVATHDVTFRSYYLRKLAQGKSKALVLNNIANKLLKVACTIIRNNTRYIKEHRSIHPMYLKSA

SEQ ID NO: 430528 - protein, 342 aa, unidentified
MQIAVLGIDLGKNSCSVAGLDASGRVVLRRRLHRDGVVKLAAGLPGCVMAMEACCGAHHLGRLLQDQGHQVRLMSPEYVRPYVKAQKNDDRDAEAIAEAATRPTMRFVELKSETQLDMQSLHRARDRLVGERTALINQLRAILLERGVIVPQGRRKLELHLETLLAAEQVSLSPRVRQLIEDQRAEWAELDRRIEGFDDEFAAVARTDEAARLLTTIPGIGPLNATALVAAIGRAQTFTRGRDLAAWMGLVPKQMTTGGKPKLLGISKRGNEYLRRMLIHGARAALPALSKGETPLGAWLRGLQARAHVNTVVVAFAAKLARIVCAILHSGQRFGMQAATAS

SEQ ID NO: 430529 - protein, 344 aa, unidentified
MNIETLGIDIGKNVFHAVGLNAIGEVVLRRQFTRSALMRFMGKLAHCKVGMEACGGSQHLGRRFERFGHTVRLMAAQFVKPYVKSNKSDFNDAEAIAEAVMRPTMRFVTLKTVEQQDLQALHRARSLLMGQRTALINQLRAFLLERGMTVPKGVAALRRRLPEVLEDADNELSDRLRALIDQIWQQISGLEARIATLNAEIEVIAATDTACPHLLSIPGIGVLTATAMVATIGDGKQFHCGREMAAFLGLVPRQHSTGGKPRLLGISKRANTYLRMLLIHGARAVLRGGDKRSDRLGPWLRELKARRPSNVTAVALANKLARIAWAVLAHGEDYRPRLSLLEVA

SEQ ID NO: 430530 - protein, 337 aa, unidentified
MKLYCGIDLHSNNHYLTLIDENDRRVIERRLPNDLSATLKTLEPHRATITAIAVESTFNWYWMVDGLMEAGYSVRLVNTAKARQYDGLKYSDDRHDAFWLAQQMRLGILPTGYIYPKEERAVRDLLRVRRRLVRERTTHVLSAQSAFCRHTASKPSSKLIVGEKKMPWPQLPNVHDELGIKAHRAAIETLNIHIERIERTVLQVLKPRKDYEMLRTVNGIGSVIAWTILLESGDLSRFKNVGHFASYARCVDSKRTSNDRKKGEGNVKNGNAYLAWAFFEAAHFAKQFLPAAKRFYEKKAAQRNPILAMKALSHKIARACYYIMRDQVPFDAARLFG

SEQ ID NO: 430531 - protein, 422 aa, unidentified
MKERARIVGFDCGEDEHSAVLLDASGEFDKRFSIVNERGQIQEALAEVLLDVGPDSQLVVVVESKRSHGRIVTDVATELGCELWQVNTVALNHFRDLEGQPRKDDEWDAYLGARMVYLRMGGCREAIETTDEERSLSRLTRIHSRVTEDRKRYVARLRAVLLELAPEMLHAKWNGPRPDSKAMLYLLERWPGFDGLERAQLRSIEKILRQCRYKPEDRTPVAKLIRKAARGISIAAEERSSLTMELDLLVRQIRLCDESIAKVYVEIAGRVERHPVGQKLLEMHGIGPVIAGVLVSELFPVARTAPEPKSATYSGVTPLARKSGKSLDKDRLTQGVNKRILHALYTSSVVAIKHSSVDRAYYQKKLRDYAGHPKPHVAAFIALSRQRHKLIYKLMTTEARYDKEILVASHLERIERDRIVAA

SEQ ID NO: 430532 - protein, 367 aa, unidentified
MKKITTATGRRTGKVQEQQRLTIGLDVGDRSSFYCVLNGAGEVILQAKVATRPEALREAFGRMPRSRVALETGTHSPWMSRLLSELGHEAIVAHARDVRLIGESRRKDDKIDAQTLARLARIDPQLLSPVQHRSAEAQADLSVIRARYALVRARTGLICAARGLTKSFGERIRGRNPKAFRAEMGETLSPQLRVALTPLLNALETITERIREYDDQIEQLAEEKYPEAALLKQVKGVGTLIALTYILTLDDPRRFRRSRDAACYVGLQPGRRNSGQSEPQMHITREGDSCLRMVLVQGAQHILGPFGEDSDLRRWGLNLAERGGKNAKKRAIVALARKLAVLLHHLWISCEEYEPLHNTQKHRLAAA

SEQ ID NO: 430533 - protein, 412 aa, unidentified
MKVVHEICCGIDVHAKMLVACLLMANGEKKIRTFSTMTDELLQLREWLVAAQCTQVAIESTGVYWKPVFNILEDALTVILINPEHAHALRGRKTDVKDAEWLADLLRHGLLRPSFIPPPVIRELRELTRYRESLVREQGAVANRIQKLLESGNIKLGQVASDALGVSGRAILKALADGETDPRKLAALARGKLKEKSLSLERALHGRLTVNQRFVLRESLRRWEELETADARVTREIDKYVQADPKLARAREILDSIPGIGLRVAEVIIAEIGIEMTAVFADAAHLASWAGICPGNKATGGKRLSGRTRKGNTYLRSALVQAAWGASMKKNCFLSSQYLRLLKRLGRKKALVAVAHSLLVIIFHVLQRDQTYTELGADYFDRHHVEQQREYYLRRLQMLGLKVTVEELPVAA

SEQ ID NO: 430534 - protein, 433 aa, unidentified
MLKLNYMSTLFVGIDVSSKTNAVYAMDFEENKYISSSFGNNQPGADQLVNMIAECMQKHKNLDTVLIVLESTSVYSVHISNFLSASEVLMPYKPYVFCVNPKATSNYRKSYIGMEKTDPTDAYLIADFGRVGRTKKLEPWRGGQFISLKRLTRHRMHLSECITREKTYMVSNLYLKFSELQLLEGDDKPFGSLYGATSSAVLTEFLSPQEIIDMPEEELLTFLAGKSRNRISDLSKTSELLRKAARDSYRLDKCMYEPLSISLASSFNCIHAYQKEIKLIEQAIEKCINGMNPNALLILQSIPGIGPIWASGILSEIGDITVFHSSDALAKYAGLYWPKGDSGDFTSEDNKMSKAGNPYLRCYLGEAANSVRKHIPEYADFYARKYAEVTKHQHKIALALTSRKLVRLVFGLLVKNQLYTGEKLDTEYNIESN

SEQ ID NO: 430535 - protein, 411 aa, unidentified
MQQDCDRVAGLDVHRDIVVACVRVGRGDKVKLHRGKFATTANGVRELVSFMADLGVERVAMESTGVYWKPVYYPMEGCFSELWLCNAHHVQNVPGRKTDVNDAEWLADVAAHGMVRPSFVPPPEVRALRELTRYRKTQVTMRGQEIQRLEKVLQDAGVKITSFASNVLGVSTRSMLEAMLAGETDPKVLADKAKGRMRSKIVGLEEALAPQLEGHHKVAVRAILGHIDYLDVSIASLDQAVLERMGPFEPAVATLVSIPGVGRMAAEMVVAESGADMSRFPTAGHFAAWAGVAPANHESAGKRQSRGARFGSPWLKRTLVESAKSASRTKSSYLGAQYKQIARRRGPNKATLAVAHTLTVAIWHMLSNGTEWADLGADFFQRGSDTGRQANRLIANLRALGYEVTITPPAA

SEQ ID NO: 430536 - protein, 344 aa, unidentified
MNVKRMGIDLAKQVFQLHGVDRFGKVVVRRQLRRAQMEAYFEALPPCLIGMEACASSHHWARVLTGYGHVVKLMAAQFVKPYVKSGKNDANDAEGICEAVGRPNMRFVEIKSVEQQVVQAEHRIRSRLVRVRTALANEIRGLLGEFGIVVARGVSQIRNALPILLEQEEHPLTQRFALLLTELSEELKQIDDRIEAHDKRIRIDSRDDKRVSRLMEIEGIGPISASALVAAVGDAKQFASGRDMAAWIGLVPSQHSSGGKDRLGHISKRGDTYLRTLLVHGARAVLNSCAGKLDRRSQWAQALAARRNRNIATVALANKNARIAWAVLSRAEAYRGAQPAKQTT

SEQ ID NO: 430537 - protein, 345 aa, unidentified
MTSMNYIGLDVHKKTISYCVKDASGRVQQEGQVGSTRRELDCWMKTLPQPWTVAMEATIFSGWIYDHLLPHAAQIKVAHPLMLRAIAAAKKKNDQIDASKIADCLRCDFLPECHMMPAAIRDRRRTLRYRHLLVRQMVQMKNRVSGLLMETGVEYNKQRLHKVSYFRELLSENEEVPLSIRPLLKLSRETIERCQRTEYALVSSLRRDPVLADRITRLRTVPGVGPITALTWALEIGDVSRFRTIKHAISYCGLCGDERSSADKAMRMPLSKQRNKHIQRALVEAAKLAPRQSHELAMVYDGERQKGNSNRATLAVARKMVAYLLAVDRQQRDFVPAEERRTAAA

SEQ ID NO: 430538 - protein, 415 aa, unidentified
MRVVFPTCCGVDVHKRFLVATIITSPTDSLQPHYQKKRFSTFNSDLNRFADWLHENACLDVCMESTGKYWVPVFNILEQRGIRVVIANPKWVKAVKGNKDDTKDSKWIGDLFRIGLVKSSFIPGKNIRILREFTRYRYKLTSMRSSEKNRFQNAFTVCNVALDSVVSDMFGKSATAITDYLTSNEPFDAEHCVSLLQRSLKKKADAVLESIEGYSITDEQKLRIGIIREHLDHIVGLIDKVDDCINTLISEYEGQINLLCTIPGIRRDTAITIISEIGIDMSQFGSSKRLCCWAGLTPGNNESAGKKKSVRISRAGVYLKPALVEVAHAAVKDKANPYYALKYERIAKRRGKKRAIIAIARMILTAIYEMFSTGEVWNPVDLYNVDMPEHLKEKQLAKAVKQATRFLEAQGLKVS

SEQ ID NO: 430539 - protein, 397 aa, unidentified
MIAVGIDVSKSKSTVAILDGDGSIRAHPYEMNHSKAELDALINYIKAVDDHPVILMEPTGHYHYPVLRAFLDAGLSPSLVNPYLLKKYGDAELRKTKTDKKDALRIARYALEKWYTLVPYSPMDQKYEDLRFLSSQYRQRISMVTKSKIQLLNLLDESMPGITKILPLKSRNPEKCMLLQFIKRFHSFDYICEIGKTRFMNSYVTLARKVGERNASAKGLSIYELAKASITTRSKSEYMDISLDQCVDILSDSQRAADEIILHMQNIAETIPEYKVLRSMNGVGDRLGPVILAEIGDIRRFHSGKALNAYAGNDAPPYQSGQFESRNRHISKRGNPALRKACFEVMQALKLLKPQDDPVYLFMIKKEQEGKPYNVAKMAGVNKFLRIYYARAMELYK

SEQ ID NO: 430540 - protein, 316 aa, unidentified
MLYVGIDIAKNKHDVTALNVPGKTVLKPLTFSNNKAGFELLDLSIRQLNQDCLIALEDTGHYAFNLLNFLHEQGYKVYTYNPLLIKEFAKSLSLRKTKTDKKDAHGIALKLLSDPNREQFQHDNRQVDLKILARHIHRLKKKQSDWKVQYTRCLDIIFPELDKIVGKHSEYTYQLLTRYPNPQKRIEAGFDKLIEIKRLTASKIQDILSVAPRSIGTTSPAREFEIIEIIKHYKRLIDKAETCVNDLMAEFNSIITTVTGIGNRLGAVILAEIRNIHAFDNLAQLQAFAGLDSSIYQSDQIDLAGRMIKRGSPHLR

SEQ ID NO: 430541 - protein, 410 aa, unidentified
MVERFVGIDVALREHRIAVLDRDGEAVGQSFTIAASTDGVATLLRTLGARGATAAQTLIGLEASGHLWENLEAALVGAGYRVIVLNPLQTRRYRDVVRRKAKTDDIDAHVIAGLLRSGAAQASYVPDEQIQSLRELARLRARLMADRQDYLRQLVAQLDVVLPEHRTVLGDLLTARARGILAQFPTAQHLAHANPRAIRRAAEDAGARGFSLNDATVVRDSARRSLYSGKAAAARAHVVRTLVSQLERLTSAIDEVDRAATALLPPSEPGTGPSDAELLQTIPGIGPQTAATLLGELGAFTRFTDARALVAYVGFYPVINESGDRAATPRLSPVGSRIARHSLYLAAVNAVRRSAEWRTIYLRKKAQGKTAKQALVVVAVKRLHALYAMLKHRQPYNPSRLLVAPATIGS

SEQ ID NO: 430542 - protein, 334 aa, unidentified
MDKPAVAGVEISADVLVVAFDNGQLRSSEFPNSAAGHQQMLRFMRRNTTQVRVCMESTGLYGLDAALALHQQPGIEIMVANPRSVRHFGCAMMQRSKTDPIDARLLAEYARRMPFQPWQPPSLKGRQLCALSRAIHQLTEMNAMQKNRLHAAGVTETTPKIVIRELERSLTQQQRSIQRLAREALQLIASDPQLQKRFDLLLSFPGIAETSALQLLGELVLLSPDCNVRQWVAYAGLDPRHYSSGKSVEKKVRISKVGNRHLRRALFMPALVAVRRNPQFRAYYRHLLAHGKFKMVALVAAMRKLLHGIYGVFQTLQPFDPDKLFTLPAPVEIA

SEQ ID NO: 430543 - protein, 339 aa, unidentified
MCNQVLGPDPIKMMEVGMNCKGLRVIGVDVGKGMLDVAREGVRAGERCSNDVVEIARFVRGLDPQRDIVVFERSGGYERLLEGQLAEANVRWAVVHSKRVKAFRIVKGIKAKTDAIDCRLLRDFGRDQLDSGELRLGRLGDVTMAALAARRRQLNEMLHAERCRQETAAIELVRSSIGCTIATLEAELTATEAAIAAHIHTDPELYLKEEVMCRHIGVAETTARGLLAVLPQLGRASAREIAALAGAAPRVHQSGTTQKRRGLEPGRAVVKVILFYPAQTAMRFDPEIKAFAQRLRNRGKPGKVIMVAVMRKMLVQLNAAVRDVLMSRLALAPAGSPAD

SEQ ID NO: 430544 - protein, 338 aa, unidentified
MKYYGGIDLHSNNSYLGIIDKKEREVFKKKLPNDLSEIERALKPYRKDLEGIAVESTFNWYWLVDGLMEKGYNMHLANPSAIKQYEGLKHSDDARDAFHLAQLLKLGILPEGYIYPKEERPMRDLLRKRLQLVRQKTSHILSFKNLVSRNLGFQMPSNDIKKLCEEDVEDMFKEEHLVLAGQANIATMRFLKEKITEIEKAVLEKAKLKKEYHKLLTVPGIGKILALTIMLETGDIKRFREVGNYVSYCRCVGSTRISNGKSKGEGNRKNGNKYLSWAYVEAANFAIRGYPYVRSYYQKKAAKTNNIVAIKAVSHKLARASYYVIKNQEVFDPKKAFS

SEQ ID NO: 430545 - protein, 536 aa, unidentified
MAVKNNRNQVKHLKSGGSYSSEELRSLRLDDGTTVVHSADGDIRRPVCAAIDVHKEILMAAVCKTDTETLKAAFYVRKFTTMNSDIRSMAIWLKEYGVQDVCMESTGKYWIPVFNILEQNGIKPILTHPKYVKQAKGQKTDFRDAVHMASMFRMDLVVSSYIPPADIRDLRELCRYRLKLTYMRTSEKNRFQNSMTISKVRLDSVFSDPFGKSASAIMDYLIFTEPDEVSDDQSLSLVCRRGNVKASDEDILDSIHGYEFIGVQRDKLQIISLHLSQIEECIDLIDRKLEYYRQKYAGIIRHLTTMVGITPASALYILGEIGTDMSVWRDDASLACWAGLSPANNASAGKKKSTRIGNGGHYLKPLLVQCALAAVKSTKKDPYFRRKYETLKKRRGHKKAIIAIARKMLVAIYHMIRDDADFLPVDHGEIIQNTKKTKGLNLNNVIAFLKDQGADDDTIRLVEVQCSGKASETADACSEASTDKEAKEKQPASECADAFQPIQESVNGSPVLISDSQQGRALNHRQKDPAMASATA

SEQ ID NO: 430546 - protein, 355 aa, unidentified
MNQEKYIGMDVHAATISAAVMNAQGKLLMECVLQTKAATILEFVQGLRGTLAVTFEEGTLAAWLHDLLKPHVSRLVVCDPRKNALMRDGNQNDRADARNLAELLRTNQVHAVYHGKQGIRALRELGRSYSTLTQDSTRVMNRIKSVYRSWAIPCGGTSVYSRRHRAEWLAKLVEPGVRIRAEHLYQQLDSLEPVRQAARRELLRESRKHAAVELLRQIPAIGPIRSALLVAILQTPHRFRTKRQLWAYCGFAAQTYDSGEYRVVRGKLQRNRERITVRGLNRNHNHDLKNLLKGAAISAIERPGPLQDFYAARVEKGMRPSMARLTLARKIAAITLTMWKKGVSFDPKQLQRQAA

SEQ ID NO: 430547 - protein, 469 aa, unidentified
MSKHINKENQTQRKKHSKKKQGDSFGVINPNAAGIDVGSEEHWVAVPKDRDEEPVRSFKCFTADLHAMADWLKKCSIQTVVMESTGVYWIPIFQILESHGFEVKLVNARHVKNVPGRKTDVSDCQWLQRLHTYGLLSGSFRPEDSICVLRSFWRHRDTLIRYASSHVQHMQKALTEMNIQLHKVISDITGLTGMRIIRAILAGERDLVTLAHMRDPRIKSSTEQIAKALEGDYRKEHLFALQQAVELYDVYQQKIQACDQQIEQYLTQLDSKIDLESNPLPASTKSNKTPKGNAPHFDLRTHLYRISGVDFTQIDGLDAVSVHTILSEVGLDPAAFHTEKHFCSWLGLSPNNRITGGKIKSSKTRKVINRATSAFRMSAQSLTYSSSALGGYYRRMCARLGAPEAITATAHKLARIFYHLWKNGGIYQDPGPLYYEQKYKERVINNMIRKAKQLGFQLNIEPLNELQVS

SEQ ID NO: 430548 - protein, 416 aa, unidentified
MDAIVERCAGLDVHLDTVVACVLYGKLDIKPKKEVKTFSTTTKGLLELLDFINQKECTHVAMESTGIYWKPVWNILESGAFDLIVANAKKIKNVPGRKTDVKDAEWIASLLRCGLIEKSFVPPERIRDLRDLTRLRKELLGEVNRNKNRIHKVLQDANIKISSVLSDVFGETGKSILNQIIGNQCITEEFIYSLYEGRGKSKLKSTLMEMYEALNGKIRGHHVILLGMHNSNIVFLEKQINELEKEIDILLQKERDSLELLETIPGISKISASSIIAEIGTSMDVFKTEKHISSWAGLCPKNNESAGKKKRSGIKSGNNWLRSMLCECAWSATKKKDSRFKNKYWSMVPRMGRKKALIAIANMMLRLIYHLLKTKSTYKELEIQYFIDKDKRREDRIIKELKSKGYLVEKDSLQMA

SEQ ID NO: 430549 - protein, 357 aa, unidentified
MKIVGCDLHARQQTIAMVDTQTGEFTEKTLSHEGDAVRAFYAALEGPVVVGIEATGSMQWFLELLEELGIQCRVGHPAEIRAKETRKQKHDRRDARLIWELLIEDRFPEIWMPSSKERDLRTLLRDRHQWVKMRARLQHTLQAIALNHALRQGHALWSAAGQRALEALPLPPYTRQRRDELLALYAQLQKRIQELDKEVEAQARQRPQARRLLTHPGVGPVTALATDVFLGDPSRFATGNQVASYIGMIPCEHTSGKRQRLGKMSKQGNALLRYLWTEAAMSTVRKDPELQRFYRRKLIPKGMGKARIATARKLGIRLWIMMRDQIDYEEFCRRGKLRQTGKAHAGMPDFNSGPAQQ

SEQ ID NO: 430550 - protein, 350 aa, unidentified
MMVTLGCDAHKKTHTIVAADEAGAEVGSVTVPATTEGHLRAVRWAGQFQQRQWAMEDCRSLSRRFEADLLTAGERVVRVPPKMMAGVRRSARTRGKSDPIDALAVARAALREPGLPVARLDGPSREIKLLVDYRESLVRERTAAQNRLRWRLHELEPGYDPPPGGLNRYRILIDVEALLAQHHGLVADLARREVARIRDITGEVNDLERDITARVTQIAPSLLHLTGCAGLTAAKLIGEAADITRFKGRDAYAMWSGTAPIPVWSGNPQRYRLNRGGNRQTNAALHRIAITQIRCHPDAKRFITRRLATGDTKREAIRALKRRLSDIVYRTMLTDTTLTQTHQATQPQAA

SEQ ID NO: 430551 - protein, 355 aa, unidentified
MNQGKYIGMDVHDASISAAVMNAQGKLLMECVLETKAATILEFIQGMRGTLALTFEEGTLAAWLHDLLKPHVSRLVVCDPRKNALMRDGNQNDRVDARNLAELLRTNQVKAVYHGKHGTRALKELGRSYLTLTKDSTRVMNRIKSVYRSWAIPCGGSSVYSRRHRAEWLAKLVEPGVRIRAEHLYEQLDSLEPVRQAARRELLRESRKHAAVKLLRQIPAIGPIRSALLVALLQTPHRFRTKRQLWAYSGFAVQTYDSGEYRMVRGKLQRNRERITVRGLNRNHNHDLKNLLQGAAISAIERPGPLQDFYAALVEKGMRPSMARLTLARKIAAITLTMWKKGVSFDPQQLQRQAA

SEQ ID NO: 430552 - protein, 350 aa, unidentified
MNVNQYIGFDVHKKSVSYCVKIADGIIVEEGKLRATHEALRQWAEKRQEPWRGAMEATLFSGWIYDALKPFAAELQVGHPAMMKAIGASKKKNDKLDARKIADLVRCDLLPACYVAPAEIRELRRLLRYHNLVVRQAVRMKNRMSGLLMEVGAEYNKQQLHGKQYFMELLDTLAEAPDSVKDLLQLSRGAMEMFETTQQQLLVRLKRDQLLSKRVTLLESIRGVGEVTALTWALEVGDPHRFSSVAHAVSYCGLTSALVSSADKQQRGPISKQRNAHLQTVLIEAAKLAPRWNPQLAAVHARELERGNRNRATLAVARKLVAYLLAVDKSGQAFQVRNQPAAAMAEGKVA

SEQ ID NO: 430553 - protein, 371 aa, unidentified
MPDVSSNAPYDVRLWIALDVHKLSIVAAALPPTGGQPEVQQIETTAVAVRRFIERLGGPEGLAVCYEAGPGGFDLLRLLTELGVACDVIAPSLIPVRAGDRIKTDRRDAKKLVRLYRAGQLSYVQPPTPETEGLRDLLRCREDLRRARTNARHRVSKQLLRYGRIYREGRSQWTLRHRTWIARQRLDDPLAQAALSQMLMHLDGLDRQLDGLDRDLEEVALSPRWQAAVAVLVRFRGISTRTALGLIAEIGDFSRFSHPRELCAWLGIVPCEYSSGEQRHRGHITKTGNGHARRLLIEAAWAYRHHPRRPDRGPQPDARAWQAQVRLHRRYHHLVDHGKRSTVATVAVARELAGFLWAASTDQPFAAEAGS

SEQ ID NO: 430554 - protein, 424 aa, unidentified
MNLTQNERLKQVTSDTLIVGVDVGSQTHFCRAFDWRGFELSRRVFKFSNTGMGFLTFLRWTEELMNKTEMKKVIVGCEPTGCYWLTFQKFLQEHGVQLVTVNPFTVNRSMELDDNSPEKSDLKDPKTIALLVKDGRYSTSYLPSGVYAEIREASVCRDQIMKQHVRLSNQIQGWLQKYFPEYFECYADWDSSSGLMLLKEAPLPRDILKLGAGGINQIWRNGKVRAAGIKRAQALLEAAQNSVGLEGGEAARLEIWVLVNDYILKEEQLKRLDGYLEEKVKEVPNVEKLLAIKGVGLSTVIGFVAEVGDIGRFTDPKQIQKLAGLEIVKKSSGKKKGQPRISRRGRRKLRRTMYESARALINWNPAFQDVFLYYRNRGKNPLGGMQAKIAVACKAIRIFYVVLKTGCEFDEERFRRDIIRPEAA

SEQ ID NO: 430555 - protein, 413 aa, unidentified
MEVFCGIDWAEDHHDIALAGRDGQLLARRRISDDAAGLALLVDLLAAHGDTATDPVPVAIETPRGLLTACLRATGRKVYPINPMAVARYRDRHSAAGRKSDHGDAVVLANILRTDLASHRPLPADTELAQAIAVLARAQQDAVWARTQAHNKLRSHLREYYPAFLTAFADARGGIMRPEARILLAAAPTPAAAAKLTPSQLRALLRKAGRSRGIDTQASRLRDAFRAPQMRQLPLVEQAMGRQALALLRQVDAACAAASDLEQAVIQPFNQHPDAGIITSFPGLGPLTGARVLAETGDDRSRFAGAKGLKAYAGAAPVTRASGKSIAILHRRVKNQRLAAAGYVWAFAALTASPGARAHYHRRRQAGDRHTAAQRNLFGRPLGCLHHCLATGQLYDENTAFPATTHQPDIAAA

SEQ ID NO: 430556 - protein, 346 aa, unidentified
MMIIGCDFHPSWQQVSWLDSETGETGEQKLVHAAGEAKRFYEQLSAPVLVGMEATGNSQWFIELVQDLGHEIWIGDAAQIRASYVRKQKTDKRDAAHILKLVVEGRFPRLWTPDREQRDLRQLVLHRHKLVTIRSRVKNELQHLSLNKGMQKKRTLWSQAGQKLLRELPLKPWAACRREDLLGLLAMLDEQIGKLDRAVQQAAEENRAAKLLMTQPGVGPNTALAFVLTIGDASRFPRGKQVASYLGLIPREESSGGRQKLGAITKQGNRLLRSLLVEAAQIAVRYDPEFRKQYLHRCHQKPKGVAKVAAARKLAVRLYWMLRTQVAYPEIVRIESSPRVPLVGAS

SEQ ID NO: 430557 - protein, 416 aa, unidentified
MNAVGIDVSSRKSTVAVLRPLGEVVCLPFDVTHDIAGLASLVEKLKALDGETRVVMEHTGRYYEAVAKALHEAGFFVCAVNPLLIKEYGANSLRRVKTDKADAVKIARYALDNWADLRDFTPMDAIRYDLKTLNRQFQLASKQRTASANNLIALLEQSFPGIRKCFDSPVRSDGTQKWVDFAHSFWHVDCVRKQPFAAFCERYRKWCKRHAYLFKLSNAEEVYALAKRAVVLTPKSKVVKVLVQEAANQLISISRSVEVYRAEMDRLAAMLPEYPVVMAMYGVGKSYGPQLMAEIGDVRRFERKQALVAFAGIDPMPNQSGDKNVRSNKSSKRGSPYLRKTLFNVIRTYLQCAPQDEPVFQFLNRKRAEGKPFYVYMLAAANKFLRRYYAKLRDFFASLDTLQSVDPIPATLKASL

SEQ ID NO: 430558 - protein, 408 aa, unidentified
MSDHGHVVAGVDTHADTHYAAMISATGEHLAAAQFPATDAGYRALTGFITCQGALLRVGVEGTNSYGAGLARHLRVENIEVVEVIRPARQVRRMRGKSDEIDAYAAAHIALAGNDAVTPKTAAGPVEAIRVTHAARRSAVKARTETIQQIKSLLVTAPEPIRAEYRALTAGRLVDRLAASRPRSGDDETAACTRVALKRLAVRHQQLDAEIVGHEADLTRLVSAANPALTQAGGIGVITAAQLLATAGDNPDRIGSEAAFAMLCGAAPIPASSGKTNRHRLNRGGDRAANCALHQIAINRLATDPATRAYAAKRTAEGKTNKDILRCLKRAIAREVFHLITNPPPVEDSTDLRLTRQHLGLSMAHVAAALDCSIAKISRLERGHISNLRFLHQYRDWLTKQKPRLNAA

SEQ ID NO: 430559 - protein, 348 aa, unidentified
MAMLADSADAVIGVDTHTDTHTACLLDSAGRELATVTVEASPDGYAALLDWAVQQAPGPRLTWAVEGCRSHGAGLLRCLLAAGHHVVEAGRPERVGRRPGGKSDPADARLAAREALAATVHAQPRGDGDREALRILLVAREHANSTRTAAINLFKSLVLTAPDQLRESLRRLSTPRQIAACSVLRAHPSHSATERVLRQTLRSLAQRIRLLEKEIRANERQLRGLVSTMVPALLEEPGVGPVSAAHLIVAWSHRGRCRSEAAFAALAGVSPLEASSGRVKRHRLNRFGDRQLNRALHTIVNWRMLHGHETTQHYLTRRRTEQKSDAEIRRCLKRYTARHMFRLMETAE

SEQ ID NO: 430560 - protein, 331 aa, unidentified
MKFTETIGIDVSKLTLDACIHGQQFLIQVPNTKKGHLKLLSWAKKSSGCSIENILFCFEHTGIYSFILARFMTEMKLNYILVPGLEIKRSLGIQRGKNDQIDARKIAQYAYRRRDEITPYQAPDESINKIRQLLSLREKLVKQRSEFMTTLKDQANFIEKLKNKLFFSIPNKLIKELNKQIENIEKEVDILLEESPAIMDNFKLVTSITGIGRQTALLLIVVTNNFLWFNDHRKLASYAGIAPFPYTSGTSIKGRNKVSPLANKKLKSLLSSCAVSAIRNDPEMKIYFNRRTESGKHKMNTINAVRNKLLSRVFAVVRRRTPFVSLCKYAA

SEQ ID NO: 430561 - protein, 357 aa, unidentified
MKNNKKKFIGKAFVGIDVHKNNWKVCVLGDHGYRKEFSCDPIPSVLRSALVKLLPDFEFQCAYEAGFCGFWIHDALNIMEGFNCIVVNAADIPTSDKERAQKEDRRDARKIATHLKAEVLKGIYVLSKEAVALRELQRLHFTVTKDLTKCKNRIKSFLFRHGIEICKEQFKKPSSHWSNKFIQWLQRLELDPLLRITLDEMLENVIRLRNQKKRLLVTIRKEIKSNKELEAQYVKLIGIHGIGLISSITILSEVEDIRRFSTYEKFHSFVGLIPSTNSSADIEKIRGITNRANKRLRSILVEVAWITLRKDADLLHYYMELKQRMSSNKAIIRIAKKVATKVRYELLNGEELEKIAA

SEQ ID NO: 430562 - protein, 341 aa, unidentified
MEYCGIDLHAEYSQICILNEDGEVMETSRVRTSRKALERFFLRDRMRVVMEAGGSSPWVSRLLESLGHEVVVCSPRRVRLIAESKLKNDRVDAEVLARLVRLDPEFLRPIQHRSEEAQLLRANLKVRSAMVEVRTKWINTVRGLLRSFGYKVSGKAPQTFVDRVDKVELPSELRTVIEPLLEQLDLLSGEIARRNEHLEEMVKELPEVEHLREIPGVGPVVATYFVLTIDDPQRFKNSRDVASFFGLRPSMRESASVSHFGRITKEGDPEMRRLLVQAAHACLLTKADSELKTWALALAERKGKGKAAVALARKLAVLMHHLWVTGEVYQAFPNKEADQAA

SEQ ID NO: 430563 - protein, 358 aa, unidentified
MKQVYIGLDLGSSQFEYVALDREGVILARHRFKTGEENLRASFCQLRAEQKGELHVHLEAGELAAWARAVIAPLATRVLIGDPRRSAWIAKDPCKKDQLDAFKLADLLRMSRVHEVYYDDAKPRRIFKQVVQHYEDLTRRQAQLKVKIKARLRVQGLIRKDSRVFAPAQRESLLDQLSDKQLRAVIGQLYDLLDATRAQQLAAFETMREMSRQFPEITLLQKIPGVRLINACRFSAYVQNPHRFGNLRRLWRYARLGVVQQSSDGKPIGPQRLDRAGCGSLKDVSRKAFSAAIRRKDDNVFKRAYKQSLARTHNAMHARLSVQRKILAVMRAVWIKGEPYRDDLGINVPGSIKQAEMV

SEQ ID NO: 430564 - protein, 458 aa, unidentified
MKPEIYVGIDWARTQHTVCLLNIEGKRMGLFKVEATAKGNDVLLREIRKHKAPCVIAIEREDLPVVSFMREEGFTVLIVEPSRTRFLRDEIRKGGSKTDEIDARAIAEYARTKAHLLTERHPDMEPATVWIRKLYSHRRSMVSERSAKTFRLKDLLSRVAPGYYYAFEHIGPSATRFILRALEGKLHLRAEDIEPLARATGFNRPDSITRIKKFLCSEPVSPEMRFHMEEIRYLCEDIITLSERIKKAEKDMARAYEGHPGSELFKGIPGVNLVLGCGIISLLSRGFSSPEHLTAFSGVAPRVSRTGKGPGLVCYRKACNKQARDTLTQLARSSILWCSWAREMYHRLRKRGKRHYHALRIIARVWTRILFAVWRDNRPYNENIYLAARERQRSCLSKSSPSPGPSSSGSLSPCSTVAADPSSPSPPRATVSRHREVPGPDQPLLQVGPYSERKRSGG

SEQ ID NO: 430565 - protein, 399 aa, unidentified
MIENYDSVDVFVGVDVGKGEHHAVALNRAGKVLFDKALPNDEGKMRAVLQKLKQSGTVLVIVDQPATIGALPIAVAQAEGVLVGYLPGLAMRRIADLHPGEAKTDARDAAIIAQAARTLPHALRSIQLADESVAELSMLCGFDDDILGQMTATSNRIRGLLTQIHPALERVVGPHLDHPAMLDLLQHYPSPAAMKTAGTTRMATRLLKLAPRMGRRLAEEITQALGEQTVVVVGTHAAATVLPRLAEQLAALRRQGSDIAVEVEKLVNDHPLSLVLTSMPGVGVRTAARLLTEVTGKHFESAAHLAAYAGLAPVTRRSGSSIRGEHPSRRGNKILKRALFLSAFAALRDPVSRTYYDRKIAQGKRHNQALIALARRRCDVLFAMLRDGTLYETEHQLAA

SEQ ID NO: 430566 - protein, 345 aa, unidentified
MDHFAGLDVSVKETSVCIVDDTGKIVREVKVESEPEALLSVLNNSAYHFKRIGLEAGPLSQWLFSALAEAGLPIICVETRHMKAVLKAQINKTDRNDARGIAQMMRVGLYRPVHVKTLRSQKLRMLLTHRQLLQSKAIAVENDLRGTLRNFGLKVGMVGKVKFEARIKELVENLPDLAVLVDPMLIVRRVLREQIVILHRRLLAIVRDDEVCRRLMTIPGVGPVVSLTYRATVDVPARFRKSKSVGAVFGLTCAKYQSGEVDWSGRISRCGDEMMRAMLYEAAQSMLVHSKKWSWLKAWAMQIARRRGMKKAIVALARRLAVIMHRIWVDGTEFRWTREQATATA

SEQ ID NO: 430567 - protein, 392 aa, unidentified
MDSPPPRHHSATVAFEEANGSEGETMKKHSSKHDSLSSTDVELCTTICVDLAKQVFQVAGEDATGRVIYEDRIKSRQAFHDFLIRLPTTVAVLMECGPGAQAWARLLQTKGNPVRILPAQRVAEHRSGAKNDRNDAHAILRAGRDTSIASVPIKSTTALAIQALHRIRRGNIKRHTALGNQIRGLLLEHGVSMPQGDAAISQQVPRALEDASLPLPDLLRELLDELLTDWLSLGERIAALSGRLEVTAQQDKVAQRLITIRGVGPIIATAIVAKQTEPSRFASGRMYSAFFGIVPDQHSSGNKIRLGRMSKRGDGYIRSLMIQGAHAVLSQLRPDSDQPDDRRLLRWLSRLGRKEAAIRLANRNLRIIWALLQSNQVYQRKPNNNPEAAMSL

SEQ ID NO: 430568 - protein, 348 aa, unidentified
MTVYCGVDFHARKQTISYLTTEDGEVQQTELHHEQDNIRGFYAKLRSQGPVIVGFETSGYAAWFEEMLEELGCEIWIGMPAAIRRQARRRQKNDRRDADLILELMLRGDFPRLHRYTPASREVLQQLRYRHRLVKLRTIVINSLQYLALSRGVSLRTKLLTTRGQQRMKELKLPSHLAKQRDEMCELLQELTAKIETAESWLELKAKQDAQVERLMSHPGIGPLTGLCLVYTLEQVERFANPRKVTAYVGFDPVEDSSGERQRIGSISKQGSRLLRFLLVEAGQVAVRTDPDLKAAYWRVQLRRNHQKAKVAVARRLLVRAFIMLRDEIDYAEFQRRGVAARSTRRTA

SEQ ID NO: 430569 - protein, 388 aa, unidentified
MIQVDDLSRSLIAFEQISTLVIVVELSQSSWLAAGVVPGIERRPLKKLDPDPTALLHLVEGWRDRATKAGRAITRTVLAFESGRDGFWLARWLRVRGVETFVMHSASIAVSREPRRAKTDRLDTEMLIRVFLGWLRGEPRHCKMVAIPTLEEEDARRPSREREILVGERTRIINRMKAALVRLGIRGFKPGLLTAPQKLDALRTPEETPIPPNTLDEMRRDMARLAWVREQINAIEQARLERLERAPATGRHAMVRMLARVIGVGVETADMLVQEVLSRNLRDRRAVARYAGLTGSPDESGSKRREQGLSKAGNARVRRGLIQLAWRFLRFQKDSALAQWYRGRTEDGAGKRKRTMIVALARKLLIALWRLVTIGEIPVGVALRTAVA

SEQ ID NO: 430570 - protein, 450 aa, unidentified
MFSNVDAEHEPPTDATLWGWPGDLSNPVQAMRVRDPKGAVMTGFNLGDYALFIGLDVGKSEHHATALTADADKVYDKTLPNSQQKLQHILTELVDQYGPALLVVDQPCTIGALPVAVAQSLDTVEVAYLPGLTMRRVADLHAGSAKTDARDAYIIAETARTMPTALRAIAASDEQIAELAVLAGFDDDLLAQTTATRNRLRGLLTQIHPGLERVLGAKLHHYGVLDMLTRWPTPQALKSADRGYVRKRIAKHNPRLADKLTNQIFDALEAQTVVVPGTNAATTIVPMLARQLTDLYTQRANVFAQVEELVDDHPLSLVLTSMPGVGVRTAARLLTEVVGKEFKTAGHLASYAGIAPTTRRSGTSIRGEFANRGGNKRLKSALFNSAFAALSHKPSRAYYDKKTSQGKTHKQAIIALARRRLDTLYAMLRDGTFYHNPTTPVSATNLSEAA

SEQ ID NO: 430571 - protein, 316 aa, unidentified
MPKPLVFVGIDVAQATLEVAVRPTGEAWQVANDETAFSDLIERLREIKPVLIVLEATGGIHLPVVAALAAAKLPVVAVNPRQARDFAKATGKLAKTDRIDAQVLAHFAEAVRPEVRPLPDVATQELAVLVARRRQLMEMRVAEQNRSRGTPARIRAQIREHVEWLNRQINELDHEIGQRVRSSPAWRERDDLYRSTPGVGPVLSATLLADLPELGSVSHKQIAALVGLAPFNQDSGKKRGQRVIWGGRASVRAALYMATLVATRRNPVIRTFYQRLLAMHKPKKLALTACMHKLLTILSAMVRHHTSWSAPVSASA

SEQ ID NO: 430572 - protein, 458 aa, unidentified
MRKNKRRGMSLSDRPVEQPNAAGVDIGAREIFVAVPHDPEGEPVRKFATFTEDLGSLGDWLQRCGVTTVAMESTGVFWIPLYEILEQRGLNPCVVNARHMKNVPGRRTDWHECQWIQFLHSVGLLRAAFRPEDQVCAVRALVRHREQLVEMVGQHVQHMHKAMTQMNLQLQHVISDITGTTGLAIVDAILAGQRDAKELAKLRDPRIKVGAEVIEKSLCGNWRDEHLFTLEQSRKFHRFYQEQIAACEVNIERLLQQFDARVDPQQKPLPADSKRNRSAAKRRKKLGRTENQFDLRTEAYKLFGVDVTQIPGLETNVVPLFGEIGRDLGRWPSASHFVSWLSLCPDNDISGGRILWRGVRKANNRAGQIFRLAAQSLHRSPTPMGEYLRRLKAKLGPAGAITATARKIATLFYTLVMRQVEFDSALWQATDVKRQQRIQARLTRQARRLGYQLVPLAA

SEQ ID NO: 430573 - protein, 350 aa, unidentified
MNVNHYIGFDVHKKSINYCVKMADGQIVEEGRLRATHDALRRWAGRRQEPWRGAMEATLFSGWIYDTLKPLAAELQMGHPAMMKAIGASKKKNDKIDSRKIADLVRCNLLPACYVAPAEMRELRRLLRYRNVVVAQGVRMKNKMSGLLMEVGAEYNKQQLHGKKYFTELMGNLEEVPESVKDLLRLSRGALEMFEATQRQLLDRLRKEPRLVERVAVLESIRGVGEVTALTWALEICDPQRFRSIADAESYCGLTSALDCSADKQHRGPISKQRNGHLQTVLIEAAKLAPRWNPQLAQVHERELERGNRNRATLAVARKLVAYLLAVDKSGQPFRIRNQPAPTTEVATAA

SEQ ID NO: 430574 - protein, 388 aa, unidentified
MPQSFDASRSLTALEQDNTIVAVIEMSKAKWLIAALVPGFKRQPLKKIDADAPLLLKLLQRWRDEAGQTGHTIKRIAVAYEAAGDGFWLARWLRARDIEAYAIHPASVAVSREHRRAKTDRLDTELLMRTFLGWLRGEKRHCSMAAIPTLEEEDARRPNRERQTLVGEQTRLVNRIKAILARFGIRSFRLSLRNAADRLIAIRIAEGTPLPDNTRAELHRLLERLDLLRAQIRTIEGDRLRRLAAAPAAPEGPHAMVRLIARVIGVGVETADMLVHEILSRGLRDRRAVARYAGLTGSPDESGKRRREKGLARAGSARVRHGTIQLAWRFLLFQNDSALARWFQARTADGRKATRKTMIVALARKLLIALWRLVTTGEAPQGVSLRAA

SEQ ID NO: 430575 - protein, 336 aa, unidentified
MVQIYGIDLGMSSFDVSFLSESGSVRHLSGVKNTVHGISKFLLSLPSSAVLCAEHTGVYGALLLRLCTLNRTCLCFVPGYQIKHSLGLQRGKSDPLDACRIREYAERFYDLLRPCFYPGEEMSELQELYRTRSLLVESRKRLDTLNIGDNCKSSVSLAADHARRAVLAELNTQISGLDHEIEALIQNSSEFSRNYQILTSIVGVGPVTSCELIIKTENFRKLDTAKKCAAYAGIAPYPKESGKMKCGHKISPMGDKQLKTLLFLCARSAKEHNKEIRLYFLKKHKVEKKHFFVAMNNIANKLLRLIYSLIQKQQTYDRDYIQRDPRCVVISDTHKC

SEQ ID NO: 430576 - protein, 408 aa, unidentified
MDLTPMHRRVIALDVHQAKITACAVIEHDDGRLEITQRDFGAFKRDRRALAQWSLEIAPEVVVMESTGVYWKSPFAALEAVGITAWVVNARHVKAVPGRKTDMADAQWLATLARAGLLRASFIPPLLMRQLRLVARQRQKLVGMCSAEKNRLHKVLVDAGVRINVVVADIHGASARAMVKALIADKPMHEVLDRKGRLRASRDELFESLSTEQLSPVHRFVAEEILQHIEQIEQRIARLDEYLLQGLKAYEPQLRLLQTIPGIDLQGAAMLLVEIGSDMASFGSAERLASWVGICPGNNESAGKRKSGRIRRGNAWVRRLLCEFAQAAARTRCALKAKFESLAIRKGHKKSIVALAHKMLRTIYAMLSTGDHYKDKTVDYEALSVARNAPRWMKMLRKHGFIATPAAT

SEQ ID NO: 430577 - protein, 340 aa, unidentified
MGDIITIGLDLAKNVFQVHGVDEAGSVVVRKRLRRGQVLAFFAGIPPCLIGLEACATAHHWARELIALGHEARLMPPNYVKAYVKRNKHDVADAEAICEAVKRPSMRFVPLKTAEQQSVLMMHRARDLLIRQRTMLVNALRGHLAEFGLIEAQGLHKVARLITIVMDEMDGRVPDIARQVLKVIVSQIEDIRRGIAELETQVLAWHKNNPVSQRLATIPGIGPIIATAIAATVADPNTFRSGREFAAWLGLVPRQNSTGGKARLGGISKRGDSYLRRLLVNSAHTVLLCSKAAKTDPWLISLLRRKPRLVAAVALANKTARVAWAIMSRRETYRHVAAPA

SEQ ID NO: 430578 - protein, 347 aa, unidentified
MKIIGCDFHPSFQQIAMVDTETGEHTGKRLTREAAMAFYRGLTGPVVVGIEACGNTLWLERLLAECGHELRMGDAAKIRAMEVRKQKTDRRDAELLLRLLLEDRFPQIWVPSLEQRDTRQLLLHRHKLVNVRRQIKNQLQHLALNQGIQQKQKLWSKTGRKLLEELPLTGWTARRRADDLELLDELNRSIVELDTAVEQVAAQDPIARLLQTHPGVGPITALAFMLTLGRVDRFAHSKNVVSYLGLNPAEHSSGGRQKLGSISKQGNPLLRSLLVEAGQSAARLVPELKRAYQRLKHRKHSGVAKVMVARKLAVRLYWIWRTQQPYSAPRMQGSPSHLVGRTLHPVA

SEQ ID NO: 430579 - protein, 393 aa, unidentified
MLFVGIDVAKSHHDVAVLDDNGLVVLRHLRILNSRQGFATLHQSLIQLSADTNDDIRIAMEATGHYHLNLLLFLQANAYPTFAYNPFLIKEFARTLTLRKTKTDKADALTIAKKLATDLSSDRFKPDFNMQELKFLTHHRNRLTDSRSKLKTQYIRLLDILFPELAGFIGKTNLHYQYVYDLLTKYPSPAKLSRAHTNALVKLLHNHGNRLDMAQQLKVLAKQSIGLSSPANALELVQTISVIRLYDEQINAIDQEIAQIMNSLDEAAIVTSITGISNRLGSVILAEINHINNFQSPDQLLAFAGLEPSVYQSGQMNATGKIVKRGSTSLRWALCQAAEYASHWSPTLRQYRQKKLDEGRHYYVVMTHVAKKLVRIIYYLLKHHQYYDESKLI

SEQ ID NO: 430580 - protein, 332 aa, unidentified
MYFIGTDVSKSELDLAVMYGKTLLFHRRIANTPAGIQPFLKELAKLPGFTLKTTVFCMEHTGIYNNHLLKVVHEKRGNICLEAASQIKNSLGNIRGKNDKIDAIRIAEYAYTYRDKLRLWQPKRLIIQQLTQLTATRSRLIEVQKTLKTPLEETSTFISRKVAKPNNGICNDSLNAIGKDLDKVDKAIDQIIQSDAELRRLFTLISSVSGIGKVTATMILITTNEFKDISDPKKFACHAGVAPFIRESGIFKGKGRVSHMANKKLKTLLHLSALVSIRYNDDLKQYYQRKTKEENKNKMSAINAVRNKLILRIFACVRQNRLYEKNYVRSVA

SEQ ID NO: 430581 - protein, 313 aa, unidentified
MEKEKVYVGIDVAKANMDVAVHPSGKRWSFTNDDRGISEAVSSLRELPPTLIVMEATGGIEAPLVAALGVAELPVVVVNPRQIRDFAKATGKLAKTDVLDAQVMAHFAATVQPKPRTLPDAQSKEFAAILSRRRQVIEMLTAERNRLSTAREVVRERIEAHIAWLEQELDSIDSDLRSSVRKSPVWREKDDLLRSVPGVGPVLSATLLADLPELGTLNRRQIAALVGVAPLNRDSGTLRGKRTVWGGRAKVRPALYMATLVATRYNAVIRAFYQRLCTAGKEKKVALTACMRKLLTILNAMLKHRTPWNYAVA

SEQ ID NO: 430582 - protein, 359 aa, unidentified
MADEPETVCPLVHKDRPEAWVLARQCMISRTTARARKSPNLQGRELMESIFVGIDVAKESLDLQTYPAAKAQHFDNSLAAIRAIVRYLRRSNIALIVVEATGGYETAAVAEMAAAGLPVVVINPRQARDYARALGLLAKTDAIDAGVLARFGHDVKPPVRPLPTKQERAMNDLIRRRRQLVKQRAAEQCRLQQNTLAAVVKSVKQALRFLERQLEAVTGELDALIQASEIWLEKVQLLQSVKSIGPVTARELIVELPELGQLHRRQIASLVGLAPINRDSGKMRGKRTIWGGRKNARTALYMPTMCAIRHNPVIRNFYLRLLETGKPKMVALTACMRKLLTILNAILREKKPWNLCQNT

SEQ ID NO: 430583 - protein, 407 aa, unidentified
MRPIYERCCGLDVHKKTVVACRLTPEGSQTRGFGTMTGELIQLRDWLLEAGVTHVAMESTGVYWKPVFNLLEDQGMELMVVNARHVKAVPGRKTDVKDAEWLAELLQHGLLKASFIPDRESRERRELVRYRRSLVEQRAHLVQRIQKLLEGANIKLGDVASDVMGVSGRAMLQALAAGVDDPAAVAGMAKTALRHKIPELERALTGSVREHQRFLLRSQFRLLESIETEIAALDEEVAERMRPFQTALDRLDEIPGIGRRAAEQILVETGTEMSRFPTSGHFASWARVCPGNNESAGKRQYASIGGGNRWLRTALLEAAWTVSHSRKPTFFTARYRRLAARRGRKRAAVAIAHSLLIAVYHVLKDGVVFQDLGPTHFERRNQEAIVRRSLHRLEALGYKVTVEAMPA

SEQ ID NO: 430584 - protein, 323 aa, unidentified
MSAQKTKKRVKHFIGIDVSKRLLEVAVHESDYHFSCANQASGFAALIAELIDWRPALIVLEATGGLEIPVTAALNAAGLPVVVINPRQVRDFAKALGQLAKTDRLDAGVLAHFAAAIKPPLRPIKSASEQQLDALLGRRKQLIEMLTAEKNRLGSAANPNIREKIEEHIEWLEQDLAALDEQLQALLKASPTWQLADEILQSVPGIGPVVSVSLLAELPELGKLNRQRISKLVGVAPLNSDSGQHRGTRHIFGGRTHIRSILYMATLSAIRCNPVIKEFYQRLLANHKLPKVAITACMRKLLAIINVMVRNCTRWKEAEAVSP

SEQ ID NO: 430585 - protein, 383 aa, unidentified
MKSVCGLDVHKDSVYLCILSEFGELIEKVFGVLTYQLEEMRDLMLHHHVVEVSMESTSVYWIPIWRVLSPHFKLNLANPYFIKQLPGRKSDVKDAQWIAECTMKELIRGSFVPPETIQQLRQYDRRIFDLNEEIVRKLSKLDAVLQRCNIRLSNYVSNVDSKSYKAVVRAISQGITDPEELVKLIHGRIIKHHGMDVITASLKGVVSLAEIDMISQLRDELDMAEAHKEKCQARMLEICEREFPEDLKRLQTIPGIKERAATSLIAEIGTDMNKFETANHLASWSGLKPRNDESNKKIKSRSITHGNVYLRKTIIECAWAASRTKDCFFSRFSFHQTQVRKKNKMKVLVAVARKMLIAVWHVLHDNTIYIDFTTDRKTSRTKG

SEQ ID NO: 430586 - protein, 342 aa, unidentified
MEEVTIIGVDLAKNVFQLHGAAADGSVVFRKKLSRPQFARFMTDHPACDVAMEACPSAHHWARELTRDGHHVRLIAPHYVKPFLKRQKNDAADAEAIVEAALRPTMRFVEPKSADQQARAVAFRTREQLVKQRTEAVNALRSHLYEFGYIAPVGIGYVPRLAQIVADPEADIPDLARDICRMLLEQIAQLTDRIKALKARIAAMSNEAEMPRRLQTMPGVGPITALAVETFAPPMEQFRRGRDFAAWLGLVPRQHSTGGKQKLGKTSKMGQRDIRRLLVIGATAVIRWASRRGAPAGSWLARMLERKPIPVVAVALANKMARGIWAMLSRDEDYHGPVVIGA

SEQ ID NO: 430587 - protein, 361 aa, unidentified
MKAYHIGVDMHKRDSQIGVIDEKGRKLETRKLSNDPEALRDYLSAFPKGTPVTLEATTGYEWMCDLLTEMEFQVLLANPRKVRLIAESTIKTDTIDAWTLAQLERVNFLPTAYLPPEEIRATRELLRHRLTLVCFRKGVKNRIHAVLTKRGVLSYPVKDLFGKAGREFLSSLDLPPVYRMEVDSYLALIDQINVFIAQRERDIKQQVTQENPDAQLLMTIPGIASFSALLLVSEIGTISRFATVRKLISYAGLTSTLRESSNISHQGHLKKDSNKYIRWILIEAVTTAIKHDPGLYAFYRKILVRKGKLKARVAVAHKLLVAIYFMVKQQKPYHPKSLYGKSSRVSPYSLSGHRSSGRPLE

SEQ ID NO: 430588 - protein, 352 aa, unidentified
MLIIGCDFHPGFQQVAIFDNRTGEIEERGLSHRTEAEEFYRSLGGRQVRVGMEACGHYPWFERLLAELGFELWMGDAAAVRAAVVRRQKTDRRDAEHILKLLVEDRFPRIWVPSLEERDVRQLLVHRHKQVQARTRTKNQLQAMALSHGVQKKWKLWTQAGRVELEQLPLLPYAAERRKRLLEGLDGLEAEIGELDRRVAEEARRRPEAERLMTHPGVGPVTALSVVLTLGPAERFESAKQVGSYFGLIPSEASSGGRQRLGRISKQGSSFLRFLLVEAGQTAARYDAQLKRFYRRLAARKNRGVAKVAVARKLATRLYLMLREGWTYAQLHQAVMLVSPSHSVAGKQKPSV

SEQ ID NO: 430589 - protein, 341 aa, unidentified
MPVDPHTPLDPHTPLDPHTPPAAQVTPPITLGIGVSKQRLDLAYSDGHTPAPLDYDERGLRALLDLLRQRPASLVVVESTGGIERPLLDCLLDAAVPVARVEPGRVRYFAKADARLAKTDAIDARVLALFGQRMAPRLLEKRSKNQDELDALVTCRRQLLLVRTEQANRRRCVTSKPALKAIDAVTAAVEKQVDALDRQIEKLIDSDDDFRDIDRILQSVPGVGIGLSAAILAGFNELGTVHKNQAAALVGVAPFNNDSGPRTGPRHIRGGRVGVRNVFYMAAYAATKYNPVMKAFYQRLTAAGKPFKVAITACMRKLVGYLNVMVKERLTWDQLAINKIS

SEQ ID NO: 430590 - protein, 357 aa, unidentified
MEKRLKQSLGIDVSKLNLSLSLGFLTDKLVKEFNSHPDVPNDMLGYKELLNWLKRSIDPSVELLVVMEATGVYHQGIAHYLYSQGYGVCVMQSGRVKRYAQSLDQRSKTDALDSRMLSMLGLERTIRLWQPPSKELQQLKALSRERSSLLKDRTIENNRQGAIASSVYSNAKALKRHKNRLKLLNAQIEMIEVEMKELISKNEVLERKIGFMMSIPGISFISAATVVGETLGFESITNAKQLASYAGYDVILRESGNFKGKTRISKKGNSHIRAVLHMPSMTCVRCNPTLKQFYNRLKPKKAKPLVALVAVQRKLLILMYTLWKNEEVFDAGFETKKQQKHKALAARDNKLIAQLVS

SEQ ID NO: 430591 - protein, 402 aa, unidentified
MPMLSIGIDVSKGKSTVCGMKPGGEIVYTPFEVQHTREGMSELVSLLRGSGEEVRAVLESTGSYHCPVVAALLENGIFVSVVNSLRMKRFCSQSIRKVKTDRIDAMQIALYGLAYWQELQPTKLPEDTYRELQLLARQYYQMTSMLIKAKVDFNAICDQVLPGMQELMNDHAGRHKLSDFVLRYHHTTHILEMGETRFRKDYCKWAEKKGYRNCERMAAHIFATAQNGIPVLPNAPSTQIVITEAIRVLHTVEASRDAILTQMQALAKTLPEYSLVREMPCIGDTLAPRLIAEIGDVRRFHSKRALIAYAGIDAPPYQSGKFCANNRHISKRGNRYLRKTGYEVMQSYVMHKPANDPIFTFIEKKRSEGKCGKLAMVAGLNKFLRVYYGKVTELYRSLPTIE

SEQ ID NO: 430592 - protein, 355 aa, unidentified
MDHIGIDVHKRESQICILAEGGELIEQRIRTEPERFAAVLGKRSRARILIEASTDSEWVARCLEGLGHEVIVADPNFAPMYATRTRKVKTDRRDARTLADANVLGAYRPAHRLSDAQRHVRGRLGVREALVRTRTRYISLIRALLRQQGYRVPSGSAEGFVHRVGAMALPGQVRSMIAPLLAVMLPVNRQLAYSDEVIEHLAAHDPRVQRLRTVPSIGPVTAAAFVATLDDAQRFRHAHQVEAYLGLVPREFSSGDSQRRGPITKAGPGRARWLLIQAAVSILRRRPPEAEALWTWALRIAARRGKHVAVVALARRLAGILYALLRDGSVYQLRRAVGVPEAAVGALNRHAARAR

SEQ ID NO: 430593 - protein, 349 aa, unidentified
MEVTTIGIDIAKRIFQLHGVNNNGKTVLKKRLMRDQVLIFMSNLPKCLVGIEACGGSNYWARELSKLGHEVKLMAPQFVKPYVKTNKNDEADAEAICEAVARSNMRFVPIKTVEQQDMLSIHRVRARLVKNRTALANEIRGLLLEFGIIIPQGINKIVDKLTEVLDSNQLSGISYQTFSDLKEEYITNDKRVKELENRLKILSSQCSLYKRLQEIPGIGLITGTALIASIGNASCFKNGRQLASWLGLVPRQNSSGGKTKLLGISKRGDVYLRSLLVQGARAILNAKLRYISKKDQIHANCSKFTEWICNLSERCGSNKTVVAIANKLARVIFAVLSSGNAYLEQKVCN

SEQ ID NO: 430594 - protein, 357 aa, unidentified
MRRPKAKSNDKLIAGIDLHGNNLVIGVINQDGTRLMHRKLDCRLEQVEEFLRPFKLRLQSMAVESTFNWYWLVDGLRAQGYPIDLANPAKIEQYSGLKHADDKDDAFHLADLQRLNILPKAHIYDPELRPVRDLLRHRTNLVHQHTALLLSLQSLYARTTGQRLDLGEAKKMEPKQAPQLYEHPANQLIAQVQVEHIGALAKSIHRIEKAVLDCAREIPLYEKLLTLPGIGRILGMTITMEVGDVSRFETAGDFASYCRMVDAKRLSNGKCKADNNRKCGNKYLAWAFVEAANFARRYDESCRRWYDRKAAKAGKIVATKALGCKLAKAAWHVMAQQCNYDEKRMFPELANKPMKTS

SEQ ID NO: 430595 - protein, 343 aa, unidentified
MTNLYGGIDLHANNSVIVLVDEQEPVVFQTRTPNDLSKILFHLRPFHPHIHGLVVESTYNWYWLVDGLMEAGYAVHLANTAAIRQYEGLKHTNDHSDARWLAQLLRLGILPTGYIYPKEDRAIRDLLRKRSQLVRQKTSNLLSIHNLVTRNTGTALTGNRIKTLTPEAIRDVLPTPDLALAVTSTLAVMRCVADQISAIEHMIKARVSLRPAFHQLLTVAGIGQTLALTIMLEAGDMHRFPTVGQWASYCRCVNSTKLSNGKRKGQGNTKNGNKYLGWAFVEAANFAVRYYPEVQRFYQRKKSKTQGVVAIKAVAHKLARACYYVLRDQVPFDIKKAFVPQPA

SEQ ID NO: 430596 - protein, 432 aa, unidentified
MRSTKMAKQNEETIAAYIGLDWADSEHEVTMLVVETGEVESRKLKQESEALKDWVQSLRERFSGRKVAIAIEQRKGALIYALMCYDFLILYPVNPKTLARFREAFNTSGAKSDPGDSGLLLDLIRLHRDKLRPWVPEDADTRLLQMLVEERRALVDEGTRLTNRLKGTLKQYFPQALEWAGELDSRQALDFLTRWPTLESIRKAGAVAVEKFYRRHSMRNQDKIEQRVKAIKEALALTTDRAVLVASKMKALAIVRQLRALGKSIAQMEARIQELFEQHRDHQVFSSFPCAKKVLGPRLLAAFGGDRTRYESALELQSFSGIAPVTRSSGKSKTIHKRMACPKFLRQTFHEYAAQSIKKAGWARVYYRRHRDKGVKHHAAVRALAYKWIRIMFRCWQEQEPYDEAKYIESLKHRSSPLVSGLPPAPGSLVEV

SEQ ID NO: 430597 - protein, 343 aa, unidentified
MNEVTTIGVDLAKNVFQVHGIDASGQVVVRRQLRRSQVLPFFEKQAACVVGLEACATAHHWAREIAKLGHDVRLMPARYVKPYVKRNKNDAADAEAICEAVTRPTMRFVAVKTEEQQSVLMLHRTRQLFVRQRTSLINAIRAHLAEFGIVAGVGRNGVERLLRLIDDGSDERVPPVARECLQALRAQLVLVKRQILEADRRILAWHRSNELSRRLETIPGVGPLIATALVASIPDPHAFGSARDVPAWIGLVPKQNSTGGKERLGSISKAGNRYLRSLLVVGALSVIRRAKQVGYTRRPWLAELMARRPVKVAAIALANKIARIAWALMVSGKHYKEPVPQAV

SEQ ID NO: 430598 - protein, 344 aa, unidentified
MTSMHFIGLDIHKKTISYCVKDVSGTVLSEGTVAATRAQLNEWMKSLPAPWTVAMEATMFTGWIYDYLLPHAAAVKVAHPLMLRAIAAAKKKNDRVDASKICDCLRCDFLPECYMVSSEVRERRRTLRYRKLLVRQNIQLRNKVSQMLMESGVVYNKQKLHKVGYFKELMATNPDINSELKPLLAICRETIVRIGKTEAALVRSLRRDPLLHARIERLLTIPAVGPITALTWVLEVGDVARFHSVKQAVSYCGLCGAERSSAETFKRMPISKQRNKHLQSVLIEAAKLAPRLSPDLALVYETEKQKGHANRASIAVARKLVAYLLAVDRSGREFVVAGERRAAA

SEQ ID NO: 430599 - protein, 429 aa, unidentified
MVFNSAVALSDHVEGFGQAISRVCTINMCAHMGPRIVEWMQRTTIKVSSPLSEGNEEKEERMIEKAHGIDRHKQFSTISVLNRQGEEVQFLGACREFGKYVEGLGPTDAVVLEASTGSFWWADQIEAKGAKCFVVDPRKFRIIKDSWNKTDKQDARNLAKALWVHVVTGEFGIPTVYKPTGVVRDLRKLFAQYCLLNRQIATHKNNAQAIFVENGVELKKELKCRLFAPESGLELLKGMDVSAASRVCLELTLQVLWKVVEAKERLATEILLAGEPLRSQVELLISIKGVTPLIALAFLADVADVRRFRTLRKMNAYLGLVPRASNSGGKSRPGHITRESRKLTRTILTQCVHHVAASSESLDRYYQELREKRGTGRARIAVIRKLCGMMMRMLLSGEQYRWMDRGLYEKKLRQYERVLKRAKEERPAA

SEQ ID NO: 430600 - protein, 431 aa, unidentified
MTEQKSTPPEAALVAIDVAKHRNEVLIDPGQGRRRRMTVLNTRADHDHFVANLHALSRPVIVGIEPTGNYHRVLAHRLISAGFEVRLISSMALARTREALHNGWDKNDPKDAQVILHMLRIGATMAYHDPLVAGINDLQELSKTHEVVSKAKTEIWHRLLTHYLPLYFPEIERFAGNSRSDWFLAFLERFPTPASITALAKDAFIVAAWDVVGRKVSKTRLLGDIYETACSSTALPVPLNAPAITMFRLVLAEARGLIRQRDEIETQADELLRTHPDYLRLRQVPGIGPIHALTILAEAGDLRRFRHHRQFLKFCGFDLATHQSGQFRGQTRLSKFGNARLRRTFWLAAQVAIHQRDNSFRDHFGRHIAKDRDNKDLRRKALSAVAAKMARVAHALVKTGTDYRPFFEGPVPSGRTRSVGAVRARSETSTL

SEQ ID NO: 430601 - protein, 369 aa, unidentified
MDDITYVGLDVHKATVCVAVAESGRGGEVRQAGVFENRPEILSRMVARLGKNGRRLSFCYEAGPCGYGLHRLLTACGHSCVVAAPSLIPMKAGDRIKTDRRDATMLAKLHRAGELTPIWIPDAAHEAMRDLVRARATAARVLSKARQHLQGFLLRHDRIYRGARAWTLAHRRWLTTVRFDHPAQQIVLQDYIHAVQDAEARRDRLTRQIEELLPNWSMAPVAAALQAMRGVALVVAVTVVAEVGDFRRFTNARQLMAYLGLVPSEHSSGSSIRRGGITKAGNSLARRVLIEGAWTYRMPARVSRKIHNRLEPLSAAIRDIAWKAQVRLCARYRRLAATGKPKVVVTTAIAREMVGFIWAIARLAQPVLV

SEQ ID NO: 430602 - protein, 392 aa, unidentified
MYIIGIDIGKNHHEASIVSPEGKQIGHSLRFATTHKGADSLMSFIFNNIGNSSCIFGMEATGHYWYPIYSFLKARGYTIYVINPIQSDSLRKMYIRQTKNDSIDSFLIAEVIRFGQFTTTSMADESILAMRQLCRYRDSVISSRTEIKLRISTIMEQIFPEYEKQFSSLWLSTSMGILEKYLTPENIENAPIDELFEIIKDKSHNRLTKAKAISIKEAAADTFGIKIAQDAFSFQLKQLIDRMNFLDKQIEALDIEIMKYYEQFDCYLHTIPGIGIIGAATILAEIGDISRFKNSSALVAFAGIDPTVRQSGEFNSTHNHMSKRGSPYLRHAIFLAATTCSFHNSPLNAYYKKKRDQGKHHLTATGAVARKLTTVIYAVLRDSKPYEPKKFC

SEQ ID NO: 430603 - protein, 427 aa, unidentified
MPYRIAAIDVHKRMLAVVVSDVESEGEYRFERRKFGATPGELHVLAQWLVQQEVEEVVMESTAQYWRPVWGTLERYWKPARQQREGAHPMSGTLHLCQAKSNHGPRGRKNDFLDAQRLIRRLVAQELVLSFVPDEAQRLLRTVTRRKHQLTRAKIGFRNQLEALLEQGHIKLSSLVSDLLGVSARRMLKALAEGERDPGVLAGMAERGLRATPEQLRDALGASAQLNGVVRRLLKLALEELQVIESHIEKLDREAMGLLKGHEEVVQRLAEVPGFGMDSAVQMIAEVGLEAAHFCTEKKLSSWVGVCPGNQESAGESQSTHSPKGNRQMRRLLNQAAQSAVRVKGSIFEVTFQRLLPRLGYKAAIWAIAHRLCRLLWLILHKGVRYEERGPAVSAKSKRTRATRMIRELKKLGYRVEGGPLPAVTQA

SEQ ID NO: 430604 - protein, 347 aa, unidentified
MRFYNEVHAYYCGIDLHVKTMYVCILDGVGQVRVHRNVPSTPAAFLEVVAPYRTGLVVAVECMFTWYWLADLCAAEGIAFVLGHALAMKAIHGGKAKNDKIDSHKIAILLRGGMLPHAYVYPAAMRSTRDLLRRRLHLVRTRGQLLAHIQHTRAQYNLPAFEKRLAYPGNREGVVEHFPDPSVRKSIEVDVALIDQYDALITDLELTIVREAKRHDADAFHRLRSVPGIGKILALTILYEIHDITRFDRVQQFASYARLVKCRHESAGKVVGGGGAKIGNVHLKWAFSEAAVTFLRQNRQGQQLRARLEKQHGKGKALSILAHKIGRAVYYMLARETVFSMEKFLAA

SEQ ID NO: 430605 - protein, 414 aa, unidentified
MFAVGVDVSNGRSTVAVLDARRKVVVKPYDVPHTADGFAELMTRLNELDGEIRIVMEHTGRYYESFAMSMYRAGFFVSAVNPLAIKGYQEGISVRKVKTDKADALKIAQFAIDKWEILPHYTPMDTIRYDLKTLHRQFQLSSKTKTALNNNLIALLEQSYPGANRYFDSPVRPDGSQKWVDFVDTFWHVDCVAKISRNAFVERYQKWCKRHGYNFSEATAVEIHEDTRQKFPLVPKSDTCKLLIREAVVQLNAVSRTVETYRAEMDRLASQLPEYETVMAMTGVGKSMGPQLMAEIGDLRRFAHQKSLVGFAGTDPIKDDSGDKVSDSKPSSKRGSPYLRKTLFVIMTILLQLQPPDDPVFQFLDKKRSEGKKYYVYMTAGMTKFLRIYYGKVRDCLKEKGLWEQPTVDEVNPV

SEQ ID NO: 430606 - protein, 572 aa, unidentified
MKKNAFIYSFHNLCNTTSIFVNFYKSWGYEKHHWACCYIISTKEIALSIPNFRLLFISYFFVYSIVIAGTKCNLPLLFKQHKMLVYSVIPLPVKLHIRKLPSTISGTVYDKQGCRCLSRQPVKVYHLSVFPQTQKQLSRLSIMCLKGGYHLCPCKTLKSQGGNFMNNFISMNNSQNKLVVGIDPHEDILGIVYLNCAYTIIKGFSIPNCSKSHFDSLIKDASSIANSISASLVFVIESTNVFWRPLFSYLVSKNLPVYTVNSYQTNSSRKTKMRKTKTDLIDAKNIAELYLQGKAHQTKFPPEVLFDLRELTRFYFWLSDLKGRFLNRIYAYIFQVFPESLSVFPKRYFSKTLALLLKKKLFHPSTISNMNPDKLLDMVRRISRDKYTNKVKQLVPIASQSTGIQEGKYAFTNILKILTNLYQLFELTLNNIELYNIQPLLMSIPNKLNTIKGLSPVAQAGFLSELGHHSWFNNADEVLAFFGLDPAIGQSGRRKGQGKHISKAGTKFGRETMFLASTPVMFHNPVFKQKYHRLRNQGRKYIDAKVILAADLVKICYAMCRDNKEFIPNKVM

SEQ ID NO: 430607 - protein, 362 aa, unidentified
MNVAGIDAHATYLVVAIVSKAGDLLHAPMRITNKNASKLLALLERFRPIEAVVETSPAWPWLYDMLTGHGFGFVLAHAKRLRIIAESNYKRDEIDAELLARMRLAGLIPYVHPKDIETREQATLIRHRERLTRLRTGAASRIHAELHSVGLYLGRGRLLTRAGRRWVREHAWPVFGPEQQRLVRTHWVLIRTLSSMIQRLDRRIERVGAELPAVALLRTIPGIGPYRGLLIATEVLPIERFSTPAKLVGYAGLAPRSARSGLRPTRTGHIPAGANRRLRNAFVQGVVSHLKHAPDSWLSRYYEAHKKRLGWQTARVATARKLARATHAMLRTGEVWRDESDTPSGERSELQGTHVAPTTSVS

SEQ ID NO: 430608 - protein, 328 aa, unidentified
MVEPIVKRCAGLDVHRRTVMATLLIEETDGSLREETREFGTFRKYRRQLATWLQENRIELTVMESTGIYFKSIYAELETAGLKVYVVNARHVKQVPGRKTDVKDSQWLASLARVGLLKPSFIPPRDLRELRLIGRYLLKQKGILAGEKNRLHKILDDSGIRLGSVVSDIQGVSARRIVSGLIEGKPIKELVGYAKGRLKEKTAELKDSLEGELSERHRLLLQTIHAHIRYLEEEITKLEQTLLDAMKPYQDQWQLLQTIPGIDQISAAALIIEMGVDMQQFASADKLASWAGMCPGNNESAGKKKAERAARVTPHSESSCVRWLMQPG

SEQ ID NO: 430609 - protein, 343 aa, unidentified
MDYFAGLDVSVKDTSVCIVDGTGKIVREVKVASEPEALLAVLTNPAYHFKRIGLEAGPLSQWLYSALAEAGLPVICVETRHMRAVLKAQINKTDRNDARGMAQMMRVGLYRPVHVKTLRSQKLRMLLTHRKLLQSKAIAIDNDLRGTLRNFGVKVGIVGSARFEARVKELIENLPDLAVLVEPLLVVRRVLREQLGILHRRLLAVVRDDDVCRRLMTVPGVGPVVALTYRATVDVPARFRKSKSVGAVFGLTCAKYQSGESERTGAISRCGDEMMRTMLYEAAQSMLFHSTKWSWLKAWAMKIARHRGMKKAIVALARRLAVIMHRIWVDGTEFRWTREVAAA

SEQ ID NO: 430610 - protein, 397 aa, unidentified
MYIVGIDIAKRKHEAAVIDGEGAVIIKPFSFTNNCSGYNRLLAMLTKAKLPLDEVSFAMEATGHYWLALFTRLQKEGFRVQVINPVQTNSIRSFYIRQAKTDPRDALLIAEVIRFGHFSESTLHPENIYELRELCRGRHAIVSMQADVKRKVVALLDQVFSEYETAFTNLFGDTSMAILQTCPTPKELSEMRLEELCHLIEVSSHKRFRMAKAQELQELARNSFGFAMAGDVFSTMIRLYAKHLDFLKQQVREMDRKIAEIMDTLDTPITTITGIGPTLGAYILSEIGDISRFPSAAKLAAYAGIDPTMRQSGEYNGVRNRMSKRGSPYLRHAIWLATSSAVLHDPALKLYFQKKRDEGKPYMASVGHACRKMVSIIYAVMRDNKAYTPYIPNEISA

SEQ ID NO: 430611 - protein, 343 aa, unidentified
MAEITTVGLDLAKNWFQVHAADAQGRLVMRKKLARSKVLEFFANLPPCLVGMEAGGGAHYRARELIKLGHEVRLMPPQYVKPYVKTNKHDAADAEAICEAVTRPSMRFVPVKTVEQQTMAQLHRIRQLLVKQRTMHVNALRGHLAELGIVRGQGRGKAGELVRLIEAAADDGIPAKVRQQLRHPVELLRDLERRLAELDRELGELAREDPVARRLATIPGVGPITATALAMTIGDIGRFRSGRHLAAYLGLVPKQHASGGKERLGRISKRGDTYLRSLLTHGARAVVRVVRARPDPSPGWIGRLLQRRPVNVAVVAQANRTARIVWALLTKGEDYRRPTAAGI

SEQ ID NO: 430612 - protein, 386 aa, unidentified
MTHSTNIQPRSVDYDQTLVLAIELSNKSWVLAAQVPGLSQTKAKRTIDPNKNDLLAAIDGYRTRAAAAGRSVKRVIASYEAGWCGFWLARWLMAHGIEVHVVQPSSVPVDRRMRRSKSDGIDAELLLRTLLAWLRGEPRVCSMVPIPDESDEDARRSVRERSELISERVGLVNRISAILATLGADDYNPLLQSRRRRLTQLRTGLGEPIPPNALAKIVRLLTRLELVLAQIVELELERDAVARTAAPDKAGKMIQQLVSLRGIGVQSATVLVREAFVRRFANGKALGSYAGLTSTPYSSGGIDREQGIGKAGNRRLRTVMVELAWLWQRYQPNTAQVLWFRERVGSTGRRVRKVMVVALARKLLIALWRFVIDGVMPEGAVTKPSI

SEQ ID NO: 430613 - protein, 429 aa, unidentified
MRNESTPGARGPVFCGVDTHADSHWLCVLDWRGRRVLSRQFPADAAGYEALAGAIAAAGEPACVAMEGTSSYGAGLTRHLASLGMPVREALSPARTQRRRPGQGKCDEADAERAARAAMSGSRLGTPKSQDGWVDGVRCMLAARSGAVKARTSAINTARSLLTTAPEGLRSRFRGMGGPRLMEELPSVRAEGALGAALGALADLWAAARDAALDMERAIEASLEENCPALLAMYGCGPVSAAKLAVAAGDNPGRLRSEASFAAICGACPIPASSGKTVRHRLNRGGDRQANSALHEIARQRVMRDPETAEYAERARGRGKSDREVMRCLKRYVAREAYRALMRPHEIRRPEDASGLVAARRAAKVSQVRAASILGTSEKYISMLERGQRELKPIRRAYEAWVEAGLPLDWDRQAFEAERKMDSKKHLAK

SEQ ID NO: 430614 - protein, 360 aa, unidentified
MEKYIMAGCDLHGESMMVKVAVNRGPSEKKEYGGGARDRRKLLGYLKKRAKEEGCEEIHLAYEASGLGFLLYDEAMAEGIKCYVLAPTKIEKSVKQKKSKTDERDAEQLLGIVRGHVLAGSAIPEIWVPDEGTRDARELLRRRLGVGEEAARVKVQVKSLLKRNGMRAPKKTGEGWTAGMRKWLKDKSQKSSRLGQGSRLSLESMLRQLEMLEEEIEKLNVAVMKLSMNKRYESVCKELMMLDGVGVLVAMVFLTEMGDMGRFQNRRQVGNYLGLVPGSFESGEQDDRKGHITHHGPGRIRKVLCQAAWVLIRGQGKEKEVYDRLVEKNPKHKKIAVVALMRRLGIRMWHVGLEAQKKAA

SEQ ID NO: 430615 - protein, 421 aa, unidentified
MTQLSGKTYTAYIGIDWASTKHDICMQLAGSEERTFECIKHTPEAIEEWAQALHQRLGGPIAVALELSEGPIVSALQKYDFLVLFPIDPKRLAKYRQAFVPSGAKDDPTDAEFAMDYLMRHPEKLEVLKPESAAMRKLRYLVEARDRIKGDQSRCVNRLIQALKQYYPQAVDWFNDHNTLVFCDFLKQWPTLTTVQRARRARLERFFKEHNVRFARVIEDRIQSIKAATPLTHDEAIIEAHRLQVELLVEQLRLTIKAMKCFDEKIAAIASQFPDYGYLFTPLPGAGKVIAPRLLAAFGEDRDRYSCATQLQKRSGIAPITKRSGNSTWVHWRFQCPKFLRQTFIDFAAQTINKSAWAGAYYRQQRAKGSSHNMAVRALAYKWIRVLYRCWQENTPYDESKYLETLRRRGSPLLKQLAEAA

SEQ ID NO: 430616 - protein, 321 aa, unidentified
MKTIVAGIDVSKNFLDCKCSGSQQTTRYANNPKDLLKLLKHLKKSNVELVVVEATGGYEQALVQLLWGANLKVAVINLRWIRDFAKSFGKRAKTDQIDANVLMLYGEQQNPMPTPPVSDIICQLRVILTRRAQLNQMLVMEKNHALAPGVSNDIKRDIRTAIKALVKQIKQLDQKIMALINSSSEIKAKADKLSQKTGVGPVLMTTLIADMPELGTVKRNVAAALVGVAPFNHDSGKHKGKRAIAGGRVRVRNVLYMATLSAIRHDEHLKKFYVRLLSKGKPKKVAIVACMRKFLIFLNGVIRQEPEQNFLAEDKILTSPL

SEQ ID NO: 430617 - protein, 345 aa, unidentified
MPIVGGLDIHRKQITFDYLDTVTGEVRRGQIAPADREHLGAWLARFAGRGEVAFAVEGCAGWRYVSEELAAAGIAAHLAEPADTATARGRKRRAKTDKTDARHLRTLLAEGRLPECWIPPEHILEYRALLETYHDLRREHTAWVQRIHAVFFHQGAPRLAEDALRTEQGLAGLRAAAAAHLSPTGQLQVATALDMITAVEARMGPLRHQLRDAARHLTGAKVLAARLYGVGPVTALALTCWLAGKDRFSSSRKAVRFTGLDITVHSSDRKGPPGRLSRQGPPVLRWAVYEAGKTHARASAPDHAYYAAVKDRKNSKRAALSEARKIVRQACHILTELGDDALTAA

SEQ ID NO: 430618 - protein, 329 aa, unidentified
MEQYIGVDLHKQFFQACSITSTGARVWEMRFPRTDGGLALFCARCGPQTAVAVEACGPTWAFVDAIAPTGTTVCVVDPRKTRLKAGFAAKTDRLDARRLADALRRDSVVSVYVPPPAIRELREVCRGRHQVIRLRTRLAQMIRALLLRSGGPDVPVRRVFSPAGLAWLEAVQLPPEAAASLARLRHVLTAIQAEAAAAEAVVAARAQADPIARALDAMVGIGPVLALTLRAEVGDGWRFPRGAALASYAGLVPRVDASADRYWSGRITREGSPWLRWALVEVAMHAMRRQDPVGRWARQLAIRKGAYKARVALARRLCDDVVQVWRQAV

SEQ ID NO: 430619 - protein, 428 aa, unidentified
MNTTNTTNFAATIGLDWADRKHDLWICPAGQSKAEHLRLDQKPEALHEWVAKLRARFSNQPVAIAIETSRGPVISALMAYDFIVLFPVNPKGLKDYRAAFCVSGAKDDRTDSMLLEELVRLHRDKLNALEPDTELTRKLAGLVENRRRLVDERTRLVNQLHSTLKTYFPLALDLLENQMNTPLAAEFLARWPSLAALQKEKPKTLRAFFYKQNSRNAERIEERIQAVPAAKPLTTDGAIIEPACALVSARAGMLRPLHQAIQGLDQAIAKAMDEHPDAAIFRSFPGAGPALAPRLLVAFGTNRERFKSAAEVAQFYGIAPVVQQSGNSKTVRMRYRCPKFGRQSFHENAGCALKKEPWARCYYEAHKEKHDDKHHPACRALAYKLTRIYFACWRDKKTYQPDLYLQALEKNGSPLHKALNAQTTAPSE

SEQ ID NO: 430620 - protein, 440 aa, unidentified
MKTKLPIINPNAAGIDIGSEKIFICANDYGYQSFDTFTEDIKLAAKYIKNNGVDSVAMEATGVYWIPIKDILEADGIEVVLVRAGDANQLPGRNKTDGEDCQWIRTLHQHGLLRPCFIPEETIRELRTIVRLRQDHIQMAAAHVQHMQKAFTLMNLRLPQVISQIQGVSGRRIIEALLEGERDAEKLAMLCDRQIICNKKEEVLKSLDGNYREEYLFMLKQAYQAWNFYNELISECDKNIEAWLSRNTNDKPEVDHITPTKPIRHHKPEIENFHVKMVQLTDGKDASQLPGLTDYSVMRLVAEVGIDLKEWKNEKSFVSWLGLAPKRYSSGKMRRRYKGKQNTAAGQIFKEAAQSILNSKHIGLGSFARRLKSRKGPQIAIKATARKLAVLYYHAATKGMDYVEKGINDYNAQVKQTELHRLRKQASKLGFSLTEVLVHQ

SEQ ID NO: 430621 - protein, 343 aa, unidentified
MIMEYFGLDVHKRYTVFTRLDERGTLLGQGRVTNDAESLASLLAQSVEPAKVVLEAGGIWPVFTDALEDHAAEVVLAHPLKTRAIASARIKTDRIDSATLAHLLRTDLVPRAYLAPRSLREVREVLRYRVQLVRLRTAVKNRVHALLAMRGLMSPASDLFGHAGRRWLASLALPPVPRRAVDGFLSILDALNVQIRLIEREIRQRVRQSPEARRLWSIPGVGRFGALLILAEIGDVHRFPDARHLISYAGLAPSVHSSGGRTYHGRITKQGSPLLRWILVEAAVAASRQEGDLRERFRRVAQRKGPKTARVALARHLLTIVYHVLADGTPYHAHTSAVAPLAA

SEQ ID NO: 430622 - protein, 330 aa, unidentified
MDKLEMCGIEVSARELVVALGEQRGGTRLRRFANSPVGHGALLRVLKRVGKVRVVLEATGLYGMDVALALSAEQGIELMVANPRAVRHFAQAMMQRSKNDQLDAVVLREFAARMPFRAWVRPPENQLELWAIARRLEALTAQRAAEKNRQHAAGLSHAVPIVVRREIANSLRFLQRSIARLQKEAQRRIAADAQLQRCYELLCTIPGVGRVSALHTLGELVLLPKDRDVRQWVAYAGLDPRECSSGTSLRKRVRISKVGNRHLRRALYMPALVASRRQPQVRAFYERLQRRGKNKSQALTAVARKLLHAIYGMFRTLRPFDGTLLFAPAS

SEQ ID NO: 430623 - protein, 411 aa, unidentified
MDKVYDKCCGIDVHKKLIVACFRKGSKQELRNFGATTRELLELANWLQNGGCEMVAMESTASYWKPLYNILESSELKAMVVNASHMKAVPGRKTDTKDAEWIAELLQHGLLKASYIPDKQQRELRELVRYRKSLVSERTRELNRLQKMLEGANIKLSGTVSDINCMSARNILEYLLTGEFFDEAKYDEMYKQKIIAHNLKASKEQIIDDLNGVMTPLQRRMMKELLSHLDELNVHINNLEDEIDNFMKPEEKQATQAIQDVTGIGKNSSQAIISVIGTDMSRFPTAGHLAAWAGLCPGNNESAQKRKTGKMRKGNALLRSTLVVCAHSATRNKNSYFYAQFMRISSHRGKKRAYVAVAHSMLIAIYHILKDGVVFKDLGADYYNQFNMERKINAYLKKLKALGWEVPVVAA

SEQ ID NO: 430624 - protein, 346 aa, unidentified
MSEIIRIGVDTSKYIFQLHGVDAAEQPVLRKRLGRKQMLEFFAKLPPTQIGMEACGAAHYWARELSKLGHEVKLMAPQHVKPYVKRNKNDGRDAEGLCEAMSRPTMRFVPVKSAEQQAALMLVGLREQMVKRRTQLSNMIRGYAAEFGVTAAKGLDKIEALLAEIAQDERVPTPARDLFALQGSEYVQLQAQLKVIEARLRAWHRTNADSRRLAEIPGIGSVGAPELIMKTPDPGAFTSARHFAAWIGLTPKDHSTAGKTRLGKITRAGDERLRSVLVAGATAVIKQAMHGRGHPSPWLVALLKRKPPKLAAVALANKNARIAWKLMVTGERYEGARMQAASAAAA

SEQ ID NO: 430625 - protein, 478 aa, unidentified
MNNELFVGCDVSKGYADFQAVCRDGTPFEAAFRLEDTRQGYGQLKTIINRWVTQGTGYLHIGVESTGGYENNWVRLILGWAEELPVRIARLNPSGVTSLRKAGLIRTVTDAVSAEAIARYVLVFPEKITWLTSRQVPGNEFAAARKFQRGTATLDKQRQQLASQLEKLMYEYFSPLLVYTRHGIPRWLITLLSKYPSPASFRRAGKKRLTVIKGITMEKAATVLDKLSAGDAEPGLLDRENIRQTARQILHLYGLIEQRHELLQSEYSDDPQVDLLRSVPGIGLQTAVLLRIEIEDISRFATAKKLATYFGVCPKFVESGDKKGQIRMSKQGRPDVRKALYMSGLSVIRHDESFKALYHRYRNKGHNHYQAIGVVMHKLLRVVYGILAHRTPYDPEVDKANQRRAKQKKRAKEDDQNRIISQQKKRLNRYQKETVDAPRSRRSVQKLREEQAASQSSTVEECAGSPNAPQTKTYENIT

SEQ ID NO: 430626 - protein, 351 aa, unidentified
MIVVGIDSHKKTHTLVAVDQVGRHLTQLTVDATAKGHRQVCAWLAQFEQVLLAIEDCRHLTRRFEADLLLAGYAVVRVHTRLMAGARRSARERGKSDPIDAEAVARVALREPDLPKAELDGPAREVKLRSDHRRTLVRQRTAIANKLRWFLHEIDPELVVPSRGLKRLCVLDSLEAGLSTRHGVVAEIALDLVQDCRRLTLRINAMETRLRHLVRELAPNLLAVPGCGVLSAAMILGETAGASRFKSKDAFARFNGTAPIPVWSSNTVRVRLNRGGNRTINNALHMAAVTQVRRDGPGAAYYAKQLAAGKTVKEALRLLRRRISDRVFRALLADEAARDNQQIIQELPQAA

SEQ ID NO: 430627 - protein, 394 aa, unidentified
MKKVCGLDVHKDTIFLCILAENGQSFIKEFGANTPDIIEMRDLLHSNQVHEVAMESTGVYWIPIWRIFQGHFDLKLVNPYFIKQLPGRKTDVKDSEWIATCLQKRLIKGSYIPGKNIQELRQYERRYVHLVGQVTRIEQAIDRQLHRCNIRITNFTSRIGSVSVMNVVRALIHDETTPEALIKQVHGRITNKHKEKIKAALTGYISDSDRMIFRQNYEELELITRQQQECVKEMERICDTLYQKELELLCTVPGIQKLSAMTIIAEVGVDLKSFATAASLVGWAGLRPRNDESNKKVKSRKITKGDKYVRRILVQCAWAMTRSKKSWLSKKFNELTKRLSKKKALIAIARKLLVIIWNILSKHESYRDYKPTISRDQKKKRIAWLEKQILELQA

SEQ ID NO: 430628 - protein, 351 aa, unidentified
MKYYTSTTEFNCGIDLHGRQMYACVMDRQGNKLVHRNIKGNDFHYFLKLVAPYQHDLTVVCECTFNWYWLADACFDAGIEFVLAHALYLKHIHGGKNKNDRIDSEKLAHLLRANLIPPAYVYPSQQRPVRALLRQRMSYVWARATLKTHLSMNQTAEGLVPAKKSGCNWDVWEERILEQYCNPLHKLAASCDMDMIRAYDSQIETLEREILRQAKEGHSRDLQVLLSSPGIGRILAMTVLYEIDTITRFPTVKDFTSYCRLVKGSVASAGKVKGLTGGKMGNAYLRWAFGQAAVLGKGSHDLLAPYAEKLIAKRGKFKGNAILANKIARAVYFMLHNGTVFDAERVIATSI

SEQ ID NO: 430629 - protein, 421 aa, unidentified
MDTGNIEYAAWIGLDWGSQKHAICLKPADSGGVEHYSLEQKPQALHCWFMNLIARFGGRQLAIAIEQTRGAVINFLLGLDSVHIFTIHPKSLKNYRDAMHPSGAKDDPSDAELLLQFLTLHQHRFKPWIPDKPDVRLLLRLVEFRRKTVGKRVRLTNELTQLLKEYFPAALDCCGSLDTAMACDFLLKWPTLEKLQKSESETIRKFYQAHGSRSPKVIEDRLKQIQSALPLTTDTPVIEPSVFLVQSIAPQLRSVIDAIAQFDRRIKEVFEKQPDAQIFSSFPGAGAALAPRLLATMGSDRSRFGSSQEVAEYSGIAPVTERSGKSKWVHRRFACACFVKQSFHEFAAQSIMFCDWARCYYDQKRREGKSHHSAIRALAYRWIRIIYRCWREHIPYNEDKYVRALHKRRPAWLQSAPPGES

SEQ ID NO: 430630 - protein, 307 aa, unidentified
MQAVTTIGFDIAKSVFQVHGIDADGQGVIRQRLRRSRVLGFFRKLSPCVVGVEACASSHHWSRQLQALGHTVRLMPPAYVKPYVKRQKNDAADAEAICEAVQRPSMRFVPTKTPDQQACLMLHRTRHLFIRQQTALINAIRAHLAEFGIVAPVGRNGVEKLLDVVADPDDGRVPEIARECLEALGRQLWQLKRQILTFDQHINAWHRSNETSRRLDELPGVGPALATALVASIPDPRAFRSGRDFSAWIGLVPKQNSSGGRERLGNITKQGDRYLRSLFCARACLQLSKMKAEAKWTPARKFLASLS

SEQ ID NO: 430631 - protein, 350 aa, unidentified
MLIIGCDYHPGFQQIAYVDTETGEFQERRLQHPEEAEKFYRALWEQSVKVRVGMEASGHARWFERLLEELSFELWTGDAAKIRAKRVRKKKTDREDARHILELLVENRFPKIWVPTWQNRDLRQLLWHRHRMVQTRTRIMNQLQAVAINEGVRYKKRLWREAGRQQLESLSLAPWASRRREDLLEVLDRINPTIAELTQAIENEAEKCCEARRLMTHPGVGALTAVAFVLILGEAHRFGCGKQIAAYLGLVPEEDSSGERRRLGHISKQGNSLLRFLLVEAAQATARCDQRWRNQFFHLAQRRGRKIAKVAMARRLAVRLYWMWRREWNYEQLQSFGSHVGQPGNPHGVQ

SEQ ID NO: 430632 - protein, 429 aa, unidentified
MIMGFTKPIEHFNLQRKKVITMNTLYVGIDVSSKSNVVYLMLPNGDKHSNFSVANSHEGSTLLVKKIYSALTSHSLDTVLIGLEATSVYGDNLVYFLREDATLAPFNRKIHVLNPKQVKKFHDTYNDLPKNDYVDSFVIADCLRFGRINKEVYMGEYRYKALQNLTRARFFAVQNLVKEKQRFMNVLFKKYSTMTQEKVFSDTFSTTALAVYDEFESAEALANMDLHELTDFIIEKGKNRFPDPDAVAKAIQKAARSSYRLPKTVNDSVNQVLSISITSMKALESQIKEFDKAIKALMELLPNVLISIPGIGPVYSAGIMAEIGDINRFDNQASLAKYAGLAWKQHQSGGFEAEVTRLIPSGNRFLKYYLCEAAFSLVRCDKEYSDFYHLKYKEVNRCQHKRALALTARKFVRLVFRLLKDNRLYCPAK

SEQ ID NO: 430633 - protein, 317 aa, unidentified
MSITRHIAVGIDVSKRTLDVCLMPDGKTFAVANDQEGIDSLTERLEQMRPELVVLEATGRYERPAAAAIAASGIPVAVVNPRQARDFAKATGRLAKTDRIDAWVLARFAGAVGPKPSVLPDEEAQLLQAILTRRRQLSGMLIAENNRLQMAPEAVARRIRAHMKWLEKELSRTDRDLDEAIEASPGFKENEALLRSVPGVGPVLARTLLAEVPELGTLTHKRLSALVGVAPFNNDSGQRRGKREVWGGRAPVRAALYMGALVATRHNPVLKEFYERLLAAGKPKKVALVACMRKLLSLLNALMRNRTLWRSTHALTP

SEQ ID NO: 430634 - protein, 421 aa, unidentified
MKKRTYRRTPVNEFELSRLQPETFGPRVVFAIDIAKVDMVAAIADGRGQVFDTVGWKAPSQNATVIDLLRRLRDRGFTVEAVMEASGTYGDVLRQMLEDNGFPVFRVNGKKTYDARELYDGVPSMHDAKAAAILARLHTEGLSAQIQAEPDDKRSLRAAIAIADLHQRRYLELVHKLESWLARYWPELPELLALTSASLMALLARIGGPADVAAAPDDARRLLNGISHRLLEDETVEAVVASAATSLGVRPLPLEREALMAIAAEAHRSLRAFKEAKLAVEQLSADTPARTLAPVVGSTTAAVIFTEVGDPNAFRSVAGFVKAMGLNLREKSSGKTKGQLKLTKRGPARVRHYLWLAVHRWVQRDPIARAWYQSKKARDGGRASRAVVAMMRKLAKALFHVGRGAEFDSTKLFDIKRLGFA

SEQ ID NO: 430635 - protein, 343 aa, unidentified
MDHFAGLDVSVKETSVCIVDDTGRITREVKVASEPEALLQVLRNPAYRFKRIGLEAGPLSQWLFSALAEAGLPVICVETRHMQAVLKAQINKTDRNDARGIAQMMRVGLYRPVHVKTLRSQKLRMLLTHRKLLQSKAIAIENDLRGTLRNFGLKVGMVGKVKFEARIKELVENLPDLAELVEPLLIVRRALSEQTVILHRRLLAIVRADEVCRRLMTTPGVGPVVALTYRATVDVPARFRNSKAVGAVFGLTPSKYQSGEIDRSGRISRCGDEMMRMMLYEAAQVMLLRSAKWSWLKAWAMKIARHRGMKKAIVALARRLAVIMHRIWVDGTEFRWTREFAAA

SEQ ID NO: 430636 - protein, 316 aa, unidentified
MGGYIGIDVAQEELVVAREGVAGSKAYPNSERGQRDLVKDLKDAELIVLEATGGYQRGVVAALGGAGLPVVVVNPRQVRDFAKATGQLAKTDLLDAHVLAAFGATVKPELRVLPSEDEEELRDFLTRQQQVIQMLVAEKSRLLQAQGRGRQALRRQIKSHISYLERELKALDSDLDQMIRKSPLWREQDDLLQSVPGIGKQTSRILLGILPELGRANSAEIARLAGLAPINRDSGKMRGKRFIGGGRTRVRAVLYMATLSATRYNPTVRSWYTRLLSTGKPKKVAIVACMRKLLVVLNALVRTKTRWRSAELATTA

SEQ ID NO: 430637 - protein, 360 aa, unidentified
MTGTMTWAAMDVHARSTYTASLDVVTGELSRQRFDTGAVEPVVGWLVGLPGPVRACYEAGPTGFGLYRAAVAAGIDCQVIAPSKTPRPSGDRNKSDRRDTDLLLRQLMAGGLTPVTVPSATFEAARDLARAREQVRLDLMRCRHRLSKLLLRHGCVWDRTAWTQTHRQWLSAQTFEHQNTELAFIDNLAACDGLTARRQALDERLSWVALDPEFWPLVRRLRAFRGLDTLSALIVVLEVADFTRFPRAVQLGSWLGLVPSRQQSGESDVHGSITKTGSKYARRILVEAAWHYARPPRIGRTLAERQEGLPDHVLQIASRAQHRLYRIHRRMRERKKPGNVITVACARELACFLWAAATAP

SEQ ID NO: 430638 - protein, 361 aa, unidentified
MGQVRSWVGLDVHARKVIAVTVDGESGELRSLRLSGRTGEVVEFCMGLPGPTRVAYEAGPTGYGLARALRAAGVGCVVAAPGKIERAAQDRIKTDRRDAERLVRLLMIGGLHAVRVPSSEEEALRDLVRAREDLRGDLMRARQRLGKLLLRHDVRYEETAGAWTAAHRAWLTKIDLGGGAQLTLLDYRGAIDALVLRRDALEARIAELVPGSPWAETVGRLRCLRGIDTLSAVGLCAEVGDFRRFDRPGRLMSYLGLVPSEHSSGEQRRQGAITKSGSRHARRLLVEAAWHYRRSPAKGAGLRRRQEGQPVQIIAISWNAQQRLHRVWRRLDAERGKRRTIVAVAVARELAGFSWALARAD

SEQ ID NO: 430639 - protein, 348 aa, unidentified
MRFYTKQHNFYCGIDLHARSMYLCILDQKGKTMLHRNFKASPEAFLRAIKPFGDGLVVAVECMFVWYWLADLCAQQNIPFVLGHALYMKAIHGGKTKNDKIDSKKIATLLRGGTLPVAYVYPRTMRSTRDLLRRRNHLMRKRSELLAHIQNTNSQYNLPDFAKKLAYKANRDGVPEHFPDPCVQKSVEVDLQLLDFYDRLLTELELYIVRKAKGHNSRTFYLLRSIPGVGKILSLVLLYEIHTIDRFPRVQDFVSYCRLVKCPRESGGKKSGSKNSKIGNAHLKWAFSEAACLFLRGNEQAQLYHERLVSKHGKGKALSILAHKLGRAVYFMLKRKEPFNMDVFFARA

SEQ ID NO: 430640 - protein, 336 aa, unidentified
MQITTIGLDLAKHVFQVHGVDANEAVVEKRRLRRGQVLGYFAKLAPCRVGLEACATAHFWARELRRLGHEVRLIPPQYVKAYLKRGKNDAADAAAICEAATRPSMRFVPIKSEEQQAVLIMHRARDLLVRQRTQLINALRGHLAEFGLIEAQGPSNVRRLLAGMRTDLTVPELARETLDLLAAALEAVDAQIDAVEAKITTWHKANPTSQRLATIPGIGPLIASAITATVADPAAFRSGREFAAWLGLTPRQKSTGGKQRLGRITRKGDQYLRRLLIVGAQTVLLRSKAAKANLWIQGLLARCARLKVAVALANKTARIAWAVMIRGECYQPVAAA

SEQ ID NO: 430641 - protein, 364 aa, unidentified
MCQSGDGDNHTVDQETYMNRTTYGLDLAKRVFQVHWVEIDTGEVKRRTLRRSEVLRFFALQPSGVVAMEACGSAHHWGRALAKLGHEVQLIAAQFVRPFVKTNKTDTADAQAIWEAAQRPEMRRVALKTEEQQAVLGLHRVRQQLVKQRTMHANQVRGLLYEFGVVMPEGWKKLLAQAGPLLADDAIVAVPKLLAEVLREQLSGIRSLSERIDALERQIGLWQRREAECRRISAIPGVGPLTATAVVATIGNANDFRSGRELAAFFGLVPRQSGTGGRVKLLGISKRGDPYVRTLLIHAARAVLSAQTRGGREPDPWIKQLLARRPWNIVLIALANKMARTIWALLAHTRTYDSRWAEARVRST

SEQ ID NO: 430642 - protein, 330 aa, unidentified
MYLGIDTHKRYSQVAVVDGDGNLQDEIRLPNDRLDELAEQYTGAEAAIEASGHYRPIYEMLDEHLDVTLVNPSKNRIIADAAVKTDRVDAKRLAQMLRAGMLAESYVPPDEIRVLRDLVRTRKSLVEARTAEKNRVRAVLTRTDNTYDSELFGPTGREFLAELSLSDVDRAILEAHLSIIDEYDQQIERLEEKVERRVLESPAAQRLLTIPGVGQYTAAVIAAEVGEIERFDEDKQLVSYAGLDPVIHQSGDKEIRGSISKEGSAPLRWALVQCANIAVRCDEYLGNFYTRLKQRKNHQIAIVATARKMLVSIFHMLTRKEPYDPPGVSA

SEQ ID NO: 430643 - protein, 361 aa, unidentified
MTSAMLTPPTVPIREEVVLGVDTHKDVHVAAVADLLGRILASESFHATAAGYGQLLDWARQFGAVERAGVEGTGSYGAALTRFLRTEDVEVIEVNRPDRAKRRMRGKNDVVDAEAAAQAVVSGRATAVAKSGDGPVEQMRVYKMARDSAVKARRQAINQLKAILVNAQPNLRESLSRLGQAALITACVKLDPEAWAEGAAVVHTLRSLAGRIKCLTAEAQELSARIDALVQQVAPALLEEHGVGVDSAAPLLITAGDNPGRLTGEAALAALCGVSPVEHSSGKTQRHRLNRGGDRQANAALFRIVMTRLRGEPRTVAYVERRTAEGKSKREIIRCLKRYLARHLFGIIRDAMARAKPASTA

SEQ ID NO: 430644 - protein, 359 aa, unidentified
MKESTVLRQALGIDVSKDSLSFCLGVLKDDLEKDYFQSEDVSNDTNGFKVLSRWVKSSSRKKELPVVIMEATGVYHEALANYLFNHGYDVCIMQSGRVKKYAQSLDQRSKTDALDSKMLSMLGCERKISRWVPPSKTLEELKFLSRERSSLIKDRNIEKNRIHAKNAASFAYKKAIKRYNKRMVLLNSQIDEIELEMQAITDKDSLLAEKMNYLKSIPGVSFISAVTVVAETLGFSLFSSAKQLVSYSGYDVVLRESGTYKGKSRISKKGNKYIRAVLHMPSMTAIRVNPTLKPFYERLKPVKTKPLIALVAVQRKMLVLMYSLWKGNQYYDANYEMKKVARNKFPATQDSNKIEFETS

SEQ ID NO: 430645 - protein, 315 aa, unidentified
MTQTSTTTAGIDTSKRKLDVALHGRAGHWQVPNSLAGWRELTAKLVEAGVSRVGIEATGGYERGVVEHLRAADLTVLVLQPMQVKAYGWAHLRRAKNDVLDAVLIAAFTASLDRIKAAPDPRLAELADHLTFLEQIEEDIRRYKTRLEHIGEPGLRRMVLGDIARLKARRLTQIRHLAKQLRAHRDLAVRFDLVLSIPGIGERTALALLIRMPELGQVSREEAAALAGLAPFDNDSGQQRGQRRIAGGRDRLRRSLFAAALPAAFRWNTALIALYTRLIARGKAHNAALIACARKLLIYANTVVQRGTPWTEKTA

SEQ ID NO: 430646 - protein, 339 aa, unidentified
MKHTTVGVDIAKNVMQLHYINMETGEVVNKPVKRAAFLEHFANLAPCLIGMEACGGSQHWARKLIAMGHQVKLMPGKFVKAFVMGNKNDAADAKAIWLAVQHAGKSVAVKTEMQQAVLGLHRIREQLVKFRTMQINGLRGLLTEYGEVMGKGRAALDKAIPNVLERLVDRLPAILIDTLREQWNGLAELDKQIAGIERRLQVWMREDKACKAIAAIPGVGLLTATAAVATMGDAKTFRSGREFAAWIGLVPRQIGSGGKVQLLGISKRGDRYLRKLMIHGARSVLCLAKEPGPWIEGIKKRRPLNVAVVAQANRMARTIWAILAHDKAYDKDYVSVKPV

SEQ ID NO: 430647 - protein, 409 aa, unidentified
MGLYCGIDWATAHHDIVVINDNGKVVARGRVGNDAAGFAALLTLLVEAGDTANHPIPVGIETDRGLFVAALRETGRVIYPINPLAASRYRSRHSVSGAKSDATDAVLLANIIRTDAAAHRPLPADTELAQAIRVLARAQQDAVWARGQVSNQIRDLLKEFYPAALVAFADLDGGLARPDARTILAAAPTPTQAAKLTSPRLRRLLIKAGRQRYLDRDVERLRAIFTGTYLHQPPVVEDAMGIHLTALLGQFDAACAAADALAEAAITHFERHPDAEIITSFPGLGNLAGARVLAEIGDDRSRFTDARGLKAFAGSAPITRASGKKTVVLHRHIKNRRLNAVGPIWALASLRASPGARRHFDTRRAAGDWNHQAQRHLFNKFLGQLHHCLHTGQLYDEHRAFPPPLPLAA

SEQ ID NO: 430648 - protein, 351 aa, unidentified
MHYIGVDYHKKYSYVVVKNEQGQAERRGTVNNSKEEFRQFLQPYRAGKAVLEATRNWGLIYDWLEEILDDVALAHPLKVRAIAEARIKTDKISADILCDLLRSNLLPEAYVPDKETREAKNVLRQRMFFVRVQTMVKNRIYTILDRHPEAVSGAPDVSDLFGASGMAWLKQVVLSGQDNQLLASELELLEILKRKSSEGNGMVKELAKGDKRVKLLRSIPGLGPFFSVLVAKEIDDIGRFRDEKKLCAYAGLVPSTYASGGKVFHGRITKTGNKWLRWAFIEAVQPAISCDADLFAYYQRLRMRKDANAAKVATARRLLTIVYRVLSQERLYERRNKRARRSLAPAALITS

SEQ ID NO: 430649 - protein, 316 aa, unidentified
MQTTVLYIGADVAKAELVISVAGQRPCIIANTATGITRWLKTVSEHALIAMESTGNYHTLLAQLAYLHGLTVYILNARDVFYYARALGSRAKTDNIDAEVIVRYLQEHQSSLQAWQPLTPEQQQLRQLLSRRAQVITHQSALRQAFTDVDLSGVDTQALQHGFDVVLASMDQQIQHLIANDPQLEQGYQRLRSVSGIGQQTAALLTELLNRIPFANADALVAYSGLDPRPNDSGTKRGRRRISKRGPTLLRRQLYLAAMSACRSAACKPLYEAYRARGLAGTESIVILARKLLRIAYAVWKSGQAFDPSKLSPKTA

SEQ ID NO: 430650 - protein, 318 aa, unidentified
MKANTATVYVGVDVAKATLQVHQQGRQTELNNAPAGLTKFCKKLKALEGAHVICEATGGYERALVQALHKVKIPVSVVNPAQVRGAAQAQGQRAKTDRIDALMLTDYGQRYQPQPTPPASQSQRQLAALAQWLKQLVDAQAVAKTQAEHHEDPFVRKQHNTLLDHYQSQIEAVETKLKALMRKDPVLAQRVECLDAIEGVGLRTAFMVLAHMPELGQLNRQQAAALAGLAPWTRDSGTMKGMRCIGGGRSEVRLALYMSALSATRCNPVLSAFYQRLIAKAKLPKVALTAVMRKLLIYMNHQLKALDAQPAPNAPKKD

SEQ ID NO: 430651 - protein, 350 aa, unidentified
MSIIGGLDVHRRQITYDWIDTDTGQTRQGQLAPASREHLRGWLEPFAGQQAAFALEGCTGWRYVVEELQQAGITAHLAEPADTRALRGRKRHAKTDRADARHLRDLLMGGRLPESWIPPTHVLEARTQVRLYKALVDQRTAWQQRIHAVLFHHGVPAESDLLVAERRQRLTQGAGLTVAAHQAVLLALRMIDAIDAELDLLRAELAHLARHQPGCRALRDLYGVGLITAVAIWAEFGDVRRFSSSRHAVRHTGLDVTVYASDDKRAPGHLARQGPAVLRWALFEAAQCAARAGSPDHAYYTQVKARLGGNRAALSVARKLARRAYHLLRGLGDDALAPVAGSHRSAAAGA

SEQ ID NO: 430652 - protein, 378 aa, unidentified
MNRIIKIGMDVHTSNYTLCIFEPSFEHDGTVHCITQVKPEVKNIIHVIETFKKKHENEELNIVCGYEAGCLGYSLYHELKEKGIECVILAPTTMKTEKGGRKLKNDYRDAKMIAECLAYGGYSAVHIPTELDNSVKEFIRMRDDIKENLKSIKQQIIAFLTRNGKQFEGKSFWTRKHIDWINTVSFSEPLLQYTLKEYMIEYNHLCNRIETLDRQIEEISLKEEYVEKVQQLQCLIGIKTHTALSLIVETSDFNRFKKGNMYSAYLGLIPGDDSSGGHENKLGITKAGNSHLRRLLVEAAQGYTRGRVGFKSKDLKSRQEKCSSEVVAYADRANERLRRKYYRMTLRGKKFNVAKTAIARELACFVWGIMTDHIDLCN

SEQ ID NO: 430653 - protein, 418 aa, unidentified
MVKNRIPVCHVAVYLRNAACLTTNTMNKPTGKINRIIGLDMHPDVFAAAALEKTTADLSKVLWVQDRVPTKGIERWAKKHLDAGDVLVLEASGNSFEVASRFHRLGYTCLVLESCQAAKIKDNFCNDDRHSAIKLARVYLSGLAKLVWQPDEETRQMREIFFSHRASVKDCTRLRNRIRTFLNEYCVRLPKGTRLTQSSGLNCALKAREWGTLQSELLRERFEQLWQTEARRKRLEKLMVELLLERPEWAKTWRLMGVRHIVAFALMAMIGDIKRFPNAKKLVGYFGLSPSKVQSGNNVKGREKGMGNTGRGDVRALLVQAAQNAMTQKSSPLHKWGWKLTMKKNKNVAVAAVARKLTTAIWHLLQGHFTPILEIGKHLETKLLKLATVLGKERIKALGFERRQDFVLHHFNIIQLST

SEQ ID NO: 430654 - protein, 345 aa, unidentified
MNYYAGIDVSLKESCVCVLDAGGKVIRETKVASEPEAIIAWFAQLGLAMELIGLEAGPLSQWLFAAMKQAGLAVELLETRHVRNALKTMTVKTNRKDARGIAELVRIGWFRPVHCKSISAQETRAILTARKLVDTKLHDVEMSLRGILRGFGLKVDKTTATSFAARIRELVDGHPTLQGLVDALLSIREVLLREFKGFEKRVRTMARHNEQAKLLMSTTGVGAIISLTYAAAIDDPARFESSKVVGAHYGMTPKKYQSGQTDYNGRISKIGDASVRRALWQAAHVILTRSVKDSALKTWGLSVAKRKGMAKAKVALARKLAVVMHRMLVDGKSFDPALPKQAAAA

SEQ ID NO: 430655 - protein, 347 aa, unidentified
MIYNQQHKFYCGVDLHARSMFTHVLDHKGKTVFEEDLPADPDEFLHAIKPYRKNIIVGCECMFAWYWLADLCEDEKIPFVLGHALAMKHIHGGKSKSDRIDAGKLASMLRGGMFPMAYVYPRAKRQTRDLLRRRSFFVRQRSQLIAHIVNTNSQFNLPPLTKKLTYAANRSEAIAQRFTDPSTRLMIAADLALIDNYDERIQVIESHLIRTAKVDDAVTFGFLRTIPGIGPILGLILLYEIDAIARFPDVGNFLSYSRLVRCEHSSAGKVKGSGPKKIGNAHLKWAFSEAACLMIRAVPAVKSWMQRQEKKGGKRKALSVLEAKIGRAVYHLWRKQQAFDLKRFLKG

SEQ ID NO: 430656 - protein, 426 aa, unidentified
MKSINEFAATVGWDWADKKHDLWLRPADGSKAQHVILDQSPEVIHEWVAKLRERFGGRPVAICLETSRGPVISALLSYDFIVLVPVNPKALKNYRAAFSVSGAKDDRSDAMLLEEYVRLHWEKLKALEPDTVETRTLGGLVETRRRLVDERTRLVEQLHSVLKTYYPLAEVLLGEQMTKPMAADWLARWPDLESLQKAEASTLRTFFFKHNSRSRQTIEERLQAISTAKALTTDQAIIVPARLRVLGLAAMLKPLHRMIAELDEQIEKIMDQHPDAEIFRSLPGAGPCLAPRLLVAFGTNRERFGSATEVAQFYGVAPVVRQSGTTKTVHVRGRCPKFGRQSFHENAGCALRQEPWAACYHGQYKSRHNGCHHQANRSLAFKLIRIYYACWKTRQPYDAQRYLRALQKNGSPLHKLLQNPQTRTSQ

SEQ ID NO: 430657 - protein, 332 aa, unidentified
MHYVGIDVSHEHLDVALLGDEGHPIRTARIANSRRAIASWITQLKKNDRVILEQSLFCLEPTGHYSQLLLEMLVEHQAPTWLAHPMHIKQSLGDQRGKSDTLDALRIAQYAHRFRDKARMFTPDQLKMTKLKQLLMKRQQLVNAATKLKAQISHVNKNMHKELRAAFNRLDKAQLKKVQALIEKLDHMVQVEIESHPEVHERYDLICSIPGIGRVLATNLLALTDDFTRFNSPRQLACHCGVAPFEHSSGSSIRGKTRTSPKANTWLKSLLHMSAIVAVRIDTGLAAYYKRKVDEGKPKLLVLNAVRAKLIHRVFAVLRKGEPYNTNLLHVS

SEQ ID NO: 430658 - protein, 342 aa, unidentified
MEITSVGIDLGKTTFHLVGLEVHGRAVIKRKFSRRQLLAYTANLPTSLIGIEACSGAHFIGAALRDQGHDVRLIPAQFVKPFLKSNKNDFLDAEAIAEAVARQNMRFVPIKTDEQLDLQAMHRVRDRLVHRRTAVINQMRGFLLERGITFAPGPANLRRHMPSILEDAEQNLTPRMRSLLSHLWHEWKQLEDDVDRISSEINAIAEQDPACQRLRQIPGIGPLVSTATVAAIGNGAAFRRGREFAAWLGLIPRQHSTGGKARLLGISKRGSVYLRRMFIHGARAVLLIVKYDTGRLGQWARELALRAPRNKVIVAVANKLARIAWAVLARGSDYRATTVTAA

SEQ ID NO: 430659 - protein, 315 aa, unidentified
MGTPVFVGIDIAKKHLDIFLTPPDTSFTVSNTEAGMVKLLTRLRQVTPQIILLEATGGYEFRVVAALREAELPACCINPRQVRDFARSLGILEKTDRIDARVLAHFAEKLRPEPRPLPEAQQQELKHLMARRRQLLEMILMEQNRLQISPFPRVQQSIQAALQALKEQLRQLDRDIDDFFRRYPVWLDQDQLLRSVPGIGPQTSLSIMAWLPELGRLIRREIAALVGVAPFNRDSGAWRGKRSIRGGRPQVRRSLYMATLAALRFNAVIRTFYQRLLLNGKAKKLALTACMRKLLTILNAIMKNHQPWLPQDQTA

SEQ ID NO: 430660 - protein, 414 aa, unidentified
MEVLYPRCCGLDVHKETVVACLRLVIQGKIVKEARTFSTTTADLMNLSEWLAQNKCTHVAMEATGVYWKPVWHILSDGEFELLLANAAHVKNVPGRKTDVKDADWVSDLLAHGLIRPSFVPDGPTQEMRTLLRTRKQLNREKASHILRIQKTLEDANIKLDSVVTDIMGLSGRKMIEAMIAGQTDPGKLARLADPRVKASREALREALRGRVTRHHRFLLRLHLQQIDALNDAIVKIDREVETGIAPFRTAIEQISTIPGVKDLSARAILSEIGIDMTRFASDAHLISWACICPRNDESAGKRRSSRIRKGSPWLKTTLVQCAWAAARTKGSYLQAQFHRIRARRGAKKAIVAVAASILTAIYHMLKHGTMYQDLGPNHFQRRDSERQKRRLVQRLAGLGYAVELVPLTAHVSP

SEQ ID NO: 430661 - protein, 346 aa, unidentified
MLYAGLDLSRKRLDFHLLDSEGATVEVGAAPPDADGLLGLTRRLDRHREPIRAAIESMNGARFVHDRLELAGWQVEIADAQKVKGLAPLACKTDRIDAWVLAELTRRDLVPAIWLPDPMVRAERERARWRLHLVRHRSSLKQRVHAVLLTHGKPCPVSDLFGVRGRQLLARLGLPEPWQATIEASLRLIDELEREITDCERELRRLGADHRYVPRLLTVPGIGWVLAYTIAAEIGDIGRFASPRKLAGYTGLCPRVYQSGERDLRGPLAKQGPKYLRWALVEAATHACTHPAYRDRYHQTKARIGKQRGAKVAQIDLARRLSEAIWHMLTREQPFAPKGATDPLAA

SEQ ID NO: 430662 - protein, 408 aa, unidentified
MDLTPMHKRVIALDVHQAKITACAVVEHDDGRVEVTKRDFGAFKRDRRALAQWALEMAPEVVVMESTGVYWKSPFAALEAVGLIAWVVNARHVKAVPGRKTDMADAQWLATLARAGLLRASFIPPVQMRQLRLVARQRQKLVGMCSAEKNRLHKVLVDAGIRINVLVADIHGQSARAMVKALIAGQPMHEVLDLKGRLRASRQELCEALSTEQFSAAHRFVAQEIVQHIEQIEQRIARMDQYLLQGLQPWQPQLRLLQTLPGIDEQGAAMLLVEIGADMSVFGSAERLASWVGICPGNNESAGKRKTGRIRKGNAWVRRLLCEFAQAAARTRCALKAKFDALTIRKGHKKSVVALAHKMLRTIYAMLSNGSHYQDKEVDYEALNVQRNAPRWIKMLRKHGFIATPAAA

SEQ ID NO: 430663 - protein, 374 aa, unidentified
MGKSIRFVGLDVHAETIAVAVAEGREVRSLGVIPNRAEAVRRLLGKLGDLSTVKACYEAGPTGYALYWQLTKLGVECEVIAPSLVPTKAGDRVKTDRRDAEKLARSYRSGDLTAVWVPDAKHEAIRDLVRAREAAKEDQLRAKHRLGKYLLRNGVRPAAGCRAWTAAWWQWVRGVQLEHGEQNTTLVELILEVDHQGQRIERLDGAIDRAITAAPEHLRALVDALQSLRGVAKLTAVTLATEFGTFSRFERASQVMSYTGVVPSEYSSGAKSRRGAITKTGNSHLRRVLVEAAWHYRHRPRLAQRQKDLQKSLPPKVAAVAWRAQERLHRRYWALSNRSKPAGKIVTALARELAGFVWAIGIETERELAGVRTA

SEQ ID NO: 430664 - protein, 405 aa, unidentified
MFYAGIDWSDTHHDALVIDDAGRQVNAPIRVAHSPQGLDKLHAFLESIAGPEGYENMACIVETSHGLLIAFLLEQGWPVYPVHPTTVDRRRAASGAKTDSIDAYLLAKTGRADFTELRRLTPDSDQVAELKALTRDQDALIQMQTRLVNQLTACLKAYYPVALTLFAKLQQRSTLLFLQAYPTPQQARAATPEQIAQLLKQARHPRAEQTASEIVETVHQPQLEAHEITTRTKSRLALALIAQLLPLVEQIAAYDKDITQLFLSHADSTIFESLPRAGKRLAPRLLAEIGDDRQRYADATKLQALAGTAPVIFQSGTYTRVHRRYACVKPLRNALHQFAWQTTQTEAWALEYYQRKRKEGKSHTVAVRALANVWVRVIYAMWQKSEPYQSAVFEAAQQQHVRRAA

SEQ ID NO: 430665 - protein, 328 aa, unidentified
MFYLGMDVAKAKLDCCLLLDEASNKRKTKVISNNKSGIADLLVWIGKQQISPDALHVVMEGTGVYHEQAALALADAGVTVSIVNPAQVKDFGRGLAIRTKTDGVDSFVLARYGALLKPAAWTPPAPEARILQALIARRDAIAQDLQRERNRREKADATDTLARIQQSISDSIGFLSQQLAQLQQDIDLHIDRHPGLKEDLSLLQSIPAVGPQVGNNLLAVMHSHNFGSAEQLAAYLGLVPVERQSGSSVLGRARLSKAGPARIRAVLYMAAIVAKRCNPHVKAVYERLLARGKSKMSALGAAMRKLVHLCFGVLKTRQPYRHDYAKIS

SEQ ID NO: 430666 - protein, 342 aa, unidentified
MEQIRIVGLDIAKSVFQVHGVDGDGEVVVRRRLKRSRVLPFFASIEPCRIGIEACATAHFWARELGALGHDVKLMPPAYVKPYVKRQKNDAADAEAICEAVSRPTMRFVPVKTVEQQSVMVLHRVRELLMGQRVRLSNAIRGHMAEYGLVAPVGRNGLQKLIEVIGDETDERVPAEARLCLKMLIAQLHLVNFQVLGNDRQIRTSARATDVGRRLMEIPGIGPVIASALVASVPDPHAFRCGRNLSAWIGLVPRQNSSGGKERLGGITKQGNRYLRKMLVVGAMAVIRHAQRNGTRRPWLVQLMARRTTKIAAVALANKTARMVWAIMVSGERYREPVVRAA

SEQ ID NO: 430667 - protein, 388 aa, unidentified
MSQSFDASRSLAALEQDNTIIAVTEMSKAKWLVAGLVPGLKRQPLKKLDADAPALLKLLQRWRDEADRAGHTVQRIAVAYEAAGDGFWLARWLRAHGIEAYAIHPSSVPVSREHRRAKTDRLDTELLMRAFLGWLRGEKRHCSMAAIPTLEEEAARRPNRERGTLIGEQTRLINRIKAILARFGVPSFRLSLRQAADRLESIRTAEGTPLPHNARAELHRFLERLNLVRAQIRAIEQERLRRLAATPAAANGPHAMVRLLARIIGIGVETADMLVHEMLSRGLRDRRAVARYAGLTGSPDESGKRRREKGLARAGNARVRRGMIQLAWRFLLFQKDSDLARWFQARTTDGRKTTRKTMIVALARKLLIALWRFVTAGEVPQGVIVRAP

SEQ ID NO: 430668 - protein, 431 aa, unidentified
MKYKHARKQNQRIQQITESTLVVGADIAKKTHVARAVDFRGIELGKDCVFGNDHQGLTKLVTWMKELQRRHHKTEIVLGIEPTGHYWFPLAEYLQREGVRVVVVNPHHVNKSKELEDNSPTKNDYKDAKVIADLVRGGKYSEPKLPMNVYADLRILMNLREKVMVNFGQVQRRIQNWLDRFFPEYGQVFKDWEGKASLITLSEFPTPSEIVALGVGAIVRRWKEDVKRAVGPKRASQLLETARTSIGLKQGLAAAKIELKTLLEQYEMFAKQLEDIMMEVERLLAQIPGTKEMLTIPGVAIVTLAGFLAEVGDLSGYDHGQQIIRLAGLNLKENSSGKKKGKSTITKRGRSRLRALLFRAVMPMVTKNAEFKALHQYFTKRSHNPLKKKQSIVALCGKLIRVLYTLGTKRIPYQPSDVLGPVRQAQLQMAA

SEQ ID NO: 430669 - protein, 335 aa, unidentified
MQIYGIDLAKEKFDVSFFDLTSKKVSNQPSHKVVKNNFKSIGRFLETLPSDAVLVAEHTGVYGDTLLKCCMDSNVKIAFVGGYVIHRYRATPDRAKTDVLDCALLREFGERYPDKLKFRKFPEEALYELRQLARHREMLVEQRKQLMTADKSEDCRPIRSLAVKRSMDRIKEMLDTEIAETEKEMLKVINGHDSIHHNYEIVKSVNGVGLVTAVELLVKTDNFTKITTARQYAAYAGTAPYEKSSGKMDKGAHISKIGNRRSKTLLYICAESARLHNKEIKLYYERRTLIDKKPRHYVLNAIANKLLRIIFTLVEKGEYYDANFIRQDPRVVKYN

SEQ ID NO: 430670 - protein, 418 aa, unidentified
MKKHSKSSQRSEPSLKRTKARGPVQRDAKEVMAEVLGKLTAKLDAPTVCTSAQENRRGNTVRPNLDRLTVGVDLGDRWSQYCILGLAGETLAEGQLRTTQEDVREFFQALSVARVVIEVGTHSAWVQDVITELGHEVLVANPRLMEGSKRRKRKSDRIDANKLARLGRVDPQSLHPIRHRSREVRQDLVVLRARDALVSVRTELINSTRGLVKSMGTRLPRCSSPSFAEKVKDAIPVEVGEALQPLVQLVETVSECIARYDQKIEELGQKKYGHTTLLRQVKGVGPITSLAYVLTLEDPQRFASSREVGPYLGLVPKQEDSGDSQPQLGISKAGDRMLRRLLVGSSQYMLGAFGPDSDLRRYGLRLCEHGGKNAKKRAVVAVARKLAVLLHHLWVSGDVYEPLHHTGAGSRTAEAMAA

SEQ ID NO: 430671 - protein, 344 aa, unidentified
MSNLDTCGIEVSAKELVVSLRRQEDLEPLRNFTNTPEGHLIILRYLRQAGRVVRVCMESTGLYGLDLALALSGQEGIEVMVANPRAVRHFAQAMMKRSKNDQIDAGVLEQFALHMPFRPWQRPSVAVLALHALARRLRELVEMQTAEKNRQHAAGLSQAIPAVVRRDLARSLRAQERAIERLTRQARKLIAQDPQLAERFELLDSVPGIGETSAVQLLGELGVLAPDLEARQWVAYAGLDPRQYTSGTSVHKKPRISKAGNKHLRHALFMPALVAVQHDPHLRAFYQHLLAQGKFKMQALVAVMRKLLHALHAMFKTHHPYDGSKLFRLKSTPAQEVTHVLVAC

SEQ ID NO: 430672 - protein, 427 aa, unidentified
MNLTQNDRLKQVTSDTLIVGVDVGSQTHFCRAFDWRGFELSRRVFKFSNTGMGFLTFLRWTEEIMNKTEMKKVIVGCEPTGCYWLTFQKFLQDHDVQLVTVNPFTVNRSMELDDNSPEKSDLKDPKTIALLVKDGRFSTSYLPSGVYAEIREASVCRDQIMKQNVRLSNQIQGWLQKFFPEYFECYADWDSTSGLMLLREAPLPQDILKIGAGGINQIWRDAKVRAAGIKRAQTLVEAAQNSVGLEAGEAARLEIWVLVNDYILKAEQLKRLDEYLEEKVKEVPNVEKLLAIKGVGSITIAGFIAEVGDIRRFDSPKQIQKYAGLELVENSSGKHKGRTRISKRGRRKLRKILYQVMVPLLARNKEFRGIYDYYVTRVKNPLKRRQAMVAVSCKLIRVFYAVLTKGVEYDRFKMMSDIHRKSDIIAA

SEQ ID NO: 430673 - protein, 382 aa, unidentified
MTGTEPQAWGTGLMDDITFVGLDVHKATVCIAVAEGTRGGEVRQLGVFENRPEILRKVVSRLSKGGRRLSFCYEAGPCGYGVHRLLTGYGHECVVVAPSLIPMKAGDRVKTDRRDALMLAKLHRAGELTAIWIPDAAHEAMRDLVRARATAVRMLVKARQHLQGFLLRHERIYRGARAWTLAYRRWLSTVRFEHPAQQIVLQDYIHAVQEAEIRRDRLTQQIEELLPNWSMAPVVAALQSMRGVALIVAVTVVAEVGDFRRFANPRQLMAYLGLVPSEHSSGSSVRRGGITKAGNALARRVLIEGAWTYRMSARVSRKLHDRLEGLPAAVRDIAWKAQLRLCARYRRLAATGRPKVVVTTAIAREMVGFMWAIARVAQPALV

SEQ ID NO: 430674 - protein, 344 aa, unidentified
MIWIGLDVHKRFSRMGCFDPATGEVHDLGSVSNDASALEGALEKLPSPKTVVLEAGRSSYHMVGLLESIVEEVWIVDPGEVRRLQHTISKTDRRDAAALAWWAAKGVITPQWRPDAELLDLRELTRGKTALTRMSTRVRTMIRMLLARHGHECPHRDLMGERGQLWLEEVELGGHAGEMLAGLREILVVVQAKADDFERKVEQTSREHPVARRLRTIPGIGPFLSLALAVEIGDINRFPGPTQLRGYSGLVPAVYQSGDKDARGPLTKAGNKWLRYAAVLAAQRIGQMKEPDPRLKRIFLSVAFRHGRNPGKVAAARRLLDLSYHLLKKEADYQAPRARTASVR

SEQ ID NO: 430675 - protein, 411 aa, unidentified
MLTEQTSSPATRFVALDVHRQYLVVGAVDLQQHVVLTPRRFGFAAFAEWASVHLTHADAIVLEATSNAWLLYDQLQPLVAEVVVAHPRAVKLIAAARVKTDKRDTIKLASLLAANLIPAVWVPPPAVRELRALVTHRNRLVKQRTQAANRLHSVLHRHNLDPPPGIPFAIHQREWWLALELPLAEKLRVQQDLSLYQTLDTLIQESDAELGRLSTCDPWVKQVPFLVQLPGLGALSALRILAAIGEITRFPSAKHLVGYAGLGASVHQSGETDRGGRITKEGRSDLRGVMVEAAWVAVEHHPHWKAQFERLSRRIGKQKAIVAIARKLLVAVWHVLAQQEADTNAQVEAVTRKLLHWISQTGTIPGKRRDRLLLLSQYLDQLGLSEEVEEVKYKGTTYRLSAQQKSLRVTQ

SEQ ID NO: 430676 - protein, 373 aa, unidentified
MQFVGIDLHTNRFTCCYRDEHSPNNMKKGKRLETFELDSSGLSAFCQTLTPDTYVLVEATITTFAFVRLIQPLVKEVIVANTYELKQISLARTNTDKIDSNILSRIIKMQILSGEQAISPVVIPPVAIQELRGLFTTYRLYRKQTTQVKNRIHSLLKEKLYGFTQEEIFDRNGRERIRGIESGTPLSFQLNELLDLLEYVEARIEPLKEQIMAQAEPFIREIEILTSMKGVSVFIAIAIIADIIDANRFKNSKAFTSYLRSAPKVANSNTSVSIRGTNKKGRKLSATLLTQSLHHVLDASLKLRRWYSRLCEYKKAGLVRTGLRRRVLAEIYQMLKKGEYHYGRDARNHDAKMAQYLRFLSKHKNHDILKKTS

SEQ ID NO: 430677 - protein, 354 aa, unidentified
MSKERTDAALVFIKPERLQAPIASAHAQAGDAKTMSESLVVVGIDVAKAHVDCAVLGADFGARQFANDIDGHSVLAAALQPLAVALVVMEATGGYESALACALQAAGLAVAVVNPKRARDFAKGIGRLAKTDRIDAEALAELAATLARRRDLARFIRPLPDAQQQELAALVTRRRQLLTMLGAERLRLQLATAKIRPSITALIEAIRAQLEDIDAQMQAHVQEYFASLDELLRSARGIGPVASATLIATVPELGRLSRREISALVGVAPMANDSGTSHGRRRITGGRFQVRRVLYMATLTATMHNPTIKAHYQRLLAAGKLPKVALVACMRKLLTMLNAMVRTQRPWSDEFHRA

SEQ ID NO: 430678 - protein, 337 aa, unidentified
MQTIAVVGLDLAKTVFQVHGVATDGAVVVRRQLRRGQVLGFFQSIGPCLVGIEACASAHHWARELMAIGHDVRLMPPAYVKAYVKRGKTDAADAEAIAEAVTRPTMRFVAVKSKAQQAVLMLHKTRDLLVRQRTMLINALRGHLGEFGIVAPQGPAGVRAALKSLREEGQALPDLAHAALGGLAEQLEHLGAEISRMERRILDWHRQDETSRRLATIPGIGPITASAMAASAPDPSLFRSGRQFAAWLGLTPRANSSGGKERQGGISKMGDSYLRRLLVVGATAVLRMARQRGREGWVGNLLERKKPKVAAVALANKTARIAWTLMARQEDYKPTAA

SEQ ID NO: 430679 - protein, 368 aa, unidentified
MKKLVYVGLDVHKDSITIAVARQGRQPAAIWKTIPYDGVRLRKALKMLVKDGEELRVCYEAGPTGFGLCRRLREAGMDCIVVAPSLVPGKPGERVKTDRRDARKLAHFLRSGDLTAVHVPEEEVEAIRDLERARDDAKCAERVARHQLSKFLLRHDRRWEGKSWTQKHRDWIRVQKFDYPAQQRVLEDYLKTVEDLAERVERLTRQVEALVEETVLAPLVKALQAFRGISVVSAVTIAAEAGDLRRFATAGQFMSYVGLVPSERSTGKRRRQGAITRCGNSHLRRIIVEAAWHYRHLPLMSKEIRRRNQGVAPGVQRIAWEAQKRLNQRLYHLIHAGKSVQKAITALARELAGFIWSVGQEETLLEAA

SEQ ID NO: 430680 - protein, 425 aa, unidentified
MTIGFVGLDVSQADVQVCLMRADDDATGTCWTVPNSQTGADTLIARLTDRCAQAQITDLRLGVEATGLLWWHLACALIQAPPLQPLHPRLYVLNPLLVSRFRANYGALPKTDRLDAFLIAERVRFGRNLPTPFQLDLRYAPLQRLTRFRCHLMENLAREKNYFLSFLFLSFSSFGQVSPFGDPFGATSCAVLEDFTTEELAQQSLDDLAAYLQQHGRGRFADPDALAATLQRAARDAYRLDKVLDEPLRVVLSTTLASIRSLQQQVKTLDKTIARELAGIPQTLDSVPGLGPVWTAGLLAELGDIQRFAHEEAIAQYAGLTWPQHQSGTFQAEDTRMSKRGNAYLRYYLIEAANSVRQHCPEYRTYYQHKREETTKHAHRRALVLTARKLVRLIDALLRQGTIYRPPEARTAARGAGSVSDTVPA

SEQ ID NO: 430681 - protein, 331 aa, unidentified
MTLALGIDIAKKSFDAVLLDPTGKSIGYWHQPRTIDGLQELRDQLEALNVDFEQLHIGMEATGSLWKLVAVTCQSWNATCSVINPWVIHSFGQVKMAHHKNDKLDAALIARYVKMYEPRAWVAADATLSDLVELTRRVDDIKRLRTQEKCRLASEPSARVAESINTIIDCLQQEHDTLIAAIQELVAKDEQVSKTIERLTTIPGVAFWSACAILAELGDVDRFDNAKSVTSYAGLVAREFQSGTSVHKKSSLTIYGNRTLRKFLYFPSMAAIRRNQDFREFYDRLRGKGKSFKTALVACMNKLLRLFYAIAKGDSVFEANHQNKRAAASTI

SEQ ID NO: 430682 - protein, 389 aa, unidentified
MPSVSERPEAPTAIQTHLAASFVSLELSRSIWLITSLSPGSGEKMSKHSVRAGDVAALLARFSELKRKASERTGKSFPIVVIQEAGLDGFWLHRVLQSEGVESHVVDPSSIATSRRRRRAKTDRIDGEALLRALLAYKRGEPRVCAMVKAPTPEEEDRRRLCRERKVLIAERVKHVNRVKGLLFSQGISGYEPLRRDRRQRLDELTTGDGRPLPVHLKTQIRRELDRLELLLDQIKEAEAERDALLTAPQPAAPAPAGRMLLEFKGIGAELAAVLWLEALFRHFDNRRQLASYAGLAPTPWQSGSVDHEQGVSKAGNPRLRTSLIQLAWLWLRHQPQSALTLWFKERVSGNGGHFKKSTIVALARKLLVALWKYVTAGVVIDGAVMKDA

SEQ ID NO: 430683 - protein, 368 aa, unidentified
MKKHNNNGRTARPLWDIAPGTLTVGLDVSDHDTHAAVIGANGELLAEERVRTRTPAMESWLRRLPASLVVLETGTHARWIAQLAERCGHEVIVANPRHLRLIYAGTNKSDRLDAIKLARVGRLDRGLLAEVELRKPEEHADLAVITARDTLVQVRTQLINLVRGTVKAAGARVDVCSSPAFTGKANQVLPAELRPALGPVLEQIDALNDQIQEYDERLEHLARTKYPETELLRQIGGVGFVTALTFRLTIGDARRFRRSREVGCYVGLRPKRDQSGAYDPQLGITKAGNGLLRRTLVNAAHYIVGPFGPDCDLRRWGLALAGRNIKAAKTRAVVAVARKLAVLLHRLWANGEVYEPLRNSRRRERAVA

SEQ ID NO: 430684 - protein, 367 aa, unidentified
MPSMPQPSPPDRPDASEEVILGIDTHKDVHAAVVISLLGVVLGRRCFPTTASGYETLLDWARGFGALRRAGVECTGSYGKALTRYLRAATGGIAVIEVNKPDRAARRRRGKTDTVDAEAAARAVLSGQASATAKTSDGNVEMLRLFKLAKSSAIKSRTQTINQLKSVLIGADPGLRDEFAALSTNALVRRCASLTVPATTDLDSATRYTLRLLAQRVQALSAEITELDGKLAHTVHRHAPQLLQPVGIGPDCAAELLIAAGDNPDRMAHEASFAALCGTSPVEASSGKTSRRRLNRGGNRHANSALYMIVVTRLRWCPRTRAYVQRRTAEGRSKREIIRCLKRYVAREVYQIMIGPQTSPRSLHDAA

SEQ ID NO: 430685 - protein, 466 aa, unidentified
MRDSPLSPGERACYIKGKEVVVRKRLYSFLKDRKLVKPTFKERSIAMKNGNTKKVRRLNEKTLLVTVDMGMIRHTGYCRCPNGMEVKPFDFANNRKGFEEFWFRVLQTQKSHNLQEIVVGFESTGAYAEPLLHFLRRKGIKLVQVNPLHTKRLKELQGNSPGKTDHKDPKVIADIIELGHALTVVIPEGTSAELRRLTSARERSMQRRTVLLNQLHVLIFILFPEFLQVLKNTGSKTSQYLLKHCPTPEGIIEKGVVALARILKTVSRGNMGNERAEALYKAAKETVGVKEGQKSIVFEITEIVFAIEATERFIATVEAEMKKYLKEIPYSLSILSIKGIGTITTAGLIGEIGDFGQFNTISEVMKQAGLDLYEISSGKHKGKKRISKRGRHLLRKILFFAAINTVRKGGMMHEHYQKYLQRGMLRMKALIAIARKLLRIIFAIVRDNSVFISDFSGTQYQLKEAA

SEQ ID NO: 430686 - protein, 362 aa, unidentified
MKNNKLDFIGQTIYLGLDVHKKNWAVTICFQGIILKTLSMVAKPEQMVKYLHKNYPNATYLSVYEAGFCGYWIDRKLRSLGVKNIIVNPADIPTKQKERRHKTDKVDSKKLARELSNNNLEGIYIPSEENESIRALSRLRRQITKDQTRLKCRIKSLLHYVGIELPESSELSHWSGKFIKYLSELEFSERSFGKDKAMKLTLERLLESLGQQRQILVNIIKNLRQVVKETDRVKKTVKLLQTVPGIGFITAVTLCAEIMDITRFRKFDHLSCYIGFSPATDSSGEKETVVGLSNQQNKYLRSMLIESAWTAVRKDPALTQVYGKLVMRMGKQKAIVRIAKKLLNRIMYVWKNDKEYICAVVS

SEQ ID NO: 430687 - protein, 376 aa, unidentified
MHTSPFEFHHTQPELDAFIKYILNSKQSATILMENTGHYHYPVLKAFQEAGLPVCMVNAYQIKKFGDMDLRKAKTDKKDAVRIARYALEKSYSLVPYTSMEQKYEDLRFLARQYNQRMLTLKTNKVFLLNLLDETMPGITNILPLTTRTPETSLSVLFINRFKSYDRIKKMGKSRFLDAFEKIARKSRNRQTKTYGLAIYEAALRNITTRGENEYTLAAQDQCLELVCESQKAADSIILKMKTLAETLPEYAVLRSMAGVVDRLGPLILAEIGDIRRFHSGKALNAYAGNDPPPYQSGTFESYNRHISKRGNAALRKYCFEVMQALKLTRPQNDPVYLFLLKKEQEGKPYNVAKMAGVNKFLRIYYARAMETLKQQ

SEQ ID NO: 430688 - protein, 318 aa, unidentified
MSEPVVVGLDVAKATVDVAVRPSGECWTVPNTDAGAAELVARLRPLAPALVACEATGGFERAMIAALAAAAFPVVVANPRQVRDFARATGQLAKTDRLDAGILALFAERVRPTPRPLPDEAAQLLDAVLTRRRQLLEMLTAEKNRLGFAPKPLHRGIQAHIRWLERQLDDVTKELAELIEASPVWRAKDDLLQSVPGVGPIVSSTLLGELPELGTLSHKQAAALAGVAPLARDSGTLRGKRMVWGGRASVRTALFMAVLCGRRWNPVLKVFYERLIAAGKPKKVALIACARKLLTILNAMVRNNTRWINPGAKIQYSC

SEQ ID NO: 430689 - protein, 371 aa, unidentified
MKEFSKYVGLDVHKATIAVAVAEGKGGEVRYHGEIENTQEALGKLVRQLRKGSATLSFCYEAGCCGYQIQRYLTEHGWDCLVAAPSLIPKKAGDRIKTDRRDSISLARLHRAGELTAAWVPDEAQEALRDLTRGREDVKQLERKAKQQLLALLLRHGRRYEGKSHWTQAHWRWLETLKFERSAQQILFQEYVDLVKAMTNRVQALNQIIKGEAAASVFWPVIEGLMALRGVDLLTAVRIMAEIGDLHRFSGAPQLMAYLGLVPSERSSGGSKKRGGITKTGNSHVRRVLVESAWTYRHPARKSTLLQRRAEHAPQAIQDIAWNAQKRLCGRYRLLEGKGKLRVQVCTAIARELVGFIWAIGHAVPAPAVSH

SEQ ID NO: 430690 - protein, 420 aa, unidentified
MLSSALDTSSFADVVGIDVGSQAFVYTVLQPDKRTMVKPTELANRDTGFVQVHASLSHLGVAAQRILIGLEATSRDSENLYQFLAAQGYVLCLLHPRQTHQFAQQRGLRARTDRLDAATIARVLLSGEARPGYVPDELIATYREVERLHSQLAEDSARYQNQIQALLVVLFPECVQVFANACRPTALALLKRYPSARALVAAGVEAVAATLHEVAPRRYGRQTAQQLVDLATQCSASGLATDARALSLQILCDQLQHTLANLAQVEHELDQLLDRDTGVTGLKSTPEFGRKTVAVLRAELGDVTRFQRVDQVVAYAGLDLEVKQSGQWKGQVKLSKPGSGRLRRVLYLAALRSICLPASAFGAYYQRLVARGLKARDALTAVMRKMLIVAYHLLRSNETYDPTKVCAMAGPPSHTPSSGS

SEQ ID NO: 430691 - protein, 340 aa, unidentified
MDTHRDTHVAAVLSPLGAVLGTEEFPATAAGYHGLLGWAGGLGTVRRAGVEGTGSFGAALSRYLLSEGVEVFEVNRPDRTDRRLRGKSDPLDAQNAARAVLSGRARARAKTGDGPVQIARMYKLAKGSAVKARTQAINQVKAVVFTADPDLREELAQLNTPDLLRTCARFADDSKDDEGEEETVLQATRATLCLLAHRIEQLTEQIQDVERRLTRLAERHAPQLLDVVGIGPVTAVTLLITMGDNPERLGSEASFAALCGVSPVERSSGVRQYRRLNRGGDRQANAALHRIVQTRLRCDPRTQEYYERRIKEGKTRREIVRCLKRYAAREVFHLVRPIQA

SEQ ID NO: 430692 - protein, 417 aa, unidentified
MIDDVQWFVGIDWATQSHRVCLLDVEGRHVNERDFAHCGAGLTELRDWLLEKTKAAPEQIAVAIETPHGPIVEMLLDHAFLVFAINPKQLDRFRDRFTVAGAKDDSRDARVLGGSLRTDRQAFRQLVVDDPLVIELREWSRIAEELKQERTRLANRVRQQLWRYYPQIIELTDDVADDWFLALWQQVPTPATAAKVSEKTITRILKDHGIRRLDAATVLQTLRQKPLFVAPGTTEAARAHIRTIAARLHLVNQQIKEAHRALDGLCAKLEARESPSGQNREQRDVTIIRSWPGIGIIVLATLLTEAAEPLRARDYHALRALAGTAPVTRRSGKQCFVIRRHACSGRLQTAIYHWSRVAIQHDAVARRRYDALRRRGHGHARALRSVGDRLLYALCTTLKRQTTYDPNCQAAKITASL

SEQ ID NO: 430693 - protein, 351 aa, unidentified
MTKVVPRPEPGQSVFVGLDLSRSTWSFNLRWGGRERRRWSTSGDVRHVEALATEYAACALHVAYEACGFGYEIAWLLRARGVAVTVVAPSTIERAPGLRVKTDRVDARLLAEHLDQGRLKGIAIPTRADHEARQLSRAYAQAAQDRKRAQSRLRALLQEHGRLGPLPRCGWTAYTRWLATQELAAPVRLCVDELLAARHESEQRARRLRLALLRVARDTPYAPLIAAVTQQPGIGRFTAIRLRLELGELPRFRTAGSFTHYLGLTPSEYSSGDNIQRGHLTKCGPAAVRAWLVQCAWASIREPQGDAALRATFLRLCPRAGKKRAIIAVTRRLALRLRARWLACVNAPAAA

SEQ ID NO: 430694 - protein, 280 aa, unidentified
MVSHSRSRSIPIATLGRPGAAGCGDLPIAEPLCIGADVSKEWIDLCDTQGRAKHVVNCADAIEAAFVGPWAEAAFVVCEATGGYERVLMQTAARLRLRLRRVHPNRARAFARATGRLAKTDPLDAAILARFAKFIFDEPAPSPPSAQSQELAAMVSRLNQLTDLRQSETCREKLAPGAAVKVTIRAMLKAIGEQIAQMQKAIDAFIAADATLAENAKLLRSCKCVGPKSVQAILGLLPEIGTLDRRKIAALVGVAPITHKSGSSINHASIGGGRKALRDC

SEQ ID NO: 430695 - protein, 376 aa, unidentified
MEHDSTVYVGLDVHKESITIAYAVGIGDVELLGRIGTAKGDIDRLCKRLHSKGRRVHVVYEAGPCGYGLYRQLVAEGFECMVCAPSLIPKKPGERIKTDRRDSIKLARALRAGDLSAVHVPGIEDEAFRDLARAWVSAKDDLKQARQRLKSFLLSHGVRYPGKADWGSSYRRWVSQHSFSNEWQQLAFEEHRRTLGDRMAQCERLEAALRDSVVNWRFYPAVLGLQAMRGVQFTTAVGMLAEVGDLSRFEHPRQLMAWLGVTPSEHSSGDKRRQGGITKTGNSYARKLLIEAAWSYRHQARVSENIGRRHPGLPKPIIDRAWDAQLRLCRRYRKLAARGKNANTAVVAVARELAGFIWDITRLSMSLAIPRTGLSA

SEQ ID NO: 430696 - protein, 392 aa, unidentified
MVVSVGIDVSKDKHDCFIVNSEGEVLADVFIIPNNMDGFHYLLQRIQDCTNTQDKIKVGLEATGHYSYNLLGFLLDNGLSTYVLNPLRTNLYRKSLSLRKTKTDRVDARTIASMLLSDAGLKPYTDTAYHYEELKSLTRYRFDKVKARSKLKNSISRLVCILFPELEKLVPSLHLASVYALLEEFPGAKQVAGAHLTRLKTLLETVSNGRYKRDMALEIRNAARNSIGSRMPAKSLELQHTIRLIRELNSEITEIEEQIQSIMAELHSPITTIPGLGFRMAAMILAEVGDFTRFESPDKLLAYAGMSPSIYQSGQLKNCYPHMEKRGSRYLRYALYNATKYVCQWDPTFSDYLAKKRAEGKHYNVALSHAAKKLVRLIFAMEKSRTTYRLAA

SEQ ID NO: 430697 - protein, 319 aa, unidentified
MTTNSVVVGVDVAKDRLDVAVRPSGEVWSEANDETGITTLVGRLRPLRPAPIVCEATGGFERAAIAALAAAGLPVVVANPRQVRDFARATGQLAKTDRLDAGILALFAERVRPTARPLPDAAAQLLDAVLTRRRQLLEMLVAEKNRLGFAPKPVHRGIQAHVRWLERQLDDVTKELAALIEASPVWRAKDDLLQSVPGVGPIVSYTLLGELPELGTLSHKQIAALVGVAPLARDSGTLRGKRLVWGGRASVRTALFMAALCGRRWNPALQRFYERLKAAGKPTKVALIACARKLLTILNAMVRDDKRWAVPAPSVQYSC

SEQ ID NO: 430698 - protein, 368 aa, unidentified
MNTVKFIGMDVHKKTITIAIAEEGRQNQPRVYGTIANDLGALNKFCRKMVSTSTQIHFAYEAGPCGYGIYRHLNEKGFDCIVAAPSMIPKKSGDRIKNDNRDAVMLARLHRAGDLTAVFVPDAQDEAMRDLSRARGDAVIVAKKAKQRLKAFLLRNSVVFNGRSQWSKAYFSWLADIAMPHPAQQIALQEYLDAVHESLNRVNRLTDQIRQMVADWRLAPMVSALQAARGVSLIVAVTVLAELGDLSRFKKPSQLMAYLGLIPSEHSSGSNIKKGGITKTGNGHARKALVEAAWAYRMQARVSRVLLKRQKDLPQQICQIAWKAQLRLCARFRRLAAKGIPKQKVVTAIARELSAFLWAIAKQVPSVV

SEQ ID NO: 430699 - protein, 344 aa, unidentified
MYFIGVDHHKQVSVMTVLDEDGQERKNGRVPNLRRDVNRFLEGYRPFTAVLEAGRSSYVMADLLRELGGEVKIANALQVKAIAHARIKTDKRDSRMLAHLLRANLIPEVYQRRDGNRRAQRVIRMRAYWVCKQTEVKNKIRALLAQQREEVRLEVEKRESGLFSSKGLEFLAGLPLESREKEILKDLLQGYEEIQAHIKKSDGLVNALYGELEEACRIDTVPGFAKTLSVLVAVEIADVKRFSRAADLHSYAGVIPSTYSSGERTYHGPITKQGSSWLRWAALEAVYPAIKKDLVLRTLYNRLARRKGPNVAKIAVARRLLTIIYRMLTEKRDYIPDIMKQSAA

SEQ ID NO: 430700 - protein, 355 aa, unidentified
MPSKADTAVARTIGIDTGKNTLHMIGLDEKGAIVLREKVSRTRIAARFVNLPPCLVGIEAGMASHHVARELVALGHEVKQVPPAYSKPFRQGHKNDFRDAHAVAEAVERPSTRCVPIKTEGQLDLQALHRVRSRLIGNRTAVINQIRGFLLEHGIPVRQGHRFLRQQLPQILATRTDVLSPRMIRIIADLMADWKYLDERIERVTDEIEALAHADEGCQQLITVPGIGPIISSAMVAAIGNGAAFCKGRDFAAWLGLVPKQMSTGDRTILGRITKRGNRYLRMLFVQGARAVLLRPASWAKHSFGSWLTAATRRLHRNVLAIALANKLARIAWTVLAQGRRYEARVEPRVEPAAA

SEQ ID NO: 430701 - protein, 341 aa, unidentified
MDDYIGLDVSMKESAVSIRRGGKRVWRGKCPSDPKLIADLIRKRAPSAKRVIFETGPLSVWFYHALCAEGLPAICIDARHAKAALDMAANKTDANDADGLAQLAEVGFYREVRVKGFDSMLTRTLVAARTRLVRICTELSNQIRGLMKTFGLIVPAGKGSTFETNVRGLLVDQDGLAAIVLPMLEAWRSLRLRGAELGRQLLAGARQSQACRILMSIPGVGAITATSFATAIEDPENFKRSRSVGAWLGLTTRRYQSGEVDYDGHISRRGDRHVRGLLFEAATVILTRSSAESGLRRWGLKLRERVGFKRAAVAVARKLAVIMHAMLKTGTFFDRSIGAAA

SEQ ID NO: 430702 - protein, 337 aa, unidentified
MKKNYQVFIGIDVSKCKLDYCVINDPSSTKHHYGIVANNEKGIKQLISSLKKKFISEQMIICLENTGVYSMPICYWAQLYEIDYWVVPALEIRRAKGISRGKNDKADSRDIASYCITHLHLVKLTTLPQNDFIELRLLLAEREKLVKAIGMFKMTKESQGFLPKEVLKVTFAHNKKTTEVLQKQLNKIEKILQALIDNNPTFKEQQKLLKTIPGVGHQTSVNLIAITYAFTAFKNWRKFACYCGVAPFEYKSGSSIKGRTRVSHLANKKIKALLNMAALTAKKNDLEMKAYYDKKVKEGKNKMLVLNSIRCKIISRAFAVVQRNTPFVNVNKFKTAA

SEQ ID NO: 430703 - protein, 487 aa, unidentified
MRSIFRKRNPDVEALFLEAGLASKVMCVAFDYAKKIHTAVVCDGTGRQLRGVFNVENNRQGLDFLLAVVSGLCRKHKIRREHVFFGGEDCGSYAFNFIHALVVRGFLVVGINTKQAKDERESSQASTDLIDTVGVAGMMIKMRGRTIGAATEQVHGLKRLRRQRGAILKAHSASSHRMHRIIDELFPGFLTCEDSGIDPFSRASLWLMKERFSPSDIHARRRPALTRKLREFGVQDADGAVEKLKALTETALPPAEAMVPALQRSLQEELGLYVLLESSLHNMDTDIAKLLAYTPGAMLTTIPGISLRWAPALYTELGDPLRRRNVDKMAALGGITPRLKQSGGPDKAAVVGHRGKACCTFLKHALLGGAVSISQYGHPEMREAYQSDKTMGRDARTRLAQTLLRVSLYIIDHQSFFLPPSLHQGGTPDQIRDYYAKTWRKVLIKWRDAGAIKQATAEGAPLRQWRDMAQELYGLELDLRSPQTGRK

SEQ ID NO: 430704 - protein, 405 aa, unidentified
MSTDVFCGLDWATRTHAVCIIDTAGRVLERFEIEHDRDGLAELLRRLARYGARVRIAIERPSGLIVDALVEAGHQVFPIHPNAVKASRPRYRSHGAKSDASDAYLLADLLRTDGHRWAPLLPQSDSIRALRALVRARDDLVATRLSLANQLRATLDAFWPGAASIFAAVDSPIGLAFLRRYPSPTSAARLSEAALQRFCRAQHYSGHRTPAELLARLRAAAQGHTSELTTAAMAEVVNSLVAVLKPLVEQLGTLTRRIERFVESLPDGQIIMSFPRAGHVCAAQILAELGDVRERFATLDQLASEAGVVPLTYQSGKSRCVAFRWACNHRLRRAITTLADNSRHANLWARGIYTAARARGCDHPHAVRILARAWLRVIWRAWTDRKPYNPELHLGALKASSDAGG

SEQ ID NO: 430705 - protein, 347 aa, unidentified
MNFYTHQHKHYCGIDLHTKAMYVCILDQGGTILVHKNLPTTPEAFLRVIAPYREDVVVGVECMFTWYWLADLCAKEGIAFVLGHALYMKAIHGGKAKNDKIDAHKIAVLLRGGMLPQAYVYPAEMRATRDLLRRRCHLVRKRAELLAHIQNTNSQYNLPELGKKLAYKANREGVEDHFPDPSVRKTIEVDVSLIDHYDKLLGEVELYITRSAKAHDVQTFSRLQSVPGIGQILALVILYEIQDIARFPRVQDFVSYCRLVKCAKESNGKRLGTSGKKIGNVHLRWAFAEAAVLFLRQSQPGKEYFAKLEHKHGKAKALTVLAHKLGRAVYYMLTREQAFDLNRFVTA

SEQ ID NO: 430706 - protein, 343 aa, unidentified
METIYYIGLDVHKKSIAYCIKTVGGKTMRQGVVSAGRNELRQWLADLPGPWMGAMEATLFTGWIYDFLKPHAVELKVAHPEMLKAITAAKKKNDRADAEKLADLLRVNLLPECTMMSEDLRELRRILRYRNLVVRTATKMKNKISGLLMEVGAPYNKQRLHGKKYFGELLERVEDVPESVKDLLRLSRGNLEMFSAVQKKLTKTLREQALIRERVERLQSIPGVGEIMALTWVLEVGDPGRFSNSRQAVSYCGLCSAQRESAGKEQRGPISKKRNKHLQTTLIEAAKLAPRWNPQLAMLHEKELQRGNRNRATLAVARMLAEFLLAVDRRGTPFSAEAPRRVA

SEQ ID NO: 430707 - protein, 430 aa, unidentified
MKSNTQNAKIEAITEKTLVLGIDVGSEMHYARAFDYRVIEYSKKPFKFSNTEAGFATFKEWVLDLKERHEKDKVVPGMEPTGHYWFNLGKFLQDNEMKPVLVNPHHVKKSKELDDNNPTKNDRKDPKVIAGLVREGRYMIPYLPEGVYADLRTASNIRFQLQAELTRIQNRISRWFNIYFPEYKTVYGKPDAKSGMLILKAAPLPENILTLGIDGVNQIWRDAKLRAVGKARAKTLIEAAEHSVGSKEGAVSARMEIRMLLEDYESRNTRLQEVMVLIEELVRKIPMAEKLLEIKGVGIRTVSGFLAEVGDISRFNNPKELQKLAGLALVENSSGKHKGETTISRRGRKRLRYLLFEVAMSLVSKNQEFRELHNYYTTRRLNPLKKVQSLMAIAAKLIRVFYAMLTKGVDYDPKKMVSDIKRPAVYLQAA

SEQ ID NO: 430708 - protein, 353 aa, unidentified
MKTFKGKNIYVGLDVHKASVEMKVFSDNLSLGNAVKLRPFTSEVIFKYLNKHYPEANYHCVYEAGFSGFWLQRELEGLGIDCRIVNPADVPTSHKDKVYKNDKVDCIKLGRGLRSSDLRGIYVLNEKQELDRCLVRQRGKVAKNIIRTKNQIKSHLNFIGVKIDWEEGTSERYWSKRMISQILANSEKRGDLALQGFLEMLEVLRKENLKGLRRIRQLSKTAEHQKVIESLIGIKGIGSLSAMIIKTELVDIGRFSSFDHLQSYVGLIPGQRSSSDSDVKGKITRRSNVRVRGVLIQCAWAAVRFDSEMSVYYEEQKERLRRSQLAIIKVAVKLLRKINYEWANTKLAHEDCR

SEQ ID NO: 430709 - protein, 335 aa, unidentified
MKKYRVIIGIDVSKNKLDVCFLLDPHSKQLSFLVVSNDRKGISKILSVFTKLEICIRDTLFCFENTGIYSLSLACYLEDLKTDYWEIPAIEIKRSKGISRGKNDKTDARDIAFYAYTHIHKLKLSKLPEKDILKLKLLISERGKLLKSIQIFEMTNEIKGFIQNDIYKEVFSVNRKTLKSLRKHLLEVEQKIQAIIKDNHEISTQKELIQSVTGVGPQTAIYLIITTKCFKSFSNWRKMACYAGIAPFPYQSGSSIRGKTKVNHLADKKLKSLLTMCALSAKKHDKEIALYYQRKVNEGKNPMLVLNSIKCKLLSRVFATINRGTPYVNTCKFAA

SEQ ID NO: 430710 - protein, 515 aa, unidentified
MEYCGIDLHAEYSQICILDEDGEVMETSRVRTSRPGLTRFFGRRERMKVVLEAGGSSPWVSRLLESLGHEVVVCSPRRVRLIAESKLKNDRVDAEVLARLVRLDPEFLRPIQHRSEAAQLLRANLKVRSAMVEARTKWINTVRGLLRSFGYRVSGKAPHTFVDRVDKMDLPDELRAVIEPLLEQLDLLTGEIIRRNEHLEEMVKDLPEVEHLRQIPGVGPVVATYFVLTIDDPHRFRNSRDVASFFGLRPSMRESASVTHFGRITKEGDPEMRRLLVQAAHGCFRTKADSELKRWALALAERKGKGKAAVALARKLAGELGIARQRGINGTCLLGELPYYLTQISYPLASLAVLETFSALVGLDLDLDELRALSAATQTEIDTYFEQIKSEVDDKEDGPDDLASLDEPDEEDEGEGVAGEDPGEDGTVVVHRAAGQGGVGTLLDGGEHGTGLPAVEARPVLVGGARGRLVHPSLADVGQPGMSGVGRALRHHEDAASQKPSQENDEEQAPDECHR

SEQ ID NO: 430711 - protein, 391 aa, unidentified
MIYIGIDVAKDKHDCFITNSDSKVLFKAFTIFNNLDGFNDLYQKIESVMDDVTKVKVGLEATGHYSYNLLGYLIDKGLPTYVINPLHTNLYRKSLSLRQTKTDKVDARTIASILMSDVNLKSYSDISYHNEELKSLTRYRFDKVKERAKLKTSVSRLVCILFPELEKLVPTLHMASVYALLSEFPSAKHVATAHLTRLTNLLSKSSKGRYGKDTAITFRDSARASIGSNMPAKSLELKHTIKLIQELDSEIDEIENEIKIIMDEINSPILSIPGINYRMGAMIIAEIGDFNRFDSPDKILAYAGFSPSTYQSGQLDGAYAHMEKRGSRYLRYALYNATKYVCHWDPTFAAYLAKKRAEGKHYNVAISHAVKKLVRVIYHLEKTKQQYIKAA

SEQ ID NO: 430712 - protein, 334 aa, unidentified
MYVGLDISKNSTVCVGKDKEGVLLFEGSFPTSQKGFDRILGRVGKDSKFVLEASTHGVFAYNYLKEMGADVKVANPGRIRMICDSEKKTDRNDAEILADLLRTNMLPESYLPNKNERELRDIIRQRKSIVNMRSSVKNKIRAIIARDGIKIMDKNVLGVKALVALTKVELQSPVQQDALERLIQIAGTLTATIDDYDGVIRERYQTLPYAKLLDTIPGIDCHSAVHIASAIGDIGRFPSDEELASYAGLAPQTYQSGDVRRDRGLRHGDKLLRSLIVQDAHAAVRCSRRFRKYYLKMVRKKGKQKAIISVSRKMIEIIYVMLTRGEPYNEDYGK

SEQ ID NO: 430713 - protein, 463 aa, unidentified
MTINKLWQSRKERKELARQLRSEDPGLEVVHPHAAGIDVGNGAHYVAVRPDRDSQPVRRFECFTADLHRLADWLQSCGVKTVALQSTGVYWIPLYDILEERGFEVYLVNARHTKNLPGRKSDVQESQWLLKLHTYGLLNNSFQPTSEIRILRTYWRQRAEHVRGMTTCIQRMQKSLTQMNLQLANVISDLSGVTGQHIVRAILKGERDPRKLADLSDPRIHASKEEIAKSLEGNWRQELLFVLQQEIDMYDVYQKRIAECDQELQKHLARFADTVPPQAKEEAKKKKGKQNKNNPHFHLADELQRITGVDLTRIDGIDVMVAQTLVSEVGLDMSRWKTEAHFASWLGLCPDNRISGDKVLSRGTRHVVNRAATSLRIAATTLLRSQTYLGAQYRRLRSKLGAPKAITAMAHRLARLVYRMLKYGQEYVDKGAEYYEQRNRQQQIEFLRKKATQLGLQVTAAHP

SEQ ID NO: 430714 - protein, 482 aa, unidentified
MKKKNIYVNQSQELLNLFEEAGNNEKIMCVPIDYAKKDHVVMFCNGYGHILRKPFSVKNSPEGIEYLTEQVTRSCSHRRIDPKHVFFGGEDVGSYAENFANTLRSGGWIVAGVNAHDAKEQRANIQASTDRLDLMGIASMLLNRRANCSPAQSGIYRNLRTLVRHRRNLVSMSTEEKNRIHTVVDRLFPGFLDEKKSGILPFSKSSLYLMENRFSPLQIRRRKRHTLIEVLHRYGTVKPENTAAKLQEYAVRVLNTPDEYITTLQLSLVQHVKHLRCLQDSINQLENEIAVWLAQTQGAFLTTVRGIGIVLAAGVSAEIGNPYEQKPLNNLVSYSGIIPKVKQTGGSEGKTYTGKVAKRCNRILKNYVVQSANHMGLHGPEDLMADYKRREADGQHADFGIGRRYLRMAMCLMRTSQIYMPQRLRNREVKPEERAGYYLMTWPYLRDKWNKAGALEIAFEKNHPLGQWRNMVQELYEIKLKL

SEQ ID NO: 430715 - protein, 429 aa, unidentified
MTSKSSITSPVVRVAIDVAKLMHQVLLELPSGKRRVMRVANTKTEIDRFVAMLRALELSCEIAFEPTGDYHRPLAYVLGQAGFHLCLVSSIAVARTREALYNSWDKNDPKDAQVILHLLKNGMTQRYLDPLVTGHQDLQEMANTYQQVSLRKVRLQHSLVTHHLPLYFPEAERYLHSSRAEWFTELLLFTPCPTAVRRYTKAAFVAAAREQIGGRKVDKARWLADFYETACGSVGLPVSEASETMRMFRVVLEEYRALCQRRKRLEAEVVTRLANQPDFVRLQTLPGIGPILAMIILAEARDLRRFGCARQFLKYCGFDLCTEQSGQFRGTTHLSKRGNARLRYAFWMAGTVAIRMQQNSFRRKFEDYIRPDPQNTDRRRKGYTAVAAKMARVAYAVVTTGIDYRRFPEATRPGGRIPSPGAVEAHATS

SEQ ID NO: 430716 - protein, 348 aa, unidentified
MGEVSTIGLDIAKNLFQIHGVDADGTVVIRKRICRARVLEFFADLPPCRVGMEACATAHQWARELRRLGHDARLMPPTYVKAYVKRGKNDAADAAAICEAVTRPSMRFVPIKDVEQQSVLMLHRVRDLLIRQRTQLINALRAHLAELGLVAAKGREGLHQLVAVVTECGNEQLPSNARFACQAIVTQLHAVQIEISGLDKRITQTHRANADSKRLDTIPGFGVILSTAVAATMADPKAFRTGRDFAAWIGLVPRQNSTGGKERLGSISKQGDRYLRRLLVVGATSVINCARARPHKYPWVIELLGRRPTKVVAVALANKMARIAWAVLAKGQPYRAPTRSSNATVLAA

SEQ ID NO: 430717 - protein, 337 aa, unidentified
MDYFAGLDISMDETHVCVLDREGVVVRESKTESTAQAIAGELAKAPSCHRIVFETGRMAPILFHGLNQLGLPVVCVESRQAYQALKSLATHKTDRNDARGLAHLARTGFFKPVHVKSLQAHALRSLIIARKKLVGQRVTLENQIRGLAVVFGIRLPRALAAAFIDQALKASEGIAGLSAAMRGLITARTAVMTAVAAIDADMRRMTRASAACRRLMTIPGVGQLTALAFVAAIDDPSRIRRSRDIGAYLGLVPRRHQSGEVDYTGGISKCGDRGVRTLLYEAANVMLTRYKGQLKLKDWAFAIARRSTMRKARVALARRLGIIMHAMLRDETEFVLA

SEQ ID NO: 430718 - protein, 338 aa, unidentified
MKKYSGIDLHSNNNVVVVIDEADRVVYRRRLPNELGKVLEALEPYREELAGVAVESTYNWYWLVDGLQAAGYKVHLANPAAMKRYDGLKHSGDDTDAVQLAHLLRLGILPTGYIYPVAERGLRDLGRRRLQLVRHRTMHVLAVENVQARQTGARMTGDRVKRLSAQEVQALGLPEDVTLGLQANVAVIGTLNEEIAKLEKHLLERLKPQPEYALLSTAPGIGRILGPIILLETGSIERFAAVGNYASYARCVDSARLSNGKKKGEGNVRNGNKYLAWAFVEAANMARRWCPEARRFHDRKRAKTNAIVATKALAHKLARACYHMLKRQQPFDMKRCFG

SEQ ID NO: 430719 - protein, 338 aa, unidentified
MVLYAGIDLHSTNNVVVVVDEKDKVVGRKRLANKLETVEAWLAPYRDELVGVVVESTYNWYWLVDGLAEQGYTMHLANTVAIQQYNGLKYRDDASDARWLAKLLHLGELPEGHIYPRKERAIRDLLRKRTQLVRQSTSNLLSIQNLFSRNTGTSISANRAKRLTPAAVDEVFEDPNVALAAKSNLKVLMCLQEQISLVEDAVHGQVRLRKPYRRLVTVPGIGKILALTIMLETGDIERFDRVGHYVSYGRLVGSSHWSNGKRKGSGNTKNGNAFLCWAFMEAANFAIRHDRAIRRFYDRKKARTKRIVALKAVAHKLGRACYHMIKEDMEFDVARAFV

SEQ ID NO: 430720 - protein, 342 aa, unidentified
MAHFAGLDVSVAETSICIVDEHGKIARERKVPTEPEEIIAALNGSGQACERIGLEAGPLSQWLYGELAEAGLPVICIETRHIRAVLAAQVNKTDRNDARGIAQMMRVGLFRPVHVKTPQSQQRRMLLTTRKLLQSKMLDLENDLRGTLKNFGFKVGKIGAASFEARVRELVDGYPTLRAMVIPVLVARAALREQFKVLHALLLRLVRHDQACRLLMTAPGVGPVAAMTFRATVDVPARFRKSKAVGAHFGLTPRKHQSGETDRTGRISKRGDRMVRTALFEAAQAVMIRLTRWCALKAWGMKIARKRGLRRAIVAVARRLGVILHRMWASGTAYRWGQPAAA

SEQ ID NO: 430721 - protein, 336 aa, unidentified
MALYCGIDLHANNHVVVVIDEEDHRVVEKRLPNSLQRTAALLAPFRRDLAGVVVESTFNWYWLVDGLMEQGYPLPLANTAAIKQYEGLKHTEDRYDAFHLAHLLRLGILPTGYIYPKERRGVRDLMRRRSGLVRIAARQLIGVQSQIWRDTGVRVSANEIRRADFALPLTEPLSLLPATAALRLYHGLRAEIDTLEERALAAVSLTPRFEVLTTMTGIGPILGLTVMLETGDIRRFPTVGDYASYCRCVKSERLSNGKRKGEGNRKCGNKYLSWAFSEAAHMCVRYEPAAKRFYERKRARTNGIVAIRASAHKLCRAAYYMLREQQPFDANRLFVH

SEQ ID NO: 430722 - protein, 407 aa, unidentified
MDQQQPGHGRVWVGIDVGKHAHHAAAVTADGRLVWSRRVANDQAAIAELIGQATAAAGVRWAVDSTCSSATLLLALLVAADQPVVYVPGRVVNRMAGAFAGEAKTDPKDALVIAQTTRMRQDVLAARPKDELVAELAVLVGHRTDLMADWVRTVTRLRGLLTASFPGLEGCFDFTSRSALVLVRRYQTPEALRALGHRRLVAWLRRHVPSQLSDAQVAQMAEVALAAAAAQTIRLPAQDLTARLIAQLANDLLALDRRIKELDKAITQRVGSHPQARIICSLPGMGPLLAAELLVAVGDLRSFPDAGHLAAYAGLAPVPRDSGRRTNNLHPPKRYHRSLRRVFYLSALSSLSVPGPNRDYDRRKRAQGRRHQQALIALARRRVDVLWALLRDNRCFELSAPIKTTMA

SEQ ID NO: 430723 - protein, 344 aa, unidentified
MDHYAGIDVSLEYSSVCVVDASGKVVREAKVVSEPEALIGWFGSLGFGLARIGLEAGPLSQWLYAAMKQAGLAVELLETRHVSDAFKTMPVKSDRNDARKIAQLMRLGWFRPVHCKSITAQEIRAMLTARKLVQSKLLDLENSLRGILRGFGLKVGKTTRTKFAGRIEELVKGHPNLQTIGQALLRARAVLLAEFNGFEKRVRAMSRLHDKARLLMSTPAVGPIVSLTFACAIDDPSRFTSSKQAGPHFGLTPKKYQSGETDYTGRISKHGDASVREALYEAAHLMLTKPIKGCSELKSWAMRIARRAGTNKAKVALARKLAVIMLRMLKDNVPFNPAAKPATA

SEQ ID NO: 430724 - protein, 341 aa, unidentified
MQDVTLIGIDLGKHTFHLHAQDRAGHAVWRKKCNRSQLMALLANTPACTVVMEACAGAHQMARDLGRFGHTIKLISPQFVRPFVKTNKNDFIDAEAICEAASRPSMRFVTPKTEAQQCLGAWHRVRESLVRDRVQVTNQIHAFLLEFGISLPKGPAVIKRLPSVLAEQRLPARLIVLLERLRDQYRALDAQIAEIEQDLAAQLQEDESGRRLLSVPRIGPITASLLASELGDGKQYGGARDFAASLGLVPRQHSTGGRAQLMGISKRGDKNLRRLLVQCARVYMQHVDRQTGRLADWVRDLLQRRHSNVVACALANKFARIVWAMTAKRVDFERLGEALPA

SEQ ID NO: 430725 - protein, 417 aa, unidentified
MNNYSKFTKIGERTLIVGIDIGKENHYGYMRTISIEDFKTFTFRNTLDGFETLLKRITDFRKKHQVENVIVAFESTSNYWIPFASYMMNQVDYTVLQVNSKHTKRFKDITDNTSNKTDHKDPKVIAQIVMIGSGLHVNLPTGPKADLRELTRMRKTIIEQRTRIINQLESTLAVYFPELGRVFKDLSCKTCLFLLKETPTPDAILKIPEEILIKELRRISNGRVDQNKSHLLISLSQCSIGVKYGVEAYLINLKFLLAQLELYGYQIKETEKRITGILKTLKEYNILKSINGLGEITMATIVSEVIDFNNFSTDRELLKYAGLNLVENSSGKHQGNRKISKIGNKFFRTSIFFATLRLISKRGIYHELYQTHLKKGMSKKKAVIAISRKLIRTIHAMIRKNEKFNISHEMKQYKNVA

SEQ ID NO: 430726 - protein, 346 aa, unidentified
MMIIGCDFHPSWQQVSWLDTETGETGEQKLVHASGDAKEFYQQLAAPVLIGMEATGNSQWFIELVEDVGHEIWIGDAAQIRASYVRKQKTDKRDAAHILKLVVEGRFPRLWAPDREQRDLRQLVLHRHKLVLIRSRVKNELQHLSLNKGMQKKRALWSQAGQKLLRELPLKPWAACRREDLLGLLVMLNQQIGKLDAAVQHAAEENPQAKLLMTQPGVGPNTALAYVLTIGDVSRFRRGKQVASYLGLIPREESSGGRQKLGAITKQGNRMLRSLLVEAAQVAVQHDPGLRRQYLHRCHQKPKAVAKVAVARKLAVRLYWMLRSQVGYPEIVRIESSSGLALVGAS

SEQ ID NO: 430727 - protein, 402 aa, unidentified
MRFIGMDVHRDFCDVAIYEDGKVRLAGRVESSPEQLGLFAQSLCDEDHVALETTGNALSIARILEGHVGGVLVADTRNVRAMTHAKVKNDRVDACMLAKLLAAGMLPGTWLCDEPTRVLRRRVSRRNQLVRGRTRARKQIHAVLIRNLGGRGPGSDAFSKKGREWLAGLELPTDERETLEGCLREADFLSGEVALVDREIACYAMGSAEIRRLMTIPGVDVTTAATLMATIGDIRRFPSPRHLVGYVGLDPRSRQSGASPIYTGHISKQGSSSARHVLCEAAHATMRAPGPLRAFGQRVRSRRGSKIATVAVARKLLCLTWQLLTKEQDYLYERPALTFRKLRKLELAAGAPKRSNPRGRDGKGTPDNPAQWATDRAQALQTEDHYRTAVANWQPQPQASPS

SEQ ID NO: 430728 - protein, 339 aa, unidentified
MELYVGIDLHSNNSVLVILDETDKVVYERRHPNELPVILAQLAPYKEGIQAVAVESTYNWYWLVDGLMEAGYNVKLVNTAAVKVYEGMKYTGDEHDARHLAHLLRLGILPCGHIHPKEDRAVRDLLRKRGQLVRYRTMQILSIQATVSRNVGHGLSTAEVRKLDDVEIDRLCGGEAPRALAIKSNLVTLRCLDAQIAEVEALALQKAKLKPEFKKLLTVDGIWEILGMTIMYEAGDMKRFEKVGQFASYARCVGSSRWSNGKKKGEGNRKNGNKYLAWAFIEAAHYAVRYNERIRKFYQRKKAKTNNIVAAKAVAHKLARACYHVLKEQAPFDEARAFA

SEQ ID NO: 430729 - protein, 393 aa, unidentified
MTEPSDYESVQVFIGVDVGKDTHHAVAINRSGKRLFDKALPNDENKLRSLISDLKQHGQILLVVDQPATIGALPVAVARSEGVLVGYLPGLAMRRIADLHAGEAKTDSRDAAIIAEAVRTLPHALRTLKLADEQIAELSMLCGFDDDLAAQTTQASNRIRGLLTQIHPALERVLGPRLDHPAVLDLLQRYPSPEKLASLGEKKLAAQLCKLAPRLGKRLAADIAQALAEQTVVVPGTNAAAVVLPRLALQLITLSKQRDEVALEVEQRVLAHPLYPVLTSMPGVGVRTAARLLTEVASAAHLAAYAGLAPVTRRSCSSIRGEHPSRRGNKALKRALFLSAFAALRDPISRAYYTRKMSQGKRHNQALIALARRRCDVLFAMMRDGTFYTPQAS

SEQ ID NO: 430730 - protein, 417 aa, unidentified
MAMKIVRFNCCGMDVHKNLVVATIGITDSKTNITEYFQRSFSTLNSDLYRLKDWLKSHHCSDVCMESTGKYWIPIFNILEDEINVRLTHPKYVKAIKGKKSDKKDSKWICDLFKHDLIKFSFIPPREIRELREIARYRYKLVCMRSSERNRYQNCMTVSNIGLASVISDPFGKTASNIMKEVMKSNVIDDDKILKLVHRNCKNKDKILDSLHGYHIESDQRFKMEKSLDHMEYLDQLIDSCEVELIKRAYPLRRSFQHITQIKGISALSAILIISEIGIDMSQFESDKQLVSWAGLSPANNESAGKKKSVRISKAGQYLKPLLVQCALSAIKDKASYFGRKYSNIKKRRGHKKAIIAIARMMLVSIYHMILTGEEFQPTDHESLMSPKSNTDQSLTVEKALNFLKRSGIDISSILVN

SEQ ID NO: 430731 - protein, 449 aa, unidentified
MEKSRKKTNVKKITQFEIIRPQVAGIDVSDNADMMVAYPLNEKEIAVEAFGCYTCDLRRISSRLKEYKIESIAMEATGVYWIPLFLLLQEDGFEVYLVNAKHVKNVTGRKDDEEDAEWIQKLHRCGLLSASFQPDNMTRSLRSMVRHRSTLVQTRSSYLNRMQKALEQMNLKLHTVISDIDGKTGLAIIHAIFEGERNAEKLADLCHPRIKASRADVVKSLEGFWSETHLFELKQCYKAFQFHNDLIADCDREIEKQLLEMIAAQNHGVIPDIEKLKRKRNYKNQVHVDLTSYLKEINGVNMTEITSISEISALTILSEVGTDMSKWKTEKQFTSWLGLAPNTKISGGKVISSRVPKKKHYAGQAFRMAAMSLRSNKGPLGDFFRRIRSYAGAAKAIVATARKLAEIYYLMMKSKQAFNPAELEKSQKKYKDNQIRYLERKIDKLKNSA

SEQ ID NO: 430732 - protein, 377 aa, unidentified
MSETDKLYVGMDVHKDSVMVAVLPETAPEPTLVKRLPNDVGKLRRFFDRVARDGEVRACYEASGAGYVLERALTEWGHGCEVVAPSLIPKRPGERRKHDRRDATDLARLYRAGELVTIRIPTAEEERVRDLVRCRETFQREILKSRHYVLKFLARRGFVYREGANWTGKHFTWLRRLLSGDALEAEDRTVFAEYLSLLDYKLQRREELDRRIEELALEPANREAVGRLCAFKGIRTHAAMVLVTEIGDFRRFERPGQLMAYLGLVPSEHSSGERQRLGAITKAGNSRCRHVLVQAAWSYRHPPRLGGPLRRRQEGQPPEVIGHSWKAQHRLHKRFRQLEYRKNSRIAAVAVARELAGFVWAVMQDLEESRERAALAA

SEQ ID NO: 430733 - protein, 402 aa, unidentified
MDILIERACGMDVHKDSITACVMTPEGKEIQTFSTKTVFLLQLIDWIKKHGCTLVAMESTGVFWKPIVNLLEAEDIEFLVVNAQHMKALPGRKTDVKDAEWIAQLLRHGLLKASFIPNRNQRELRELVRYRRSIIEERARQHNRIQKVLEGANIKLGSVVTDIMGVSSKDMLHAIADGEEDPEKLASFARRTLKKKKEELELALRGYVNPHQRMMLKTILTHIDFLTEQIAMLDQEVAQRVSSDLEDVERLDSIPGIATRMAEQILAEIGTNIKNQFPSAAHLCSWAALVPGHNESAGKRKSAKGKKGNKYLKSALTEAAHSVGASKNYLGAMYRRTLARKGRKRAATVVAHAMLRIAYYLLTRKEMYVDLGEDYFDKQKQGAIVRNSVRRLETLGYTVTIS

SEQ ID NO: 430734 - protein, 327 aa, unidentified
MKKNPAPVYVGMDVAKAALQVHLNGHQFEFGNDSQGHAQLCKKLAKLTLPHVICEATGGYERPVVDACHKANILVSVLNPAHTLAASQAQGKRAKSDPCDAAALTDYGQRFQPEPTPAVPPAVRQITELAIWLKQLIDNRAVAKTQAEHQVNAFVGQRHAELLAHYQSQIETVEQEIKKMVQAQRPFQQRVDCLTQIDGVGFRTALLTLVFLPELGSMNRGGIAALAGLAPWTRESGTMKGKRCIGGGRAQVRPVLYMAALSASRCNPVLAPLYQGLKKRGKPGKVALTAVMRRLLIHMNSELKKLAAKPDLEKPGNSNKTKKSLAK

SEQ ID NO: 430735 - protein, 355 aa, unidentified
MNDAKYIGLDVHQATISVAVLDCAGKLVMEAILETKAETILQFIHGLRGSLHATLEEGTCAAWLHDLLKPHVTQVLVCDPRKNALIKAGNKSDRIDARKLADLLYLNKLNPVYHGETGIRTLKESSRSYLALTRDTTRVMNRLKALYRGWAIPCAGQRVYAPRYRSEWLAKITEVGVRRRAEIYYQQLDALRSLREQVRRELLAEGRKHGAMKLLRQIPSIGPIRAVLLIALMQTPHRFRTKRQLWAYCGLALQTSTSGEYRIVKGQLKRSKEFLAIRGLNTNHNHDLKNIFKGAATRAAAVPGPFQEFHAGLVARGMKPTMARLTLARKIAAIALIVWKKGVHFDAGHLKQQAA

SEQ ID NO: 430736 - protein, 373 aa, unidentified
MKRLAATNVVAQGTHKQTNAVKSRKWRPAVEHIGLDVHKRESQLCIVTEQGEVLEQRIRTERGRMAEVLGGRTGAKILLEASTESEWVARYLEQMGHEVVVADPNFAPMYGGRNRRVKTDKRDARALADACITGTYRKAHRTTESRRQLKAQLAVRDALVRERAKHIVLIGALVRQQGLRVATGSADTFLARLTKVGLSEEVRKVVAPLVAVIRTLNEQIQVVDAKLEKLASDDEQVARLCTMPSVGPVTAVAFVANVDDPKRFAGAHQLEAYLGLVPSEMSSGEKQRRGRITKVGSRRMRALLVQVAVSTMRLRKATTAGLWEWASRIEVRRGRKVAAVALARKVAGILYAMMRDGSHFKPCVSREAMTNAA

SEQ ID NO: 430737 - protein, 412 aa, unidentified
MADIVAYIGLDWGDERHSVHLQTPQGRIEHIELEQKPDVLHAWVAQLKERFAGGQVAIALEQRKGAVVNALMLYDFLVLYPINPKALARYREAFRSSGAKDDPTDSQLLLDLVVRHHDQLRAWLPDTMEARKLQLLCEQRRKLVNQRVALTNRLTSLLKQYFPQALEWVGDLASLQGCDFLAQWPHLDALQAARPSAVRKFYQTHNCRTTSVIEARLAAIKIAQPLTRDPAIVEPLSLAVQTYATQLRALLRAVQAFDDHIAQVFAQHVDHDLFASFPGAGDVCAPRLATAFGTDRSRWASASELQSYSGIGPVTERSGKTLWVHHRLACPKFVKQTFHEFADQSIRFSRWARAYYDQQRGRGNDHHAALRALAYKWIRILFRCWKDRRSYDEQRYVEALRRRGSPLVKHFA

SEQ ID NO: 430738 - protein, 320 aa, unidentified
MMAQDDLVVVGIDVAKDKVDACIRRFKLRQTFPNTLQGRRKLTVWLRKCQVGKAVMEASGGYERKWRDVLHSAGIAVRIVDPRRVRNFALSAGRLAKNDPIDAEMIAWFAETFSQAPGQVPDAAREDLAALAKARKALVDVKIRLQAQNEHAAPEPARKAHARILKSLAAEIDKLEAAISAKVKATPEFAERAEIIQSVPGLAQTTSAILIAGMPELGQVSDEVAAALIGLAPYDDDSGKQRGERHIKGGRRWVRNAIYMPCLGAATQNNPVLKAFYQRLIAKGKEPKVALVACMRKLIIILNTMLARRQKWNPGCHALA

SEQ ID NO: 430739 - protein, 346 aa, unidentified
MLYAGLDLSRKKVDVHVLDEAGKTVAVTAVAPEGWALRDLVRRFAGTGEEVTAVIESMNGARFVHDTLELAGWDVLIADAARARALAPLAAKTDRIDAWVLAELGRRDLVPAIWLPDIDTRSAREVCRFRQHLVGHRTALKNRIHATLIAHGHPVAMRDLFGKAGRAYLAELAIPEPWNTTLAQSLELIGETEERIKACERELLARAVHDPYVPLLVTVPGIGLILGSVIAAELGDIGRFASAKKFVGYTGLCPFVRQSGGRDDRGPLAKNGPRLLRWALIEVTTHACSHPLYRDHYQRTRKRLGKRRGPSVARVELARTLATAIWYMLSKNKPFAPAGPVRALVA

SEQ ID NO: 430740 - protein, 449 aa, unidentified
MSKPILAVGIDPAKRVHRAIGVLFPDEVVFDCELPNALDAIQSLDLRLAELAATHAAELVYGLEDHRRYGRLLCEVLTERGRDVRVVNPLWTNRQRAFYGQDKDDAIDGRSIAAVVLRRRDQLPLANDFGPVAQAIREAERAIEDLGKKRTELVNRLHLQLNDVYTSAYETYFGKLKSPIALRFFRRFPIPQDLGGQDAVQLSKVILGLANGRVGPHKGRDREKFLQAKAEGILKTSASLRQTPRTPALELKAELIRQLCDELLVNHDRVTRLERMLRKQLLPATGQTITTMPGIGTILAAAIIGETASVARFRSRAAYAVYNGTAPARHSTGGRERHKARRDCNHRLKRAFWLAARAAALHDPLAKAYFNQCKSRGLNYNECIKRIAQRMSDIVYSLLKSGRDYDRTIVEQAIQKRQEQVANADDSRVKEALPIPDQKRLSRRSHGGN

SEQ ID NO: 430741 - protein, 458 aa, unidentified
MGRNKSRNKDRGTISVVHPNAAAIDVGATMHTAAVNADRAPEPVRSFGTFTTDLHRLIDWFAECGVDTVVMESTSVYWIPIFELLDARGFAVFLVNARDAKHVPGRKTDVSDAQWLQRLHSFGLLRASFRPKGQIAELRAYLRQRERLLEYGASHIQHMQKALTEMNVQLHHVVTDITGVTGLRIIRAILAGERDPAVLAGMRDRRCHATVETIEKALAGNYRVEHLFALEQALALYDTYQQKAFACDARIEAVLKELSVRRGREEGQLPAARQNRSSQQNSLLFDVRAALFALLGKDLTQINGLGPYLALKLIAECGDDLSAWPSAKHFSSWLCLAPSNKISGGKVLSARTRRSGSRAAALLRLAARTVGRTDTALGAFYRRLAARIGKAKAVTATARKIAVLFYNAVQHGMNYVDPGASSYETRYRARVIANLHRRAKAFGFVLQPVDPLPGVAVS

SEQ ID NO: 430742 - protein, 321 aa, unidentified
MTTVLGIDIAKATYAVCWRGPDGKRRHKTFPNTPAGHDGLRQWILRQTPAPLHACLEATGTYGEAVATVLADAGHRVSIVNPAAVKAFAQSQLRRTKTDEVDADVLADFCLAHQPPAWTPWPPAVRALQGLVRRHEAVQDMLTQERNRAQAGELVAPVADSLARHIAMLEQELADLERQIRDHIRQDPTLRGQRDLLLTIPGLGETTIARLLAECRAITDFESARAYAAFAGLVPRESRSGTLRGRPRLSKLGTARLRHALYFPALSAIRYNPIIRAFSARLRTAHKPKMVVVGAAMRKLLHIVYGVLKHQRPFDPTIAGA

SEQ ID NO: 430743 - protein, 439 aa, unidentified
MRSIGLDVHKRFAEIAILDGKDPPIGRRIGTTTTELRAFARTLRPDDQLVLEATMNTWAIADLLRESGARVVISNPLRTRAIAEAKVKTDKVDALTLAQLLAADFVPEVWTPDPETRRLRREVAGRAALVRQRTQVRNRIHAVLHRCLVDSPVTDLFGTAGQAWLKEVALPEDERAQVDAALRVHEAIEAEIALLEQRLAKVALADERVERLMTIPGIGAVSALALVAIIGEVRRFRRPGKLISYLGLDPRVHQSGEREAWIGHISRAGHAHARGLLVEAAHKAVGAPGPLRAFFGRIERRRGFAIALVAVARKLAVLAWYILSTGERYRYERATVVRDKRRRLLRIAGQTIERRRRAAAGEPSLVALREQELAELDEVEAAYKAEVAARTARDAAATKGEATVRPLKGRDARRSLRPQRSALLTGSTASEKGEYASGA

SEQ ID NO: 430744 - protein, 394 aa, unidentified
MKLVGIDVGKNSHHFCVMDKETGEFNVAPSSFSNNKEGFDFLINSLKPYSKKSILIGMEDTGHYHVALLKFLLSNGYTVALINPKTTDLTRKMEGGITKNDKLDTITICDVLDTPERKKQYRITKVDRFDLYEQRQLTRHHHNLKEELNVYCNRLQKSIDLVFPEFNTLFSSKYGVVYMNLLKTFGNAEIIASTDIRTIRKCFEIKGRGNRISLTPEKLKECAKNSIGISSEVETIQIKHLVSQIMLIKEQIAEIDKKIEEFSIKNNSPILSIPGISHFSGTSILSELGDIGNYSKPSQIIKFAGVAPYHYESSQYNAQHTGITKKGSKYLRKTLYQIILTVINNNPLFKKYYLLKISQGKGHRCAQGHCIRKLLRIIYHLLETGQSFDPALLR

SEQ ID NO: 430745 - protein, 417 aa, unidentified
MDILVERCAALDVHKDTVVACVRVPGRDRDGGRQQELGTFKATTAGLLTLADWLESYGVTLVGMESTGCYWKPVWQVLEDRFECWLLNARHARNLPGRKTDMADAAWLCQLVEHGMVRPSFVPPRPIRELRDLTRYRKAQIQERTREVQRLDKVLQDAGIKLSSVASKTLGVSVRLMLDAMIQGTHDPEVLAELAKGRLRAKLPALREALAGRFRSQHHGLLVGQILAHIDYLDETIAFLSARIEQVIDPFSAKVALLRTIPGVDQRTAEVLLAEIGADMAQFPSAAHLASWAGMCPGNDESAGKRGSGRTRKGSKWLRGALVEAAKAAARAKGSYFSAQYHRLKGRRGPGRATIAVGHSILVTAYHMLDRGVAYQDLGEDYFQQRQQEAADRYAKRLVRQLEQLGHKVTLEPADAA

SEQ ID NO: 430746 - protein, 429 aa, unidentified
MHYTQNQKLEQVTEKTLVIGVDVGSENHHGRVFNYRGIEYSPKAFKFGNNAKGFEAFQGWMQGFVRMNGAKKVIVGFEPTGHYWYNFADFLKAQGIMFVMVAPQHVKHSKEMDDNTQRKDDHKDPRVIAKLVTEGRYIIPYVPEGVYAELRTAYVRYCELTETKVRLENRITRWFDIYFPEYREAYKNPGAKTGMMVLRVAPLPADVLKLGADGINQLWRGEKVRAAGIKRAKTLVAAAKRSTGREGGDAVRRDLWQMLEEYELVMRHLAEMQVMLEELVARIDGAERLLRIKGVGFSTVAGFFAEVGDLSRFTDPKQIQKLAGLSVVTPDSSGKHNGQSEISRRGRKRLRMILFRAAMSMVKNNREMKMLHKYYTTREQNPLKKMQSLMAIAGKIIRVFYGIMKNGTEYDPVKLLADIRRPGTDKNVA

SEQ ID NO: 430747 - protein, 355 aa, unidentified
MSQEKYIGMDVHQATISVAVMDAQGKLIMECLLETKAATIVEFIQGLQGTLSLTFEEGTSAAWLHDLLKPHVSRLVVCDPRKAALLKDGNKSDRIDARKLAELLRTNQLKPVYHGEHGVRTLKELGRSYLTITKDVTRVMNRIKALYRSWAIPCSGTTVYAPRHHAEWLAKIVEPGVRVRAERLYQQLDSLQPVRLQARRELLLESHKHPAVKLLRQIPSIGPIRAALLVALLQTPHRFRTKRQLWAYSGFAVETHDSGEYRCVRGKLQRNRERITVRGLNDNHNKDVKNLFKSAAISASTRPGPLHDFYAARIAKGIRPTMARLTLARKIAAIALTMWKKGVAFDPQQLHRQAA

SEQ ID NO: 430748 - protein, 354 aa, unidentified
MPRQSTDTVAVLGIDIGKNTFHLVGLNERGAIILRRKLSRGQLEAKLANLPPCLIGMEACVGAHHLSRRLKALGHDARLMPARYVRAYLKGNKNDFRDAEAIAEAVQRPTMRFVATKTAEQLDLQALHRVRSRLVGERTAIANEIRAFLLDRGIAVAKGLNRLRAALPGILGTRTEVLSPRLLHIIEDLVADWRHLDQRIDNVSLQIEALAKQDAGCERLMTVPGVGPIISSATVAAIGSGDVFAKGRDFSAWLGLVPKQISTGDRTILGKISKRGNKYLRTLFVQAARVVLLWPRSWERYGLKPWIEAAARRLHHNVLAIALANKLARIAWSVLHHGRNFEVRKMSEPVSRSA

SEQ ID NO: 430749 - protein, 332 aa, unidentified
MSRIQGKTFTDSIRVYAGIDVCKASLDLHVLEADTVGNGGLSHRFANTEAGIRSMISRLDARLAGQPCRVAIEPTGRFHLAAWKALDAAGHDVVVLNPFRARRFAEAMGLLAKTDAIDAYALARAAACLELASSSPPSETHLRIKELQAARSSITRTLAATKNRRGAACDALVKRLLSEQVALTEAHITELDAELARLIEADTALARRRDILASVPGLGPVCVTALIAELPELGTASDKQIAALLGVAPFNRDSGQWRGQRKIKGGRAHLRRTLYMAAVTAARFNPPLSAFCKRLRAAGKPAKVALTATLRKLIILANALIRDDRLWTPQKP

SEQ ID NO: 430750 - protein, 406 aa, unidentified
MNRLFAGLDWAARNHAVCIIDETGAVREPFEVPHDAAGLRELLARLRRYAPTPAQLPIAIERPSGLLVDALVEAGYPVVPIHPNIVKATRPRYRSHGAKSDASDAYLLADLLRTDGARFHPLQAQSDAIRALRALVRGRDDLVATRVQLANQLRSLLESFWPGAAAVFAEIDSPIALAFVQRYPTPASAARCGEKRLAAFLAQHSYCGRRSAAALLERLHAAPAGHADELEADAKRMLVQALTTTLAALVEQITQLTSRIEHAVAELPDGQLIMSLPRAGRVCAAQILAELGDVRDRYPSDAQLAAEAGVAPLTYQSGKSRSVTFRWACNHRLRRALTCFADNSRHASQWAASLYSTARARGCDHPHAIRILARAWTRVLWRMWTDRCTYDPARHRAALPFNTARG

SEQ ID NO: 430751 - protein, 324 aa, unidentified
MNLPCLGIDIAKVKFNVCLLQLTGKLKHKVFSNTATGFEQLQQWLKKHEVQLVHACLEATGTYGEALSLYLHQHGHTVSVMNPAAIKAFAASRLSRTKTDRVDAELIARFCLAHQPPAWIPPAPEVRELQALVRRLESLLEMRVAEENRLAAGVTVAAVRSSVEELLTHLKDQITRTQKLIRKHIDKHPGLKQQSELLNSIPGIADTTAALLLAEVPNIKQYRSARQVAAFAGLVPRERQSGSSVKGRVRLSKIGNARLRKALYFPAITALRCSPFFRHWAEGLRQRGKSKMSVIGAVMRKLIHIAYGVLKSGRPFDPELAKSA

SEQ ID NO: 430752 - protein, 410 aa, unidentified
MEVLYPHCAGLDVHKETVVACVRHMVGGTVKREVRTFDTITTGLLALADWLASEGCTDVVMEATGVYWKPVWHILSDGDFRLVLANAKHVKNVPGRKTDVNDATWLADLLAHGLIRGSFVPDAETQVLRNLLRTRKQLVRERSSHIQRLQKTLEDANIKLDSVVTDIIGMTGRAMLQALIAGETDPSRLAALAHPRIKAPPAQLREALRGRVMKHHRFLLRLHLQQIDAIDTAVTEIDREVDERIEPFRITVELLTTIPGISELSARIVAAEIGNDMSRFATAAHLISWAGLCPKNDESAGKRRSTRMRKGAPWLKTALIQCSWAAARKKGSYIEAQFHRIRSRRGAKKAIGAVAASILTAIYHMLKNGTCYQDLGPDHFDRRAKTTKTKHLVARLQNLGYAVQITPLAA

SEQ ID NO: 430753 - protein, 351 aa, unidentified
MIWVGVDAHKRLHQALALSDHGGALGERTIANTPEAWAELLEWAKGLGPERIWAVEGAWYLGRGLAQHLARSGERVHEVSGRWTARRRRGMRRPGKSDRLDARAVVQLLREEADSLPRVYAEEDPIATVQLWSRLQAELTEDMTRLVNRLHNLLLFCDPGYETKLPRLTTTAGLEAVRAYVAPGQGELVRERERAVRQLAEQLTLLSEQDRELRRKLERASRARFSPLTQIEGVGPIIACAIVAEVGRPRPGFGEERFAALGGVAPLEASSAGAVRHRLSRLGNRRLNMVLHQIVLTQGRIYPPARAYLDRRRTEGRSDREARRALKRHVARRVFHALQQCFRPTLEAVAA

SEQ ID NO: 430754 - protein, 345 aa, unidentified
MERYIGIDAHRDSCTVTVLNARGKKTQQHVLPTEGGALVECVRSLTGSLHLCVEEGEWSEWLVEILSPWVGQVVVSQTPWRPGPKSDATDARDLAERLRTGRLRTPIYKAPRQWARLREAVRLESKLTQDVVRTKQRLRSLYRRRGLTCSNDAIYAPRHRADWIRKLPQSLVPSAEILGQELDVLVEFQQTAERHMLTAARKFPIRRILETAPGIGPKRAARLLAIVVTPHRFRSKRLFWSYCGLAVVTKTSSDWVAQAGGRWVRAPVIQTRGLNRACNRQLKDLFKGAANSALRGKPPNALRDAYERMLEAGTKPNLARLTIARKIAALVLAMWKSESEYRIMS

SEQ ID NO: 430755 - protein, 343 aa, unidentified
MQSISTIGLDIAKSVFQVHGVDAAGQVVIRRQLRRRHVLAFFQKLPPCLVGIEACASSHHWSRELQALGHTVRLMPPAYVKPYVKRQKNDTTDAEAICEAVTRPNMRFVPTKTVEQQSCLMLHRARHLFIRQQTAVINSIRAYLAEFGIVAPVGRRGVEQLLEVVADTADCRLPEVARACLAALGSQLRALKAQILEFDRRIIAWHRSSATSKRLDAIPGVGPALATALVASVADAKAFRSGRDFSAWVGLVPKQNSSGGKDKLGSISKQGDRYLRSLFTAGALAVIRYAKIHGTGHRPWLTALLARRPTKVAAIALANKLARMAWAMMARNERYKEPAALAA

SEQ ID NO: 430756 - protein, 360 aa, unidentified
MTNLQPSETMKVIGGVDTHKDIHVAAVVNEFDQVLSSKSFPTIRHGYKGMLQWMSSFGCLLRVGIECSGTYGAGLLHYLQMKHIDVLEVTAPDKSERRKRGKNDIFDAESAAHAAFSKNRTVTPKTRDGMVEALRVLKVCRKTAINARRIALQMIQMNIISSPESLRESLRNLTRMQLIRTLASSRPDLSGYKDITTAYKIAFKSLARRYIELHDEIADLDVMMNSIVDELAPELVEQKAIGYVTASQLLITLGDNPERMKSEASFAALCGVSPIPASSGKTNRHRLNRGGDRAANSALHIIAIGRLRTDQRTQKYIEKRTSEGLSKMEIIRCLKRYIAREVYYLLKSRNALINSTQITH

SEQ ID NO: 430757 - protein, 430 aa, unidentified
MKNRTNQRLEEITAGTLIIGVDVAKSVQWVRFVDYRGVEIGKAMSFQNNGEGFESIVARIREICKLKTLQYQIDKIMIGMEPTGHYWKALANYLMKEGFRVVCVNPYHTKKAKELDDNSPTKNDKKDALTIARLVKDGRFFEPYLPKEEYGELRVLTNTRVSVIKRNNAVKNTITALLDEYFPEIWTVFKNPLKGKASRHILKNCPFPSLLLALGEDGVLAEIKKAVKKTVGIKKVRQLIETAKTSVGVNYGMGAAKIRLEWLLDELELIEKQLCEVERLMETALNRTGYAEQLLGIKGIGIVTAASFLGEVGDPLRFQNARQIANYAGYNLVEDSSGKSKSGTCISKRGRKQLRSVLYQMAFTMVGKNAEMKSLYRHLTARKDNPLKKKQALVVISKKIITVIYSLLKKKETYKPELVLGTVRKEMMAA

SEQ ID NO: 430758 - protein, 407 aa, unidentified
MLFVGDDWAEDHHDVELQDERGRVLARARLPEGIAGITRLHALVGQFASPDTEPGEVAVGIETDRGLWVTALCAAGYAVYAINPRQVSRYRERHGTSGAQSDKAGAHTMAGMVRADSGQLRAVAGDSPGAEALKVAARAHQMLVWERTRQMQRLRAALREYFPAALEAFEDLDAPDALELLAKAPDPARAARLTRAQVAAALRRARRRDIAGKTDAILAALHGEQLRQPQPVADAYAATVRSLTVIIAALNGEIATMEQQVTGSFRGHPDAAIYLSQPGTGQIPGARQLGEFGDDPHRYASAKARKNYAATSPVTRQSGKKKTVLARYVRNGRLAGALHRQAQSALITSPGARTYYDEQRDRGLDHDAALRALSHRLAGILHGCLKTRTLYDEATAWSHRVKLPAAA

SEQ ID NO: 430759 - protein, 369 aa, unidentified
MGEYSEAFVAFDVAKIKHAVAVAEGGRTGEVRFLGEIENREGPIERTVKKLAGRYGRLHFCFEAGPTGYGLYRQLQALGHDCMVVAPALIPKRPGERVKTNRWDAVTLARLHRAGELTGVWVPDAVHEAVRDLVRAREAAADDLRRKRQQLLSFLLRHSRIYSGSGHWTLAHRRWLANQAFEHAAQQIVFQDGIDAIEDAIARRRRLEEQLIAIMPSWSMAPVVEAYQAMRGASFLVAVTFAAEIGDVRRFDNPRQLMSFLGLVPAESSTGDTVRRKGLTLAGNRRARRALVEAAWTYRYPARVSETLRARLEGLPKAVRDIAWKAQIRLCARYRRLSATGKKLPVVVAAIAREMAAFLWAIGREVAPG

SEQ ID NO: 430760 - protein, 343 aa, unidentified
MQTITTVGLDIAKSVFQVHGVDADGQVVVRRQLKRRYVLAFFQKLPPCLVGIEACASAHHWSRELQALGHTVKLMPPAYVKPYVKRHKNDAADAEAICEAVTRANMRFVATKTPEQQSCLTLHRTRHLLMRQQTSVINALRSHLAEFGIVAPVGRNGVEQLLGAVADLNDKRLPEVARACVAALGAQLRVLKVQILEFDRMIRAWHRSSEASQRLDQVPGVGPVLATALVASVADPRAFRSGRDFSAWIGLVPKQNSSGGKERLGNISKRGDRYLRSLFTTGALAVIRYAKIHGTKHRPWLTALLARRPTKVAAIALANKLARMAWAMMAKGERYKEPVALAA

SEQ ID NO: 430761 - protein, 429 aa, unidentified
MEDVDELELLVERVAGLDVGKAELVACVRVPHPSKPGRRMQEVRAYATTTAELVAMAVWLRQHRVQRVVMESTGDYWKGIYYLLEAEGLDCWLVNARDVKNLPGRAKTDTLDSIWLAKVAERGMCSPSLVHPEPIRRLRDLTRYRRALVADRGREMQRAEKLLEDAQIKISSVLTEVHGVSGRAMMEALIAGKRDPHTLARLARGRAKVKTAQLEEALRGFFTDHHAVMLRMMLDNIDRMSAQITALDGRIEEAVAPFSDRVDRLVDLPGVDRVAAAELIGEIGVDTSRFPTAAHLVSWAKFCPQTHQSAGKTKRKGRGKGNPWLGGTLGRIVFGLSRTDTFLGTRYRRLAKRRGKQKAIVALGNSVLTVVYHLLADPEARFDDLGPGFYESRINTNRRARNLATQLQAITGQKIVIRDGKAVIAESAA

SEQ ID NO: 430762 - protein, 357 aa, unidentified
MGRMMYVGVDVHKNFCQSAMMDDAGHIVKEDRFPNTDEGIQSFISRLVGFDDVRVVLESTGSLWMKLYDAIEEHGLEAVLSNPYKTRLIAEARIKTDKLDARILAHLLRADLIPRCYVPSKEIREVRSLVRHRVKLSKTRTEIKNRIHALLDKHRLKAPCSELFSKEGLEWLKSLKLSSIDDAVLKSDLVVLKALDEQIGYVESKIASIALKDPNVELLITMPGIDFYSAMVLSSEMGSIERFSTDKKLVAWAGMAPSLLQSGDVLRVGRITKEGNKMVRWIMVQAALNAIRSDARLRELYERYRSRKGHHKAIIAVAHEMLRIVWFMLKRREPYRGEDKRLSLRKHNRMCRLALDG

SEQ ID NO: 430763 - protein, 407 aa, unidentified
MIYVGVDVAKSDHCLGAIDAQGKVLLKPITFAQDAEGFAKLASHLHQLGKPDEVVVGMEATGHYWVLLAEEIQKLGYLPKVFNPILSADAGRMSVRGRKTDEDDCLAIAKVLRDGGFNPVRLPDAMMGELKRLCRYRQLAVERGANLKKRLIGYLDLVFPEFQNLFSDCYGPTARAVLAKTPSARLMRGYQAKSFASLMMKVSKGHLGLERATDMITAAKASIAANRTDLATEMAIRMTVEELDLIERQIDSYDVQISPMAPAGKDLLMTIPGIGPVLAAVILAEIGSIDRFIPSAGDTAKSDGIHRLLAFAGLDPRVRESGQWTGKVRMSKRGSRALRTAIWRAAFIACKHDAFREIYERHRKTMKQHQKIALSHVARKIVQAIYGVLRYQKQFDLDAFRGIKKAA

SEQ ID NO: 430764 - protein, 347 aa, unidentified
MASSSRSYHLVAGVDIAATSFMATWARPGQVAAPARPFEQTAAGFAAFHKQLAATGGAPDATLVVLEATGSYWVALAVELHTAGYHVAVANPAHVHNYAKSLPRRGKTDGLDAHLLTTFGHERQPESWTPPPTVYHELRQRLVARDGLLTMRQQARNQLHALEQWPVRVAAVQQQMSEVIESLDQQVRVLEKAIAEVLADGAWAASAAHLQSIPGLGLVTAAWLLVGTVNFTTCASAEAAANYAGLAPMERQSGTSIRGRPSIGHGGNQRMRTALYMATLSAARYNPVIKTFYTRLREAGKPAKVARCAAARKLVHLAFAVVTKEQDFDPSYQKTPVVSAGYAEIGG

SEQ ID NO: 430765 - protein, 344 aa, unidentified
MEYFAGLDVSLRSCALCIVDTKGKVILERELACEVSDISECLRRFGHPVERVGFEAGTMSQHLYFGLSGEGFDVVCMEARQVNAALSAMRNKTDKNDARGIAQVLRTGWFSAVHMKSREAHGQRALLSTRKALLNKTIDLANEVRGLLKIFGIRLPKCVKQGSFDGVVRPMIEIDDVLAHAMLPLLDARLALYQHFLELDRRVKRAASHDEVCMRMMTVPGVGPIAALTFKAAVDDPARFKSSRTVAAHFGLTPRRYQSGETDNPGRISKAGDRDVRATLYAAANALLMRTMAGSQIKSWGMRLMRTKGRRRAVVAVARKLAVLLHRMWIDGTEFRQEKVGGVA

SEQ ID NO: 430766 - protein, 313 aa, unidentified
MSKRYVGVDVGLHSFDVAVRPDGLHWVVPYTPEGVREFVKRMQKLRPQLVVMEACGNLERSLARGLERGDIPVAVMNPRQIRDFAKSIGQLAKTDKLDAAVLARFAETMQPEPRLLPAEDEEQLRDLLARRRQLVGMITAEKNRLRRASSSVRTGIETHLRWLNEKLKELDKEIRQRQKSNAVWEERTRLLESAPGVGEVVSATLVGFLPELGTLDRRKISSLVGVAPFNCDSGVRKGKRAVWGGRAQVRSALYMSVMAGIRCNDQIRSFYHRLRKQGKPAKVALVACMRKLLTMLNAMIRDQTPWQPQSVNT

SEQ ID NO: 430767 - protein, 401 aa, unidentified
MKYVFALDVAKGKSMFMLSSDVGEILLEPTEYTHNKSDFEKIDSNINKLNIKDNLTIIMEATSIYHKAPERFFKENNYHVIVFNPLIGKEITNTIRKTKTDKQDCIKLTNLFWKGSIPDRKYTEDEIYTKLNELSRQYYHLDEGLTRHKNRYKELLHLCFPEFELCFKDGKIYDLTALNFIKEFPHAYIIKGKRVDALAYNMANTNNRHLNYYKRKANVIKEYAINSYPGVSQNSKDVDNLKQLADVVVDLTKRKDEVKNQVIQLAKETKNYECINSLFGIGELSASLIIAELKDITRFNNIKQINASCGLDPTIIQSGKSINYHGPISKRGNRYARKLLFNCSRNIITLSAKCNKENSIYVYYLKKKQEGKHFYACLTACSTKLIRIIYALCMNNSTKQN

SEQ ID NO: 430768 - protein, 356 aa, unidentified
MKRNHFIGIDVHSQFCEVAVMTPAGQVVQRERCATTIPALSELLDKAPRPCSVVLEEGPMAGWLWRNLHDKVNTLVVAEPRRNRLIVRDGDKDDDIDAEKLALLHRGGFIKPVHQSGSLEQAVFKQLVALYHYRVRQRVREAHRITHLFRQHGIVIRERAYADRADRPALVQRLPAEGLLPELVRSMWTSYDALVQQEDQWRKRLLRAAKQVEVVCRFQDLPGAGWVRAATLYAYLDTPWRFRSKAALWKYLGIGLERKHSGKGKEYLGVPKQAHRLLKCTILGAARSAATARDNPFADMYRRWVEEEGLSPARARRNVARRLAATAWGMWKNGNAYHPEWVGVAGTAQAAAQESR

SEQ ID NO: 430769 - protein, 320 aa, unidentified
MTNVNVFTGFDVSKDYFDFFTIDDQGKSGGQRVVYNREGLKSLSRLIPAGSHCVMEATGPYYLKLATWLYQNGFTVSVINPLVIRRFCQMKLIRAKTDKADARMIALYAKTEKPTSWQPPAPYIIKLQQLDAMVELFTKNRTAYTNQLHAIEVTGMADPFTRSLLKKSIADVTKKMQKIEEKMAEIINNQHKEMLKNITTIPGIGKKSAVALIVASDGFKRFDNYKKFSSYLGLCPRIYESGSSVRGRARICKLGMSRIRAILYVCAWSAKKGNMACKQLYDRLVEKGKSKKLALIAVANKLIKQAFAIAKSGLVYQSVS

SEQ ID NO: 430770 - protein, 361 aa, unidentified
MDLPITHTDEEALPVVLGVDTHVDAHVAVALDGLGGRLGHKTVPATEAGYALLAAWAEEFGVLERAGIEGSGSFGVGLTRFLRARGVEVVEVNRPNRQYRRRFGKHDTADAEAAARALQANTATGEPKSADGPAEMVRALHVVRRSAVKARTQAANQLRALLVTAPEGLKAELRGLSTTKLVATAARFRPGTHSEDLRAATKLAMRSVARRHLRLSEEIAELEEQIERLVKEAVPALASLRGVGTDTAASLLVAVGDNPERLKSEASFARLCGVAPVPASSGKTVRHRLNRGGNRDANRALHVLALGRMSWDERTRAYVARRTAEGKSRREILRCLKRYVAREVYRILVAPGALPPSISTP

SEQ ID NO: 430771 - protein, 321 aa, unidentified
MTYVGIDVSKVTFVVAYSSVKTNKTRTFKNTVNGVHEFVQTISASEHNCVLEATGNYSALLVYLLSEAGITISLENPLKIKNFARVMLTVTKTDEIDARLIALYGEKMQPAPYKLRSDAILVLKQKRTVLRQLKKQLVATRNLKGSMEVLPFFDPKCKKTIEKTITFLEKQIKEMEEELASLAQGEYKKQMDLLTSIKGIGVTLAAALIVATGRFSYFDNAKQLTRYLGLSPTYQQSGTSVNVKGHINRNGDSSLRSQLYVAAFASLRCNTECKACFDRLRSNGKPGKVALIAVANKLVRQAFAVVTQGKPYVDGFKSEKP

SEQ ID NO: 430772 - protein, 348 aa, unidentified
MTLTTIGLDVAKLVFQVHGVDENSRAALKRKLHRHEVVTFFEELPRCTVFLEACGASHYWARLLTALGHEVKLIAPEAVKPFAKKGKKNDAVDAAALCVAGSRPEIQFVPIKSVAQQAVLALHTARSLLVKQQTMLANAIRGLASEFGLVVPQGLHRLEELMVQVTAEASVPAEGRQALIVLHAQLQAAAERIVMLEEQIVVHARQNASARRLATIPGIGPITASLIAATMGDNITAFTSARHFAAWLGLVPRQHSTGGKPRLGRITKAGNTEIRRLLVLGATSMVRRAETWNSAAGIWLRCVLARRPVRLTTVALANKMARIAWALLTRNDVYRAQGRSKVAAGAAA

SEQ ID NO: 430773 - protein, 423 aa, unidentified
MPVSTLYVGIDVSLKTNQVCPINFNQDVFFNEKFDNSPFGTEKMIVKILDILNKNKDLNKVLFCMEATNVYHIHVSSILASDSRLLAYGCKVYAENAKSIQKYKETFLDREKTDPEDAYLCADYARIGKCKDSHPVIGYQKIALQRLTRQRKHIAEQLGKEKQYLSSNLFLKFSALKVNPEDNPFSNTFGKTSSVMLTDFLSNEEIVEADLGDLVVKIGEVSNNRISDKEEVARKLKRMAQHSYSLDSYASDSVSMAMASSFRLIETYQNELKKLDKEILRLIEGYDNKYCAILTSIKGVGNVYAAGIIAEIDDIHYFRNDEHLASYCGLRWKKNDSGNKRSDHTRQPNTCNTYLRYYIVEATGSILRFNDEYSSYYHRKKSEVKVNSHKRALVLTSRKFVRLVYGMLRDRKLFGDHYLAHRS

SEQ ID NO: 430774 - protein, 361 aa, unidentified
MRIIGCDLHARQQVLAMLDTTTGEIVAMTLKHEGNNVREFYSKLPRPVLVGIEATGSMLWFVNLMEELGIECQVGHPANIRAAEPRKQKHDRRDADLILKLLVENRYPKIWLPSKEQQDLRALLRHRHQWVRIRTRIQNALQAIALANGLRRGPALWSQDGQRTIASLPLAPHAAYRRSELQAMYAKFAKEIEKLNQRVEEQACERPGARLLMTHPGVGPITALATEVFLGDAARFADSKALASYVGMIPSEYSSGERQRFGGLSKQGNPLLRFLWGEAAMHAVRRDPELQRFYRRKLVQKGLGKSRVAVARKLGIRLWIMLRDEIDYNEFCRRGQKQQKSSEACAGMPDTGHGAKQSPAD

SEQ ID NO: 430775 - protein, 355 aa, unidentified
MDSTKYIGMDVHKETISIAVLNSSGKLVMETIIETKASTLLQFVQGLRGSLHVTFEEGTWAAWLYDLLRPHVTKVVVCDPRKNALLKTGNKSDRIDARKLAELLYLNKLKPVYHGEHGVRALQELSRSYLTISGDLARVMTRLKALYRSWAIPCAGKQVYAPRYRSEWLGKITEAGVRRRAEFYYQQLDALRSLRLQVRRELLAESAKHKASKLLCQIPSIGPIRAAQLIAILQTPHRFRTKRQLWAYGGLGIETHSSADHRYVEGQLRPSKRPVSLRGLNRNHNHELKNIFKGAAIIAATKAGPFQEFYAALVAKGIRPEMARLTLARKIAAITLIVWKKGVCFDAQHLKPQTA

SEQ ID NO: 430776 - protein, 417 aa, unidentified
MKKKLRYVGLDVHVDSITVALAEEGDEPRSLGAIPNTSESVRKLIVRLGPCEQLRVCYEAGLCGFVLYWQLQEMGVHCSVIAPSLIPQRSGERVKTDRLDALRLVRCFRAGELVAILIPTKEQEGLRDLLRALQSVKRDQIRHMHQLAKFLIRQGRRRPPGMGLLNAKYLAWARAQQFEQAAQREVLNHYVLEFEHSTRRLQELKNALDDVSEQLPKPTAALVAALQALRGVAKLLALSLVSELGSLSRFRTPRQLMSYAGVVSREHSSGNRIRRGAITKAGNAHLRRMIVEAAWHYRHQPGLRHALGKRQVGLSEDVKGIAWKAQLRLTRRYRRLVARGKPKPQVIVAVARELLGFVWAIGIQAERESKLVMVAQPSARIAHPGRRAARRPNSRLKISLDSPPGEKPLINAPSSHG

SEQ ID NO: 430777 - protein, 358 aa, unidentified
MANESMAQGGGTRVIVGVDTHKDVHVARAKDELGRALGELSIPASSKGYRALLAWSRGFGEVRAFGVEGTGCYGAGLARHLHGEGEVVIEVIRPNRQARRLRGKSDPADADVAASAVLSGEANGVRKAGDGAVEMIRVLRVARITAVRARTQALNALHALVVTAPGELRERLQDLSDRKLVRTCAAFRPGAVAGPTEATKTALRSLARRYIALREEVRTLDQDLERLTHEACPPLLDIFGAGSDTAGALLLAAGDNPERLHSEAAFAKLCGASPVEASSGKTTRHRLNRGGTRHANAALYRIVMVRLRWRHQPTMDYVGRRTAEGKSKREIIRCLKRYVAREVYRALADGGSPAPSTS

SEQ ID NO: 430778 - protein, 371 aa, unidentified
MDKITRGVAARVGVDLSKRVIQVQAVDAGGRVLTNRSLGREKFLPWCTQLPPGCMVVMEVSSSAHHWARKLLAMGLDARIVSAHLAAPYRSEGHVGKNDANDAAAICEAASRPHMRFVPVKSIEQQSLLCVHRLREGVKADRTACINRIRGLLLEFGIAVATGVRALQTTLHDILEDAGNELNGLARMTLQRAHAQWRELDEHLAWCDARLAAHAADSADVQRAADLMGVGPITASAAVATVGDFKQFDSDAQFGAWLGLVPRQRSSGGKSNLGTITKRGDAYLRTLLVQGAKSVVNTAHTRTDPISRWALALKERSGWQKAVVALANKNARILWAVMTREQRFDRHHVSTKAAGAIQPSHGADPTAAAMG

SEQ ID NO: 430779 - protein, 389 aa, unidentified
MIVIGIDVAKDKHDCFIMNSEGEVLFNPFVIQNNREGFDSLYEKICSVANDFTKVKVGLEATGHYSYNILGYLLDKGLPTYVINPLHTNLYRKSLSLRKTKTDKVDAHTIAAMLLSDVNLKSYSNTLYHNEELKSLTRYRFDKVKERAKLKTSVARLVNILFPELEKLVSTLHMASVYELLSQYPSAKQIASVHLTKLTNLLSTASKGRYGKERAEEIRIDAKNSIGSDMPAKSLELKHTIKLIRELDAEIEEIEFHIEIIMDEINSPILTIPGISYRMGAMIIAEIGDFDNFSSPDKILAYAGLSPSTYQSGQLTSSYSHMEKRGSRYLRYALFNATKFVCNWDNTFAEYLAKKRSEGKHYNVAISHACKKLVRVIYHLETTGESYRR

SEQ ID NO: 430780 - protein, 443 aa, unidentified
MARKQSRQRFELVHPHCAGIDIGSREHWVAVDRDHEQPVRSFSTFTDDLIKLADWLEGLKIEVVAMEATGVYWIPLFELLDARGFKVYLVNSRATRQISGRKSDVLDCQWIWQLMSHGLLRGAFRPDDAICSMRALIRQRANKVRSQAQTLNRMQKALSQMNIQLANVISDISGVTGMKILRAIIAGERDPSILADLTDRRIKASKETVARSLQGNWRLEHLHALEQEVECYDFFEQQIGACDKAIMGALSQLPEREEAPQPSRKILRSPHRCAADQAALHQSLWRVMGVDLTAIPTIGVDTALIIAGEIGPDLSRFPTMEHFCSWLGVAPPTRISGGRPLSGKSQKTLNNAAQALKQAASNARNDKSFIGASHRARLARMDTSCAIKATAHQLARLIYAMLTKGQPYVEQGIEAFEERSREKQYRALLRKARKLGLDLVKAS

SEQ ID NO: 430781 - protein, 427 aa, unidentified
MSEEKPLELRVSVDVGYRRHSVAMGLSSGEVLEEFEIDHRIEGFQEFFLRIEKHQKSQGCEVAVAMEGYNGYARPLDSLVRARGYRLYNLNNLKFARFKEIFPGAAKSDRIDARKGLELFQLSDHLPLAKEVLQEVRGTPPENEVLKRLTRRRRRLVNERVRVVNNLQADLQAVCPGLLEITGEASNQWFLNFLLSTDTLPQLARLRRSTLLKIPSVGVKCAGTIEGWQKRAHFSEEVKCVGEMIQEDARRCLELDEKIKRLEAKIAEIAKGSKIAKTLRSIPGFGPVCTSELAGEVGTIERFGGEASLSLYLGMSTLDNRSGKYQGTKAPKHVNTRAKAAMMIGVDRHRKYVPESQRYYEKKRSEGKKHNQAIRALGRHLCRIIYKMLKEERPYEIRSQKGNTKTKGQSRSCVKTQIRRPKISAKS

SEQ ID NO: 430782 - protein, 402 aa, unidentified
MYPLSIRVAVDVGSTRHRVAVGLPDGKVLDEFDIDHNAKGFNEFFQHIERAEKLHQLPVAVAMEGYNGWARPLDGHILQHGYRLYSVNNLKLARYKEIFPAPAKTDAIDARRILELFRLSEYLPLAKDALHEVAPTPLENEQLKRLTRRRKQLVFERVRVINRLQSDLHAVCPGLMSITGNADNIWFLNFLTCRKELHKLAKVRPTSLLSINAVGKTYAAKIREWQLQAQFSPDVKWVGEIIQQDARRILELGKEINKLELKVATIASNSSLAQTIGSIPGFGKTSMAEIAGEIGTIERFQSEAGLAVYMGMTALDNSSGKKNGAKTPRQVNTRIKAAMMIAVARHIECVPASRAFYDKKRAEGKQHNQAIRALGRHLVRVIWSMVKQGRTYEMREKTEKNT

SEQ ID NO: 430783 - protein, 463 aa, unidentified
MRTIGIDLAIKAEHRAIVMDEHGEFISPVLKFTTTAEGLDQLLAQAREGAPRSKLQAVMEPTGMAWFPVAVYLIEHQVTVYLINSQQVADLRQYFSHHAKSDRIDVRVLAKLPLISPEKLHEVHLRTAAMLACQRGCVQLDRWARQIAAIKTRVKALDRFAWPGLETVFPDLYAPEARWFCQHWYQPRAVLNAGVAGLQQAWRESGLNPEDSGTWAEPLVALAREVVALYGVQSPYIDFELLQAEIGRELEMLSYLEAQHHTLQLKTVRPLYRQLHPTRNLETIQGVGQDGAAVYASLIGDPGRFDSLRLFRGWSGMVPASKESAQVEAKGLHISQAGPRLIKKYAFLDADVARQWDPQLAAIYYDQMVNKGKHHTQAVCTCATHLLDRVLVVLRDDKPYQLRDVDGTPVTAEQGRAIVLARYAVPEEVRRRKTKRYRQTHRDQRAEKKQKREIARTKVRSKP

SEQ ID NO: 430784 - protein, 263 aa, unidentified
MAQQMIIGIDLAKHVLQVCMVTPTGTLKTNTTVARGKLLTFIARPPPALIFMEACGGAHDWARRFCALGHDVRLLAPQYVTPFRRGQKNDPNDALALTEAGQRPHIPTVPIKTVEQQDIQALHRVRERRMKNRTAVVNQVRGLLLEYGIVIPQGIARFRKRLPRVIEEADNGVSFVLRDLLQSLQSDLHALDTRVVEVTCQLTRLSHELEACQRLQEMEGIGPLSATALVAALGNGHDFQTGRQVAAWLGLVPRQQSSGGTTR

SEQ ID NO: 430785 - protein, 349 aa, unidentified
MTEQRRSYAGECVYVGVDVHKETYTVTCVCHKQIVKPATVQAEPGGLAVSLPRGFPGATLYSVYEAGFSAFVLHRVLTKAGITTMIVNPASIAVAANDKVKTDRRDSKKLAIDLADGRLRGIYVPTEAAELARLLPRTRAQIVEHRATIARQINAKLHQFGLIAPSSRRMISNRYLREMATWTLPPELSVSLTLLAEQWRFATRQLIEMRRLLRDQAKAQEEIEKVYRSVPGIGEVVARTFATELGDMTRFANERALFSYTGLTPSEHSSGTAVRRGSISRQGSSRVRHLLVETAWRAIPRDKALKEIFDRIAATRGKKRAIVAIARRLTGRIRACFRQGTTYAVGTAA

SEQ ID NO: 430786 - protein, 482 aa, unidentified
MRLLYRCCAGLDIHRDTVSACIRKRVRGQAEVVIEEQVFGTFTQELERLRSWLKQHKVRQVAMESTGVYWIPVWNVLERGFTLTLVNPATVRALQGQKTDRIDARRIAEYLQYGLLRGSFIPAKPIRELRELTRMRAHIQQDRNRVINRMARLLETVNIKLASVASHIVGASGMAMLRLLARGVCDAERLAACAQGHMRVKIPALVLALDGRPDQHFRWMLTQLLAKLDRLDEERARVDVRVDELAVPYADVLRRLRTIPGVDRTTALVLLAEFGEDMTQFPTAAHLASWAGLCPGNAESAGKRFSGRTRKGDRYVRRILVQSAWGASRCHDCFLAAFFFRTAQRRGLKKAAVAVAHRIAILAWHILAEPGAEYRERGGDFFDRRNPERTARKLSRRLEAIGYKVTLLAPPKPFGTPPQRPARKPSEPVVDASVCPRCARWGMPRCICLVKRKRGRPSTQPNRLYNLTPGVFEGTLLPLGSS

SEQ ID NO: 430787 - protein, 367 aa, unidentified
MRRVISIDVHRTFGEVVVWEDGRLRHAGRIDMTRTALEGFGKTLLASDEVVVVEATANSMAVSRVLAPFVARVIIANPLQVKAIAQAHVKTDKIDAGTLASLQAAGYLPQIWTPDAETERKRRLVARRYQVVRHRTRLKNEVHSILHAHLIPKCPLADLFNFRGRAWLAAQPLPDDERAAIDRHVRELDGLAEDLALLDREIAQDAIDDSAVNRLMTITGVNLAVAAGIMAAIGDISRFNSPQKLVSYFGLNPRVRQSGLGAAHHGRISKFGRSHVRAMLVEAAWAAAKALGPLHAFFVRIRARRGHQIAAVAVARKLTVLCWHLLTKGEDYLWARPALVAIKTRAMQLQAGHPQQKGSRRGPACEC

SEQ ID NO: 430788 - protein, 318 aa, unidentified
MALLISIVGIDVAKATLDVWFRGMSTPRQFSNDEAGFAELIAFLGEHAPPAGTVVGLEASGGYERAVCRTLHHSGIGVRVHNPACVRYFARAIGKLAKNDRLDARVIARYTEVADTQAFEFDAGMAEFAEVVAQRRRLVDDRVAISNQREILTRPTLLEQCRERLEMLERQIEELDRLIDELLQDNEANSAKAKLMCTLAGVGRVTATTLIALMPELGTLNRRQIAALAGVAPFDHESGKYKGERHIRGGRSSVRTVLYMAARSAARTRTVLGQYYRHLLAAGKSPKVATVALMRKMLVTLNAMIRDRKPWKHANALP

SEQ ID NO: 430789 - protein, 341 aa, unidentified
MNVFIGLDVSLRSVAMCVLGAEGELIEETNLDCEVVAISNHIRTKGYSVERIGFEAGTMSQALFHGLTAEGFDVVCMESRQVSAAMSAMRNKTDKTDARGIAQILRAGWYSPVHMKSRESHEVKALLAARKAILNRCIDLENEIRGLFKAFGIRLPSRLSRLRFDEKVRPIIEADDALAFALLPMLNVRGELYDAYRLMEKRVIAVSRKDPVCKLLMTAPGVGPITALSFKAAVDDPTRFKSSRLVGAHFGLTPRRFQSGEMDNTGRISRAGDRDVRATLYIAANSLLIVSGRPSSLKTWGLKLIRTKGVRRARIAVARKLAVILHRMWITNTPFQTEGAS

SEQ ID NO: 430790 - protein, 351 aa, unidentified
MLYVGMDIHKNYSSVAVMNEQGDLVDRRRVSHRYREELTGYFNQFPLKTQVVMEATCGWGWLSEVLQDLGLEVKLANPSKVRIIAESQIKTDKVDALALAQLLRTNFLPESYLAPKEQREARDLLRYRISLVHLRSGIKNRVHALLIRLGIYHNYSDLFGKRGRRFLSSLELSPVHRRSLDGYLCLIDAINKLIGEAEVEIRKVVKESADGKHLLSLPGVGFILAYLILVEIGDISRFSSYKKLCCYAGLVPSVCQSGAKRYHGHLSKKANRYLQWGMIEAAQKAKVIDPFLRRKAERIERKKGASVATAAVAHHLLVIVYHLLKEQREYYSSKLRGNPSGRPASTLVARS

SEQ ID NO: 430791 - protein, 339 aa, unidentified
MKYTPVGVDIAKHLIQVHFIDENTGEVVDKQLCGRDFLEYFSNREPCLIGMEACGGSQHWARELTKLGHNVRLLQARFVKAFVMGNKNDVMDARAIWMAVQQPGKEIAVKTEEQQSVLVLHRTRMQLVKFRTAQINALHGTLLEFGETIHKGRAAMEREFPEALERMKERLPPYLITVLKNQYKRLNELDSLIEDIEKQLASVAKQNETCKRLLDIPGVGPLIATAAVATMGEASAFKSGREFAAYVGLVPKQTGSGGKIRLLGISKRGDTYLRTLFIHGARAAALLTKEPGPWITELKKRRPASVAIVAMANKLARTVWAIAAHDRKYDRNHVSIRPY

SEQ ID NO: 430792 - protein, 348 aa, unidentified
MLADELDYVIGVDPHRDTHALAVVEVRSGGVVFEATAAADGEGYAHVLRLAGQHAPGRRAFAVEGTASFGAGLTRFLVSHEERVLEVGRLRRERRSGGKSDALDAIRAARSVLAQTRPARPRAGGEREALRALTAAREGAVTARRAGLCQLRGLLVSAPEPLRAQLRSLPRAQLLRRLVAVRPERRQDAELRGTLLALRALARRVTALTVEERELAREIETLTRKLAPQLLEQPGVGPLAAAQILISWSHRGRITSEAAFARLAGVAPIPASSGQTVRYRLDRSGDRRLNRALHMILVTRRRAHAPTIAYIDRRIQQGKTRREAIRCLKRYLARNLFRLLENGAPLPG

SEQ ID NO: 430793 - protein, 342 aa, unidentified
MRIVVLGIDLGKDLCSLAGLDETGAVVLRRRMKRASVLPFTAQLEICTVAMEACCGAHHLGRQLVAQGHVVRLMSPAYVQPYVKAQKNDERDAEAIAEAATRPTMRYVEIKSEAQLEVQSLHRVRGRLVAERTALINQLRALMLERGIAVPQGRCKLARYLPEILADERNGLGPRLRQLIEDIREEWRSIDQRIKGYDDELAEQVRNEDTAKRLISIPGIGVLTATALVAAVGNAQTFSCGRDLAAWLGLVPRQATTGGKPRLLHISKRGNGYLRMLLIHGARTALPGLAKKDTPLGRWVKALLARAHRNVVTVALANKLARIAWAVLARDRQYVTVQAIGK

SEQ ID NO: 430794 - protein, 410 aa, unidentified
MQILNARCAGLDVHKQSVVACVLVSEGQDKVEKHCQTFGTMTPDILALADWLRGLGVKEVAMESTGVYWRPIYQLLEESFQLLVVNAAQVKRMPGRKTDVTDAEWLAELLQHGLLAASFVPPQAQRELRELTRHRTNLVEKRTQAVNELHRTLEGTNLKLSSVATDITGLSAMRMLEALLQGEMTDPNLLAELAVGRLRRKIPQLQKALQGRIREHQRLILSQLLVDIELFDEQVEQVSGMIEQRLTEQTQLLARLDAIPGVSRRTVEVVLAELGADMKRFPNARHAAAWAGMCPSNKESGGRRFAARSRQGNKALKRALVEAAMAAGRTKETYLSAQYRRIGARRGKKRAAMAVGHTLLRIIYHMIKEGTTYRDLGADYFDRRNQTAVVRRLVERLEGLGYTVNVSKAA

SEQ ID NO: 430795 - protein, 398 aa, unidentified
MQPTRINHSMPIEDVLAVALELSSGAWKIALHDGKREKPAIQTVAAKVPAHRLDEAMQAIEKIKTKWGLGPDVRTVVLYEAGQDGFWIERALSKLGYEVVICDAASIPVERHARRAKTDRLDAIKLVLCLRAWLRGEHDRMHVIRVPAVETEAQRHLVRDRGELQKEALQHRDRIRKLLRTVGCWQEVEGDIAKRLTKGEISCYDGAAIPAQLHARLTRERQRLALVQQQLAALEKDLVRQLPEPAQKRIADLQRLKAVGQVGATRLVLELFWRSFDNRRQVGACVGLTPQPYDSGESRVDQGISKQGNRRVRSLLIEMAWLWLRYQPGSAMTQWYVQRTQGNSQNKRGKRIAIVAVARRLVIALWRYLTHGILPQGALLKNSKTTGFKRSAGEEAAV

SEQ ID NO: 430796 - protein, 324 aa, unidentified
MAENKPTKVYVGIDVSKVHLDVSVGMGQTSWQVENSPEGIGELVRKLSELKPSLIVLEATGGYEMAAAGALALAKLPVAVVNPRQVRDFAKSLGWLAKTDHIDAQVLARFGEAVQPEPRALADAQTQQLQAILGRRRQLTEMLVAENNRLHLVHKDVLVGLKDHIAWLEHSLDDLDKDLRDLLKNSPIWHEKDDLLRSVPGVGPVLSTTLLAELPELGTLNRKKIAALVGVAPYNCDSGKMHGKRAIWGGRAAIRSVLYLATLSATCCNPVIRTFYARLIRAGKEAKVALVACMRKLLTILNAMMHTQKHWESALAASKDRATA

SEQ ID NO: 430797 - protein, 339 aa, unidentified
MNRTVVGVDIAKRVFQLHWVELGSGEIVSVQLKRAKFLEHFANRLPCLIGMEACGGSQHWARELHKLGHEVKLLSARMVKAFVSGNKNDAADARAIWTAVQQPGIKAVAVKSEGQQAVLALHRMRAQLVKFRTAQVNGLRGLLAEYGEVLPQGRAGIRRDVPGALERVAERLPAMVIETLREQYARVGELDEQVQRIERRLQQWHRQDEASRRLAEIPGVGVLGATAALATIGDAQVFKSGREFAAWLGLVPRQSGTGGRVRLLGISKRGDPYLRTVLIHGARAVMTHSKAPPEWARQVAERRPKNVAIVALANKMARTIWALLAHQREYEPLYASRPA

SEQ ID NO: 430798 - protein, 341 aa, unidentified
MDQYIGLDVSLKDTFISVREGGKRIWRGKCASDPTVIAKVIRTHAPSVRRVVFETGPLSVWFFHALTAQGVPAICIDARHAKAALDMAPNKTDVNDADGLAHLAEVGFYREVRVKSFDSMLVRTLVAARHQMLKMTVQISNQIRGVMKTFGLIVPKSAGNILEGHIRTLLATNAGLERIVLPLLEAWLAVRARVAQLSKQLIATARADEQCQLLMTIPGIGVVTASSFIAAIEDPANFAKSRSVGAWIGLTTKRYQSGEVDYAGRISKRGDNHLRALLYEAAMVILTRTTADSALRVWGLKLREKAGFKRAAIAVARKLAVIMHTMLKTGELFNRSAGATA

SEQ ID NO: 430799 - protein, 410 aa, unidentified
MERQVERCCGLDVHKDTVAACVRIGGGPGQRAQQHVQTFRTTAGDLVVLRDWLAAHAVTHVAMESTGVYWKPVYYALESDFTCLLVNAAHIKQLPGRKTDVKDCAWIAQLLEHGLLRGSFVPPAPIRELRDLTRYRKAVIQDRTRVVNRLHKTLEDAGIKLASVASDVLGISGRAMLEALVQGTTDPVMLAELARGRLRGKLPALRQALAGRFRGHHAFLIGQLLAHLDYLDEAIEILSGQVATVIAPFADAVTRLDSIPGINQRTAEVIIAEIGVDMSAFPSAGHLASWAALCPGNHESAGKHKSGKTRKGNRWPRTALIEAAAGASRAKNSALQARFRRVLRHRGPKKAVMAVAHALLRAAYHVLADHAVYRELGADYYDRQHSQRVTRRAIHLLERQGYRVTLEPAA

SEQ ID NO: 430800 - protein, 316 aa, unidentified
MISYYVGLDVSKATVDVGFLPANYAQFQVSNDLEGFTRLITCLNELEVGRVLLEATGGYERALLRALRLEGLNVFRVNPKRARDYARAMGKIAKTDKIDAQMLAKFARDFEDLPHVEPNKDRDELGELLKLRGSLVKSRDSDKRRMKQTTCAKAISTYTDHIAYLEGQIKSLGKEIEDASTVLDQEKARRLRSVKGIGAITCGTLLAFLPELGTVSGRKIAALAGLAPYNNDSGKKSGPRSIEGGRYTVRGATYMSTWSMVQHDPQVKAEYEALRARGKLAKVAVVACMRKLLIRLNAMLRDGTGWREQKSQAPAA

SEQ ID NO: 430801 - protein, 340 aa, unidentified
MNNGLKLLGIDIGKNSFHLIGHDAGGHQVLRKCFNRNRLLQFAAQIEPCTIAMESCGGSHWLARKLASLGHRVKLIAPQHVKPYVTGNKNDFIDAEAICEAASRPRTHYVAAKTVEQQVLSVQHRLRESLVCHRTEAINRVHGFLLEFGIALPATKAAIANVPELIDNSRSDLPLQLKRIMEHLLEDIRRLDAEIRACDVQIKQQLAQDDAGTRLMTIPGIGPITASALVADLGDASNFKTSRDLSAFLGLVPRQFSTGGRPVLLGISKRGDRRMRTLLVQGSRALMIRIDRREDALGQWVRNLLARKHPNKVACALANKLARIVWAVLRRGGTYNASMI

SEQ ID NO: 430802 - protein, 349 aa, unidentified
MVADELDYVIGVDTHLDEHVLAIIAARSGAVVAQHSIQASARGYAAALRFAADEANGARVWAIEGTGSYGAGLARFLAGRGETVLEISRTPRAERRLRGKDDSLDATRTARAALASETLALPRSGERREALRLLLVARRSAVDVRREALGQLRGVIVTAPDKLREELRVLPTGRLLKRCRRLRRSSKVGADELATRLVLRSLARRIEAATLEAAELERELLGHLRALAPALLDEPGVGPIVAAQLIVAWSHPGRVRSEAAFARLAGVAPLPASSGKTTRHRLSRGGDRQLNRALHTVVLHRRQHDPATKDYISKRIAEGKSRRDATRLLKRYLARHLYRLLQTQEPLLA

SEQ ID NO: 430803 - protein, 353 aa, unidentified
MTAEPDPRCEAILGIDTHQDQHTAVVINGLGQVQATLEIPTTAAGYRELLDWARTFGQVQRAGVEGCGAYGAGLARFLINAGVTVIEVDRPNRQRRRRRGKSDPTDAENAARAVLAGDATGTPKDSNGRVEAVRMLQMTRRSAVKAKTQAANQIKDIVLTAPEALRAELRSLTTNQRVRLVVTWPIEPALDPLSAARRCLTELAKRWLDLHRQINGLNRELRHLLDELVPSLLEQPGVGTDVAAKLVLAVGEDPDRLNSPASFAALCGTSPVEWSSGKNSGHHRLNRGGNRQANNALHVVMLHRWRTDDETKAFIARQRERGKTNRHIQRCLKRALARRLHHDLNTDLRNLLT

SEQ ID NO: 430804 - protein, 315 aa, unidentified
MDHPIPQTAGIDIAKDHRDVCLCPDGATRHFPNDAKGHRALITWLSSHAIQRVVFEPTGAYHRALERSLASADLPLAKINPRHARRFAEALGQLAKTDRLDAALLARFGAVLEPPSRPVLSPTLDAMKELVVARQALIKDRTAALNRQKVVRSPLLRRQLDQRLSQIARHLAAVDAQLQSLCLEDADLAPRLAILMSIPGIAQATAVSLLVEMPELGSLDQSQVASLAGLAPVARDSGASRGRRAIRGGRAHLRQALYMPALVAARFNPDLKAKYQALLAAGKPAKVALTAIMRKLIILANALLRDQRNWSPKPA

SEQ ID NO: 430805 - protein, 348 aa, unidentified
MLADELDYVLGVDTHRDEHVLAVVAAPAGALIAGASATANGRGYRELLRVGIRHAPGRRAWAIEGSGSYGAGLARYLAERGEAVLEVSRAPRTERRLRGKDDALDAARTARAALASETLALPRAGERREALRLLLIARSSAVDVRREALTQLRAVIVTAPDRLREELRGLTTGKLLQRCSRFRRSRSAADELATRLVLRSLARRIQAATLEADELECELLGHIRALAPALLDEAGVGPIVAAQLIVAWSHHGRLRSEACFARLAGVAPIPASSGQTQRHRLSRGGDRQLNRAIHTVALHRRQHDAATRDYIAKRVAQGKSQRDATRLLKRYLARHLYRLLQQTEPLMT

SEQ ID NO: 430806 - protein, 423 aa, unidentified
MMKLKYSICCGLDVHKNVIVATIVTTNKDGISEYLQKSFSTINSDIQRFHNWLIENNCYHVCMESTGKYWIPIFNYLENDIDVCLTHPKYVKAIKGKKTDKKDSKWIADLYKFDLVRCSFIPPKDFRQLRELSRYRFKLVCMKSSEKNRIQNCMTISNVGIASVLSDPFGKTATEIISYLLEHTADSMDEKAVRKLIKKGAKSKSDEIIEAIKGYTIETDQAKKLELARGHLEYLDDMITQTEVELYVRIKPYYEFVEFVSTMPGMTELSSTIVLAETGIDMDIFDDAKHLCSWCGLSPANNESAGKKKSVRIAKAGDYLKPMMVQCALAAIKSKKQPYFAIKYGRIKKRRGHKKAIIAIARMMMVCIYHMVSEKKPFTPTDYEELMNPQNHVERVVLNENNVFAYLESLGYDSSKLVKRNDN

SEQ ID NO: 430807 - protein, 421 aa, unidentified
MKKRTYRKIAVKEVDVESLIVELGGSRVVFAIDVAKVDMVAAVVAGDGRVVRTIAWKNPTENGLVLELLAWLGRAGLLVEAVMESSGTYGDVLRHQLVTRGVPVYRVSGKRTHDAAEVYDGVPSLHDAKSAAIIAKLHVDGASRRWEPLSDEKRGLKAAIATMDLFREQNQRLIHSLESSLARYWPEVTELVELGSATLLALLARIGGPKDVTREVSAARKLMLGMSHRLMSEEKIEAVLQCAQASVGLPMLPQERAALMTLASEAHRALKEFKKAKAEVERLSESTVAQVLAPATGKTTAAVLVADVGDPRDFPCARAYLKAFGLNLREKSSGMLKGRLTITKRGSGRARQYLWLAVFRWIQKDPVTRAWYDSKIKRDGGKKAKGVIALMRKFAKALFHVARGAVFDSTKLFDISRLQLG

SEQ ID NO: 430808 - protein, 421 aa, unidentified
MRKADTRKVKAIGDDTLIVAVDIGMEMNRGYCTTPDGRSSKTFKFDNTRAGMDTLWDMITINKNRFKCNEVIVGYESTGPYGEPMLHYLMKKPVRIVQVNPMHTKKVKEISDNSPLKTDDKDPRVIADIIRWGRALSIVIPEGDAAYLRRLNNSRERHVRERTALVNQLQQLVFLLFPEFRTVIKDIKCKTPLYLLREYPTPETLSVLDKDVLGEEMRKRSRGKLKEHHADMLINLARNTVGIREGAAGLSMDIRHILIQLEMLTNLIAELESEMEIALGRIPYSSKLLSIKGLGVVSVAGIIGEIGNFKKFNTRSEIMKLAGLDLYEISSGKIKGQRRISKRGRSLIRKILYYTAIQTIRKDGILHDYYTRLTDGGMKRMKALIAVSRKLLGIIYAIVRDDSEYSANFESMKRQVIKKAA

SEQ ID NO: 430809 - protein, 451 aa, unidentified
MFRPKPILAVGIDPAKRVHRAVGVLFPDEVVFDRELPNALDAIQSLDLRLAELAATHAAELVYGLEDHRRYGRLLCQVLTERGRDVRVVNPLWTNRQRAFYGQDKDDAIDGRSIAAVVLRRRDQLPLANDFGQLAQAIREAERAVEDLGKKRTQLVNRLHLQLSDVYTSAYETYFGKLKSPIALRFFRRFPLPQDLNGQDAVRLSSVILGLANGKVGPHKGRDRETFLQAKAEKILKTSASSAQTLRTLALELKAELIRQLCDELLVNHDRVIRLERMLRKQMLPATGQTITTMPGIGTILAATIIGETASITRFRSRAAYAVYNGTAPASHSTGGRERHKARRACNHRLKRAFWLAARAAALHDRLAKAYFDQCKNRGLNYNECIKRIARRMSDIVYSLLKSGRDYDRTIVEQAIQKRQEQVANAEDDRVKEALPIPDRKRLRDHSHDGN

SEQ ID NO: 430810 - protein, 348 aa, unidentified
MARPTVGVARRVTGGVDTHLELNVAAGVDHIGGVLGVAEFPTTSAGHKGLLEWLESFGEVASVGVEGTGSYGAGLARFLRGAGVQVLEVDRPNRQSRRRTGKSDPADAVEAARAALSGRAQGAGKSRDGNVEAIRALVVAKRSARASKIKALNQIRHLGFTAADDLRERLEGVPREHLGTTAALLRPRVSSDPVTFATKTALRILGQRVVARDDEKAHLDELLEKLVKATAPSLLELHGVGVDTAATLLVTAGDNPERIRSEAAWAHLRGVAPIEASSGKVVRLRLNRGGDRAANSALWVVVITRMRNDPRTQAYVERRLKEGRSKKEIIRVLKRYVAREVYAHLPRP

SEQ ID NO: 430811 - protein, 339 aa, unidentified
MDLYCGMDLHGDNVYCTVMDQEYRRVFEKRLPNDMKVILNELAPYQERMAAVAVESTYNWYWLVDGLQAKEYPAKLANPARMQENIGLKNANDKTDSRFIAKQLAMGVLPEGYIYPKEDRPVRDLLRRRMRLVHMRTGEWLSLEGLVARHSGKDLGITALNGLEDGELSALLGNDPMVLASAQICFRHITFLNTEIKQIEKAVEGRVKLADNYERLLTVPGIGRILTMTIMLETGPIQRFPGPGNYASYSRAVKADHTSNDRKKGAGNSKCGNKYLAWAYMEAANFAVRYSPELRAWYQRKAAKTKRVVALKALANKLAKACFFILRDGVEFNVKKLVG

SEQ ID NO: 430812 - protein, 430 aa, unidentified
MKSNTQNAKIEAITEKTLVLGIDVGSETHYARAFDYRGVEYSKKPFKFSNTEAGFVTFKAWVLDIKEKHGKDKVIPGMEPTGHYWFNLGKFLQDNEMKPVLVNPHHVKKSKELDDNHPTKNDRKDPKVIAGLVREGRYMIPYLPDGVYADLRTASNIRFQLQAELTRIQNRINRWFNIYFPEYKTVYGKPDAKSGILILKEAPLPEDILTLGIDGVNQIWRDAKLRAVGKARAKTLIEAAEHSVGSKEGAVSARMEIRMLLEDYESRNIRLQEVMGLIEGLVNQIPMAEKLLEIKGLGIKTVSGFLAEVGDIRRFNDPKELQKLAGLALVENSSGKHKGKTTISRRGRKRLRYLLFEVAMSLVAKNPEFRELHNYYTTRRLNPLKKMQSLMAIAAKLLRVFYAILTKGVGYDPKKMVNDIRRPAAYAQAA

SEQ ID NO: 430813 - protein, 354 aa, unidentified
MSQTQNAAIAVVGIDIGKNSFHIVGHDERGAIVLRQKWSRGQVEARFANMPPCLVGMEACVGAHHLSRKLNSLGHNARLMPAKYVRPYSRGQKNDFRDAEAIAEAVQRPTMKFVATKTAEQLDLQALHRVRERLVSQRTGIINQIRAFLLERGIAVRQGQRFLRAELPRILATPPDVLSPRMVRIIEDLAGDWRGLDERVESLSNEIETIARQDAGCERLMSVPGIGPIISSAMVAAIGAGDVFTKGRDFAAWLGLVPKQISTGDRTILGKLSRRGNRYLRVLFVQAAWVVLIKPKIWERHGLKPWIEAARKRLHHNVLAIALANKLARIAWSVLARGRAFEARKIDQAANQSA

SEQ ID NO: 430814 - protein, 334 aa, unidentified
MMNDIAVGIDVSKKKLDICIAREGKYKSKSLSNTNSGHKELTKWLQSQGISYEVPVALEATGPYSEAIAIHLSENDWRVSVVNPARISGFAKSELSRNKTDKADAKLIARFALRADLEVWQPPTPATRELRALVDRLQALSDMRQQELNRIEGLSQTAKVTVKEMILDHVQWLEEKIDSIKSEIDDHIDGNPELKRDADLIESIPGMGRRATAQFLSYIGDVRRFKSAKALAAFIGVTPRQKLSGTSLKGRSSLSRAGHNAARKALFMPGMVAKRYNPVIIAASSRLEARGLTPKAIIGASMRKLVHLIYGVVKSGTKFNAKIPLSALDFQEGI

SEQ ID NO: 430815 - protein, 390 aa, unidentified
MSLPNDLSRCLAKFDPHTTLIAVVELSLSSWLVAGMVPGMERNPLKKMEPDEAELLRLLEKWREEAIKAGSTINRVAVAFEAGRDGFWLARWLRARGIEVHVIHSSSVAVSREHRRAKTDRLDTALLMRVFVGWLRGERGHCSMVAVPSMEDEDARRPNRERENLVGERTRIINRMKSALARLGIRGFKPELRKAPQRIESLLTPEGTNIPNNTLEEIRRDLARLALVREQIDAIEKIRLEKLESAPDTRPHAMVRLLASIVGVGIETADMLVNEILSRNLRDRRAVARYAGLTGAPDESGKKRREKGLAKAGNARVRRGLVQLAWRFLFFQKESALVQWFRARTEGPAAGRKTKFIVAFARKLLIALWRLVTTGEIPAGVVLRNNQCSA

SEQ ID NO: 430816 - protein, 308 aa, unidentified
MPLWIGIDVAKDTLAVHVLPLDQLLSFPNTAQGHQRLCDHLAGHCVGNALLEATGGYERAVMTALATAGIPVTRINPRRARAFATALGTTAKTDPLDAALLARMAQLVQAPAPVPDPLREQLRMLVQRREQLVQQRDDERRRLHQATLAMVRARLIEQIGDLRRRIQRMNQAIKQVRCQLDDALAHALGTVPGIGEVTTASLMAYLPELGTLDRRQIAALVGLAPYNVDSGQHCGKRRIRGGRATIRRVLYMACWSVVRTQASFKERYQQLRARGKPAKVAITACMRVLLIRLNAMARDRTPWREVIG

SEQ ID NO: 430817 - protein, 380 aa, unidentified
MPDGIRWVGLDVHARESTIAVFDQATGEVATKRVAGRPHELLPLLRAVERPARMVYEAGPTGYGLARRALAEGIELFVCAPSKTERPADRVKTDQRDAVRLARLLAAGELTLVTIPSLEREQLRDLVRCREDIRCDLVRARHRIGNFLLRREIYWEGPGEAWSREHRSWLASIRFADHASQATLADYLHAHDVLIARRDQVEADLAQLALSAPCRHTVARLRCLRGIDTLSALGLCAEIGEWERFDHPDQLSAYLGIVPSEHTTGSQRRLGSITKAGSTHARRLLVEAAYHYRRGPVVGEALERRQRGHAPEIINISWKAQRRLNARWRQLKDARRKPGGIVAVAIARELAAYCWEIATCPTALEPTPTPTTRRRLTNSR

SEQ ID NO: 430818 - protein, 319 aa, unidentified
MNKSTLFFGIDISKDYFDVYSKELVQKSYPNTKEGYKRFATTITDTSYCVMEATGCYHHKLCMFLHSSGISLSVLNPLIIKRFIQMKLRRIKTDKSEAYMIYTYASEQPLERWYPDAAYIVKSKELLSLIQAYSRPSTSLKNKRHALEERGERSGVVISSINRQLRQLKKEKTLLEEALEVLIKTHEPHLFSRLTSISGIGKKTTLLLMVSTSNFKTFSSYKQVSSYLGLAPNERSSGSSIRGQSRISKTGDGLLRNHLFMCSFTACIHNAQCKAIYDRIVAKGKSKKLALIAVCNKLLKQAFAIAKSGLPYDCNYATK

SEQ ID NO: 430819 - protein, 384 aa, unidentified
MQASHVSTPIKSNVSTIFVAIELSQRSWLVTMHCPDKDKISHHKLEGGDHAGLRMLIDRMRERAARTLGAVPAVVSCYEAGYDGFWLHRLLMAAGITNHVFDPASIAVDQRARRVKTDRIDGEKMLRTLMAYLRGEPRVVRIVRVPTPEQEDARRASRERGRLTKEQTAHTSRIKALLRLLGMAVGNPRRHDWLTWLVKQRDWQGQAVPPQIMAEIKREHARLMLVREQLDALAQAPADLTPAAAQMAQRSELLLRLKSLGPAFATTLTNEVFYKDFRNRREVASYFGLTPSPWQSGGIDRDQGISKAGNPRARCAAIEMAWLWLRHQPDSKLTQEYRRRTLNASKRIKRVAIVALARKLIVALWRYLTTGLVPEGAMLKTAEV

SEQ ID NO: 430820 - protein, 338 aa, unidentified
MYYTGIDLHKFTSYLTTIDSDGCIVKQANIKNVDYNFFQYFSDLGVEHQTTVESTCTWYWLNDLLTSINIPLTLAHAKYVKAIAYAKVKTDKVDSHILAQLLRLNFIPQAHKISNENRTLRDALRARLKIVQRHTSVTNSMALLLAKYNLTEPESLQDIPKLQYEQLSVHASLLKEQMLTLEKSLYPYLIPNEDIQRLLWIPGIGKMNAFTIVLEADDINRFADVKNFFSYCRLVPSARNSAGKSKQRSSKDGNKYLKIAFTDAATHAVQYYSEIRKYHSSLLRKKNKQIAKTIIAKEIAEIVFHILKNKTNFNNKFKGVELQNKKSLQWPRVVSPDV

SEQ ID NO: 430821 - protein, 426 aa, unidentified
MRVLYGRVAAIDVHKDMVKVAIRVPGAKRGTRKTDVLEFRTFYGVLQAMARELRGRGVTHVVMEASGVYTDPVYYALRELDFAEVMVINPAHAKALKGHKTDAKDAIRLLDLYECGLLSGSYIPDPDLREVRDLARYRMKTVQARTSEIQRLQKALETAGIKLSSVVSDVTGGSATAMIEALISGERRGAVMAGLAQTRLRTAGKMADLSMALTGRFTDHHALMCRLHRDRIKVFDDAVKDLDAKIAPLVARYAREADLLKSLPGFGDVIVAGWLGAIGPAPHRHFATASRLASWATLCPGNYMSAKKSKGGRTGDGGAYIKPLLIQAAWAAVRVPGRLQARFGRLVRKFGGPRNKGAQKRAITAIAHTLLKIAYSVLKTGKPYADLGADFYTCRESPDARQDYLMRQLRKLNPGYVITITPAETA

SEQ ID NO: 430822 - protein, 416 aa, unidentified
MNAAGIDVSSRKSMVAILRPFGEVVKLPFEVCHSAEDLSALAQQLKSIEGETRVVMEHTGRYYESIAKVLHEAGLYVSVVNPLLIKEYGANSLRRVKTDKADAMKIARYALDNWADLRDYTPMDTIRYNLKTLNRQFQLASKQRTASSNNLIALLDQSFPGIRKCFDSPVRSDGTQKWVDFAHAFWHVDCVRKQSLNAFSERYRKWCKRHGYFFKQANAEEVYTLAKNAVVLVPKSDVTKVLIQKAANQLTSISRSVETYRTEMERLASMLPEYPVVMQMYGVGKSFGPQLMAEIGDVRRFERKQALVAFAGIDPMPNQSGEKNIRSNKSSKRGSPYLRKTLFNIMSIYLKCAPKEEPIFQFLDRKRTEGKPYYVYMTAAGNKFLRRYYAQVRDYLATLENLPPVDMESTGLQHTT

SEQ ID NO: 430823 - protein, 350 aa, unidentified
MTIVAELFEHVVGIDTHARNHTYCLVHARSGAVLDTASFPTSKAGTARAITWILRRTQGSLLAAVEGTSSYGAGITAALTEEGFDVAEVRPGARVTHAHTGKSDALDAEAAARSVLGRHYDQLARPRQTGRRAALRVLLAARSIIDQQRTANRNALNALLRSVDLGIDARKAVSDAQIRTIAAWRITRSKRPADPLVVARREARRLATAVLEQTTALRENHNELRLLADELAPGLQEHPGIGPVTAAIIVCAYSHHGRVRSEAAFAALGGIAPLPASSGNTQRHRLSRSGDRQLNRAFDVIVRTRMSYDPTTRDYVARRRGEGRSNREIRRCLKRYVCRSIFRELQVRMT

SEQ ID NO: 430824 - protein, 343 aa, unidentified
MNEAITIGIDLAKNVFQVHGVDGSGRTVIRRQLRRSQVVPFFERLPRCLVGMEACATAHHWAREITALGHDARLMPARYVKPYVKRNKNDAADAEAICEAVTRPSMRFVEIKSPEQQSVLMLHRTRQLFVRQRTTLINAFRAHLAEFGIVAGVGRNGVERLLKMIEDGDDDRVPGPARDCLLALRDQLAMVKRQILDADRRILAWHRSSEISRRLEGIPGVGPLIATALVASIPDPHAFRSGRDVAAWIGLVPKQNSSGGKERLGHISKAGNRYLRSLLVVGALSVIRRAKQVGYTRRAWLAQLMERRPTKVAAIALANKIARTAWAMMAHGTPYKEPAPQAV

SEQ ID NO: 430825 - protein, 337 aa, unidentified
MIVIGVDVHKQSLTAVAVDEAGRALAEVTVAAAPELLGWSASLARERLWALEDCRQLTRALERTLVAAGEGLVRVPPKPMAPHRRAGRTRGTSDPIDALAVARAALREPRLDHPRPGEQRLRELKLLVDHRDDLIDERRRAQQRLRWHLHELDPEWAVPLAALERGVWLDRLGRRLARLEQTAQVRIARELVGRCRSLTRTILDLDRELQTAAAQSAPALLALPGCGAISASKLLGEIGAIERFESDAQLARHAGVAPLEASSGKHRRHRLDRGGNRQLNCALHRIAVTQARVHPPARAYLERKQAEGKSRREAIRCLKRQLARTVYTTLKNAPLLT

SEQ ID NO: 430826 - protein, 350 aa, unidentified
MTMVGGLDVHRQQITFDYVDSDGLVRWGQIRPATRKTLRAWLAEHCPDGAGEFALEGCTGWRYVSEELAAAGVGVHLGDPAEIAALRGPKKRAKTDRADARLLRTLLLEGRFPESWIPPAHVVEMRTLGRLYYRLMDERRAWQQRIHAQLFHQGCPPVATLLSAAGRDTLGRAELSVAGRQYVETALRRIDELTDQIDPLRTQLVNFAQHQTGCRALQRHYGIGWLCAVIIWAEVGDVRRFRSSDQLVRFAGLDVTVYSSDAKRSPGHLSRQGSPELRWAAFEAAKSAAGRGSPDYGYYHELAAKHDHKNGKNPTLAVERKILRRCYHTLRALGDAALAVPSPQGQEVAA

SEQ ID NO: 430827 - protein, 356 aa, unidentified
MRKTDPAEIIIGIDTHKEAHAAVAINGLGARLGAMTLLASSRGYHEMESWAQSLGPVRAFGIEGTGSYGAGLARFLQERGHNVIEVNRPNRQIRHQHGKNDPLDAENAARAVLSGQARAAPKSGTSSVEMIRHLKVARDTAVKSRTQAMVTLKTIIVNAPAALRESLDGLTGKMTLIRHLAALRPGAMTSPTASAKATLRALARRWLMLDAEIKSHDAALDALTSACAPTLKEAHGMSTGTAAEMLILVGDNPERIRSEAAFAKLCGACPIPASSGKTSRHRLNRGGHRQANAALYRVVIIRMRSHPPTLDYVRRRTAEGKGKMEIIRCLKRFVAREIFGYLCRARRDPTTVPSTS

SEQ ID NO: 430828 - protein, 453 aa, unidentified
MDLRPGEVERGGYPVGCMRRQSASTGADEASRELAEGGNCMGSNAYRVFVGVDLGSRLHYLFVLDASGNYLGEGGFEHTAEGLAKMADWLLERANGEPAAIAVAVEKPHGAVVDTLLERGLAVYAINPKQADRFRDRHSPSGAKDDRRDAFVLADALRKDRPCFQLVRLPSPEVVALRELLRIDEELCKQQVAVSNRLHEQLLRYQPHLLELAPDKNLIDLFFWEVLERFGSPEMARQADKESIQTLLRQFRIRRLKAEQVLRTLRQAPLRVAPGTIDAATNHIALLLQQLRLLLQQRRENAKEMNALLEQLCISDKAGSYTDAAILSSLPGVGPTVLATVLSHAPEAIHQRDLAACRSLGGIAPVTKKSGRRRQVIMRRSCIPLLRKALYHWARIAVMRDSHFRHHYDTLRASGHHHARALRGVMDRILTIAMAMLRQGTLYDPSRFDDGRA

SEQ ID NO: 430829 - protein, 366 aa, unidentified
MERTFVGLDVHARSVVACALDDRTGELSKARLVPDNETVLAWLQALPGPVAVVYEAGRTGYGLARFLTGRGIRCVVAAPSKMHRPSGDRVKTDARDALLLARLLRLGEITAVTVPSLTQEAARDLVRVREDVRADLMRARHRTSKLLLRQGILWSGGTAWTGAHEQWLGHQRFELPGLQAAYDTTLETVLLATSRRSRLDEAIIEMAHEPQWWPTVSRLQCPRGVSTLTAFGLAVEVGDWSRFSGSTFGAYLGLVPTERSSGEGRHQGSITKTGNTHARRLLVEAAWHHRRPYRPTKTMRDRWDLAPAAARARGHAGNQRLHERWLRFNERKKRTVIANVAVARELAGWCWSLAMIEDPAAPAARR

SEQ ID NO: 430830 - protein, 355 aa, unidentified
MNSEKYIGLDVHQATISVAVQDSTGKLVMESILETRAATILQFFAGLQGRLLVTFEESTCAAWLYDLLKPHVAELIVANPRKNALLKQGNKNDQIDARKLASLLRGNLLKPVYHGEAGVRTLRELARGYLTTVKDLTRVMTRLKAVYRSWAVPCAGRDVYYACHRAEWLGKIPHPGPRRRAEQLYQQLDMLQQLRQQARRELLRESRRHAATARLRQIPYVGPIRAALLVALIQTPHRFRTKRQLWAYSGLALETRISGEYRYLEGQLQRSHKLLAIRGLNHDHNHDLKGLLKATATTASTRPGPLQDFYQGLLAKGMKPNLARLTLARKIAAIALSLWKKGEQFDAEKLKPQVA

SEQ ID NO: 430831 - protein, 316 aa, unidentified
MDQSPAASPGFVGIDVSKDRLDVHLRPSGRAFAVPRDGPGLDQLLVRLRAEPPALVVLEATGGFELTVAAAIAAAGLPLAVVNPRQIRDFARATGRLAKTDRLDAAAIALFAERVRPVPRPVPDAAAQALDELVARRRQIVEMIGMEQNRARQARAPKVAHTIQATLKVLEAQLAELDADIDDTVRGSPAWRAADDLLQSVPGIGGVTARTLIAEMPELGHLDRREAAALIGVAPVNRDSGQMRGHRAIAGGRTAIRNVLYMATLSAVRWNPVLKAHYQQLVARGRPKKVAIVACMRRLLGILNAILKAGTPWQSA

SEQ ID NO: 430832 - protein, 358 aa, unidentified
MLADQVDYVLGGDTHRDEHTIAAVIAATGGVIATRTITTKERGYQAALRFARRHAPGRRIWALEGTGSYGAGLTRFLLAQGERVIEVDRPIKHDQRTAAKDDELDAIRAARTALARAKHATPRSDPAADALTTLVTTRGGAVTARTAAINQLRALVVVAPETLRTKLRDRSADDLVTRCLRLRTTTAQPANQRSVTIAMRSLATRIRTLTREQQTLAREITRIVAGTAPFLLAEPGVGPITAAQLLISWSHPGRFASEARFARIAGAAPIPASSGLTPRYRLDRGGDRQRNRALHTIALSRSTRHPPTRAYLDRRISEGKTRREAVRLLKRYLARHFWRLLEHTPTGTPPPIMIGPCS

SEQ ID NO: 430833 - protein, 453 aa, unidentified
MEKEKSISMPVINERAAGIDVGSRSHYVAIGQSAQDVCKFSVYTKDNIALVEHLRTNGIKTVAMESTGTYWQTLYSCLQEAGFEVVLSNNYIKDPQKKTDTKDARWLQRLHTLGLLKGAFIPAPDVERIRAYHRHRDNIVALASASQQRMQKALRLMNVRLDVALSDITGLSGMKMLEAIVNGERSGEKLASLAHGTVKKTQQEIADALQGQWKDEQLFILADELEAYKNYQKRMAECDKKIEKLLKEVVERLPVSNTPVARSAKRPHIKNRPHYDVETLSMKYFGVNLLTVEGIGENTVMTFISEIGTDILKFPTKKNFTSWLRLAPNNKKTGDKTMSSRTPKGKSIMANAFRLAANTIAQRRSGVLKKIFVRIALKKGRAAAITALARRLAEIFWIMTVKKVPYKCMNEEEYSQKIKMTVIKNIRTKMKKLNINTEELIFEGMISNSLSSH

SEQ ID NO: 430834 - protein, 390 aa, unidentified
MYLIGIDISKFKHDCFIATETGQVVKSSFSFDNNQEGFNQLLTVLLSLDHSQEIRIGLEATGHYGTNLKFFLHEHNFSFMEFNPILSDRFRQVSSLRKTKNDKIDAKLISQMLLSFDYKPNSLLSYHISKLKSLTRFRKKLVKDCTVYKERLINILDLSFPEYSNYFTQVWGKVSLYILKNYPTIQDIANINVESVMPIIKTLSKGHYSMPKLIKLIEAAKVSIGCKDDYHTLELKLTINLIEQMNYAIENVENEITNIMNKYNFKTASIPGIGIISAASIVSEFNDFSNFNSSNQLLSFAGLEPSIYESGTQTTYGHLVKRGSSYLRETLMNVAPFVMNYNNIFYQYYLKKRNEGKHHRVALTHLVKKLLRVIYYLETNAVSFDSSKLK

SEQ ID NO: 430835 - protein, 312 aa, unidentified
MPAIAEPHYVGLDISKDQLDYSLSDTEEGKFPNTVADRAQFIKKLHALHTARVVCEASGGYEKVIVAELLAAGLEVCLVHPGRVRAFAHAEGLLAKTDRLDRCLLRRYGQKMAPRLAVPTDPVVATLRELLEHRRALTTQLSEVKGRLPLAGATLRQLLDAQKTFLEEQIAQVETMIEKHIDSDPGLHAKSERLQQIKGVGEVLSATMLAYVPELGKLESAQLVALIGVAPHPKESGASRAPRHVRGGRSQVRHVLYMAAVCAAWANPILAAFYQRLLAKGKPPKVCLVAVIRKMVCLMNRLIQDPNFVLAK

SEQ ID NO: 430836 - protein, 377 aa, unidentified
MNMNAVGIDVSKGKSMVAILRPYGEIVSTPFEVKHTVSGIRSLIEHIQSIDGESRIVMEHTGRYYEPLVRELSQADLFVSAVNPKLIKDFGDNSLRKVKSDKADALKIARYTLDSWTELRQYSLMDEIRNQLKIMNRQFDFYMKHKTAMKNNLIGILDQTYPGVNTYFDSPAREDGSQKWVDFANTYWHVDCVRKLSLNAFIDHYQKWCKRRKYNFSQSKAVEIYEASKEIVSVLPKDDLTKLIIKQAVEQLNTASQTVEQLRSMMNEAASKLPEYPVVMAMKGVGKSLGPQLMAEIGDVSRFTHKGAITAFAGVDPGVNESGSYEQKSVPSSKRGSGTLRKTCYEVTVVKRRLQERFISRHGTFVFSCQHLERALI

SEQ ID NO: 430837 - protein, 352 aa, unidentified
MLSVGLDLHKRYSQVEALEESGERRSGARLVNEFEEIEGFFRSLGEPCRVVLEAGWNWGSMYDWLEQVENVVEVQLAHPYGVRAIAAAQVKTDRIDARMLGQLLRVGLIPQAYIPGKETRQLREAVRQRLFLVRVRTMLKNRIHALLDRHHVVPPPVSDIFGKRGRDYLSRVELPGWAQNLMSQDLRLLEMLGQEVRQAEMLLARALKGDRRVELLLTIPGLGAILATVVVLEIDRIERFFRPAKLVSYAGLVPTTYSSGGKTSHGGLMKMSNKWLRWALVEAAWIAVRRDPYFRHQYGLRCRTKGAKTAIIAVARRLAEVIWYVLTEDRPYQVRQPASKRREYGLTPAALS

SEQ ID NO: 430838 - protein, 349 aa, unidentified
MDFFAGLDVSLEATNICVVDGDGKVVRETKLETDPDAIELFLAEWGIHLKRVGLEAFSYSAWLFTALAEKGLPVICIETRHAKAALNAMLNKTDRNDAKGIAQMMRTGCFRAVHVKSEAAQTLRALLVGRKALLGKVLDMENMIRGLLRPFGLKVGEISVGRFDARVREIMAGKKELEAIVAPLLDARAAMRLQLAKLHRLALAAARSDSAVRRMMTVPGVGALVALTFRATVDDPTRFKRSTNVGAHFGLTPRRYQSGQTDRIGSISKCGDELTRAMLYEAAIAILTRIPKNFKLRLWGLRLARKKGLKRAATAVARALAVLLHKIWIDGTTFRFGAGGKRGRVAAAK

SEQ ID NO: 430839 - protein, 411 aa, unidentified
MIEQVTVGVDVGCHRHRVAIAAPDGKFVEEFDIPADSEGFKYFFGRLDFYRKSFDVPVVVAMEGHGGYGRPLDSCVKRSGYTLLNVNNLKLCRFKEIFSSPAKTDAIDARKIALLARMQDVLSPSREVLQEVRDVPQEHQILKRLSRRRRQLVDEKVVVLNRMQADLQAVSPNLSDMVEYKDGVAFLNLLTCRSNLEDLSRLDKKELLSIGGIGEAFAGRVIKWQKKAYFSREVAYVGPMIIEDAKRIIEIKRSINELEEKIEDILKSSKLAETIGSIPGFGAVCTAELVAEIGTMERFSSERSLALYLGMAPLDKSSGKCQGTRTPTQINKRGKAAMMTAVAHNIRKVEESKRYYQKKRDEGKSHNQAVRALGRHMIRVIWSMTKRNEVYQIRGGENKTCSDETSAVIPA

SEQ ID NO: 430840 - protein, 317 aa, unidentified
MATAPSVFMGIDVAKAELVVATRPTNESWVVSNDDRGIEALLKRVRRVAPTLVVLEATGGYERAVVAALAAATVPLVVANPRQIRDFARATGQLAKTDRIDAEALALFAERVRPEPRPLADDATHALDALLTRRRQVLDMLTAERHRLEHALPAIRRDLNQHIRWLERRLRDVDHDLDQMIQSSPVWRAKEDLLRTAPGIGPVVSRTLIGDLPELGTLNRKQIAALVGVAPLARDSGTLKGKRLVYGGRAPVRAALYMAALVASRRNPAIQVFYQRLLATGKPPKLALTACMRKLLTILNAMVKTDTTWRSMSVTTA

SEQ ID NO: 430841 - protein, 355 aa, unidentified
MKLYVGLDVSLDSTSVCVVDQDGTVVRECKPATDPEAIGLALKEWIGSIERVGLEAQSLSPWLSVELIRLGLPAIVIETVHMQRALSAQRNKTDRNDARGIAQMMRTGWFRAVHVKSPESQQLRFLLSGRRLLKRKFIDVENELRGALKAFGLVIGAVGRGDLEARTIELIDGAPRIVVALATTLLRVRRMLFAEYAELHKQILRVVRDDEICRRFMTVPGVGPVTALAFKAAVDDPARFKRSRTVGAHFGLTPRRFQSGTVDYSGRISRCGDPEVRTALYASASSLLVRCKKWSSLRAWGMTIAKRRGHKKAVVAVARKLAAVLHRMWRDGSEFRWSTAKDAQPNGMAATALTA

SEQ ID NO: 430842 - protein, 387 aa, unidentified
MNVVTDKSEPLTAIHTQLGAIFVSLELSRSSWLITSLSPGGGEKMSKHSVRGSDFAGLMQRFAQLQEKAKLRTGRSFRIIVVHEAGLDGFWLHRALQNEGIESHVVDAASIATSRRPRRAKTDKIDGETLVRTLLAYKHGEPRVCAMVKAPTPGEEDRRHLCRERKALTAERVRHVNRIKGFLFSQGISGYQPLRRDRRQRLEELQTGDGRALPQHLKALVSRELDRLELLLKQIKTVEAARDELLAEEQTAKLAPAPMLLDIRGIGPEFAAILWSEGLFRPFENRRQIAAYAGLAPTPWQSGTVDREQGVSKAGNPRLRTTSIQLAWLWLRNQPRSALSVWFHERVSRNGGRLRKTTIVALARKLLVALWKYVTAGVVIEGVTMKA

SEQ ID NO: 430843 - protein, 308 aa, unidentified
MHKIIDNNETGFAELQNWLIEQQVELNRVHVCCEATNVYYIAVAIHLHQSQIAISVVNPSIIKSYAALKLKRIKTDKQDAKLIAQYCQTECPNLWQPQSKTKAQLKSLCRRAEQINQLLTMEKNRAHVADEFSQESIKRAIEWLEQELNSCRASVANLIKQDKTLQKQQQILTSIVGIGQTTAQILLSVLVDIDKFSTAKKLISWLGLSPVVRQSGKHKGIAKLSKMGDRSIRKALYTPARVACTRSKLWRGWFDEKVKTKPVKQVYVLMMVKLVKYAYYCIKHNELFDEKRHVRAEQSWKTVKGEAL

SEQ ID NO: 430844 - protein, 386 aa, unidentified
MGGSRQVRRGPGPSSTLVTPDRAGNVVGVDPHKRTLTATVVDPRGGIVCSEHFRVSGDGHRALEAWALGFGPVVRWGVEGASGWGRHTAIFLAGRGYDARDVCPNRTAGHDRARQRGKSDTLDSERVARETLAHPLLPRAFKRAGQDAGPDEQAELLAVWWQARCSLLNRRQHLLNEAEALLGDLPLELIERLPGTQRVRPRLAALARLTRRRRFDLPTKLRLGLLGEYRAEIAKLDQQEKQVTSELRTLVQANGSTLDQLCGLQTVSVAELLVEVGDPRRFTEGGFARFNGTAPLVASTGEGPGEPHRHRYNPGGNRRVNAVLYRMALTQLRCEPRAQALYANARAHGHTKKEARRILKRHLSDVIHRRMTRDLAADPAQPLLAA

SEQ ID NO: 430845 - protein, 372 aa, unidentified
MNYNTVYVGMDVHKESFSLCAYTIEAEKASHYQRTEADYKKVLNYLEFLRTIYGDDANFICGYEAGCFGYTLYHQLTANNVKCIILAPTTMLEQRSKKRIKTDRRDAEIIAKCLAQHNYSPVHIPTAKDEETKEFLRMRDDHKLALKKVKQQILAFCLRHNYRYDGKSHWTAAHLKWLKALTPEALYKEILDEYLLTYQTLSDKIERLDKRIEELATQDEYKEAVKKLCCFIGVKTHTALSVLVEVGDFKRFASAQHFASYIGLVPGEDSSGDDQNRLGITKAGNRHVRLLLTEASQCYARGQVGFKSKELKSRQSGNTPAVIAYADKANERLRRRYYKMVLNKYKKHNVAKTAIARELACFMWGMMTDNIA

SEQ ID NO: 430846 - protein, 310 aa, unidentified
MSVWVGVDIGSRTSVVAVRKDGRPAGQWDIAQTPAGRKAAVKKLLALKPKSIVMEATGIYYLDLALELHAADLPVSVINPKSFHNFAKLMLVNSKTDAIDAQLLSEYGERMTPRLWTPPSLVQLELRALGRHINRLVGHRTRAKNELHALQATATTVSMLIEDQEEAIASLDNRIERFRKAGRELVAQCPTLTRQYKQLLAGPGMGEVSALAALAELTILPQILKSSQVARHAGLDVRQTQSGTSIDKPGRLGKSGNAYLRAAMYMPALTAVRCDPYAKAFYESLVNRGKKKMQAIAAVCLLYTSPSPRD

SEQ ID NO: 430847 - protein, 367 aa, unidentified
MKKVSTAATKPSKNVSQSNLTIGLDLGDRSSCYCVLDETGRIVMEQKVSTTPKALQAAFGAMPHSRIALETGMHSPWISRLLSGLGHEVIVAHARNVRLIGESRRKDDRLDAQTLARLARIDPQLLCPVKHRSARAQADLTVIRARAGLVRARTALVNTARGLAKSYGERLRGCNVRNMNPEKAEGLSPELQAALEPLLVGLESLSEQIREYNERIEKLAQESYPQVALQQQIKGVGTLIALTFLLTLEDPHRFRKSRDVGCYLGLQPGRRNSGQSEPQMHISKEGDPYLRTLLVQGAQHILGPFGADCNLRRWGLKLAERGGRNGKKRAIIATARKLAVLLHHLWVSGEVYEPLHNSGRMAMPAAA

SEQ ID NO: 430848 - protein, 423 aa, unidentified
MQVMHKRVAGLDVHKATVVACVRAVAGRKVTRECRTFATTTAGLRELLAWLTACRCTQAAMEATGVYWLPVWKLLSEGEFELIVANAAHIKNVPGRKSDVNDATWIADLLAHGLIKASFVPEEDFQELRSLLRTRKQLVREQTRHVQRIQKTLEEANIKLDAVICDIMGVSGRRIIGAMIAGERNPHRLAALVERGIKASPKQLYDALHGRLTQHHRFLLQLHLGQWDALDTAVRAIDREIDEQVERLDAKRQDTEPPFRELIVRLCGIPGVSVLSATTILAEIGRDMQRFPTAGHLVSWAGLCPGQNESAGKRKSARLRKGAPWLKTALVQCAWAAKRKKNSYYMAQFYRLQSRRGPQKAICAVAASILTAVYHMLKNGTQHQDLGADHFHRRSPEVQAQRLVAQLGKLGFEVHLQPISAAA

SEQ ID NO: 430849 - protein, 447 aa, unidentified
MGSYAGVDWASEKHDVLVANAGGEELLAATFAHDEQGLRSLCRALVRLEVELVAIERPDGLLVERLLDAGLRVLPLHPNQVAAARDRFRVSRGKSDRFDAFVLCELARTDHHRFRVLEPDSDQTKALRALTRGREDLVATRTALTNQLRAELERFWPGPLGLFTRLNSRISLAFLERYPSPADARGLGEARLAAFLARERYSGRQHPSQLLARLRRAPEGRVGELELITRRQLVLSLVSTIKSLNMQITELERQIATAIGEHPDGQVFLSLFKGTVITAAELLAEIGDCRARYPSRDSLAGDAGQAAVAIESGKRKAASFRWGCNKRLRSAFCTLADSTRHWHPWAQDLYASARARGHDHPRALRTLGRAWCRIVWRCWQDRTPYDPARHRALQQHCTVTIHTPSGPVPDLTATQRMLGATVTEPAARRAEREALDGKPTSAISPGG

SEQ ID NO: 430850 - protein, 503 aa, unidentified
MGLELVSKFLLLASFKSGNNLVHETVFDKTDDGWFNIFTGKEFTMTNYYLGIDISKGYADFCILDGNRNPVIRNFQLDDTFEGHCTLYKILKEFMAQYSEAMISAAVESTGGYENNWLKSLDSFQAEMNIRYARLNPYGVHNNSKAALNRLTTDAISAHNVAEYMISHPDKVSFTHEESFATLRKQWKFISALTKQKTQFHNQLGALLYSSYPEILPYCQNTMPQWVVTLLKRYPTTVHVARAKVSTLVRIPHITHARAGELIEAAKKSVASSSDEASAQLITATIKQIQHLQKSIEEQTKKLNRSCSLPEVEILKTFPGIGEFTAIGLTLQIQTIKRFPSVKKISSFFGVHPVFKISGDGSSAFRMSKKGSSEARRLLFMVAFNALRSNPLIREYYHRQLQKGMTKMAAIGACMHKVLRIIYGMLKHEQPFDSSIDRKNSEKTVLRNSGDKKFDANRRYQDFDKNAPVSRRQSRKRGEQKPLPKSANDAECGASTPAPQCLI

SEQ ID NO: 430851 - protein, 326 aa, unidentified
MALSHLTDNTFVGIDVGGAGLDVAWHRGDSAHYANRPDAIATLVERLRTGPEVTRIVLEPTGGYEKPLVKALRQAQLPVEVIHTTRFNAYRALVGVKAKSDTSDARLLASYAAAPDEVRGRKAGHVELPEDAIREALSELAGRRDQLKHMIHAETCRLGMVRLTELRQAITAHLEALRAEDKQVHRMMLELVRQRIDLRRDQRLLKTIKGIGVKSALGLLASVPELGRIDNKAAAALIGVAPFVRKSGTMSAPARIHGGRAAVRSILYMAAVTASRHNPVLRPFYERLIANGKPPKLALIAVLRRLVVFANAVLRSGQPWRGANAT

SEQ ID NO: 430852 - protein, 469 aa, unidentified
MTPFLKDYCFLLSTPENIHLGYYGSPIIHGDTIHHQAIYSVEEKEEVVLLKEYQVFKESPKGDEGGSMFYLGIDVAKKSSRYLVLDSEGKRIISFSLENLKERFQNLLSRLQEAKIATKDILAGLEATGWFWENLYQFLQEKGFKVVLLNPYYVNKFREALAKKAKTDDIDALVIANLLRTGEYMNSVVPEEKIQVLREYTNLRYEFLRTRQDYQRKVISLLGVVFPEYERTALKNPFGVAPLQILKEFPTAKDLALAKPRHIEKIVRSIQGNNFDLKEIQSLIDWAKNSIYSGRAKEARGVSLKMLLGQVQALNSNIQEIDKSIEDILSPGTDDSFPGENLLSIPGVGKKTIAAVLSYLGVDGSSFCSAKKVTGYVGFFPRLYQSGETKRENRISHRGPKVLRWALYMSAVSCLIHNKEMRVIYQRKISQGKSAKQALIVVAKKLLEVMLAMLKSGKTYNPIQVYANT

SEQ ID NO: 430853 - protein, 464 aa, unidentified
MRTLSVINPKAAGIDVGSEKLFVSIAGEEPAVFGTVTDEVYRLRDFLKQEGVTTVAMEATGVYWLYAYGVLEAAGLQVIVVNGRYVRNLPGRKTDMSDCQWLATLHAHGLLRGGFVPPAEIRRLQDYQRLRADHISEAASQVQKMQQALERMNIKFHDVISDLTGVSGMKVIQAILAGERQPGRLLELCDKQIQKKKSERVLESLHGVWAPEHLFALGQALSVWEFYQKLLAQCDRQIEAVLKDLAGPPPASPPSSPESGGTKAKGPKPPGKNAPQIDDLHALLVQICGGRDATSLPGVADYLWLQLVAETGTDLRAWATEKHFVAWCRLAPGTKQSGKRKGSVRRQCNRAGRLFSAGARSLVQSVDKGLGGFVRRISRRKGGLVATKALARKLAGLYYRVLRYGLEYAERGLREYEQKYEESQRRLLAKLAAKHGFQLVSQQALALKATISQAVSPNPSQSHA

SEQ ID NO: 430854 - protein, 384 aa, unidentified
MNKDSIIFIGLDTHKSFIQVTVLQEHRGANPLHLGRIKSNKSALIKLAKQLQSKYPKATLHFVYEAGPCGYWTYRLMTSLGHCCYVVAPSLIPKKPGDRVKTDKRDAAKLAKLLKAEELTPIYVPEAEDEAIRDLSRARETAMKDLKDAKFQLKGFLLRNNIQATVNDNWSKKHLRWLTDLILPHHSQQIVLQEMIITINERMQRLQRLDNELLHQVKNWRYYPVVKAIQAMRGVRLLVALGTIAELGDLRRFDHPRKLMAYLGLVPTENSSGGKTRRGSLTKCGNSRARRLLVEGAHTYKHKANISVELQLRQEGLPKEIVDIAWQAQQRLCRRYQRLLQKGKHRNVVVVAIAREMIAYIWAIAREVVVSDVDPKTRIARLPA

SEQ ID NO: 430855 - protein, 387 aa, unidentified
MSQLFDASKSLTSLEQDSTIIAVIEMSQAKWLVAAVVPGVERQPLKRLDADEAALLKLLHRWRNEASQAGRQIKRIVVAYEAGRDGFWLARWLRVHGVEAYVIHPASIAVSREHRRAKTDRLDTELLLRAFLGWLRGEKRHCSMVAIPTVEEEDARRPNRERGNLVTEQTRIMNQIKAILTRFGIRTFRPTLRKAEEKLEGLRTAEGAPLLENTRAELRRHLARLRVVREQIRAIEHSRLGKLATTPEKGPHAMVRLLARVLGVGVETADMLVNEVFSRRWRDRKAVARYAGLTGSPDESGKRRRERGLARAGNARVRCGMIQLAWRFLRFQKDSTLAQWFQARTADGRGGTRKTMIVALARKLLIALWRLATTGEASDGIVLRPAS

SEQ ID NO: 430856 - protein, 421 aa, unidentified
MAAATADKEIASEVPVEIWFQMLWRRAEPILFGSPNQSDGAAVMQPNDINSPTILLAIELSASTWLVAARVPGSEKPHLQRIDGGDTVALLALISSLQARVACRHAATINVVCCFEAGRDGFWLQRFLTAQGVDTHVLEPTSILINRRARRAKTDRLDAVGMLRVLAAFLRGDRQSCSMVRVPTPDEEDAKRTHRERESLVQERVRIENRIEALLFTEGIRKRPSLRSWDRDLAVLRTGDGRRLPIHLRSELDRLRRRLVMTLELIGEVESERDEAAEATPQDQTCLKIAALGRIRGVGDNFAAVLTREVFYRSFDNRRQIASYVGITPMPYQSGSMDRDRRISRAGNPRARTTMIQLAWLWLRYQPGSELAKWFRNRVGTLAGRTRRIAIVAMARKLLIALWRYVETGVVPAGAEIRAEA

SEQ ID NO: 430857 - protein, 336 aa, unidentified
MFQLGIDVSKKTLDLCLLREGVKGSVKTRKLQNDINAVNAVIAWLSKQHCKPEDVHIIMEATGVYHESLAYGLHKAGGRISLANPHRAREFARGMGMLTKNDRVDAYMLACYGALKAPEPWLPPPEEVRHLSALLRRRDALVADSTREKNRLEKYLATDTPSVIAESVEAMIGQLNAEIKRLDRLIRSHLNQHPELKKDFDLLTSIKSVGYQLGLNMLVILRSHDFATAEQAAAFLDVVPVEKYSGTSVRGCPKLSKIGPPEIRAKLYLASLCGLRFNPLMKAMYERLCLRGKGKMCAIGALMRKLVHWCYGVLKTQKPFDVGYLSSYARSACKAA

SEQ ID NO: 430858 - protein, 495 aa, unidentified
MKSGEKVLRRRHTAGGRIAPGGSRSRTLNLAKVTESTPDRLAALVPKSERTPAREAPCISVTYDGATMHHKSKKPMKEWKEITHYAGFDWARDHHLVVIVDQQGQIVADFQFDHSVEGWKSFHEKTAPFGNLAVAIETSQGVVVDQLLQGGYAVYPVNPAAAVSYRQRKAPSGTKTDQLDGWSLADALRVDGHGWKALQPMDELSLQLRLLCRDEVALIEQRTQLVNQLKQALVEYYPAALEAFDDWVNRSTWDFVIQFPTPEGLVQAGKRKWEKFLHTHRLWRSETAEKRLAIFSQADQFKASAPITKAKRQLALSLCKLLRTLQQQLDEYQNQIQELFKRHPDHDLFGSLPGAKTILAPRLLAAIGSNPDRYTTVEVLQCFAGSAPISFASGQIHKAKVRWACDKFLRHSVHLWANCFRKASAWGQAYYQKKRQDGMSHACALRCLAQRLLKIVFRMITDKKPYDAELHARNQLKHGSWVLALVEKPAVKTGA

SEQ ID NO: 430859 - protein, 320 aa, unidentified
MLSFCGIDVSKDRLDVTVLPEEQCSSVSNDRAGWADLVERLRGCSIAAIGLEASGGYERGVVRALLAAGLPVHQVNPFQLRQFARASGVLAKNDRLDARMIASFVGIMPTRPAQRRAPAAERLVEMLAVRRQLSAEKVAAENGSRLLEDAMLQRLSRRRVGRLAADIDLLDKHMVEIVETDAALVYCHRLLTSMPGVGSLLACTLIALLPELGSMTRKQVAALVGVAPYAFESGTLKGRRRIWGGRAHVRQVLYMAAMSASNWNPALKAFHDRLKAAGKSPKVAIVAVMRKMITALNAMVRDDVVWADRLSGRHNVPTAR

SEQ ID NO: 430860 - protein, 410 aa, unidentified
MLQTLVHCCAGLDVHRSTVVVTLLKSQSDEQIRKNVREFSTFRSSLQQMARWLKGEGVELAVMESTGIYWKAVFEALEDEEIEAMVVNARHVKKVPGRKTDVTDSEWLADLARCGLLRPSFIPPRDLRELRLLTRYRSKLSGILAAEKNRLHKVLDDCGIRLGAVVSDIDGVSARDMVRALLEGSTPKEIARLARGKLRKKVIELELSLDGRISDRHRLLLQTISRHIEGLVREIEAIDRQVFAAMEPYRNEWQLLQTIPGIDQTSAAMLLVEIGVDMSRFGSGDHLSSWAGMCPGNNESAGKRKTGRSRKGNQYVRRILCEVAEAAYKTDSQFKGLYQGLVIRRGHKRAIVAVGHRILEIVYLLLSRKEPYRDSSVNYEALMVKRNAPRWIEALRKYGYIRQTEHEIAS

SEQ ID NO: 430861 - protein, 344 aa, unidentified
MDHFGGLDVSVKETSICIVDDTGRIVKEVKVASEPAALLKVLGNPTYRFKRIGLEAGPLSQWLFSVIAEAELPVICVETRHMQAVLKAQINKTDRNDARGIAQMIRVGLYRPVHVKTLRSQKLRMLLTHRKLLQSKAIAIENDLRGTLRNFGLKVGMVGKVRFEARIQELVENIPNLAVLVEPLLIVRRVLREQIVILHRRLLAIVREDEVCRRLMTTPGVGPVVALTYRATVDVPARFRKSKSVGAVFGLTCSRYQSGEIDWSGKISRCGDEMMRTMLYEAAQSMMHSKKWSWLKAWAMQIARRRGVKKAIVALARRLAVIMHRIWVDGTEFRWTREQAAAAA

SEQ ID NO: 430862 - protein, 422 aa, unidentified
MHKREERPFAAFIGIDWADKKHDVCLLVAGSEKREGLVLEHSPRAIQAWAEQLRQRFGGAPVAVALELAQGPIVSALLEHNFFVLFPVQPAMLARYRLAFTPSRAKDDPTDAELALELLLRHPDKLQRLEPESAAMRSLRRLVEERRSLVEDRTRLTNRITSALKAYFPQVLGWFRDKEAAIFADFLERWPTLEAAQRARRDTLVDFFRASNVRYAATVERRLDAIRSERPLHTDSAVIEPLRLLVDALLPQLRAVSTGIERFDAAIAELAPTLPDYKLFAALPGAGPALAPRLLVAFGERRERFPDAAALQKYAGVAPVTERSGNKSWVHWRYSCPTFLRQTFVEWVGQTIPRSFWAKTFYEARRARGARHQAALRALAFKWIRVVHRCWVDRVSYDESRYLMALQKRQAPLLKFAADPST

SEQ ID NO: 430863 - protein, 362 aa, unidentified
MRIIGCDLHARQQTLAVLDTATGEVMEKTLTHSGSNVQEFCAALPGPVRVGIEATGTMQWFLSLMEELGIDCQVGHPAKIRAAEPRKQKHDRRDADLILKLLVENRFPSIWRPSKELVDLRALLLHRHQWVRMRTRIQNALQAIALANGLRRGPGLWSQTGQCTIASLPLAPHTAHRRSELQAMYAKFDNDIEKLNQRVQEQAGKRPGATLLMTHPGVGPITALATDVFLGNPKRFADGKALASYVGIIPSEYSSGGRQRLGGLSKQGNPLLRFLWCEAAAHAVRRDPGLQRFYRRKLVQKGLGKARVAAARKLGIRLWIMLRDQIDYHEFCRRGQMQQNSGDACAGMPGTRYGANSHRPID

SEQ ID NO: 430864 - protein, 362 aa, unidentified
MKTKVKEEKVNIKDELLACYDVSGEEIHFCSEYRREEKIYSIEDIVSNKTRTIKNHLLELEDISRKLGFKNIHIFCEPTGGYEKKLISVARKMNFKVSYVSGEATKKARIIESNDNSKSDIKDKHIILTLAQMSKILHCRQLPSVYSRLRLLGEYYDDAANSTMRIRTEISGVKLKLFPDFPFKCSYLYTKAGEVLIEKYGLNPFNITKYSWTSFWQRMKTHLKQPERAKLKEIYRNAVSAVIYISEAEASISEKHLKWLWQTYKISLERKEKLKDELCKLYQTLPEYRSLSKIEKISDSLMARLIAETGPLSDFRNAKKILRYAGLNLRQRQSGKYSGLNKISKRGGHYCVRCFFKWFFHA

SEQ ID NO: 430865 - protein, 387 aa, unidentified
MTPTCQSAPATAALDYDSTMFGALELSSKKWVFAVQLPGSAKHTRHIVEPNGPALASLIDRLKERSTQAGKAISRIAVTHEAGRDGFWLARFLQRRGVELFVMQASSLPVDRRARRAKTDRIDAEMLLRTLLAWLRGEPRVCSMVPIPSEADEEARRAHRERADLTKERRSILSKIDGILATLGITGFRGARRDRRDQLANFRQPDGAPVPAAAQGRIERLLDRLDLVLAQIAKIEKARDAVLKKPKAESEPERMIRDLVELCGVGVESATLLAREVFCREFRNRQALGAYVGLTPTPFASGGLQREQGISKDGNRRARALLVELAWTWRRHQPDSALTRWFEARIAGAKGRLVKIAIVALARKLLIALWRFVKDGVVPEGVMMKAA

SEQ ID NO: 430866 - protein, 341 aa, unidentified
MQITTIGLDIAKNVFQVHGIDAAEKVIVRKQLRRGQIIAFFEALAPCLVGMEACATSHHWARELTKLGHEVRLMPAKDVKAYVKRNKNDAADAEAICEAVRRPTMRFVRIKSAEQQGQLMLHRARDLLMRQRTQLINALRAHLAEFGVTAAQGREGIKELLAIVAQDESSRLPIDAHASLTVLAAQLQAVQTTIGSIEKRIVAQHRSNEASKRLETIPGIGVIGATTITAVVTDPKAFRSGRDFAAWIGIVPRQDSTGGKQKLGPISKQGDQYLRRILIVGAHSVLRRARQQPEKYPWLTQLLARRPFKVVAVALANKMARIAWALLARGGTYRAPQLVAV

SEQ ID NO: 430867 - protein, 423 aa, unidentified
MENTAARKRKQVPEGYLIIGIDPHKKRHAAVAITQDFTTRDKFKFDNTREGLEMMLRRAKMQMMKSGCRGVIFAIETGGHYWRNLAYALDEQGIPFRFINQFTLKRRREGKDLNRRKNDYRDSEVAAQLLCTGEFTESKIPQGVYAELRTAHNAYRRLVKERTRITNLLKGLLDALSPEFTHVFKDPCALTALSVLSICPIPRVIAGMTEDEFVATIEAQHKGRLMRKKLRMLHHMARTSIGIEAGARSVSFEISFLVEKLELIRQHIRLIERPLVSLVDETEEGKYLLSIRGLNYIAVAGLLAELGCFKAYRSAKQMIKMAGSNPIESESGGKRSSHTPMSKQGRPVLRYCAWTSVIPMLRLNPDFRAWAKQRRERPAHANPLNGREVVGAALNRLLRLSFALVKNQTYYQVPKLESALVAV

SEQ ID NO: 430868 - protein, 392 aa, unidentified
MLYLGIDIAKNNHVATLIDSESKSLFRGFSFTNTTEGGESLISKLSGYISTTTEVEIGMEATGHYWLPLYSFLIEKGFIIHVINPIQTDGWRKGIEIRKRKTDQIDSFLIADLIRYGDFASTNLADEDMISLRNLTRFRHYLVSSIGDLKRKTIAVLDQVFPEYQSLFSDVFGKASKEILLSFQTADDFTNITAHQLESVLENVKQKTFAKNKITQISEVAATSFGLKYCQDSFSLQIRLLIEQIKFIDAQVSDVEAEIATILEKINSPITTVPGIGIITGAAILSEIGDINRFSNPSKLVAFSGIDATVSQSGENSGSGLKMSKRGSPYLRKALFQAALVASNCDPVFRAYYQKKRSEGKHHLIATGAVARKLCYTIHAILKNNTPYKLQN

SEQ ID NO: 430869 - protein, 332 aa, unidentified
MAYDFVIGVDVGKYFHHACVLDPQGRQVLSKRINQHEGSLRKLFGQFLADNASVLVIVDQPNNIGRLTVAVAQDMGADVRYLPGLAMRQLSRIHVGNSKTDVRDAYVIAHAGLNLPDSLRSVDRVEEVFTQLKVLNGIDEDLARAYTRLINQMRSALVGTYPAFEHVLRGQMIHRKWILHLLAKYGGPTKIRRIGKTRLAAFARSHKARNPEPVIDAMLAAIHGQTVSIAGAEYAELGVAMSAKDALAKLEHRKEIEAQVLKLIQDIPQTEILLSMPGIGPRSAAQILMTVGDMSDLPDAAHLASYAGLSPRTNQSGTSIMSNSPNRAGNKN

SEQ ID NO: 430870 - protein, 341 aa, unidentified
MRMFAGLDIGGKHTAICVIDESGKLVWRGIVDTHPEMIDGALQRFKGSLDKVGLESGPFTPHLFRSLEAMGYPMICMDARRAADAIKSRRIKSDKGDAWALAEMLRTGWFSSVYVKSVDTHRLKALLGARDQLVKLKRSLGNQVRGLLRPFGIRLPSRVGGKKFDEAAYLATQKDAILHAAVRALLESLASIEGQQARLDDELDELAKRNEIAWRLMSVPGVGRITALAYMAAIENVDRFRRTRDIGAYLGLTERRYQSAETDVGMGISKQGDAMARHYLYEAANVLLTTVKKRFALRNWGLRLIKTIGPKRARVAVARKLAVLLGRMWKDGAHFEAVVAA

SEQ ID NO: 430871 - protein, 344 aa, unidentified
MQPLCLNTAFLLCAMNYSHFVGLDVGKKSFDACLVSLDKELSHHTFPNTPGGIEELLHRVKQRGVEVETALFCAENMGSYVIDLCLSSYQFHFPLALECPLTIKRSIGLQRGKNDRIDARRIARYACLHYRKHRLYELPDKDLVRLRNWMVIRDNLVKQKVSSRKLLELPRETSGLADLVTAMTFLEKQLSLLKEKISYVEQEMEKIISSNIALLTNYQLLTSIKGIGPINAIVLLCVTGNFHRFSDPRKFACYCGVAPFEHSSGTSIRGKTKTSNLANREVKVYLTRAAITAISWDPQIKAYYKRKTGEGKHKASVINAVRAKIIARCFAVIKRKTPFVTLRA

SEQ ID NO: 430872 - protein, 469 aa, unidentified
MKRNEAKGASEKRARQRLSRHLAQVNLYAAGIDIGAHEHYIAVPEDLDDTPVQCFSCFTGDLERMADWLVEIGIQTVVMESTGVYWIPAFEVLEERGLEVLLVNARHVKNVSGRKTDVLDCQWLQQLHTYGLLQGAFRPPQDICALRAYLRQRAMLIDYAGMHIQHMQKALRQMNLLLDNVVTDITGKTGMTIIRAIIAGQRAPEKLAQHRDPRCKSSEEVIAKSLHGHYRDEHLFCLRQAVEFYDIYQEKLCACDAAIERQLEAFDDRGDPAHLSATAKSRRKTKNTPGFDVRAHLYRITGVDLTRIDGIDSSTALRVVSETGLDMSRWKTEKHFASWLSLSPGNKISGGRVLTRRTQRSSNRAARALRMAAFALANSRSALGAYYRRMRARLGAPKAITATAHKLARLIYSMLKHGTEYVDRGQDYYEQQYRQRVVKNLTKRAAQLGFALLPTTPDQGSPQHEGSMA

SEQ ID NO: 430873 - protein, 357 aa, unidentified
MEKRLKQSLGIDVSKLNLSLSLGFLNERLVKEFKSRPDVSNDIKGYKVLLKWLGASVDPEVELLVVMEATGVYHQGIAHYLYEHGHSVCVMQSGRVKRYAQSLDQRSKTDALDSRMLSMLGLERNIRPWHPPSEELQELKGLSRERSSLLNDRTMETNRQGAIASSVHSNVRALKRHKIRLKLLNTQIEAVEEEMRSLIADNEELKRKLEYLTSIPGVSFISAATVIGETLGFESIVNAKQLASYAGYDVVLRESGNYKGKTRISKKGNSHIRAVLHMPSMTCVRCNPTLKQFYNRLKPNKAKPLVALVAVQRKLLILMYTLWKNEQFYDAEFEIKKQQKHEALAARDNNLINQSVS

SEQ ID NO: 430874 - protein, 404 aa, unidentified
MIFAGVDWAEAHHDVCVMSRDGRVLEQRRVSHSVTGIGELHALIGAHADEGELVAVGIETDRGLVVTALVAAGYQVYAVNPLAASRYRERHATSGAKSDPGDAKVLADLVRTDRHNHRQVAGDSDLAEAVKVLARAHQSAVWSRQRQVNALRSALREYYPAALAAFGTDLADRDATAILAIASAPDQGRALSRSKIAAALRRAGRQRNIEARAGEIQAALRADYLHAPPAVARAYSAAARSAIRLISAYTAEIAELEQALSEHFDQHPDTTIVRSLPGLGTILGARVLGEFGDDRTRFASPKSRKNYAGTSPITKASGRSRIVLTRYARNRRLADAVEQWAFCSLTHSPGARRYYDQLRARGKTHRQALRQLANRWVGILHICLQREQLYDETAAWQHLDAAAA

SEQ ID NO: 430875 - protein, 339 aa, unidentified
MLYVGIDIAKNKHDVTTLNVPGKTVLKPLTFSNNKAGFELLDLSLRQLNQDCLIALENTGHYAFNLLNFLHEQGYKVYTYTPLLIKEFAKSLSLRKTKTDKKDAHGIALKLLSDPNREQFQHDNRQVELKILARHIHRLKKKQSDWKVQYTRCLDIIFPELDKIVEKHSEYTYQLLTCYPNPQKRLEAGFDKLIEIKRLTASKIQDILSVAPRSIGTTSPAREFEIIKHYKRLIDKAETCVNDLMAEFNSVITTVTGIGNRLEAVILAEIRNIHAFDNPAQLQAFAGLDSSIYQSGQIDLAGRMIKRGSPHLRWALIQAAKACPRFSPAFKAYLKTKLE

SEQ ID NO: 430876 - protein, 317 aa, unidentified
MKTVPFEQVILRGCGIDVHKDMVVATISGEGLKTETRSYKTFSSSLTELKEWLLSSGITHVAMESTGVYWKPVYKILECPDMKVWIVNARHIKYVPGHKTDKKDSAWICKLLLAGLLKPSYIPEREQRELRDLTRYRNKLIQHVSSEKNRIVRILEDCNIKLSSVVCSLDGVVANKLIDMLIDKGYVTMDDITCIYHKKLEASPELLYQACEGFIEPHHIYMLQTIRKDMEQTKAIIADLTCRIKEVLSPYENVMELLQKIPGLSRKTVEDLIAEIGVDMEAFPTEKHLASWAGVCPGNNESAGKKKVVEPPMATNS

SEQ ID NO: 430877 - protein, 412 aa, unidentified
MNIRVEKACGIDMHQAFLMATMLDLAGTKDTRRFSTCIEDLLNLREWLIDNKCQRVAIESTGVYWIPTYTLLEGKVETIVANPLHIKNIPGRKNDVLDSEWIAEICLNGQIKPSYIPPKEIREIRELTRSHVKLTQARTAFKNRAHKVLSRAGIHISGVISDIFGKSGMIILNGILNGKTIDQTFVEIKNKKIKIKKTELKNSLKGELSQNDIFVIKECLESIKFFDKKINEFDSKINQNLKGMSKEMKILMSIPGVGFTTAAALMAEIGNIDVFSKPKKLVGWSGLAPSINESAGKSSNGHITKKGNKFLRTILVLAANSIAIGRPNKLRFFYQRIKAKKGHKKAIVALARKLVSIIHHLLTFKEVYSEEEGKQKQFKLPKFIPVKDFSIDDMIGILCGAGYSVNKTAANS

SEQ ID NO: 430878 - protein, 400 aa, unidentified
MSKVYSNVACGGMDVHYKFSNVTFRDSAGKVVRRERLEHPQRDQLRERISRWPKGTPVAMEASFGWGWLSDLMAEAGLEVHLSNCYKVEQMRKARGLVKTNKKDADLTSLLPLEANNWWEVWRAPRDVRDQRELMRFRGDLVALQTTIKNRIHAMFHRNGIFHEFSDLFNGKGRVFLTDIAISGSDYLSAQALQAFRGHLLLLDHIRKQLATLQRTLKLYLKKTPLIRRLKTIDGFGLILSHILIAEIGEIERFRNHKALASYSLLAPRADDTGEADPEHAPLGRHLGTRGNKTLKWAFIEAAHGAVAHGGKWRAMFDRITDGGKKDRNRGYIKVARELVKVVYVVWKKDVCYIESWPAVRKNFLPSRKEGENGRECRNSKKSRSGTGQLYGAMVPAARH

SEQ ID NO: 430879 - protein, 357 aa, unidentified
MEQFIGCDAHKRFSLFVAMNEDGEYGRAIRVRHDREVFRAFLHDLPAGSQIALETSGSYYWLVDEMERAGHRPQLAHALTAKRRMEGRHKTDERDARGLAMLLRNGTLPRVWIPPAELRDQREMLRLRMSLVRMKTQLKNRIHAVLLRYNLSIEASDLYGDQGRAELVSRQGELPAWSRESVLEQLQMVDSVQSQIVECEKQLEAILYPNTERDLLRTLPCVGKVLSAVIALEIGDVRRFGEAKHLVSYAGLVPSARESAERKRPGQCPRDCNVYLKWALVEAANLIACKQKMWPERHAVKLYQRVKQNTKMHGKAVMAVARHLAEASYWMLTKQEVYREPKSKAASSFVDAGVSAN

SEQ ID NO: 430880 - protein, 346 aa, unidentified
MKITTSGIDVAKSVLQVHGVDERGNVALRRQIRRSQLLLFFSRLEPCLIGMEACASSHYWARKLMALGHTVRLMAPQFVKPYRKNDKNDGNDAEAICEAVQRPNMRFVPLKSPQQQAELAVHRIRRRLIGQRTALINQLRGLLAEHGLVLAQGANQVRSKLPALLEDGSESLPPLAVELFRDLYEELVQLEQRLAACDRRVERLYRGNSVCQRLGQVEGIGALTASAFVATVAHAAQFKNGRQCAAWLGLVPKQDSSGGKTRMLGISKRGDVYLRTLLVHGARSAMRHTPKRNDPKSRWIEQLRKRRGENVAAVALAAEHARILWALMVQGEASTQHVTQIIEQPV

SEQ ID NO: 430881 - protein, 340 aa, unidentified
MPLYGGIDLHANNSVVVLLNDQDQVSYEKRLPNHLPAILEPLRLHPGEIEGVVVESTYNWYWLVDGLMEAGYCVHLANPAAIQQYSGLKYSDDHSDARWLAHLLRLGVLPEGYIYPKAERAVRDLLRKRAHVVRQHTANVLSMQNILARNTGARFSLTRMHEFTKQELQRLLTEEAQVLAVTSSLAVLDCLQQQIKILEQSVQKRLRHTPSYEQLLTVAGIGPILAQTIALETGAISRFPSVGHSASYCRCVDSNKLSNGKRKGTGNVKNGHPYLAWASREAAQFALRFQPAAQRFDQRKLAKSRHNTVLARKALAHKLARACSYMMRDLVPFEATKAFG

SEQ ID NO: 430882 - protein, 344 aa, unidentified
MDIDILGIDLAKRVFQLHGADRRGHALHSSKVMRAELVGAVRKLQPRVVAMEACSSAHHWGRQFQGMGIEVRLISPQYVAPFVKTNKNDANDAAAIVEAACRPTMRFVTVKTVEQQDIRAVHRARELLVHQRTALINQVRGLLAERGVIMAQTPTAFKRSLPSILANCEGELTSICQTLVTELLEQLRVLEERIARTNQWIMSFMKSSELCKKIETIEGVGPITATAMVAAVGDAKEFKNGRHLSAWLGLVPRQYSSGGKARLQGISKRGDAAGFRSSSHAAKLSGRRHMWTCRRCTANLKFSECEPAIDHFGCYFLCLGCGYRNKLKNVGKPDGPIEFVQVGE

SEQ ID NO: 430883 - protein, 356 aa, unidentified
MNILAGSADAVIGVDTHRDTLAAAVVTPIGAVLASTQAGADAHGYRALLDFAQARAPGRRCWALEGAGSYGAGLAAFLATHGEHIVEVCRPKRPPRAGARKSDAIDAIRAAREALSAEHLISPRRRGEREALRVLMSTRSSAVTARTRAANHLKALIVSAPETLRAELRGKTSDAQISYCSNLRSRPSQSIEHRMTVTALRSTASRILALRAEADDLEREITQLVTTAQPQLLALPGVGAISAAQVLISWSHTGRFRSEAAFAAFSGAAPIPASSGLTTRHRLSRSGDRQLNRALHTIALTRARTDPDTRAYLARRTADGKTTREARRCLKRIIARQIFRHLEHQPGADPASLDRT

SEQ ID NO: 430884 - protein, 274 aa, unidentified
MEYVGIDVHKKHSQICTCTEAGEILHQRIETQRERFAAVFGARPQVRILIEASTESAWVAQCLEARGHEVIVADPNDAPIYAQRSRGVKTDRRDAEALAHACRLGAYHPAHRTSERQRHVRAVLAVREALVRSRTRWISVVRALLRQHGYRLRSGAAESFLSRVTALALSADLQAEIAPLLRAMHSVNAQLATLEQRTETMAQGDEVVERLRTAPGVGPLTALAFVATLDEVERFDNAHQVESYLGLVPREWSAGEQQQRGKITKQGSGRLRAV

SEQ ID NO: 430885 - protein, 388 aa, unidentified
MDVLYQSCAGIDVHQATVVVCILHGPLTSTRPKREMAQFDTTTKGLKACHDFLTQFHVEAVGMESTGVYWRPVWHELCDDFELILAQPAHMNAIPGQKTDKKDAHWIAQLTRIGLLPRSFVPDETIQELRELTRQRKHYVESRNRETNRIHKILQSGGIKLTTYIEDIMGTSGRNLLQLLIDETPLTPRMIHQSVYTSLKRKVPQLLEALDGYFSAHHRFMLGQSLEIYDFYQKQIDCLEERINGYLNLYERPVEILDSIPGMDLITASVIIAEIGVDMSQFPTAGHLASWAGLCPGNNESAGKKRSTKIRHGNSYLKRCLCQAVFAAKRQKGSPLAERYYQIQSRRGSQKATIALAHQLLKIAYILLKENLTYQEFVLQKRLLETSQ

SEQ ID NO: 430886 - protein, 419 aa, unidentified
MKVVYPICCGIDVHKSFLVAAIIKTDGITPKYSKKRFSMFNNDIRRLKTQLLENNCYDVCMESTGKYWIPVYNLLEDEINVVVASPKWVRAVKGNKDDTEDSKWIGDLFRIGLVPGSFIPPKPIRILREYTRYRYKLVSCKSGEKNRYQNSFTVCNVALDSVVSDMFGKSASLITDYLTKTDNFDPEHCKTLLKGTLKKKGDAVVDSIVGCEIAPAQKDRMIMVRAHMDYVVNALDVMDLAVDELVAPYEEHISLLCTIPGVGRRSAITIISEIGTDINRFSGSKRLCRWAGLTPGNNESAGKKKSVRITRAGVYLKPALVQVAHAAVKSNKSPYYKNKYERISKRRGKKRAVIAIARMILTAVYQMFKTGEAWNPTDLFKVDMPPILQEKQKKKAIQNAIKLLISQGMTVTENPPAVA

SEQ ID NO: 430887 - protein, 463 aa, unidentified
MNNATSKRKRRTRRKPRQGLRVIRPQVAGIDLGSREHYVCCPPTPTGEPNVQHFGTTTPELHRLADWLQEQRVESVAMESTGVYWVPIYEILESRGFEVLLVNARALLSVPGRKTDMLDSQWIQMLHSCGLLKGSFRPSDDICALRSLVREKTTMESQRSDWLRRIQKSLDQMNVCVHHAVSDISGVTGMAIIRAITEGKRDPLKLAKLRDKRCRKSEKQIAEELTGNWRPEHLFSLKQALRMYDHVCAGIAEYEAEIQRVLADLQPPEHRSLDVPEVKNKNKRKNFRARGQEPMREALFRLTGNDMTAIDGIGVDTAETVLSELGADLSCFPSENHFVSYLKLSPKLAISGGKPIPSKRAGSTTTRLGATFRMAALTLRNSKTALGAEYRRIARRKGASVAVFAMARKLAILVYRLLRYGQAYVDQGIEAYEARFKAARIRTCRQIAKEFGLTVLEPEEQAV

SEQ ID NO: 430888 - protein, 323 aa, unidentified
MNKETNYFGIDISKDVFDVMDEKDIHHQFKNNASGFKKFCKLLNRTSHCVMEATGYYHYKLAYYLLENETNVSVENPLSVKRYIQMKLSKIKTDKSDAKMICSYAKDVDLRLWKGDSKDQQACLQLTRSLSLYTKQSTAIKNKLHGEEVLGIPSKDVFRSLKRLLKSIQKEIKILEEKLHELIKKEHQELLTLMESIPGIGRKTGVMLLVLTDGFNRFQSAAELCSYAGITPVIRQSGSSVRGKARISKIGNQKLRNLLFLCSFNACKYNKACKALFDRIVAKGKSKKLALLAVCNKLLKQAFAVAKSRTPYNENYRSSLIVN

SEQ ID NO: 430889 - protein, 351 aa, unidentified
MSISHYIGFDVHKKHINFCIKTADGAVVEEGKLLAQRAALRNWAANQASAWHGAMEATLFSGWIYDTLKPYAACLEMAHPLMLKAIAASKKKNDTIDARKIADLVRCHLLPACYVATPQIRELRRLLRYRNLVVRESVRMQNKIAGLLMESGAPFHKQKLHGKKYFVQLLDTLEEVPDSVKDLLRLSRSAMEMFQATQKRLLGELLAHPQLRQRVERLASIRGVGPVTALTWALEVGDPFRFSCSAQAMSYCGLTSALQSSADKQQRGPISKQRNPWLQTALIEAAKLAPRWNPQLAALHARELERGHRNRATLAVARKLVAYLLAVDKSGQPFQLRPLAPVIVPAAQQAS

SEQ ID NO: 430890 - protein, 445 aa, unidentified
MKTIGKEVHPRALTENSGGTEPAGVPLYIGIDAGRRHHVVVGIGQERMENGSWERAGARRVSSNSAGFSEMLDWLQAFGLRPDQVRIGCEPTGGWCAETLVAFLERHGYRVSWLQNWALHERRRLAIGKQTKTDALDARLIARLLYERDCHGQTKGFLGRPPRTTDGLRLLVRNRARLVVQRTRYRLQLTQIQDILFPELKDFFKDSNTGPAARRLLELYPTPANIAAASEEELFDLIARQAHSHIHGARIGELQRLARGSAGLTAGLEPVLQTQRWLLENLRRVDEQVDDLEETILSVVESWPESQRLVLDSFPCMSKLRQAVLIAMMGDISGFRHDGQLRKLFGWYPETRESGTSVFSQHLGSSGNRLARREVWLWAMQLISPRCSPTPFRTYYERLRKRNMKGNVAVGHLASKLITVLFFCLRSEQPYDPRRHAVDLGLRDA

SEQ ID NO: 430891 - protein, 355 aa, unidentified
MNQEKYIGMDVHQATISVAVMDSSGKLIMECILETKAATILEFIAGLRGTLSVTFEEGTSAAWLHDLLKPHVSHLVVCDPRRNALLKDGSKSDRIDARKLAELLHCNKLHAVYHGEHGVRTLKELGRSYLTITKDLTRVMSRIKALYRSWAIPCSGATVYSPRHRAEWLAKILEPGVRLRAERLYQQLDLLQPVRQEARRDLLVESHKHHAVKLLRQIPSIGPIRAALLVALLQTPHRFRTKRQLWAYSGFAVETHDSGEYRFVRGKLVRNRERITVRGLNHNHNHDLKNLFKGAALSASTRPGPLCDFYVALVEKGMRPTMARLTLARKVAAITLIIWKKGVEFDAKQLNRQAA

SEQ ID NO: 430892 - protein, 458 aa, unidentified
MYRELKPLRQALSSELKASMPPAGPGVEPELLLQTYLDRLTMYVGCDVADKTLTLIALDADGEELRHLCDVPNTPDGFERIWQWMDGLRCQHHFRIILLALETSGIYYWAWWDFLADRPNLARVLYNPRTTEHMTEVLSKRVRTDLVDAYALAEQVRLGSTPEVVLSEDSDLLTARFCSRAARDLAQRINDHKNQLRSFVRAYNPAVGRAFPGAKFHHPAVYALLQQHLFADELVDAGVDAITTILEDNCRTAFGRDHAQQLVALCRQTFTRPIGRVVLHQRVRYLTNDVLAAQKQKKYFLKTGYGLIKGRPETKLLRDSIGAGPSNTLALVSEVGDIHRYPSGAHVASFLGLTTSKHISGTTLFHSKRITKQGSPNGRYAAVNMALHLSHRVPKYQAMYRRIKNRKPPRKGHFVALVAIARDFVTNVLYDMWRYQRPFFLEVDDYRAYRKTHPRSDD

SEQ ID NO: 430893 - protein, 317 aa, unidentified
MSHITTLTAGIDTAKDKLDAAIHTTPFRLIVENRRPGWRRLATALTRAGASKVGIEATGGYERGIVAHLRASGFEVIVLQPLQVKAFARLHLRRAKNDALDAALIAACAAAVTPRDTEHDPRILPLADELTFVEQIEEDITRAKTRLEHIADTRIQRLVQADIRRLEKRRDAELRRIVQALQAHDDLAMRLQLVLSVPGIGERTALAIVLRMPEIGQISREQAAALAGLAPFDDDSGTRKGERHIAGGRGRLRRSLYLAALPAAFRWNQALISLYKRLIARGKPHRIALVACARKLIVYANAVVQRGKPWEINYASS

SEQ ID NO: 430894 - protein, 379 aa, unidentified
MDHANTGTPAETILRGALELSKNSWLLALHFPDRAQPSLYPIRGGDTVGLMEKLTAARDRWAKVSGKAPSIVLCYEAGYDAFWLARFLKARGIECLVVDAASMQVNRRARRAKTDRIDVGMLLRALIAWGQGDRHVWSVVRVPSVDEEDLRRSHRERDRLVRERTAHINRIKGLLFGQGIRGINVKSKYKTLQIDKLVTGDGCPLPPRLASEITREIARLALIQEQIATLERERDQAPTPCKAAEKKRLQLMCLTGIGPAIAAVMTREVYYRQFDNRRQVAGFLGLATSPHDSGDVERSQGISRAGRGQVRGTMIQAAWLWLKHQPKSAITRWFVQRTAGQSGRIRRIMIVAVARKLAIALWRFLEQGLVPQGAMLANR

SEQ ID NO: 430895 - protein, 355 aa, unidentified
MKRTTKYVALDVHQATTVSSVRDEPGRVIARTIIPTEAEALLAFVRSLRGTVHVAFEEGTQAQWLSEVLTPVVQRVVVCNRRGDTTTGNKNDQHDADDLSDRLHLGRLRAVYHGRGDHARLKELTRTYANLLQDSKRVMQRLKALFRARGIKTPGMSVYHPQQRERWLAQLTESGARFRAETLYAQLGVLQALRPRVKAAMVQEAQRDPAWPVLRSIPYFGPVRIALLLATLQTPWRFRTKRHLWAYAGLAVVSRTSAEYEMADDRPVRRRKRWVQTRGLNRNHNPVVKDVFKSAATTAATRGGALQDWYEGIRARGLSADLARVTLARKLAALTLHLWKTGAHYDPTQLSVQAH

SEQ ID NO: 430896 - protein, 368 aa, unidentified
MTSMIPTSEVVQREVDHRRHRVVVGVDTHKYVHVAVALDEFGGLIDSRSFAADRAGYTQLIDWAVGLGPKLTFAIEGTGSYGAGLTSAVRRRNIGVIEVLRTDRRDRRLRGKSDTLDAENAARAVLGGHATAVPKSNDGVVEMLRQIKVAKDVAVKARTAAMISLKAVIVNAPPELREALQPLSKMALIDRCAGLRPGPVTTVAAATKHTLRSIARRWQQLNDEIKTHETLLTELTGQLVPQLVAAFGLGPDTAAELLIVAGDNIDRVRSEAAWARLCGVAPVPASSGLTTRHRLNRGGHRQANAALYRAVIVRMQHHEPTRAYVARRTLEGKTKAEIIRCLKRLLARETWALLRPLRSVPRNAPAAP

SEQ ID NO: 430897 - protein, 397 aa, unidentified
MYIVGIDIAKRKHEAAVIDGEGAVIIKPFSFTNNCSGYNRLLAMLAKAKLPLDEVSFAMEATGHYWLALFTRLQKEGFRVQVINPVQTNSIRSFYIRQAKTDPRDALLIAEVIRFGHFSESTLHPENIYELRELCRGRHAIVSMQADVKRKVVALLDQVFPEYETAFTNMFSDTSMAILQTCPTPKELSEMPLEELCHLIEVSSHKRFRMAKAQELQELARNSFGFAMAGDVFSTMIRLYAKHLVFLKQQVREMDRKIAEIMDTLDTPITTITGIGPTLGAYILSEIGDISRFSSAAKLAAYAGIDPTMRQSGEYNGVRNRMSKRGSPYLRHAIWLATSSAVLHDPALKLYFQKKRDEGKPYMASVGHACRKMVSIIYAVMRDNKAYTPCIPNEISA

SEQ ID NO: 430898 - protein, 340 aa, unidentified
MVVVSLWRVHAVDRHDKTQWQAKLNRDQWVEALCGHIAPGAEVGMEACASAHYWGRELQKRGYRVKLIAAQFVKPYVKSNKNDRADAEAICEAMSRPGMRFVTLKSVEQQDTQAAHRIREELVSQRTAKVNQIRGLVGEYGIVAPVGIQKLRKALPQWLEDAENGLTDEFRGLLADLAEDLRYLDGRINGLDERVAQCVKNDPVARRLLELRGVGPLTASALAGALGDGKGFRKGRDFAASLGLTPRQHSTGGKDRLLGISKRGDSYLRKLLVHGARAVLRHAKNRDDELSRWLNELVIRKHVNVVTVALANKTARIAWAVVHNETAYDPMLAAGCKPAS

SEQ ID NO: 430899 - protein, 351 aa, unidentified
MSHKTAATVALTIGIDTGKNTLHLIGLDDKGAIVLREKIARGRITARLANMQRCLIGIEAGMATHYVARELSALGHDVKQVPPAYAKPFRQGHKNDFRDAHAIAEAVQRPSTRCVPVKTDDQLDLQALHRVRSRLVGQRTAVINQIRGFLLEHGIAVRQGLRFLRQQLPDILAKRSDVLSPRMIRIMEDLSGDWRRLDERIEHVTEEIEVLAHGSEGCRQLMTVPGIGPIIASAMVAAIGNGAAFAKGRDFAAWLGLVPKQMSTGDRTILGRISKRGNRYLRTMIMQGARVILLRPANWAKHSFGPWLTAAANRLHHNVLATALANKLARIAWTVLMQARSYEARVEPRTA

SEQ ID NO: 430900 - protein, 416 aa, unidentified
MKLFVGLDVSSEKLDACFMTDDSTCSVLKEASYGNSQLGASQIKEYILEFSQKFEIESLVIGMEATSLYSFHPAMFFNEDLELNQLNLMVSVEQPNKIKKYRDIFEENKNDQIDAFYIADYFRIQRQVNSIIKEEEYLALQHLTRTRYQLIKQLVRTKQHFIENIYYKCNTLSKELKAEGGSVLSATLVTLMTEDYTMDQLAELSLEEFANLIQKLGKYRFKNPEGIAKAISKAIRSSYRLGKVHQDSVDIVLGVLAKEIRSLEKLIKDLDKAIDDLVVVLPEYQCLTSIPGIGPVYAAGILAEIGPINRFSDESKLAKYAGLYWRQNQSGNSEYENTPMAKRGNRYLRYYLVEATNSVRRYEPEYHAYYKKKYAETPKHKHKRAIVLTARKFTRLVDTLLRNHQLYMPPRSVIDK

SEQ ID NO: 430901 - protein, 423 aa, unidentified
MKVVYPICCGVDVHKKFFVATLITTDGIMPRYQKRRFSTFNNQILSFKQWLLENNCYDVCMESTGKYYIPVYNLLEDSIRITVANPKWVRAVKGNKDDVKDSKWIGDLFRLGLVPGSFIPDKDVRILREFTRYRFKLVSCKSSEKNRYQNVFTVCNVALDAVVSDMFGVSASSITDYIVNSDTFDLEHCVSLLKRSLKKKADEVAASIEGFEMTDAQKLRARMVRGHYDFLVKHIQELDDAIDSLAAPFENAITLLCSAPGIKRRSAITVLSEIGTDMSQFRSSKRLCCWGGLTPGNNQSAGKKKSVRITRAGVYLKPALVEIAHAAVKDKENPYYAIKYQQISKRRGKKRAIIAIARMILTAIFHMLSTGEIWNPCDLQQVDMPPELREKEMQKSLRRAAKLLVAQGMVDIDAIKIPLAAPA

SEQ ID NO: 430902 - protein, 342 aa, unidentified
MKTFVGLDVSQKKTSVCVIDHNGNKIRMANVDTHPGVIADYLFSEGFDKSKIGLETGPLCVWLYHSLKSFGLDIDCIHARHVHAALSMQLNKTDQNDAFGIARLVLSGWYKPVHVKSLECHQQRLILTSREKLVQLRVAVTNQIRGLLKTFGVVLPLGKNSVFERAVLESSPSLETIKPAVMMLLDTWEHLSGQIRKFNYMLEKLARNDPVCQILQSVPGVGVLTALSFKTSIDDPSRFRRVSDAGAFLGLTPKKYQSGEVDRNGGISKQGNRMTRTLIYEAASCLLTRYGKDTSLAIWANELRHRMSYKKVIVALARKLTTLMLSMWKSETFYNERLKAVN

SEQ ID NO: 430903 - protein, 354 aa, unidentified
MPRNTSRLEAVATIGIDIGKNTFHLVGLDRNGAIVLRQKLSRRQVEARLVNMPPCLIGMEACVGAHHLSRQLKALGHDARLMPARYVRPYSKGQKNDFRDAEAIAEAVLRPTMKFVAIKTVEQLDLQALHRVRERLVCQRTSVINQIRAFLLERGIAVRQGLRALRTEMPIILAMTDKLSPRMIHMIEALCTDWRHLDGRIETVSDEIKTLSEQDDGAKRLMTVPGIGPIISTATVAAIGSGDVFSKGRDFGAWLGLVPRQMSTGGRTILGPISKRGNRYLRMLFVQAARAVLLRPQSWEKHGLKSWIEAAARRLNRFKLAIALANKIARIVWGVLHGGRNFEVKPIRPVSQAA

SEQ ID NO: 430904 - protein, 342 aa, unidentified
MSVYVGIDVHRKRSQVAVIDQSGEVLTNRNVPNGAEPILKVIGGLPPGTPAAFEACYGTSWLVQLLEDYGFDPHLVHPSRCKAIASARLKNDKVDAAILAQLLRADLLPEAWIAPPAIRQLRALLRHRVALVRLRTRLRNRIHAIVADYGYDRPAGGYWTGPGRAWLAALELAAVSRELVEDYLGLIDALQDRIDRLDWEIRQRARSDPQVKVLTQLPGIGPFTALVIVAEVGDISRFASARKLASWAGLTPTVRGSDRVAHYGHISKEGSAWLRWVLCEAAQTAKRHPQFAASFQRIATRRGRKIATTAVARKLLTRAWHLLASAEHAAAPQPAAPQTAAR

SEQ ID NO: 430905 - protein, 388 aa, unidentified
MRHLSVGSRMGWTGRAPAPNDTQSRLGAFEEHEEHTHATQDRLRSCTHDWDTGKNTLHMIGLDERGAVVLREKVSRNRIAARLVNMSPCLVGIEAGMATHYMARELVALGHDVRQVPPAYAKPFRQGHKNDFRDAHAVAEAVERPSTRCVPIKTDGQLDLQALHRVRSRLIGNRTAVINQIRGFLLEHGIPVRQGHRFLRQQLPQILATRTDVLSPRMVRIVGDLVADWGYLDERIERVTDEIESLAQTDVSCGQLMTAPGIGPIIASATVAAIGNGAAFAKGRDFAAWLGLVPKQMSTGDRTILGRITKRGNRYLRMLFIQGARAILLHPKSWAKHSFGPWLTAAARRLHHNVLTVALANKLARIALTVLVEGRNYETRVAPAAAAA

SEQ ID NO: 430906 - protein, 337 aa, unidentified
MIHVGADLHERFCYMTAMDATGRQVKAGAVVNRTLELRRWLRDLPGPVQVAVEACSFWPAFHEAIGSEVEKVRLVHPARVKAIASAKLKNDRVDSATLAHLLRCDLLPEAWMADRTTRDRRQQVRLRISLGQHRAAMKNQVHAILHQHGKRSPTSDTFGKKGREWLRKVALPPNAREAVNTYSGLIEQVGEHILRQEKRLKEMASGDERAKWLTTIPGVGTYSAMILLSEIGEIGRFGTAKALYSYAGLVPWVRESAGHVKRGGISRCGSPRLRWVMVEVAHTALRCSPAARIYFDRLRQRKAGNVARVALARKLLGAVFAMLRDGECFDETIFAAV

SEQ ID NO: 430907 - protein, 321 aa, unidentified
MQVWYLGIDVAKAKFDCALRQPDGKHKHKVFDNNPSGFESLSRWLLDYGVTNLHACMEATGVYWESVAEYLANQGHVVSVVNPFQIKAFGASRLVRTKTDKVDAKLIAEFCKENQPEAWKAPSAQEQALRAMVLRLDALQEMRQQESNRLAVAREVVREEITSHIQWLDNEIKNLAKKIRNSIDDDPDLRQRKALLESIPGVGERTISMLLAFSLTPERFRSARQVTAYVGLDPRQHESGSSVRGRPQISRFGHSVVRKLMYMPAMYTLYRTIWGRQFLERLSRNGKKPMTMIVAMMRKLLHVAFGVLKSGEKFKPTLHLA

SEQ ID NO: 430908 - protein, 358 aa, unidentified
MNEITRVGVDLAKHVIQVFAVNAADMRVTGRALPRAKFLAWCARLPAGCLVAMEASSSAHHWARKLVALGLDARIIAAPHVVPYRLQGKSGKNDANDAAAICEAASRPHMHFVPIKSVEQQSMLCIHRLREGIKADRTACINRIRGLLAEFGLVFAQSPEALRQVLPDAMEDATNELGGLARMALQTAYAQWQELDAHLRWCDERIAAHGKASEQVRQAEQLLGVGPVTASAVVATVGDFKQFKNGAQFGAWLGLTPRQNSSGGKTNLGRITKRGDAYLRTLLIQGAKSIVLTAHRRDDPISRWVQALRERCGWQKAVVALANKNARILWAVFARGRLFDAHHVSTKPPGAIAAVIGA

SEQ ID NO: 430909 - protein, 367 aa, unidentified
MKKVYIGIDAHKESNVVALAFSGQGEPELYGKASADLKAFEAVLRRIMKKYELLKEDIALCYEAGPTGFVLARRLIKLGFECIVVAPSKIPSKSGDRVKTDRRDARKLARLFRAGELSGIHIPSVEDEVIRDVCRGRTDAVDERSRTKKQLLSFMLRNGYRYKGTARWTEGHMRYLRELILADPAQKMVLEEYLQRIDFAVKQVERIDDQMEKLLQTWSRKPLVDALMGFRGFKQTAAMVIVSEIGDFKRFKHPKQLMGYLGLTPSEDSSGGRRKQGSITKCGNGHARWMLVESAEHYRKPPKISKGLSVRQEGLSREVKTISWHAQNRLSKRSYKLAMRRLHPNKIRVAIARELSSYVWDLAQIVG

SEQ ID NO: 430910 - protein, 355 aa, unidentified
MSGEKYIGLDVHQATISVAVMDSKGKLIMESILETKASTILEFLAGLRGTLSLTYEEGTWAAWLYDLLKPHVAHLIVCNPRKNALLKHGNKSDKIDARKLADLLRLNDLETVYHGETGVRMLRELARSYLTIVKDLSRVMNRLKALYRSWAIPCAGRDVYYTRHRSEWLGKIPEAGTRRRAEQLYQQLDMLQHLRQQARRELLAESRKHTITAKLRQIPSLGPIRSALAVALIQTPNRFRTKRQLWTYSGLGLETRDSGEYHYVQGQVRRRKKQVSIRGLNKDHNHDLKGLFKAAATRASMQPGPFQDFYQRSLAKGIKPTMVRLTLARKIAAITLTLWKKGEDFDPEKLKSQAA

SEQ ID NO: 430911 - protein, 429 aa, unidentified
MNYNTQNAKIASITEKTLIVGIDVGSETHYARAFNWRNYEYSKKPFAFSNDEAGFASFKAWMNDMAEKHGMETIIPGMEPTGHYWLNLGAYLQEQGMKPVHVNPHHVKKSKELDDNNPSKNDRKDPKTIAGLVNEGRFSYPYIPTGIYAEIRNLSNLRIQTQEEITRIKNRIARWFSIYFPEIKDVYRNPDAVSGLMVIKQAPLPCDIKELGVNGVNKIWRDARLKGAGIKRATILVTAAEHSIGNTEAPRSARKEIRNLLNDYEIYKNRMDELMQEIKETLSEIPYIDKLMEINGIGIKTVSCFIAEVGDIGRFDNPKQVQKLAGYAIVADSSGKHNGESRISHRGRKRLRYALYEAAISVIGKNKEFKEIHSYYRTREKNPLKKMQSVIAVACKLIRIFYTILTKGVDYDSQKMLNDIVRPEIQLAA

SEQ ID NO: 430912 - protein, 409 aa, unidentified
MEVLYARCAGLDVHKESVAVCVLTPGVGAEPNQEIREFGTTTAELRALAEWLRECGVTHAAMESTGVSWKPVYNILESACELILVNARHIKQVPGRKTDKADCAWIASLLRHGLLQASFVPERDVRELRDLCRTRTTLVRECVRVGNRIRKVLEDANIKLDSVASDALGVSGRAMILALIQGRQDPVELAQLAQGRLRAKLPALEQALAGQVTKHHQFLLREWMRQLAFLEGQVARFEEEIERHMSPFDWAAELLVSVPGIDRTAACALIAEIGTDMSKFLSSRHLASWAGLCPGNNQSAGKQRSGKSHRGNRWIKGVMTEIAWAASRTKDTYCAAFYRRLAPHRGKKRALVALANMLLQVSWYLLTQRRSYVDLGGDYFEKLHRERLQQTLVRRLERLGHKVILQPAA

SEQ ID NO: 430913 - protein, 338 aa, unidentified
MLYVGVDLHKQSISLCVVELADRARKIVERRRFCCDQEEQMAEYFASLGEYQLVVEATASYEWFVQLVEPTADRVVLAHPAHLRVIAQSKRKTDKLDAQTLAEFLALDQIPEAWRPTPRVRQHRTLVRHRNYVVRRRTSVKNKLRRVLSHYNADLKHLFTEAGRKYLATIDLSEADRFVTNQLCEEFDQHSARLKAVDKQLKAFAKAASVAEQEARAVLESMPCVGPVTVDVVLAEAGDVRRFGSQRKATAYAGLAPGIRESAGKAKQLGITKEGSRLLRAILVETAWRLVNRTRRWARVYEKLKARCGAKKAIVAVARRVWCVMVSILHSGQKYQLT

SEQ ID NO: 430914 - protein, 359 aa, unidentified
MKLYMAIDLHSTNNYVAAVSEDGKAIMNKRLRNDPRVILETLAPYKEQLDGVVVESTYNWYWLVDLLMDEGYRVHLANPTAIRKYSGLKYADDKHDARWLAELLRLGILPEGYIYPKEQRPLRDLLRKRQHLMKLRTSMLLSLQNLITRNHGIKLGGSVLKREGNPLEGYLESSDDLKLAGTVSKQTLDYLTGQISTVESHILRQLKGLDVYRNLTTIPGVGKILAMTIVMETGPIDRFAKVGRYASYCRKVQSLWLSNEKTKGKGNEKSGNKYLAWAFSEAAEIARRYNPACQAFYERKRRRSNRMVAHNALAHKLARAAYHVLRDNVAFEATKLFCEKPGRNGKPDSAVGIPRRLIG

SEQ ID NO: 430915 - protein, 410 aa, unidentified
MSSLEVALDPTTVIVAVDPGKVANRIWVSNGAGLLTDPVSLPVSRDGIGRLEQMLETHDAATPVIAIEATGSLHRAWATELERRHPGGVRLFAPSETKAARTQLGSGRFKTDDRDCAALTYLARQGAGRRQSEELAVDSLRSAVRHRRGLVADRKVAQQRLHDQLNALVPGLSAPSGHGRSLAIETPTGQAVLACAAAFAGRPPTRRSLTARAPGRLTRATGEYWVQRWKGCLPPPADAEQRARRLARDLDRYQRLQTDIAALEEEVAVLLAATDGQILSSLPGVAVLRAAAFAAHSLPVARFPDAEHLYSATGLAPALYQSATLRRRGRISRQGLAEHRDALMGIAWGLSVYSPSFAERNAELRARGMAPIQARVALARNACRLAYRLLVTQQPFDEQRYRQGRLSRGR

SEQ ID NO: 430916 - protein, 346 aa, unidentified
MEHYAGIDVSLELSSVCVVDAQGKIVKEAKVASEPEAVVAFFEALGFAVKRIGLEAGPLSHWLHAGLKEAGFETVLLETRHVKAALSAMTVKTDRKDARGLAQLLRMGWFQQVHAKSMASQEVRALLVGRKQLLGRLIDVELSIRGILRGFGLKVGAVTRKGFEARIRELVTGQATLERIAEAMLSARAALKAEYEKLHKAVLAIVREDPVCRRLMTVPSVGPLVAITYKSAMDDPSRIAKSKAAGALFGLTPKKYQSGEKDVTGGITRAGDEMVRTALYEAANVLLSRITRFSKLKRWGMDVAKRRGSKRAKVALARKIAVILHRIWVDGTTYRWTDARLTAPQV

SEQ ID NO: 430917 - protein, 356 aa, unidentified
MFANKVIRNTKKNNSSLTENEGYDHYIALDWSEKNMAIARLGKKDTEPKIIDVPSDLKEMKMYLSNLKGKKILTIEETTTSQWLYVELYDYVERIFICDPYRNRLLSDGPKTDRIDAGKLCKLQKNGLMKEVYHSTNEMYELRKLVSYYDDEIRAGVRLLNQKSALYRAENKSWRKKEELGKSRVNKFIVTQLDEKIESYQEKKRLYEAEFERISKKTKLLRSLRSIPGLGPISSVTILSIVIDGRRFKSSNHYLSYCGLVKHEKLSGGRSYGRRLPRYSRRLKGVYVSAAVRVASTENPLREYYEYLLNEKKLPVYNAKNALARYIARISLGIIKSGEKYKPYKWREGNKEKEVA

SEQ ID NO: 430918 - protein, 355 aa, unidentified
MERYLGLDVHAASCTLAVISEKGRKLKNFPVETNGQALVEAIRMIPGRKRLVFEEGLQSAWLYETLSPHVDEIVVAGITESRGPKSDKHDAYGLAEKLRVGDLGKTVFKAPRQFTRLRELSRIHMTLVGDVVRAQARIKSLYRSRGILVSGVNVYGVRPREGWQKQLCSSAQTRATRLYDHLDFLLEQKKQAEADLLREAKKHPIVRVLETAPGFGPIRAARLVPIVVTPHRFRTKRQFWSYCGLGIVTRSSSDWVQTADGGWIKARVPQTRGLSRQYNHVLKSIFKGAATTVITQRNKDPIHARYQRLLDGGTKPTLAKLSLARMIAATVLRMWKDEEEYDPGRVGPSTKTREG

SEQ ID NO: 430919 - protein, 423 aa, unidentified
MSYRIAGIDVHKKMLAVVVADVEVHGEYQFERIRYGSNPEQLRLLVAWLIEHEVEEVVMESTAQYWKPVWGALERYWKPSCQKREGAGPMSGTLHLAQARSNRGRRGRKKDFPDAERLVKRLVADELILSFVPDAEQRLWRTVTRRKYQLTRNKVRLQNQLEALLEEAHIKLSSLVSDLLGVSARRMLKAIADGGTDPAALAALADKKLRATQAQLCDALGACTELQPVYRRLLKMFLEELHLIEQQIGQLDQEMAALLSQHPESVQRLSEIPGLGVDSAQQIIAEVGATAATFPSGKHLSSWVGACPGDEESAEVSQSHRSPKGNRHMRRILNQAANAAVKAKGTIFEIVYRRLVTRLGHNQTIGAIAHRLCRLIWIILHQGVRYEERGPSVNTKSRRQRTSRMIRELRTLGYRVEPVGTPA

SEQ ID NO: 430920 - protein, 439 aa, unidentified
MIETISPGVAAIDLGAEKLFVGLAEQPVRSFGSCTRDLHALRDWLRENKIKRVAMEATGVLWIIPHDYLQAEGFEVTLFHGAHARNLPGRKTDVQDCQWHAMLHGHGLLQPCFVPPEPIRELRTYCRLREDHLAMAAQHIQHMQQALDSMNVRLHNVLSQLHGVSGMRVIDAILAGERDARVLAALCEAQVRKAKEAELIASLEGTWAKHHLFALEQAVEAYRFYLQLVEKCDQKIEHQLGVINQGVETVPRPKGRKVKVTRHNRPQIADLYGQLLTACGGRDAQMLPALGPLSWLKLVGEVGTDLGHWKEQDHFTSWAGLAPTHHRSGKSRRRVPRRKTKVAQIFREAAMSLAKSKDCVLGQFYRTVRGRRGAAVAMVATARKLAVLYWQVMTHGIEYVEKGLEQHQKQMAERKERHLRRQAAKLGFSLNPLKPSASV

SEQ ID NO: 430921 - protein, 426 aa, unidentified
MIQAAIERCAGIDVGKKFLAVCIMTGPLDGEPRVERRRYGTTTGELESLRDWLSAEGITHAVMESTGSYWKPVFNVLEGSLKICLANPQEVKNRKGHKTDDKDGWWLAHLLRHAMIYPSFIPPRAIRELRDLTRRRKRLLGDATAEKNRVQKVLEDANVKLGSVLTDVFGVSGQLMLDALLEGKAQPAEIAQFAKRGAQKKIPEIIRALEGHRMSDHHRRMIRYSLQHMKFLEEQIAEMDHDITAKIHEAGLDEACQLMQTVPGIQERSAANILAETGADMKQFPSAKHLSSWAGVCPGNNRSAGKNKSSHTTGGNPWLRSALTECAWAAAATKNSSLKDKFWRVTSRSGGHKAPALIAVAHVMLMLIHRTLETRQPFHDRKAPPLGEQQKQRMIRHHIRRLGKLGIAIHRISSVPAAAQPMTSTD

SEQ ID NO: 430922 - protein, 504 aa, unidentified
MDWFEFVWRASEVSHRGKRKPVPVDKSAPEVIPDAEHELVIERVVAVDVAKAAGKVCVRLPGKAGRRFSRVWDVPARTGAITDLGEQLVESRIEKVTVESTSDYWRIWYYLLEAAGLSVQLVNARDVKNVPGRPKTDKLDAVWLAKLTEKGLLRPSFVPTTEIRRLRDYTRLREDLTHERTRYWQRLEKLLEDALIKVSVVASRLDTMSTRDMIEALIAGERDPQRLAELARGKMRAKRSELITALDGRFDDHHAELARLLLNQIDALAAQINTLTGRIEDLIAELPEAGAVDHGGSEDTDITAPGAADRSHAAPQPARGAHEPTGSAPCRVDPAIEAECARLGAIERLDEITGVGEHNAQVIIAETGLDMTRFPTPAHLVAWAKLCPRTIQSGPVTRGGRTGKGNPYLKGALGQAAAAAARTDTFLGQRYRRIVKRRGKLKALVAVARSILVIVWHLLADPLARFHDLGPDYHARRINIERRMRNHIAQLTALGYRVTLEPAA

SEQ ID NO: 430923 - protein, 382 aa, unidentified
MNKIIRIGIDTSKSVFVLHGVDAAEQPVLRRKLRRSQVLEFFRKLEPTKIGMEACGGAHYWARELQALGHEVVLLPPQYVKPYVKRNKNDAADAEAICEAMSRPTMRFVPVKTTEQQAALMLAGTRDGLIGRRTQLSNTIRGYAAEFGLTTAKGLDKIELLLAGIAASAELPTLTKELFAAYGREYAQLQRQIIKIEARLMAWHKDNELSRRLVEVPSIGPIGATLLVMKVTNPHAFRCGRDFSAWIGLTPKDHSTAGKTRLGVITRAGDEALRSVLVAGATAVIQQAQKGRGYAPPWLVELLKRKPRKLAAVALANKMARVAWKLMVSGERYNPARTAAQSAAREGRGAALRGGSAPRPSLASRITPLGGGCHDRGVTSSA

SEQ ID NO: 430924 - protein, 401 aa, unidentified
MDPHLCVGVDVGYRSHRVGIAHPNGSILEEFDISHTDAGFNEFFRRVEKRRHQLSLPVAVAMEGYNGYARPLDRLVQEKGYRLYNVNNLKLARFKEVFPGAAKTDPIDTRKILELFRLKDQLPLAKDAIQEVVIAPAVNEKLKRLSRRRRHLVIEKMRVLNRMQADLQAVCPELLAATRDADNLWFLRFITFRDDLQQLARLRRSTLLQIPSVGQKYTRLIQEWQRKARFSSEVEYVGPMIIQDAKRILELRKQIHVLDNALAELSEQSEIARRISTIPGFGKTSIAELAGEIGTLDRFAGEASLALYLGMCPLTRQSGEKSRARIPRQVNTRCKAAMMTAVARHIGCVHQSRAYYDRKRAQGKTHNQAIRALGRHMVRVIWAILQDGRDYEIREDSHPVT

SEQ ID NO: 430925 - protein, 355 aa, unidentified
MTSTKYIGMDVHKESISIAVMNVSGKIGMECVIETKASMILQFFDGLRGDLQVTFEEGTSAAWLYDLLKPHVTKLVVCDPRKNASMREGHQSDKIDARRLAELLRLNHLSPVYHGEHGLRSLKELVRSYLTITKDLVRVMTRVKAIYRSWAIPCTGKQVYAPRHRAEWLGKITEPGVRRRAEFYYQQLDALRTVRQQVRRDLFAESQKHQAWKRLCQIPSIGPIRAAVLLGILQTPHRFRTKRQLWTYSGFGIETQSSADHRNVNGRLERAKKQSSIRGLNRNCNHDLKNLFKGAAIVASSKPGPFQEFYTALLTKGLRPEMARLTLARKIATIVLIVWKRGACFDAQHLKPQTA

SEQ ID NO: 430926 - protein, 353 aa, unidentified
MSSDKYIALDVHQATTVTSVLNAAGREVDQSVIATKSQPIRSYLEGFSGPLHVTLEEGTYAAWLYDLLEGRVAELVICDPRHNALLKEGSKTDRNDARKLADLLRTGMLRPVYHGSRSLRPLQELGHSYEALVEDTTRAMNRIKALYRGRGIDCAGRGVYTQKQRASWLEKLPAGASRLRAELLHDQFDYCRSLRRKARLALLQESGKHLIGARLRQIPGLGPLRVARLIAWIQTPHRFRTRRQFWSYCGLGLVVFDSGEYRLLKGQVVRRAQPVKIRGLNRNHQPRLKEIFKSAALSAIRQPGPFKEYYDVRVSQGRDPALLRLSVARKLAALVLSLWKKGGRYRAQDVKQA

SEQ ID NO: 430927 - protein, 334 aa, unidentified
MVDRETGELIERRLEHGNGEASRFYGELQKPVRVGMEATGYAQWFERMLAKLGHELWVGDAAAIRAAMVRKQKTDSRDALHILDLLLQNRFPRIWIPSPAERDLRQLLRHRHKMVCLRTSVRNQLHALAMGQGIYRKRKLWSTNGRTELENLALDPWGRRRRQELLEILDRLDPSLAELDRAVAKEAEQCPAARCLMEQAGVGPVTSLMLAVTLGPVERFRTSKQVVSYLGLNPRESSSGGRQRLGAISKQGNAMARFLLVEAAQTASCYDEELRRDYQRLKFRRGTAVAKVAIARKLAVRLYWKLRKQNSPVPPARMQGSSEHRVVGTSLSSN

SEQ ID NO: 430928 - protein, 410 aa, unidentified
MAERFVGIDVALREHRVAVLDRDGEAAGPSFTIAASKDGMATLLRTLAARDATAAQTLIGLEASGHLWENLEAALVGAGYRVLVLNPLPTRRYRDVLRRKAKTDDIDAHVIAGLIRSGAAQASYVPDEHIQSLRELARLRARLMDDWQDYLRQLIAQLDVVLPEHRTALGDLRSARARGILAQFPTAQHLAQASPRAIRRAAEDAGTRGFTLDDAIAVRAAARQSLYSGKAAAARAQVVRTLVNQLDRLSTAIDEVDRAATALLPPSEPGTGPSDADLLQTIPGIGPHTAATLLGELGAPMRFTDAPALVAYVGFYPVITESGQRVGTPRLSAVGSRIARRALYLAAVNAVRRSAEWRTIYLRKRAQGKSAKQALIVVAVKLLHTLYAMLKHRRPYNPSRLLVATATIGT

SEQ ID NO: 430929 - protein, 336 aa, unidentified
MAVLGIDLHKHESQVAVLPDEPSDEEPLEEVRVANANLDEIAAEYKGGRAVIEATSRYYTVHDRLSEHLEVTVANPLELSWIAESSHKTDEIDAQKLAELHRADIVPESYVPPEEIRSLRALTRGREHLVDERTKWKNEVHALLDQHGVEYNGELFSTSGREFLAELTLADPGEILLETYLETIDELTEKIESLSDEVEDRATEIPEVQLLETIPGVGALTALQIYAEIGEIDRFDRGAELVSYAGLDPSVRESADSRTEGSISKEGNKYLRTAVVQGAWQAVHNGQDAYLRKFYYRLREQKNKPEKVARVAAGRKLLVSIFHMLTREEAYNPPTG

SEQ ID NO: 430930 - protein, 340 aa, unidentified
MNTTTIGLDLAKNVFQVHGIDAAGQVTVRRKLRRSEMLRFFEALTPCLVGMEACATAHYWARELSSLGHEVRLMAPSYVKAYVRRQKNDAADAEAICEAVTRPTMRFVPVKSAERQSVLVLHRTRELLVRQRTMLINAIRGHCAEFGLIAPQGARRAVELVEQLRRPEASVLPDLARSVLLMMADQLAALAAQIHALERRLLAWHRQDQASQRLATIPGVGIITATALSASVPDPSLFHSGREFAAFLGLVPRQNSSGGKDRLGRISKMGDRYLRKLLVVGATSVMRRARTGALAAAPWIRSLLERRPARVVTVAMANKTARIAWAVLARGEVYRAPAMA

SEQ ID NO: 430931 - protein, 404 aa, unidentified
MWYVGLDWADTHHDVEVLDEAGKRVGARRFAHSHKGLNELKQFLLSIASSPENLACIVETNHGLLITFLLEAGIPVYPVNPKTANQLRKAAGAKTDQIDAHLLAKLGRLDLAELRRLEPDSPTVAELKTLTRDQDALIQTQTRLVNQLTACLKEYYPAALHLFAKLQQRSALVFLQAYPRPQAAQAATLEEITATLRTGKHTNPTRAASKIFDEVHRPQLVAKEVIVRAKQRLMLSLVKQLLVVIEDIATYDKEISTLFLTHKDQEIWSSLPRAGKRLAPRLLAEWGDDRTRYADATSVQSLAGTAPVPFQSGNYAKAHKRFACLKPLRNALYQFAWQSTRQEAWALEYYRRKRAEGKSHSMAVRALANIWVRIIYRMWQNKTCYLAATFEVAKLAHAPQQRVA

SEQ ID NO: 430932 - protein, 325 aa, unidentified
MKKIIIGIDISSKTLDICLQKEGSEEHFTIANQVKAIHGFFKKLSGQQVVLAMENTGRYNWQLYEALPKYDFEVYVLSALHLKKSIGLVRGKNDKVDAQRICKFIQKNQDECTIWKPTSTNIQKMKVLLTERNARIKMKRQLLGQQSDYKLMNTIGLEKQLTKMNQGLIESIQQQIEKLEAEIEKIIQADESIKEQAKQIRSVPGVGPVTCWTMIAKTEGFTAITEPRKMACYCGIVPFDHQSGTSVRRQPKVSTYADKSMKSILHLAAMSAIRLDNKFREYYRRKVAEGKNKMSVLNAVRNKIVHTIFALIKNQATYQDHLVLS

SEQ ID NO: 430933 - protein, 331 aa, unidentified
MSNIIGIDVSKVSLDCAYLRDPDQKKAKRKRCHNDVHVFAALVAWAESRSGLPVQALAFIIEPTHIYHEQLVQFLHNTGATVYLVNPGRVRKFAEGIGILSKNDLVDADLLVRYGLMARKLIAYTPVPQELNELRSLLNRLDVLERNLRSELNRQEKIGKTMVFHRLEQQSIARTVKRLKTEIITFKRAIRQCIKSTPSLQQNLDLLCTIPGVGAKTAWVMMVILGSRTFRSAPEVASFLGLNPIEKRSGKSQYRRPRLSKSGSGHYRQQLFFPAMVATRKNPDIQALYERLLAADKTKMCALGAAMRKLVHICYGVVKNQTPYRPQSAQS

SEQ ID NO: 430934 - protein, 426 aa, unidentified
MDIVHPRVAGIDVHKKVVWVAVRLPGQAPGQRAVTVRRFATFWRQLQKMAAWLAELAVTDAAMESTGVYWWPVYHALAQAGIEVCVCNAAHMRNVPGRKTDVRDCQWIAELHEHGLLRPSFIPAAEVAALRQRTRYRKKLIEQRSSELQRLSKVLEDGGIKIDSVASTLTTASARDMIEALIAGQRDPAVLARLARGVMRKKIPELEMACDGRFTDSHAQMCRLHLDAYDHLGTQIAGLDLLVAGAAAPFARLIARLVTIPGVGQRTAEVIVAETGGDMTRFATPARLAAWAGLAPGDNESAGKRKRAAARKGNQHLRTAMVESAWAVSRTATRPGARFRRLARRFGRGNEKKAAVAVAHTLTCIAWAVMRYDGDYAEAGADYYDRRDTRNRDYLVRHHQQALTRLGYQVTLTPPSNGSPPPAQAA

SEQ ID NO: 430935 - protein, 457 aa, unidentified
MEQYYLGGDVSKGYVDFVILDSQKRHVEKNFQLDDTIVGHSFLYDRLLTFFEEHPDAELCAAVESTGGYENNWHNTLRKFQSSLNIKTARLNPAGVCKNTEASLKRVITDKISAQGVAEYLIAHPEKVIYQQQDYWASLRKQWSFIKMLTKQSTQLFNQLESLAYNANPEILKYCQEGVPAWVLKLLKQYPTAAKLGKARATSVARIPYISTSRAKELVASAQTSVASATDTITGQLISATVGQIQHLQKTIKKQTKIIAAECTLPEVELLKTFTGIGDYSAIGLMLEIQAVERFSTAKKLASFFGLHPVYKISGDGVGAVRMSKKGRKEPRRILFMVAISAITSNSLIRDLYQEHVANGMEKLAAIGLCMHKILRIIYGMLKNNTPFNPEIDLKNRERTSGQPQKERKDKNRRYQDFDANAPISRRQRKKRVERKLSQNAVSVECGICASAPQLSS

SEQ ID NO: 430936 - protein, 343 aa, unidentified
MYYIGLDVHKRTISFCVKDAAGCVQQEGKIGSTRHELDGWVRTLPQPRMMAMEATIFSGWIYDHLLPHADSVKVAHPLMLRAIAAAKKKNDRIDAAKIADCLRCDFLPECHMASTEIRDRRRILRYRNLLQRQAVQMKNRISGLLMETGVTYDKLRLHRMGYFSRLLSTHEEIEDSIRPLLKLCREHIDRSIRMDRALLRSLQQDPILTERLRRLRTVPGVGPITALTWVLEVGDTSRFRSIKQAISYCGLCGEEKRSADKVMRTPISKQRNKHVQRILVEAARLAPRYSEELALLYERERQRGNANRAALAVARKMVAYLLAVDRRCTDFIPAGKPMPTATV

SEQ ID NO: 430937 - protein, 494 aa, unidentified
MRRAAHCCYEHDDQTFATFPRPPGSLAVQYTSMGGEALKPINHDVVEIDGDETEQTLTVAAAVDVAKASGMVCVRYPHPSIEGRRMSKVWEVDSTTNSILDLGQDLVTLGVERVVLESTSDYWRPFFYLLEAAGLAVWLVNARDVKQVTGRPKTDKLDAVWLAKLNERGMLRASFVPPREIRALRSYTRLRTELVEERSRHKQRLEKLLEDALIKLSSVATDLLGVSARAMIEALIAGERDPEVLADLALGKLKTKRAALMEALNGRFDVHHADIARVLLDQIDACTDKVDRLTTRIERLMSELPDPPPPGNREVDPTLAQVPVEADTEPRALTTVERLDEIPGIAERAAQIIIAEIGLDMSQFPTPQHLVSWAKLSPQTIQSGPKTKVGKTGKGNRYLKGVLGEVATAAAKTDTFLGARYRRLVRRRGKQRALVAVARSILVIVWHLLNDPDARYVDLGADYYTRRLNSDRKTRDLVRQLQALGHQVSLEPAA

SEQ ID NO: 430938 - protein, 358 aa, unidentified
MAVTGGTRRIVGGVDTHKDLHVAAVVDEQDRVIGTRSFATTRQGYRQMLAWMRSFGELQRIGIESTGSYGAGLLRFMQQAKVAVLEVTTPDKQDRRRRGKNDDLDAQNAAHAAFAGQRTVTPRSRDGMIESLRILMACRKTAVSARRVALQMIHNTIVCAPDGLRDQLRSLTRMQLVRTLASWRPDLTAYRDLDSAYRIGLKSLARRYLELHDEIADLDVMIAAIVDELAANLVARNSIGHIGAAQLLLTAGDNPERLRSEASFASLCGVSPVPASSGKTVRHRLNRGGDRAANSALHIIAIGRLRTDQRTKDYVARRIAEGHSKLDAIRALKRYLAREVFTLITQRRKEINATRIAA

SEQ ID NO: 430939 - protein, 338 aa, unidentified
MNPSQTVETYELFVGVDIAAKTAMASTLRPGGKTSRSFTIDQTPEGYSSLLHTLQATGHAPSEVLVVMEATGSYWISLATRLVHKGFAVSVINPAQAHHFAKALLKRAKTDAIDAQTLAQLAMVLRPEPWALPPPIYYALQQRLAQRDDLLNLRQQVRNQLHALVQHPEVIAEVRARMESLLATFEAQLAEVESEITAALSQDSAWAAAAERLQSIKGVGWVTAAWTLVATLNFSSCDTIDALTAYAGLAPMPRQSGSSVWHRPSIGHTGNGRLRTALYMATLSSAQHNPVIKAFYTRLREAGKPEKVARCAAARKLLHIAWAVVKKDQPFDPNDALG

SEQ ID NO: 430940 - protein, 400 aa, unidentified
MDERDRFGWFLGIDISKETFDGCCINSQGEKLFSLSTSMDRKGFEELIKELSSLSFHQESILMGMESTACYHLNLYSFLISLGYTVVIINPLLISNFVKLQLRKTKTDKKDACVIAQFLLLNRDSLSQTILSSDLSDIRDLSRQRESLVDQMTSIKSEIKRLLTMTFPELEHLAGIFTKSMLRLLCQYPSAASLKYAKRSKIAKILIPGSYGKQTDASVERILKAAKASIGTASPAKEIILKQKVSLLMQLEEHLQELTNILIEHCQGKMRRDMDILTSMKGIGEKTAMNFLIEMGGDIKQFENHKKLIAMAGLDPSVYQSGKIDRKGKISKRGNRHLRRVIWLMATKVIQFNERFKQYYLKRIKDGLPYKMAVLATAHKLIRVMFAMLTNKTLFNESMN

SEQ ID NO: 430941 - protein, 376 aa, unidentified
MNRIIKIGMDVHSTNYTLCAVEPTIGAEDRFFGEIQVSPDYKEIISFIKSLMLKLGSQDHYSIECGYEAGCLGYTLYHQLTSAGIKCTILAPTTMLTTQGKRIKTDRRDARLIAHCLSYGGYHPVYVPTGEDDAVKEYLRMRDDHKLALKSLKQRINAFVLRHGYKYTGTKWTKSHVSWLKKLELDPMYRETLNEYMASYGEQEAKIERFDKRIEEIAAGAHYQENVKKLGCFLGVRTHTALSLIVETGDFKRFPKGNIYAAFLGLAPGEHSSSSNVNRLGISKAGNTHMRRLLIEAAKSICKGSIGYKSKNLRSRQSGQPAEVIAYADKANTRFRSKYYRMIRHGKKRNVAVTAVARELACFIWGMMTGNISKAS

SEQ ID NO: 430942 - protein, 463 aa, unidentified
MKHKKASGKGARRSRPLLERVNPNAAGIDCGSEMHYVAVPADRDPEPVRCFKTFTVDLHRLADWVVSCGVKTVAMEATGVYWIPIYEILEARGLEVLLVNARHVKNVPGRKSDVSDCEWLQELHSVGLLRGSFRPIAEIAALRSYLRHRETLIDSAATTINRMQKALVQMNVQLHVVISDITGTTGQRILRDIVNGQTDPRHLATHRDARCQASEAEIAAALTGNYRPEHLFVLKQNLALYDEFQRQIKTCDSQIEDHLKALAASAAPPQVPLPAARSRRKARTNEPQFDVRTPLHQLSGVDLSQIDGIGPYNALRLISEIGTDMSRWPTEHHFASWATLAPHNKITGGRLISSRTQPSANRAADILRVAAMSVGRTQTALGAFYRRLAYRIGKAKANTATARKLALLVYRVLKGEIVYKDPGAAVYDARHRETVLGKLRRQAAVLGFGLVNGQTGETLEGVS

SEQ ID NO: 430943 - protein, 334 aa, unidentified
MQGKIPSVRAETAVYVGIDVCKAWLDVYLHPTGRGLRFSNDKEGLKLLCKELGGAGVGLVAMEATGKLHRLAHRMLSRAGYPVAVVNPLRSRKFAEALGQLAKTDRIDAQLLAIYGACLSPGATPVPAKILAELQELVMARQAAGANVYRERQALPHADETALKNRHAAAESKVLKRLLQRQIEACARAIEGLEAAIKPLLESDPALQRRYGILCSIKGVGPAVAAMLAACLSELGLLSAPKIAALAGVAPFDDDSGDRRGQRRIMGGRAHVRRALYMAALSAARCNPDLKAFYERLRANGKAAKLALTAVMRKLVALANTLIREDRHWTPEHA

SEQ ID NO: 430944 - protein, 339 aa, unidentified
MEKSLEVIRINSEGSYERQQFSTTENGISNLLNWLNPNDVVGLEAGSQSFRIAKSILNKGIQVIVLNPGDLATIYQSLKKTDKEDSLKIARLIQRFPIEELPVVPIPNDEEEDNRRLCSEQENWTRQLTQSKNRLHSLFTQAGLTHITKKHLRTKANRETSVTLLPSRYQKEAERILKVLDLVEQNLKLIEEEIKEALKKNQGLHSNNHIYAWVITSLAIMSYMGRFSSAKQAAYYVGLVPRVDISGDSAYYGRIVNRGCHSIRRVIVQAAWSLVRCQHGGKIKEFYQRLYPKKGAKKSIIAVSRKMIEVLYSMIRTGTLFDSMPEEVLNRKLAQYGLM

SEQ ID NO: 430945 - protein, 356 aa, unidentified
MSHDVKYIGMDVHKEATVIAVLNGSGKQVMESIVETKTSSILQFIHGLRGELHVTWEEGTWAAWLYDLLQPQVQRVLVCDPRRNALLKEGNKSDKIDARKLADLLRTGMVRPVYHGEHGLGTLRELGRSYQTIGQDLNRVMNRIKALYRGWGIPGAGTQVYAPRYREEWLHKIEHVGVRRRAELLYQQLDGLQTLRRTLRPELLAESRKHKASKLLRQIPCIGPIRAARLLALMQTPHRFRSKRQLWTYSGLGIETRDSAQYRWVDGQLQRTKKPQQIRGLNRNHNHEMKEIFKGAATRASCGVGPLREFYVALLDKGMKPEMARLTLARKIAAIALTLWKKEERFDAEQLKSQAA

SEQ ID NO: 430946 - protein, 408 aa, unidentified
MDVIVKRCAGLDVHKRTVVACVRIFSDGEVQREIRTFGTTTGELLELFDWLSDHDCTHVVMESTGVYWKPVWHILESGFELVLANAKHVRNLPGRKTDVSDAVWLADLLAHGLIRGSFVPPLPIQDLRDLTRTRKQLRQEMSRHTLRIQKILEDANIKLSGLVSDILGVSGRAVLQAIIAGESNPEALVAVTNGRLKADHDSLVAAARGTTRDHHRFLLNLHLKQIDEIRKTIASVEDHIELVVKPFREHVERLVTIPGVSLIVALVILAEIGADMSRFPTVQNLISWAGLCPRSDESAGKHRSTRLKPGDPWLKTILVQAAWAASRVKGSYLQAQFLRLKARRGPQKAIVAVAASILTAVYYMLRDHTNYVDLTANHFQKRDKQRTADRLVRQLTALGYAVKLEAAA

SEQ ID NO: 430947 - protein, 359 aa, unidentified
MTSMQQVPAHRRVVVGVDTHKYVHVAVAIDELGTVLDARSFSADSGGYTQLLDWAASLGGRLTFAIEGTGSYGAGLTSAVRRRDIGAIEVMRTDRRDRRLRGKSDTLDAENAARAVLAGNATAIPKSADGVVEMIRQVKVAKDIAVKARTSAMISLKQVIVTAPPELREELQPLSKMALIHRCAALRPGPITTITASAKHTMRAIARRWQALNEEITAHEKILAELTQQAAPDLAAAFAVGPDTAAEMLIVAGDNPDRIRSEPAFARLCGVAPIPASSGLTTRHRLNRGGHRQANAALYRVVIVRMQHHEPTRAYVARRITEGKTKSEIIRCLKRHLARELWAAMRPLRTTASDLAHAA

SEQ ID NO: 430948 - protein, 369 aa, unidentified
MNESVLVELFPRSCKLAARVVSFMEETRLFLGLDVGKSEIIVTLMDDGEKELYRGPFKNQLSGFRKMMKAVEKEALKISGEHHIHAGMEATGTYYLKLVKYLYEQEEKVTPYVINPNQVKKYMEYRGSRTKTDLQDSRVIAMCVRDGMEKKIFRPWFPSLKEHEELKQLVRLREDLLTMKTMETNRIEGLRQNPDSSAQAMRILEDHVTYLSEQIKEIEKILKDNIKHGNFPDTGEDIERLKSIPGISDLTATSFISEIGDVTRFEGIKQIVAHAGLAPMERQSGTSVRGKTRICKRGSKKLRQLLYMPTLSAIRCNPVIREFYQRLLAKGKRKMVAVTACMRKMLHIMYGILKNKTCFDPAICMGKSR

SEQ ID NO: 430949 - protein, 239 aa, unidentified
MGGVNAAIEVGKQQLVVQLGSQGEQFSEANEPRAIKRIAKRLGQAGCERVLIEGGSYQSVLIAGLRAAELPVLIVNPRRVREFAKSIGQLAKTDTIDARLLALYGEQTQPPLRELPDEQSQALRALWVRREQLIEMLGMEENRLEHVAEKAKTVRHNLRSHIDYLRKQIKQADDDLDREVRNSSLWDKYEVLSSVPGVGLVLSVALLSDLPELGRLNRGEIAALAGVAPFNCDSGDTSR

SEQ ID NO: 430950 - protein, 343 aa, unidentified
MEYYVGLDVSLKQTSICVVDQSGSVVREGVVDSDPEAISVYVRSKAPGAVRIGLETGPTSTWLWTELKRLGLPVICIDARHAKAVLKMQINKSDRNDAIGIARIMQTGWFKEVHVKDIDSHTVRALLASRALLVKIKRDLENHVRGLLKNLGLVIGRAKFNVFAVRAEELIEGRPELIATIRPLLEARTAVEQQVSELDRKVMKLARHDAQVRRFMTVPGVGPITGLAFKATIDDPARFARSRSVGAYVGLTCRRHASGEVDWSGRISKCGDAMLRSYLFEAAGVLLTRVPKWSAVKAWGVKLVKRNGLRKAKVAVARKLAVILHRMWIDGTEFNWSKKEIAA

SEQ ID NO: 430951 - protein, 352 aa, unidentified
MSNGTRWVGIDLHRRRSQIAIIDEDGELTLSRRIVNDRDTFKELLGDPDGTTHVALEATYGWEWLADLLLEVGYEVHLAHPLRTQAIAAARVKTDAVDAKTLAHLLRAGLLPEAYIAPPELRDLRELLRHRAVLTRMRTAVKNRVHALLARQGILPEHADLFGKAGREFLVGLELPEGTRRRLDSLMSLIGDFDREITATTREIDARAKTDERVPVLCQIPGIGRYTAMLIIAEVGDVTRFPTARHLCAWAGLAPTVRSSDGKARLGHISHQGSPVLRWALTEAAQKIPTGGGPLRAMFERIAKRRGRNIAKVAVARQILTLCYYGLRDGEIRCLKHQPIDDHDNQELAQAA

SEQ ID NO: 430952 - protein, 371 aa, unidentified
MKQQTKSSNITVGLDLGDRRHRFCALDERGEVVEQDSICNDRVSLKKLAGRYHGALGVMEAGAHSPWISRFLEALGWRVVVSNPRKVRAIYQHERKSDQRDALMLARIGRMDLALLYPVRHGTAEAQQDLLRIKLRDSLVRARVAVINSVRFTLKSLGYTVRNPSSARFHKVVMEEVPESVREMITPSVQALAELTARIKMLELEINTLAQMKYPQSAQLQQIPGVGPITALYFVLKIEDPNRFAHVRDVGAYAGLCPRRDQSGESDPQLRISKRGDAYLRRLLVSAAHYILGPFGPQSALRAYGLMLAADGTARAKKRATVAVARKLAVLLLSLWKSQQPYQPFPGACLNGEQEDRRSGTIALHRMEATD

SEQ ID NO: 430953 - protein, 385 aa, unidentified
MAPIRMPEAVIGLDVGKSSHWACVATRDGEVLLSTPVANREDDLDSLFGRFPDALVVVDQSRNIGALALARARAAGMSAAYLPGLAAHGAARLFAGDAKTDERDAMVIAKTALGIPDALLPVGDPGPTIAAARALAAQRNFLTCENTRNKNRLRSILLESCPAFEALVDLSDGPQLRLMASLGGAWSVADAGPRRAAALTRGAARGKIEALVRSTTSSTRPDASVVAAEDRAVKLLARRISENSAEIEAITAEISALLEGDDTYRCLLTVPGIGPKTASELAISIDIEDFPSHDRLASYCGLAPRNRQSGTSISSVTASRQGNKRLKNLLIFSCNCLTRTEGRWGDYYTRCRERGMSHGKALKALARKRLKVIYAVMRDRVPYAA

SEQ ID NO: 430954 - protein, 310 aa, unidentified
MGIVNAAIDVGKHQLDVALGSGGERLTEPNEPRAIARLCKRLAAAGCARVLIEGGSYQNLLVGALRAAELPVVIVNPRRVRQFAQSMGRLAKTDALDARVLALYGERLQPPVRELPDEQTRALRELWVRREQLIEMLVMEENRLEHASKALHWSLRAHIDYLRKQIKQADDDLDRAVRNSPMWDKYELLSSVPGVGPVLSVALLADLPELGRLNRREIAALAGVAPFNQDSGTLHGQRRIAGGRPRLRRVLYAASVAAARCNPLLRPFYLRLRAAGKKPKVAQVAVMRKLLTILNLMLKTSTAWRPPCPA

SEQ ID NO: 430955 - protein, 384 aa, unidentified
MSKDSIIFIGLDTHKSFIQVAVLQEHRGANPQQLGRIKSNKSALIKLAKQLQSKYPKATLHFVYEAGPCGYWTYRLITSIGHCCYVVAPSLIPKKPGDRVKTDKRDAVKLAKLLKAEELTPIYVPEAEDEAIRDLSRARETAMKDLKDAKFQLKGFLLRNNIQATVNDNWSKKHLRWLTDLILPHHCQQIVLQEMIITINERIQRLQRLDNELLHQVKNWRYYPVVKAIQAMRGVRLLVALGTIAELGDLRRFDHPRKLMAYLGLVPTENSSGGKTRRGSLTKCGNSRARRLLVEGAHTYKHKANISVELQLRQEGLPKEIVDIAWQAQQRLCRRYQRLLQKGKHRDVVVVAIAREMIAYIWAIAREVVISDVDPKTRIARLPA

SEQ ID NO: 430956 - protein, 324 aa, unidentified
MMYVGLDVHKRVCHGTVMDEEGHVVKRERFSNDPGSLSSFMKDVDEAKVVMESGYCWQPIYDHLEEAGYDVRLAHPLKVKAIAEAKIKTDEIDSETLAHLLRADLLPESYVPPREIRDLRELVKRRAFLVGMRTRLKNRIHAELAKRDIDPGTPLFTKRGRALLASLGVDAVSQLLPVMETLDLQIGEISADLKRAAAEDGRARILTTIPGVGYYTALLLVAEIGDVNRFPDAERLCSYAGLVPSVRRSGGSTVYGHITKEGSRWMRWGLTEAVHSHLRYDTELTRFHKRLSSKKPGQVATTATARKMLKAIYCMLKAGEPFQP

SEQ ID NO: 430957 - protein, 416 aa, unidentified
MNAAGIDVSSRKSTVAVLRPFGEVVKLPFDVRHSAEDLAALAAQLKSIEGETRVVMEHTGRYYECVAKVLHEAGLYVSAVNPLLIKEYGNNSLRKVKTDKADAMKIAKYALDNWTELRDYTPMDTIRYDLKTLNRQFQLASRQKTATANNLIALQEQSFPGVRKLFDSPVRSDGTQKWVDFTHDFWHVDCVRSGSQNAFAERYRKWCKRNRYQFSMEKAAEVYALAKSAVVLVQKTSVTKTLVQEAANQLTAISRSVETYRSEMNKLASQLPEYPVVMEMYGVGESLGPQLMAEIGDVRRFERKQSLVAFAGIDPAPSESGDYCSRSNRTTKRGSPYLRRTLFNIMKVHLQRAPADEPVFQFLNKKRAEGKPYYVYMTAAGNKFLRRYYGKVMAYFSTLEGLPPVDMDSTGLHHTE

SEQ ID NO: 430958 - protein, 358 aa, unidentified
MRIIGVDLHTRQQTLAMWDSETRELVEKTLKHDGDEVREFYSALPGQVLVGIEATGSMHWFLELLEKLGIDHQVGHPSEIRKAETRKQKHDRRDAALLLKLQIENRFPSIWMPSTELRDLRTLLMHRHQWVRMRTRVQNALQAIAISRGLRRGKALWTQTGQHTIESLPLPPHSAHRRTKLQDLYQTLHAQIDELDKRVGDQALQRPGARLLMTHPGVGPVTALATDVFLGDPARFADGKAVVSYVGMIPSEYSSGGQQRLGGLSKQGNPFLRFLWCEAAVHAVRRDPELQRFYRRKLAQKGLGKARVAAARKLGIRLWIMLRDQIDYQEFCRRGQMRQKNGGACAGMPQVGHSPAMQ

SEQ ID NO: 430959 - protein, 338 aa, unidentified
MTQHKIIGIDLAKNIFFLFEINHKGKNLSRKKLQRSKLLSYVANKEPCIIAMEACSGAHYWAREFEKFGHKVLLYPPQHVKRQRRKQKNDYNDAEAIAELALYQRHPPVPHKSIEQQDIQSLIRMRRLCVTERTRLINQVRGLIAEYGIVLPKGKASFRQAIPEVLEDAENQLSPILRELLSHQYERYLYIDEQISWFEDKLNQTVKQFDNAKRLMSIPGFGPLTSQAVAVWLGSGKQFKTGRDASAAMGLVPRQDTTGGNVMLLGITKQGNTYIRSLLVHGARAALRRAKFKSDNLSKWMLELQERRGPNRAAVALANKLMRIAWAVITKNEEYQPA

SEQ ID NO: 430960 - protein, 330 aa, unidentified
MSTQMASEQAREAIVGIDVAKAKLDVALKLPAGKWKTKVVANSGAGFVQLREWLAKQGVQCAHVCMEATGVYWERLAEDLADHGFAVSVANPAQIKAFAAALGVRTKTDAVDSKVIAEFCASANPRVWVPAPLSVRRLRALVARREALVELRTQESNRLEVAATEEVRRSIEEVLAHLERQIEQIERQIRSDVDDDPMLREQRDLLASIPGVGDGTAAMFLAHYGGPLRFDKARQAVAFAGLDTRKHESGSSVNGKPRLSKQGHSSIRRALYMPALTAMSRTSWGKAFSQRLLAAGKPKKLILGALMRKLVVIAYGVLKSRTPFNPALHG

SEQ ID NO: 430961 - protein, 403 aa, unidentified
MAAVVIGIDPRKGSRTAVAIGAGEEPLGELRVRACAAQAGRLLAWAAAWPERTWAIEGAAGLGHLPARQLLALGERVLDVQPKLGARVRLLAAGAVNKNDPNDARSVAVAALRSASRRPVTADDHAAVLKAWARRHRDLGRTRTQVACRLHAVSCEPTPGGVSKRISAAQAVQLLAGIKPPGAVEAARCELAAEFVEDLRRIDTQMRDVKKKLTTAVRASATTVTEVFGAGPIVAATVIGEVRDVFRFASRDHFAACNGTAPIEVPSGRRKICRLSRRGNRRLNHAIHMAAVTQISHHHSPGRAYYQRKLAEGKTPKEALRALKRRLSDTIFAQLQAGPPRRHEPALRWGAREGNRGTAPSPARPAHTPGTGSSAKPLPDPATTLRPSPPAGQKAMRKPGRTS

SEQ ID NO: 430962 - protein, 335 aa, unidentified
MVKENFIYVGIDLHKETHTAVMIDCYNQKLGEITFPNRPADFPKLVAKVKKCNTDGKTIVFGLENAYGYGRALAVWLIDKGYLVKDVNTAISHRQAKHRGAMYRKSDSDDAEAIALATLNMLDKLPDAYPNDAYWSLGQLVHRRDNIMKQRTRLVNQLHEQLCIAYPSYKQFFNDISRPTALYFWEHYPSRKYLKGKSVEDLRTELVPVSHNRCSTKNCEKILDAVASDKVKNNAYQDARDMVTLSIVSDLQHYDSQLAEVDKMLEQMYKMLGCTLTTIPGVNVITAVKILAEIGDIKRFSNANKLAQFAGIAPLHLSSSGKGKDVATKQGNRRL

SEQ ID NO: 430963 - protein, 361 aa, unidentified
MRYVGIDIAKKDHQIAAVDEFGNVILKSFSAGNNESGFAKIAEKLEAARIESDECLVGMEATGHYWISLWEFLDANGYEVVVINPIQTDAFRKVDSLRKTKTDAIDSVLIAEYLRFANPESSKMANPDVEQLRELARFRSFLVEQATQLKNKAIRVLDQAFPEYGKLFSNTFGEASKALLKQCPTPEEVLATDIRTLTRILKENSGGNCGRAKAEAVKDAARSSIGAKFGARALSFEIKLLVKRLSFTQVQIEELEDEISELLHRSDGHWLTTIPGIGDSLAASIAGEIGDPDRFETPKKLIAYAGMDASKYQSGANQDTNGHMSKRGSSRASASTHAGSRQGAHLRSLLRRVLRLNESPR

SEQ ID NO: 430964 - protein, 397 aa, unidentified
MYIVGIDIAKRKHEAAVIDGEGAVIIKPFSFTNNCSGYNRLLAMLTKAKLPLDEVSFAMEATGHYWLALFTRLQKEGFRVQVINPVQTNSIRSFYIRQAKTDPRDALLIAEVIRFGHFSESTLHPENIYELRELCRGRHAIVSMQADVKRKVVALLDQVFPEYETAFTNMFSDTSMAILQTCPTPKELSEMPLEELCHLIEVSSHKRFRMAKAQELQELARNSFGFAMAGDVFSTMIRLYAKHLDFLKQQVQEMDRKIAEIMDTLDTPITTITGIGPTLGAYILSEIGDISRFSSAAKLAAYAGIDPTMRQSGEYNGVRNRMSKRGSPYLRHAIWLAASSAVLHDPALKLYFQKKRDEGKPYMASVGHACRKMVSIIYAVMRDNKAYTPCIPNEISA

SEQ ID NO: 430965 - protein, 367 aa, unidentified
MIVNEVAKNVEKIISIDTAKNSFQVLVVNQKTGKKKNTKVQRSKFVEYILKQGPCLIFMESCSASQHWARLFESFGFTVKLIAAQHVKAFLRNRRVKNDERDAEAIYKCGIQPDTKFVRIKTVEEQTVALLHTLRKAAVSQRVELSNRIRGILAEFGIVVARGRGSFNSEIEAMFNECEKIHDVNLRVAISSLFEDYHRLEQREKELSEKIEALNKDNELVKIALTCPGVGSLTASAIVAEVGDASQFRNGREMAAWNGVVPSQHSTGGRSTLGGITKTGNRYLRTLLAQCACAVIQNASRHLEQGKDTHLDRFALRLKLNGKPVKKIMIAIANKIIRILWAMLTQRKTFENKANEISDTSAELQLA

SEQ ID NO: 430966 - protein, 359 aa, unidentified
MAKIKSKIFFRGKKIFVGVDVHKKRWVVTVRTYNLELKTFSMIPSAEELERFLVKNYEGAIFYIVYECCFSGFWVYDYFHQRGYNIIVTPTNRVYRDGSIVKTDKIDSRKLAFQHSRDLLREVKVPEMKIREYRSLFRIYDKEKMRQGQILRQIRSILEVRNHPLKWERFFKEMIRRLKEVKFQGEIFNKKFSCLLKEYEYVQEQIKDTEERIKEIALASQSEEDKELSEEIRRIEKINGIGIVSAVRLVVYLFDQKDRFESGEKLVHYLGLTPGEHSTGEQIIRSRTGLIGNKQLRSIIIQLARVAVRKDGNLLNKFERVYKSSGCKQKAIVAVARKLMMKVHSITEKQEEYEVNIAA

SEQ ID NO: 430967 - protein, 316 aa, unidentified
MNASPLFVGIDVAKAELVVALGPSSDLLTVPNDEGGIRHVLEHLHAACPALIVLEATGGYETAAVAALAAAGLPVVVANPRQVRAFAKAVGKLAKTDSIDAHVLALFAERVRPPMRPLPDEALRILDALLTRRRQLIEMLVAERNRLAHALPPVEKSLKQHIRWLERRLADVDSDLDQAVHQSPVWRAKEDLLRSVPGVGPIVSRTLLADLPELGALNRKQIAALVGVAPLAKDSGTLRGKRMVWGGRAPVRAALYMGALIASRHNPVIRAFYQRLVAAGKPKKVALTACMRKLLVILNTMVRNNTRWGERYALSA

SEQ ID NO: 430968 - protein, 356 aa, unidentified
MNKNTRLDFMGQPIYIGLDVHKKSWSVSILSQYCEHKTFNQPPEVDKLVHYLRRHFPGALYYSVYEAGFCGFWIHDQLREEGIQCLVVNPADVPTKNKERTTKRDRIDCRKLARSLRNGEIKGIYVPCRSRLEDRTLIRTRQSMVSKQTRCKNQIKALLFFYGVVIPEEREMGHWSRRFIQWIEQIRMERASGDIALKAHLEELSHLRQLIASLNRAILCLARTQEYRPAVHWLKSVPGISTLAAMILLSELGEVTRFPSLDELSCYVGLIPDTQESGDKEYIGSMTQRRHSQLRWLLIEASWMAVRKDPVLLMAFQEYCKRMRKTKAIVKIARKLLNRIRYVLKNQAEYVPCVMG

SEQ ID NO: 430969 - protein, 412 aa, unidentified
MEVVYPRCSGLDVHKRFVVACLSIIQHGQRHKEVRQVSTMTSDILALKAWLKASGCRQIAMESTGVYWKPIFHLLEDEFEIVLVNAQHMKAVPGRKTDVKDAEWIADLLQHGLLKASFIPSSEQQAVRDLTRSRVTLLQERSRLINRIQKVLEDANLKLASVVTDIMGMTGHAILTALVKGEDDPERLAHLARGSLIKKQDQLKAALAGKLTPHHRVLLEELLHLIATLDRSIARLDREIAERLRPHDALIERVDAVTGLSRRSIEVLLGELGWDMSHFPDAAHAASWVGICPGNHETGGKRLSGRIRQGNRWAKTVLVQAAHAAGHTQSYLGEQYRRISARRGAKRAAVAVGHSILVIFYHMVKTGEPYQEKGADYFTAVNKEKIQQRLVRQLERLGNTVILQPKAEMPLA

SEQ ID NO: 430970 - protein, 367 aa, unidentified
MTSLAHRGFIHLGMDVSRDSISVSVLPADSDVAEVDKITSDAESVRRLIKRLGRPSGLWACYEAGPTGYDLYRLLGSMGVRCDVVAPSLVPKGRGDMIKTDKRDARRLAGLHRAGELTAIGVPSPAQEAVRDLCRTRGDMVQDLTRARNRLGKFLLRHSLVYRGGSTWTDRHRRWLAGLSFEDKALQSTFMHYRATVNLRETTLDAVEADLEGYFHTEPFGDAVVRLGAYRGVTHMGALCLGAEVFDWARFPRARSFMNFTGLTASEHSSGLSTHRGWITRAGNSHVRGQLTEAAWSYNHVAQVGHGLRDRQDGVPAGTIARSWSAQTRLSKRLRALAARKNVKSVVATAVARELAGFLWAEMTAAN

SEQ ID NO: 430971 - protein, 405 aa, unidentified
MYNAVGIDVSKGKSTVAVLQPGGTVVRKPFDVTHSSCELKSLTDYILTLDGETKAVMECTGRYHEPILRAFSDAGIFVSAVNPHLIKNFGNNTIRKVKSDPADSKKIARYTLDNWADLREYSSMDTTRAQLKTLNAQMAFFTKQKVAAKTNLISLLDMTYPGVNDLFDTPSRDDGSEKWVDYAASFWHVDCVRKIGLKAFTERYQAFCKRHGYNFQKSKPEELFNASKELVAVFPKEQEYKDMIQMSIRQLNVISANVEHTRQEMNRLASALPEYSTVMTMRGVGATFGPQLIAEIGDISRFNHREALTAFAGVDPGVDESGKFKSKSNNASKCGPSRLRKTLFLIMSSLLQTKPIDDPVYRFLDKKRSEGKPYHVYMTAGANKFLRIYYGKVKECLRTQSETAN

SEQ ID NO: 430972 - protein, 344 aa, unidentified
MDHYAGIDVSLECSSVCVVDANGKIVREAKVASEPEALIGWFGSLGFGPARIGLEAGMLSQWLYAAMKQADLAVELLETRHVYEAFKSMPVKSDRNDARKIAQLMRLGWFRPVHCKSITAQEIRAMLTARKLVQSKLLDLENSLRGILRGFGLKVGKTTRTNFAGRIEELVKGHPDLQTIGEALLRVRAVLLAEFNAFEKRVRAISRLHDKARLLMSTPAVGPIVSLTFACAIDDPSRFTSSKQVGPYLGLTPKKYQSGETDYTGRISKHGDASVREALYEAAHIMLTKPIKGCSELKSWAMRIARRAGINKAKVALARKLAVIMLRMLKDNVPFNPAAKAATA

SEQ ID NO: 430973 - protein, 346 aa, unidentified
MTVKCIAGIDLHSNNLFCAIMDLAGKRVFEKRLPCDLGSVLQALKPFQKRLEKIVVESTYNWYWLVDGLQDAGYPVVLANPAAMQQYNGLKHADDKSDGFFLAEMARLNILPTGHICDRAIRPVRDLLRRRMGLVHQRTSLMLSLKSLHTRMTGRDLSTGRIKALAPEEGEKLFEHPADRLITRLDLQLVEQLGRSIQEIETRILAAVKPLPNYQVLQTMPGVGKILGLTITLETVDPKRFASPGDYASYCRCVDSRRMSNGKKKGENNSKCGNKYLAWAFVEAAQLARRHDLPCRRFHDRKSAQVNGMVATKALACKLAKAAWHMMSGNTAYDTGRIFPKVKMQK

SEQ ID NO: 430974 - protein, 365 aa, unidentified
MNKCHSNTELSSHEGTHCQFNGGKAVIKLGIDVHQDFYVVVEQVGGSNPKPPQRFQKEAFLFWAARLKQKSGAQVYALYEACGFGFSLQRKLSALSIKCYVVCPQKLDEQNRRVKTDGLDAKALCLKLDRFVQGNRDALAIVRVPSEEEEQARAIHRQREQLVKARKQLEAQGRSLMVNHGLEPVQNWWKPRTFTALPMPQWMKELLANSQPILVALQQKIMALTVQLQSAASPEQPCGLGKMTSVVIDREIGDWNRFSNRRQIASYTGLCPGEYSSGNTRLRSCVTKHGNPRLRAALVELAWRLVRFQPKYKPIVKWRATLAKGALATGAARKKAIVAVARQLAVDLWRIKTGRLHAEELGLIN

SEQ ID NO: 430975 - protein, 347 aa, unidentified
MKILKQVAGIDVAQNELAVSVGRLKEDLTSEIYGYKVFPNTQKGFKELTEWAKKKTVVDVAVRFVMEATGVYHESLAYYLSDDKHLVSIVMPAKISNYQKTLEIKTITDKTASEVIARFGLDRNLESWQKPRKVYRDIRQVTRERDQLIAQRTVLKNQLHAELAEAYPNKKTLQRTEAHIKFVDSHVKEIMQEISDFINQDAEVKKLALLIGSVPGIGLLTAAIILSETNGFDLIRNKKQLTSYVGLDVKEKESGTSVKSRPKISKKGNRYIRKAMHFPALTAIRHDERFKAIYARIVQKHGIKMKAAVAIQRKLLELTYTIYKTNKPYDKEYLNQSNDNSPNKAVA

SEQ ID NO: 430976 - protein, 414 aa, unidentified
MERYIGIDVHAVSCTLAVISEKGRKLKDFPVETNGQALVEAVRMIPGHKHLVIEEGLQSAWLYETLNPHVDEFVVAGITTSRGPKSDKRDAYGLAEKLRVGNLDKHVFKAPRQFTQLRELSRTHMTLVGDVVRAQARIKSIYRSRGVLVTGVDVYSSRRRNEWLKQLPSTTQLRATRLYDHLDFLLEQKKQAEADLLREARKHPIVKILETAPGFGPIRAARLVPIVITPHRFRTKRQFWSYCGLGIVTRSSSDWVQTADGAWIKARVPQTRGLSRQHNHFLKSIFEGSCGRSGHSEYDDGHHATQQRSHSCSLRAASRRRHQADTREAEPGAHDRRNRVADVEERGGVRSRTSRVANPDTQRLGDRSFRRFDEKAILQRRIREKSSQATHCAAAEVSIHVLPGQRHTIERPQE

SEQ ID NO: 430977 - protein, 366 aa, unidentified
MKKTSTVRTIGNKIFKGHKLTIGVDLGDHWSCYCVLDEAGKVILEQKVAMTPEAMKQTFGKIPQSLIALETGTHSPWVSRLLTELGYKVIVAHAQKVQLITKSNRKDDRHDARTLARLARIDPELLGPVRHRSAKAQIHLTVIRARAELVSARTGLVNAARGLTKSYGERLPKCGTKQVSRELAAELSVELREVLEPLLKEIESLNERIKEYDARMEKIARESYPHIELLKQVKGVGTQIALTYVLTLDDPHRFRRSRDAGCFLGLCPGRRDSGQSQPQMHISKEGDRYLRTMLVQGAHYILGPFGEDSDLRRWGLRLAERGGKNAKKRAVVAVARKLAVLLHRLWVSAEVYEPLRNSHKAMRAVA

SEQ ID NO: 430978 - protein, 419 aa, unidentified
MTRSKDSKIIGVVHQICCGLDVHKESISACVIFPDKDGVDQHDIEVFGTFTDDLMRLRSWLLDHSCPVVAMESTGIYWRPVHNVLEDSVQVVLVNARDIKNVPGRKTDIGDSKWLAGLLRHGLLRSSFIPFKEVREWRDLTRLRKKYVQTVGDYKKRTHKLFESANIKIDSVVSDLFGVTGRNLMNLLVSDRKSLTLSEIQICVRGKLKGKEEELYRSIQGFFSDHHRFILKRLLETIDMLESEIAEFESHIRHLMRGQNALLDRIKKAAGIADVSSCEILAEIGPDMTAFRTGEAIVSWAGLCPGNNESAGKRKSGKSPVRKHHLKTIMTEVAWAAVKKKGYYFKDKYYRLKARRGTKKAIIAIAHRILLGIYHVIKDGVEFRDLGEDYLTRRNKSQKMSYLRKQAQLMGYNLVPQAT

SEQ ID NO: 430979 - protein, 338 aa, unidentified
MSIVMGLDQHRGQITGEWIDTGTGELARTRVAPADRAAVRKFLQRFRGQQLEVALEATTGWRFVVEELRRVGAVVHLAEPAETAGLRGPKKRAKGDRADARHLRELLMIKRLPESWVPPDHILDLRARVRLRHTLSEQRSEWQQRIQATLYHHGCPQRRQLMVGDGREWLAAQPLPAAAREQLTVALAMIDGIEAQIAPLDKELRAYARRQAGCKALMAHYGIGPLVAVTILAELGDCTRFSSSRHAVRYSGLDITVHQSDQRRSPGDLSRQGPPALRWALFEAAQSACRRGSPDRDYYSQAAERLGHNRACLSVARKLLKRSYHTLSELGEEALQPA

SEQ ID NO: 430980 - protein, 356 aa, unidentified
METAYDGRQVVGMDLHRRRSVLVRMTGDGRRLGTAKITNSPEELRREIARAGKAPQVVLEATYGWYWAADTLAAAGAEVHLAHPLGVKAFSYRRVKNDERDSADLADLLRMGRLPEAWIAPHEVRELRELTRYRQKLVRLRTSCKDQVHGVLAKLGVTVTCTDIFGKAGSAWLDQLRLPQPYAGKVTSLRHLAGELTTEITMLSEVIASLLAGDRGYQVIQQLPGIGPVLAAVIVAEIGDVTRFRNAAQLCSWAGLTPRHRESDTKVARGHVTKQGSRLLRWALIEAIQRIPKDSVIGGAKDAIIARRGKEAKNIAKVAAARKLLTLVFYGMRDGQIRCLPQPRQHLPATQTARPA

SEQ ID NO: 430981 - protein, 345 aa, unidentified
MKRITIGLDIAKSVFQVHGEDSSGKIVVQKRLRRPQVLAFFAGLEPALIGIEACGSAHYWGRALRALGHDVRLIPAAYVKPFVRRNKNDARDAAAICTAVGRPDMRFVAIKSVESQASRGLERSRDLLVRQHTQLMNNLRSQLAELGVIAAQGRRGFAELTQLVATGDERIPVMLLSVLRLMVQQIDQLRVASAAIEAKIMAVAKADPAMRRLATIPGIGGLTAHAIVTAIGDGKQFASSRDFAAWCGLTPRGASSGLKRRERGISRQGDIRLRKLLALGASTIIRSARSRTDRATAWQRGILARRPVKVAVLAQAAKTARIAWAMLTAGTTYRQPAAAAQPQPV

SEQ ID NO: 430982 - protein, 334 aa, unidentified
MDKVTTVGIDLAKRVFALHGVDGAGRAGLRKTVRREQLMQTVAALPACLIGMEACSGAHDWARRFQQLGHTVRLMAPVFVTPYRKSGKNDGNDAEAICEAVSRPNMRFVPVKNAEQQGLLALHRVRQGWVEERTATINRIRALLTEFGVVLPNRAQHVRRGALAAAEGLPELARRALADLREHLRTLDERIGAYDRELQLQARASEPAQRLMSIRGIGPITAVAIVATVGNARDFTSGRQFAAWLGLTPRQHSSGGKTRLGHISRRGDAYLRMLLVQGARSVLQTAIRHTDRLSRWALSVQARRGYHKALVAIAAKNARIAWALLSKNQALRAA

SEQ ID NO: 430983 - protein, 341 aa, unidentified
MYYIGLDIHKKSISFCVKDANGQIRQQGKVAATRRDLDAWMKALPQPWTAAMEATIFTGWIYDHLKPHAAAVKVAHPLMLRAIAASKKKNDRVDASKIADCLRCDFLPECYMDSLEIRERRRTLRYRSLLVRQVVQLKTRLASLLMETGVSYDRQQLHRLGFVSELLASEDATKSIRPLLRVSQDSILRLRRIESALIRSLERDPLLAERVRRLQTIPCVGRITALTWALEMGDISRFRSIRQAISYCGLCGDEQKSADKTVRTPLSKKRNKHIQHVLVEAAKLAPRYDPSLALLYAKEKQKGNANRATLAVARKILTYLLAVDREQRDFVPVGEFHVAAA

SEQ ID NO: 430984 - protein, 389 aa, unidentified
MFYVGLDVASEKHDCCILNEKKKVLQSFSISNSSIGFDSLLAALAELPSDEIKIGLEATGIYSENLSVFLRRKGFDVTTINPLLLKKHQCATTLRKTKTDKADAKGIALFIAEEGFQPDLPISYHIQELKSLTRARFSVVQDRSALKNKVKRLVVLLFPELLGEFTDIFGSSATALLKQYPSAAKLAACHCDTLAALLRKASRGRFGRAKAEHLRQLAQNSVGNHSTARAMELRMLLERIDLLSEQIAEYDTEIKVIMDKIDSPILSIPGISYTLGAIIVAEIGDISRFSSPAKLLAFAGLEPSIYQSGKFVPTSGKMVKRGSPFLRWALLQAAGYVPTYSSTFALYRAKKTAEGKPAAVVRSHVAKKLVRIIYSLLTHSTAFSDQLSA

SEQ ID NO: 430985 - protein, 424 aa, unidentified
MATITPVTATVKSEDLMQVCCDVSKEKIDVYSRVGHEGALFEMMDTIRNCGSVLQRQLKAWQELAQAHGHAGVLVVCEPTGGHERKLLALARQAGSRTAYVSGEAVGKARVIESNDTGKTDRKDARIIATLAGMGKTLKVRQLPDEYERLRELNTTYDLECTTVATIRNHVHDQVRQLFPDLDGEEGFIFSATGRAIRQLFGLNPARIRECSWREFVAKVKTFVKAARLERLEKVWAAAASSLLHQCPATVRAMREERLGELFEDLDRHLARKLQLRTRILDAYGETEESRKLADIPDASSFQLARVIAESGPLADFRHASQLLRYFGMNIRERQSGKWTGKNRISKKGRALGRKVLYQLVFSSLIGEGKLFADPYRRKKADCACGMKAIVCLMRKALKMILGVFRSREEFSRDRVFASLPAAA

SEQ ID NO: 430986 - protein, 336 aa, unidentified
MKKIFVGIDVSKSWIDVCVTIDGKCILHHQFVNNIMGFKAMIKWIKEFSKQLNEWLICMEHTGIYALPLWNFLSEKNISYCVVSGSVITSGLEIRRGKNDKIDASDIAKFAMRYQDELKPHRLPIQVLQRLKMLFSYRERLVKAKVLISVPANEAKQFAAKESKEVRTDSSSLVQIIEARIKKAERLMLEIINSDKQTSRCYELIVSVPGFGLITACYLLIVTQCFTVVTRSRQLSNFGGTAPHPHKSGTSIKGKTRVSPIADKKLKALLSRGAGSLLQHHEETQYYAARMMAKGKHENLVRNNIKNKMLHTVCAVVKRGTSYIKNYVSPYQQNVA

SEQ ID NO: 430987 - protein, 443 aa, unidentified
MDVTYTHCAGLDVHKKTVVVCCITPAPQGEKQVEIRTFGTMTADLLAVSDWLQSRRVTHVAMESTGEFWKPVYNLLEGNVEILVVNAKHIKNVPGRKTDVKDAEWIADLLRHGLLRGSFIPPQAQRDLRDLTRQRTNLVQDRASVINRLQKVLEWANIKLAAVASNVLGVSARAMLEAILREEVDPQMLAGLAKGRLRSKRADLERALQGVVRAHHRFLIAEHLVQIDFLDEQIARFDEQIIAYMAQSSESPQVQPPACPTDPGPCQTFSPNDLAPLAWENAVVILDTAPGINRRLAEQLLAEIGTDMSRFPTEAHLASWAKLSPGNNESAGKRSSGATGHGNRWLQTCLVQAAWAAVKVKKSYLSSFYYRLASRRGAKRAIIAVAHRLLIAIYHMLKKHEPYKDLGATYLDERNKPRVVNRMKRRIEQLGYRVTLEIVPAAP

SEQ ID NO: 430988 - protein, 355 aa, unidentified
MQVVAGVDCHQDTHSIVFLNSVGQLQKQLLIETTAEGYQQALDAASEFEAVRWGLESTGCYGSAFAKCLVEAGAVVFEVPGSFTKRHRKRASQSGKSDPLDAKAIAEAVLRESDRLPRFEWSAEREAIRLRYDQRDRLVRERTKHVNRLRNAALRLDIKSLPADLTRVGVLENIRDAAQALRGKNEAVDALVDEVLFTVEDIVLSVQREKRIDTLLRPLLRRIAPELLAMHGVSTVTAAGLVGHGGNLRNVRDAAAFAMRCDAAPISWSSGRSSAVRINTGGNRQLNRLLHVIALSQIRSKDHPGRLYYDRKRLEGKTHRGAMRALKRQLSTVVYYRLRLCLTALEAQPSVPIAA

SEQ ID NO: 430989 - protein, 447 aa, unidentified
MRIVYQRCCGMDVHKDSITACLLLIDEVGEFRTESRRFGTMTRHLKEMAAWLASEGVQAIAMEATGVYWKPIWNILEAEKKFELLLVNAQQVKQVPGRKTDQKDSEWIAELLQHGLLRASFVPPVEIRHLRDLTRMRARIRQTLASFANRIQKVLEDANIKLGSVASDVLGVSGRHMLKALMAGEQDPQRLANLAQGHLRKKIEPLQLALQGHFTDHHRLQLKLLLEFVEFGEQQLSHLDSEIQLLLNKVHAEPDLPGPAEGTVAEAEASPPQPTSPLQTAVELWDSIPGIDQPAATTLVAEIGANMDQFPSAHDLASWAGLCPGNNESAGKRRSGKTRKGSVWLRRALCQAAWSASRTKNTYLAAQYRHLIVRKGKKRTIVAVAHSMLIIAYYLLKRQCTYQDLGPDYFNLRNEDAITHRLVKKLTGLGYHVTLEPARAEAGSETA

SEQ ID NO: 430990 - protein, 332 aa, unidentified
MMAQNDCVVVGIDVAKDKVDACIRSLSQRQTFPSSAEGRRALIRWLRKHKVGKAAMEASGGYERDWAKVLREAGIEVRIVDPKRVRSFARSAGRLAKNDAIDAAMIAWFAETFTDAPGQTCDAARDKLVQIVRARQSLLDLQTSLQNRGEHAAPEVVEKMQARLLKTIAREVAELEAAIAALVKATPHLAELAEIIESVPGLGKITSAGLVAAMPELGQVSNNVAAALLGVAPYDDDSGQRRGDRHIKGGRRKVRNLFYMACLGAATRHNPVLKAFYDRLIAKGKEPKVALTACMRKLICILNTMIARRQKWDANRYKMSDPARLPPSACTA

SEQ ID NO: 430991 - protein, 343 aa, unidentified
MYYLGIDCHKYFSYVTALDETGQVKFKGKMGNRKDDFERLLNGLGERCKATVETGYDWGIIYDMLTEMGVEVILAHAKKIKLITMNPQKTDKRDSLILAQLLRTNMIPRVYAPTREMRRNKAVLRERQFYTKIRTMTKNKVHKLLHHNGIKMNGYSDAFGKSGRRYMEEAELPKTEKVLLDNELDMLDVITSKIKAVEKSAVEITKENRYVELIRTIPGLGVVLSRTIALEIADIARFSKAKKLASYSGLVPREHSSSDHIYRGSLIKDCNKHLKEALIEGAWVAIRCSAYFESIYTNVKSRRGGNKAIVAVARQMAEIIYYMLKENRSYVERYTADNKMAAL

SEQ ID NO: 430992 - protein, 348 aa, unidentified
MKNKSFVGIDISKKVIDVSIFREDTNIKMFPHEVFNNTRKGFGDMCSWLKKSRVVLSQALFGMEFTGCYSLDLEKFLTSKNYSFCMLSTRIVKHHPMGTIDKSDKNDSAKIADFLYRYDGTECAKPYKLPSKAMQQLKQLVNERKFLVEQRTNFMNRMQMFETKEDSAMYESYIKKLNHDIEKIDQEECELMSKEEDVLDTFQNLLTIPGIGFVNATNIIAITRNFTAFDTARQYARYVGVAPCSHTSGTSVKWRARPSAHCNGQVKADLSMAALRAVEYDVEMQMFYNRKLGGRKDSDTKRKALNAVKFKLIRRMFAIGKQKRKWEVLNTSDDRKNLHIEKSKASEL

SEQ ID NO: 430993 - protein, 400 aa, unidentified
MITNHDDIDVFIGIDVGKHDHHAVALARDGTQLLSKALPQNEAKLRALIDKLRVHGTLLVIVDQPATIGALPVAVAQAAGVTVAYLPGLAMRRIADLHPGEAKTDARDAAIIAEAARTMPHTLRGIRVSDENVAELSMLCGYDDDLAKQATATSNRIRGLLTQIHPGLESVIGAHLDHPAMTALLVKYPTPKALRRAGKRRVETLLAKHAPRAWKRWATAVFTALDEQTVVVAGTDAAGLVLPQLATSLTQTRTSRAEVFDRIDQLVESHPLFELLTSMPAVGVRTAARILTEVVGKDFATAGHLASYAGLAPVTWRSGTSIRGDHSSRRGNKVLKRALFLSAFAALKDPLSRAYYDRKRAQGKKHNQALIALARRRCNVLFAMLRDGAYFHVSLGAAAA

SEQ ID NO: 430994 - protein, 337 aa, unidentified
MEYYAGLDVSMEETHICVMDRDGVVVHETRVASTPADIDAALMEAPACQRVVFETGRMAPMLYHGLIQRGVPVVCIESRQAYQALKSLATHKTDRNDARGLAHLARTGFFKPVHVKSLAAHAIRALIIARKKLVGQRVTLENQIRGLAVAFGIRLPRSLSPAFIEQALQASDGIDGLSAAMQGLIAARTAVMAAVDAIDTDIKKLTKASDACRRLMAIPGVGQLTALAFAAAVDDPERFKRSRDIGAYFGLVPRRYQSGEVDYTGSISKCGDRRVRTLLYEAANVMLTRCKGPLKLKDWAFAIAKRSTMRKARIALARRLAIIMHAMLKHGTEFKLA

SEQ ID NO: 430995 - protein, 350 aa, unidentified
MEQRITTIPAHTIGLDLGDKFTAFHVLDEAGETLELGRVKTSVTGLARLTRSYPEARIVLEVGPHSGWVSRAFLGWGHSEVLVANVSRVPGISRSSRKTDGGDAEHLARLGRTDPRLLYPVQLRSRSTQLMLTQLRSRRALVEARTKLINAVRGMSKGFGIQLKKCSAACFHRRTLSQLPEDLVPAVHHLVAAIAMLTIQIRRAERDLERIAHDVPAVAQLRQVPGVGLLTALAYVLTIEDPHRFACSRKVGSYIGLTRRLRISSGQDPQLGISKAGSADLRALLTQSAHYILGPFGPDTALRAWGLAVAERRGKKTAITAVARKLAILLHRLWITGDTYEAYPGRRAAA

SEQ ID NO: 430996 - protein, 387 aa, unidentified
MPQPNDLSRSPIALNQDGTLIAIIEMSQASWLVAGVVPGIARHPLKKLAADAAALLGLLERWRGEATQAGRQITRVAVAFEAGRDGFWLARWLRARGIEAYVIHPTSVAVSREHRRAKTDRLDTALLKRVFLGWLRGEPGHCTMAAIPTLEEEDARRPNRERESLVGERTRIVNRIKANLARLGIRGFKPTVRGASERLEALRTPEGAALPPNTQAELRRDMARLGFIVRQIKEIEEARQKGLATQPDQGPPAMVRLLARVIGIGLETADMLVHEILSRNLRDRRAVARYAGLTGSPDESGARRREKGLARAGNARVRRGMVQLAWRFLLFQKDSALAQWYRARTADARGGTRKTMIVALARKLLIALWRFVSTGEAPEGVVLRPAS

SEQ ID NO: 430997 - protein, 341 aa, unidentified
MKNKSFIGIDISKNVIDVSIFCEETPIKDFSHDVFNNSRKGFGEMCTWLKKNHVVLSNCLFGMEFTGSYSMELEKFLNTRNYQFCMLSTHVVKHYPMGPKDKSDKIDSAKIADFLYRYNGTECVKPYNMPDKTMQRLKALMNERKFLVEQRTCFMNRRQLCTTKEDTQLYDGYIKKLSHDIENIELEEQKLLATDDSLLSTYKNLLTIPGIGFVNAINVIVITRNFTAFETARQYASYVGVAPHFRTSGTSVKWRPRPSARCDGQAKADLSMAATVVVQYDAELQSFYNRKLGGKQDSDTKRKALNAVKFKLVLRMFAIGKQNRKWEPLDSKSSNEKLAIS

SEQ ID NO: 430998 - protein, 375 aa, unidentified
MKEKLRFLGLDVHAETIAVAIAESDGEVRSLGTIPNRLESIRKLIKKLGPTEKLRACYEAGPTGYVVYWQLAGLGVKCDVVAPTLVPVKAGDRVKTDRRDAEKLARSHRSGDLTAVWVPDEGSEALRDLVRTREAAKQDQLRARHRLSKFLLRSGQRPPTGIRPWTRPYLIWVAQLRFTQMAQEATRLDYLHEVEHMRERVERLERAITEAVKLASPALQQVINDLQALRGIADISAVTIAAELGQVSRFDGARQLMGYCGAVPSEDSSGKRTRRGSITKTGNAHLRRIVVEAAWSYHRPPCIWYGLRKRQESISEEVKEIAWKAQHRLHKRYMRLAAAGKDKRKITTAVARELLGFIWAIGTRAETTVRQRIAA

SEQ ID NO: 430999 - protein, 342 aa, unidentified
MKVEKDLCGGLDLHGDNVVCCLMDQQRQVVFERRWPNDLETIREALEPYRKRIRVLTVESTYNWYWLVDGLQALGYEVKLANTAKMQENLGLKYADDKTDARFLARQLVLGTLPEGYIYPVQTRGLRDMLRRRMYLVQARTGQWLSLESLVARQTGRSMKVEELTKCKIGEVLQGQPHALQMAETNFRLIDVLKEEIKKLERAVMGEFPDLGGYHHLMTVPGIGPVLARVILLETGPISRFAGPGNYASYCRAVKSIHTSNGKKKGEGNSKSGNPYLGWAYVEVATLAVRYSPEIRAWFQRKLVRSGKRVIAIKALANKMCKASYFMMRDGADFDVKRLVGG

SEQ ID NO: 431000 - protein, 343 aa, unidentified
MNEISIIGLDIAKNVFQVHGIDNFGQPIVRRQLKRGRVLAFFGKLPPCLVGMEACATSHHWAREIAKLGHDVRMMPPRYVKPYLKRNKNDAADAEAICEAVQRPTMRFVPIKSPVQQSVLMLHRTRQLFVHQRTTLINAIRAHMAEFGIVAGVGRNGVEALLKVIAEGSDERIPPAARECLLALATQLELVKRQILEADRRVLAWHRASKVSKRLEAIPGVGPLIATALVASVPDPSIFRSGRDMSAWIGLVPKQNSTGGKERLGNISKAGNRYLRKLLVIGALSVIRRAKILGYTKHPWLVRLIERRSTMIAAIALANKIARMAWAMMARNETYKTPLAQPA

SEQ ID NO: 431001 - protein, 382 aa, unidentified
MSLIRPFGQLTCAVDKAPLFQAPLFRSDGIQGRAMPLIPCTRLPDAERCGVHQQQGGNVPDATLGVDVSKVSLDANCIKGLQKRAKTFANTPEGWKAMVAWLTNMGTKQAHACMEATGRHSLGLALALHDAGHVVSVVNPAQIRDFGRTKLGRNKTDKVDANLIREYAELFTPGPWMPPSRAMRRLSELETIRAGIVGSRTEWSNRIKSGLGDSIATKLATATIEHFAAQLKAIDKAIRQTIEGDAELRGRRDLLLSVTGVGETLAALLLAEMPEPGVLRRSGELVAYAGLNPSHHRSGTSIDRPTRISKIGNAALRSSLYMPALSAMRFNPAVAALAVRLKSAGRLKPKQIIVAAMRKLLVLCFGVLKTGRPFDPAIAMRA

SEQ ID NO: 431002 - protein, 345 aa, unidentified
MRITTIGLDTAKSVFQLHGVDSAGNVALKRKLRRDEMVPFFEQLPRCVVVLEACGAGHHWARVLIGLGHDAKLLAPEAAKPFVKKGKKNDAADAAALYSAGSRPEARFVPVKTVEQQGVLALHVTRSLLVKQNTMLVNAMRGLAAEFGMTVPKGVDKVNGLCETFEADDTVPPTAQRAFGELNEHRRAVMRRIGDLEAQVVEHARTNPTARRLATIPGIGPITASLIAATVGDNIGAFKRARDFAAWLGLVPRQHSTGGKTRLGRITKAGNTEIRRMLVLGATSMVYRAEQWNSDVGEWLRGVLQRRPVRLATVALANKLARIAWAVMTRDEVFHPTRRPAKATA

SEQ ID NO: 431003 - protein, 348 aa, unidentified
MRFYTKQHKHYCGIDLHARSMYVCILDQAGKVLVHRNMKASPMAISRTIAPYRDDIVIAVECIFTWYWLADLCAKENIAFVLGHALYMKAIHGGKTKNDKIDSNKIAVLLRGGMLPTAYVYPRKMRSTRDLLRRRMYLMYKRSELLAHIQNTNSQYNLPEFGKKIAYKSNRAGVAESFKDKSARKNIEVDLQLLDYYDKVLQDLELFILKEAKHHDPTTLYLLQTIPGIGKILSLVILYEIHNISRFPRVQDFSSYSRLVKCSRESAGKKHGYGNSKIGNVHLKWAFSEAACLILRNNEPVQKYHNKLVNKYGKGKALSILANRIGRAVYFMLTRNKAFNMDMFLNQS

SEQ ID NO: 431004 - protein, 402 aa, unidentified
MNAVGIDVSKGKSMVAIMRPFGEIVSTPFEIKHTTSDIHSLVELINSVEGESRIVMEHTGRYYEVLAHQLSEANLFVSTINPKLIKDFDNDSLRKVKSDKADAVKIARYALDKWQNLKQYSVMDELRNQLKTMNRQFGFYMKHKTAMKNNLIGILDQTYPGVNTYFDSPARSDGSQKWVDFASTYWHVDCVRKMSLNAFIDHYQNWCKRKKYNFSQSKAEEIYGKAKELVPVLPKDAITKLIIKQAIDQLISVSTTVESLRTLMNETASKLPEYPVVMAMKGVGTSLGPQLMAEIGDVSRFTHKGAITAFAGVDPGVNESGTYEQKSVPTSKRGSADLRKTLFQVMDVLIKMMPQDDPVYQFLDKKRSQGKPYYVYMTAGANKFIRIYYGRVKEYLASLPES

SEQ ID NO: 431005 - protein, 425 aa, unidentified
MRTRDGAHWAGVDWGQRVHDVCVLDAHGEVLEERRFDNSSKGLGELSTFLSGFADVQVGIETPRGPVVEALLDRDLAVFAINPKQLDRFRDRFYPSGAKDDRRDAYVLAHSLKTDAHAFKAVSAEHPVIVELREWSRMHRELSEERVRLTNRLQAQLRRYYPQLDGFGVPLWSPWILDLFVAAPTPERARSLRRATLVRLLRRNRVRKWTLEEVREALREPGFTVAAGTVAAASAHAETLVERIRVVHDQHQRAAKRLGELTERYRLDALTERYRATELGEVDSDEDSSEQHDVDILRSLPGVGKLVLAVLLAEALELLQRRDYHGLRALSGVAPVTRRSGRKLVVLRRHACHQRLAWAVFQWARAAMSNDPEWHARYAALRARGHTHGRALRTLGDRLLRIACAMLEQGTMYDADRLAPVQRAA

SEQ ID NO: 431006 - protein, 385 aa, unidentified
MIDASFPYFICEEALMTFLGIDLHTNCFTCCYIDSQNGDKQLKTFKLDDCGLSNFYKTLNRRTHVLVEATINTFAFVELFQHLVAEVVIANTYKLKLISVTNKKTDKVDAEKLARILKMQVLSGEQQISPVLIPPKVVQDLRALFSTYTLIRKQITATKNRIHSLLKQNLFPFTKEYIFGKKTRPSIRAISEDPVLTLQLGLLFDLLESLEKKADEFADQILLTAAPFSKEIDILTSMKGVSVFTAAAIMADIVSVDRFPNAKHFTSYLRSAPRVESSNEKTIIKSTNKAGRKTSIVLLSQSLNHFRDSNPKLCAWHDRLATYKKKGLVRMGLCRRVFAEMYQMLKKQEYHYYCDAKNHQKKMEEYYLFLNRHGIEIDQELKIAS

SEQ ID NO: 431007 - protein, 403 aa, unidentified
MISVGIDVSKGKSTVCIMKPGGEVLSAPFEITHTKSELLDLINIIKSQNEEVRVVMEDTGHYHLPVATLLVDNDIFVCSVNALRMKKYCSQSIRRAKTDKIDSVHIASYGIAYWNELQPIPCSDDIYKELQLLARQYYQSVALLVKAKVNFSNLLDRVMPNIQSIITDNSSNSKLTDFVARYWHFSRILEMGEKRFISDYCKWAKKKGYRMCERNAKEIFALAQNGIPVLPSSQSTKIVITEAVRVIHELESSRDTILAQMQSFAKTLPEYSVVREMPCIGDVLAPRIIAEIGDVRRFKNKHSLIAYAGIDAPPYQSGSFNATERHISKRGNSYLRKTGYEIMQSLIKHKPENDSVYDFIVKKRCEGKCAKEVMIAGLNKFLRVYYGKVTELYDNLEYCNLTA

SEQ ID NO: 431008 - protein, 346 aa, unidentified
MEYYVGLDVSLKHTSICVVNQTGSIVQEGVVESDPEAIALFVRSRAPGTVRIGIETGPTTTWLWTELNRLGLPVICIDARHAKAVLKMQINKSDRNDAAGIARIMQTGWFKEVRVKDLDSHAVKALLASRALLVKIKRDLENQIRGLLKNFGLVIGRGKFNVFAVRAAELIENRPELIAAVRPLLEARKAIEQQVDDLDRKVHKLARHDVQVRRFMTVPGVGPITALCFKATIDDPTRFKRSRSVGAYIGLTTRRHASGEIDWSGRISKCGDAMLRMYLFEAAGVLLTRVPKWSGLKAWGAKLTKRNGLRKAKVAVARKLAVILHHMWIDGTEFNWSTKKAAAEHA

SEQ ID NO: 431009 - protein, 422 aa, unidentified
MNQSNQFKATIGLDWADQKHDLWIRPADGSKAEHLRLEQSPEALHEWAAKLRKRFDTGQVAIGVETSRGPVISALMTYDFIVIFPINPKALKDYRAAFSVSGAKNDRTDAQLIEEFIRLHSEKLKPLQPDTELTRKLSGFVQDRRHLVDERTRIVNQLHSKLKTYYPLAETLIGSELNSLMAAEFLSCWPDLESLRAATAPKIRAFFYQHNSRSAKKMEQRLEAIKTARALTTDPGIIEPARELVLALAGMLKCLHKSVARLEQAIKLAMDQHPDAPIFRSLPGAGPALAPRLLVAFGTQRDRFESAQEVAQFYGVAPVVIQSGNSELVRLRRRCPKFGRQTFHENASCVSKIEPWGRAYYEQQRKKHDDKHHQACRALAYKLIRIYFSCWKTRTPYKSNTYLNALQKHGSPLHNRLNRIGE

SEQ ID NO: 431010 - protein, 410 aa, unidentified
MEVILSCCAGLDIHKDSVEACVRRTSAGGKVEHEVRHWGTTTRELVEMSDWLSSLRVTHVAMESTGVYWKPIFNILEERFEILLANAHHLKNVPGRKTDIKDCQWIAQLLQHGLLRGSFIPPRPQRELRDLTRQRTQLVDEASRISNRIQKVLEDANVKLGSVASNVVGASGRLMLEAIVAGQDDPAQLADLAKRRLRAKIPQLEQALYGKLTEHHRWMLGLLLDQLKATEQFIARLDERIAELTRPQLPVLEKLDAIPGVDRRVAEVLLAEIGPDVTPFPTDAHLASWAGICPGNNESAGKKRSGKTTKGSRWLRQALVQAAWAASHKKDSYFQAHARHLMHRRGRKRGLVAVAHSLLTVIYQMLKQGTAYRDLGSQFLDRMRAKHLIRFHVRRLQSLGLQVNLIPEAA

SEQ ID NO: 431011 - protein, 341 aa, unidentified
MDTATRTIGIDIAKNIFHLVIQESDGSLTKKKLKRKELLNFIANTPRSLIGLEACGGAHYWAREFAKLGHEAVLLNARYVKGFVIGNKNDYNDAMAIVEAVTRPQRRTVQVKTLAQQDIQLVHNIRQGLVEQRTALVNQLRGTLSERGIILAEGIKHVRQELPLILENAENGLTILSRELIAEQYQKLNQLDLDIKAQEQRIKQLCEASSLTQRFLDVPGIGPITATMVAADLGDTGKGYASSRDYAASLGLVPKQHSSGDKAVLLGMSKRGNRYLRTLLIHGARAVLKNCSEKTDKLSLWLQALIARRGFNKAAVALANKNARILWAMAVTGQSYQAASS

SEQ ID NO: 431012 - protein, 351 aa, unidentified
MDEITRIFIDTSKSVFQLHGVNAAERVVVAKKLRRSELVTFFSKLEATVIGLEACGASHHWARELGALGHEVKLIAPQHVKAYLKRNKNDARDAEAGCEAMSRPTMQFVPVKSAEAQAALMLMGVRDRMVRNRTKLTNAIRGHAAEFGLITAKGLAKIEPLLERIAADESLPALARDLFAAEGLKYAELDKALNTADARLLAWHRTNDTSRRLAKIPGVGPIGASMMVVKTPDPKAFKSGRHYAAWIGLTPKDHSTAGKQRLGAITKAGDEALRAVLVAGAMSVIQQATRHPELASPWLVNLLRCKKPKPVAVALANKNARIAWKLMVSGQDYDDGSKPKPAEAPIIAQAA

SEQ ID NO: 431013 - protein, 316 aa, unidentified
MLYVGIDVAKNKHDVTALNVPGKTVLKPLTFSNNKAGFELLDLSLRQLNQDCLIALENTGHYAFNLLNFLHEQGYKVYTCNPLLIKEFAKSLSLRKTKTDKKDAHGIALKLLSDPNREQFQHDNRQVELKILARHIHRLKRKQSDWKVQYTRCLDIIFPELDKIVGKHSEYTYQLLTCYPNPQKRLEAGFDKLIEIKRLTASKIQDILSVAPHSIGTTSPAREFEIIENIKHYKRLIDKAEKCVNDLMAEFNSVITTVTGIGNRLGAVILAEIQNIHAFDNPAQLQAFAGLDSSIYQSGQIDLAGRMVKRGSPHLR

SEQ ID NO: 431014 - protein, 400 aa, unidentified
MLSIGIDVSKGKSTVCGMKPGGEIVYTPFEVQHTREGMSELVSLLRGSGEEVRVVLESTGSYHCPVVAALLENGIFVSVVNSLRMKRFCSQSIRRVKTDQIDAMQIALYGLAYWQELQPTRLPENTYRELQLLARQYYQMTSLLIKAKVDFNALCDQVLPGMQELMSDHAGRHKLSDFVLRYHHTAHILKMGETRFRKDYCKWAEKKGYRNRERMAALIFATAQNGIPVLPNAPSTQIVITEAIRVLHTVEASRDAILTQMQALAKTLPEYSLVREMPCIGDTLAPRLIAEIGDVRRFHSKRALIAYAGIDAPPYQSGKFCANNRHISKRGNRYLRKTGYEVMQSYVMHKPANDPIFTFIEKKRGEGKSGKLAMVAGLNKFLRVYYGKVTELYRSLPAIE

SEQ ID NO: 431015 - protein, 349 aa, unidentified
MVVVGADVHKRTHTFVAVNEVGRQLGQLTVSADGKGHAKALRWARQTFPGERKWGIEDCRHLSARLERDLLTGGESVVRVPPKLMAQTRASARTRGKSDPIDALAVARAVLREPDLPVAAHDEVSRELKLLVDRREDLVGERTRMINRFRWHLHELDPSLDPSKASLDRAKTRAVLAEQLTRFDGLVAELARDILADIDRVSQAINALETRISHRVEEQAEGLISLPGCGALTAAKIIGETAGVDRFRSEACYARHSGVAPIPVWSGNTAGRVRMSRSGNRQLNAALHRIAVTQIRLDGDGRRYYRKRLLAGDSSTEALRCLKRRLARVVYQTLKAQVQPAAGLQPAAA

SEQ ID NO: 431016 - protein, 316 aa, unidentified
MADTLMVVGIDVSKAQLDIALRPTGQSWQVPNEDGGITLLVARLQAVGPTLIVLEATGGLELPVTLALAAAKLPVAVVNPRHTRDFAKAPGQLAKTDTLDARALAHFAEAVRPVPRPLPEAQAQELSGLLGRRRQLIEMLTAEKNRLRAALTSLRPRIQAHLDWLEHELHDVDTEVGGRIRTSPVWRAKDDLLQSVPGVGPVLSHTLVAQVPELGTLTRQRIAALVGVAPLNRDSGTLRGRRSVWGGRACVRATLYMGALVAVRYNPVLKAFYDRLRTAGKPAKVALTACMRKRLTILNAMLKHQTPWHEQATRTS

SEQ ID NO: 431017 - protein, 366 aa, unidentified
MEKISTVGAFGNEIFNEQKLTIGVDLGDRWSFYCVLDEAGKIILEQKVPTTPEAMQQTFSRMPRSRIALETGTHSPWVSRLLRELEHEVIVAHAQKVQLITKSNRKDDRHDARTLARLVRIDPELLGPVRHRSAKAQIHLTVIRARAELVSARTALVNAARGLVKSFGQRLPKCGTYQVSEKLAEGVSAELRDVLAPLLREVESLNERIQEYDQRMEKIANEVHPEVSLLKQVKGVGTQIALTYVLTIEDPYRFPKSRAVGCFLGLRPGRRNSGESEPQKKISKEGDRYLRTMMVQGAHYILGPFGEDSDLRRWGLKLAERGGKNAKKRAVVAVARKLAVLLHRLWVSGEVYEPLRNSQKAMRAVA

SEQ ID NO: 431018 - protein, 381 aa, unidentified
MDTATRDQECNSEPALFMAMELSASKWKLGFTVGLGQKPRERTIDGGDLEALSEAVARAKRRFRLAEDARVVSCYEAGRDGFWIDRYLRGQGIENVVIDPASVEGNRRRKKRKTDRLDLGKLLRCLVRWHGGEEKVWAVVRPPSEEAEDARQFHRELEVLKGERTRHVARIKSLLVSQGIQVKRVSTDFVTELEAARTWDGSPVPPQLRDRLVRELARLQVLRQQICELEGQRREAIRKVTDRRMQQIRHLMRLRGIGENGAWLLVMELFGWREFRNRGEVGSIAGLTPTPWASGDEDREQGIDKAGNRRVRAMMIELAWCWLRYQPRSELSMWFEQRFGGGSKRSRRIGIVALARRLLVALWHFLRDGWVPKGAVLTAPG

SEQ ID NO: 431019 - protein, 358 aa, unidentified
MRIIGCDLHARQQTIAMLDSDTGELEEKTLEHEGDTVREFYSALPGPILVGIEATGSMQWFLEMMEELGIECRVGHPAKIRQAETRKQKHDRRDARLLLTLLAENRFPTIWMPSTEQRDLRALLRHRHQWVRLRSRVQHTLQSMALNHGLRRGHALWNQAGQHALRALPLAPYASERRAALLTLYPRLQESIEELDKEVCEEVQQHPQARRLLTHPGVGPITALATEVFLGDPMRFSDGKALASYIGMIPSEHSSGGRQRLGAMSKQGNTLLRYLWCEAAMHAVERDPELKRFYRRKLVQKGLGKARVAAARKLGIRLWIMMRDQIDYQEFCRRGQARQESGSVRAGMPDLNSGPAEA

SEQ ID NO: 431020 - protein, 343 aa, unidentified
MQISTIGLDLAKHWFQVHGVDAKGRVVVRRRLWRSGVIPYFRSLEPCLVGMEACATAHYWARELMALGHTVKLMPPAYVKAYVKRNKNDAADAEAICEAVTRPSMRFVPVKDTEQQSVLMLHRARSLLVRQRTMLVNALRAHLAEFGIVAPQGLRHVEMLTKTIAHQQGRLPELACSILQTIVDQLNGTMARIREIESRLVRLHRHSRISQLLATVPGVGIMGASAIAATVADPTLFRSGREFAAWLGMTPRQNSSGGKERLGRTSKRGDKYIRSLLTAGAVAVLRHARNRPTRDGEWVRALLARKPTEVAAVALANKTARIVWAVMMRGEGYQAKEVFGQPA

SEQ ID NO: 431021 - protein, 339 aa, unidentified
MKKVSTIGLDIAKNVFEVHGVDETGTVTVCRRVRRSQLLSYFAKLPPCLVGMEACATAHYWGRELSGLGHTVRLIPPAYAKAYVRRNKNDAADARAICEAVSRPSMRFVTIKTAAQQAASGLHKVRAMLIKQRTMLINAMRGLMAEFGIVVAQGPHHVGELIAILDDPDDGRIPAPLDAGLVKMAEMLRHLERQIEAVDKQILDWGRSNASCRHLITIPGYGPILSSAMAAIVVNPAVFRSGRDFSASLGLVPRQTGTGGKVTLGPISKRGNGYLRRLLVNGAMAVLSSKQAKRDPWLAKLLATKERKVAAVALANKMARIGWAVMMRQEDFRDRPAAA

SEQ ID NO: 431022 - protein, 318 aa, unidentified
MNTRITQEEINVGVDTGKYQLDIYIRPLEIFFSVSNDEKGIKEALTEIKKHSPQRIIIEATGRLEHAFIFACSNANLPFVVANPLHIKRFAGAIGRLAKTDPLDAQLIAHYGEAVKPNLSQLKPENIRLMSDLLSRRRQLITMQTMEKNRLKIMPKVLASSITPLLTTLKNQIEKVDKKLLKIIEECPEYQLKNDIIQSIPGVGNTVAFSLLSDMPELGTISNKQAAALIGVAPFNKESGSYKGTRRIRGGRYKVRTVMFMAMMSAIQCNPVFKQKYEQLLAQGKPKKLAIIACVRKMIVVLNSMLRNGAKWEVNYAK

SEQ ID NO: 431023 - protein, 353 aa, unidentified
MEHSNTIPETTIGLDLGDRASFFVTLDGSGRKKQEGKVPTRERNLRKVFSRYEPCRMALEVGTHSPWVVRVLRDLGHEVWVANPRELRLIYQNPNKDDRLDAESLARLARVDPQLLKPIEHRSLEAAADLAQLKTRQKLVGVRASLVNHCRGVVKTVGERLPGCSTPSFHKKVRGHIPESLVPALEPLVVEIGRLTEQIKTMDYQLAQVSKRYPQTTVMQQIKGVGPITSLAYALIIEDPLRFSKSRQVGAYVGLCPGRRQSGKRDPQLRITKRGDKLLRSLLVSCAHYILGPFGEECDLRRFGLRLSESGGKKAKRVATVAVARKLAVLMHHLWVSGQVYDPLFNQQLESAV

SEQ ID NO: 431024 - protein, 453 aa, unidentified
MAKSRKKQSPKKSPPSQLQKINPHAAGIDLGAREHWVCVPSEATEQNIRSFGCSTPDLLTLADWLEECHVTSVALESTGVEWIPLFQILSERNLQVFLVNAKMVKNVPGRKSDVLDCQWLQQLHSYGLLAPSFVPEGEIAVLRSYLRQRENLIRNASSHIQRMQKALTQMNLQLHKVISDITGVTGLNIIRAIISGQRNPQKLAQLADSRIKSSPQQLEAALTGNYREEMVFILHQELSLYEFYQQQITCLDGEIEKCLAQFPSVTEEAPPATKKKHRRRATHPPFDLHSHLYRITGVDFTTIDGLDVVTVQTIISEVGLEPTKFKTVKHFASWLGLCPGCRITGGRVKSSQTRRVVNRAATAFRLAAQAVSRSNSAIGAFYRRIAARAGAPKAITATAHKIARLFYTLWLSKQSYQDQGADYYEQQYRQRVIKNLSKRAQSLGFQLVEANST

SEQ ID NO: 431025 - protein, 344 aa, unidentified
MTYFAGIDVSLEASSICVVDADGEIIREVKIASEPEALVKFFQEAGFAVRRIGLEAGPLSQWLHDGLTQAGFDVVLLETRHVKAALSAMVVKTDRKDARGIAQLLRLGWFQPVHAKSVGTRDVRALLAARNLLQSKLMDVELSIRGILRGFGLKMGKISKGRFEARVLELVDGHDMLGEIMASMLRARDVLRTAFAALHRQVLAIVRACPISRRMMTAPGVGPLVAITFKSGIDDPHRFARSKMVGAHFGMTPRKYQSGETDVTGRISRIGDATVRTALYQAAHIILSGATPYSRLKRWAMQVAKRRGLQRAKIACARKLAIILHRMWIDETDFRWGKETLPAA

SEQ ID NO: 431026 - protein, 331 aa, unidentified
MRNYSESLGLDISKSHFDAVLHQKKLHRQFDNNQSGFKALNRWIKDLKYSWKDILVCFENTGYYSLDIAYFLSNHDIDYIQEHGLQIKRSIGFRRGKSDKADAYDIAFYCWQNRSNARLSSPPTIILSKLKQLNRSRDILIKQRVALMNQIKALSVVRDKEIYSAACKSLKKVIISIDLQIKNLENTIKEVIESDSDIERNYRLCTSVKGIGPVLSTELILHTHNFTCFNSWRKFAAYSGTVPYPYQSGSSINWRAKIHPFCDKRLKSLLTMGAISAMKCDMELKLYYKKRIEEGKPKMSVINIIRNKLIARVFAVIKRGTPYVMLDKYAA

SEQ ID NO: 431027 - protein, 360 aa, unidentified
MHKATVCVAVAENGRGGEVRQIGVFENRPEILIKLAARLSKGGRPLSFCYEAGPCGYGLHRLLSGHGHDCIVVAPSLIPIKAGDRVKTDRRDALMLAKLHRAGELTPIWIPDAAHEAMRDLVRARATAGRVLSKARQHLQGFLLRHDQIYRGARAWTLAYRRWLTTVRFAHPAQQIVLQDYIHAVQDAEARLDRLTRQIEELLPNWSMAPVVTALQAMRGVALVVAVTVVAEVGDFRRFANARQLMAYLGLVPSEHSSGATVRRGGITKAGNVLARRVLIEGAWTYRTAARVSRKLHDRNEGLSPTVRDIAWKAQIRLCSRYRRLAAAGKPKVVVTTAIAREMVGFIWAIAGIAQPTLQA

SEQ ID NO: 431028 - protein, 344 aa, unidentified
MKYYAGLDVSLEETSVCIVDGEGTIVAERKVASQPGAIAEALRDSGFALTRVGLEAGPLSPWLHAGLRTEGFAVICIETRQAKAALRAMRNKTDRNDARGIAQIMRTGWFRIVHVKSGESHELRFLLTNRKTLQRKALDIENEIRGALKAFGLKVGKVSRRRFEARVLELVADRAALHRMVVPMLKARAALLEEFARLHRMVLEVVRDDEVCRRLMTIPGVGAITALTFKTGVDMPGRFAKSKTVGAHFGLTPRKFSSGEIDYQGRISKCGDAMVRSALYEAANVMLTRCTRWSALKAWAARIAKKAGAKRARVALARKLAVIMHRMWIDGTDFQWGEQTKAAR

SEQ ID NO: 431029 - protein, 338 aa, unidentified
MNKITTIGLDLAKNVFHAVCCDSHGKIQHRKMLKRGSVLNYFTNIPPALVGMEACGSAHYWARELNKQGHEVKLIPPQYVKAFLRGNKNDYNDALAITEAVTRPSMRFVQIKTVEQQDIQALHRMRERSMKVRTALSNHLRGLLAEYGIVMPLGVPTLRKRLPEVLEDGENGLSDDFMRLLARGYEQLLAADDDIAFYTRELKRQGQQNEACQRLQTIPGFGPIVSSAFLGAIGTGEAFKRGRDVSASLGLVPRQHSSGGKDHLLGISKRGDRYLRGLLVHGARAILYRASGKDDRLSLWAERIRQKRGFNKAVVALANKLARIGWAILANKTVYQAA

SEQ ID NO: 431030 - protein, 432 aa, unidentified
MNASIPASIPPLPPGAVAAYIGIDWADEKHAVALRSATEPAKIQHQLVDQRPEALTEWIGQLEQRFGSQGKILVCLEQSRGALIYHLMGYELFELYPVNPLQLARYRETFSPGGAKDDLPDADLLSELLYCHRDRLKVWKPDTELNRKLAFFNEGRREAVDQCTRLSNAIKSQLKVYFPLALELLDDDTSTALAADLLLKWPSLEALQKQNSHSLRKFFYAHNCRGESKMLQRLQRVQQAKPLTQDQAVIEPAVLRIQMLARQLKALLPDIARYEQNIAELFAAHPNHFLFDNLPGAGRALAPRLCSALGSDPERWESAQEISTLYGIAPVRRASGKKTGKRASIHFRQACPKFLRQSFHEFAACSIRYCTWAQALYDSQRARGKGHHAAVRAVAFKWIRILFACWKHRIPYDPQRYLQALQHRGSPLANAC

SEQ ID NO: 431031 - protein, 373 aa, unidentified
MLYLGIDQHANQLTIDLGNENGDLILHRQVKTHWDSLRSFLGEVRKQAEGDGGYMAIVEVCGFNNYLLELLKEYGCDHVILVQPEKPKKNKTDRRDAQSLREVLWMNRMRLRDGKRPVNMRVVRPASDDDAMDRQLTTLHSQLTEQRTRTINRVKTILRKRNLQHDCPTKGIQTQTARQWMKTLRLPEMDRFEMDVLLDEWERIDVHLKRVEKKIERRCERNHVVTLLGSTPGMGCFNALSVACRIGSIEDFPRGSSLANYWGLTPGSRNSGEKNTALSITKAGSSHVRYVLGQVVVHVLRRDAWMRQWYQKLKRRRGTKIARVAVMRRLATIFWSMLTYDMPYVKGGPEQLKAYQHKREPFLGTPLAYAGAG

SEQ ID NO: 431032 - protein, 323 aa, unidentified
MSRGNVLGIDVAKDTLVIYDRLTNDAITIANTVKAIEQAQTEYGWNSDSYLIGLESTSNYSFLPMQYFVRKGFEVRLLNPIVTKKFTKATVRAKKTDRSDAETIAMITEHGEGNLITENDLKIAKKTLLRLEGKIIDMRSDLKRMKKALDIKIGNGIELDEAVKQIDKLIIAATKASEKIWQLSREEEVDRQEKIIASHIGCGEKLSAIISTEAGDLKRFPDAKQFKAYAGIDPRIYQSGEKNVKGKMTKRGNSNLRCALYLAAFVASQHDPELSVYYKKKREEGKSHRHAICTVSRKLCERIYSTVINNRLYEPRYPENILT

SEQ ID NO: 431033 - protein, 376 aa, unidentified
MQNDITLFVGLDVHKDSITVAYALGNGEVEVLGKIGTSARDIDRLCKQLQSKARHVKIVYEAGPLGYDLQRRLAAKGFECMVCAPSLIPRRAGDRVKTDRRDAVKLVRSLRAGDLSAVHVPTVEDEAFRDLARVWAAARDALKRARQALKSFLLAHAVRYAGAANWGPAHRRWISSFSFGNVWQEFAFSELRRAIEDRFAQCERLASAMREAVPQWRFYPAVLALQTMRGIQFTTAVGLLSEIVDVTRFAHPRQLMAWLGVTPSEHSSGGSRRQGSITKTGNSLARKLLIEAAWSYRHPAKISPEIQQRHEDMPKVIVDRAWDAQVRLCGRFRRMVAKGKNKNVAIVAIARELAGFIWDIGRLGMEQAIKTSRAAV

SEQ ID NO: 431034 - protein, 365 aa, unidentified
MVNHIFVGIDLGDKNSVARIALNREKTERIGFVNNRRGRVRLFEELRRRAEKVDEAQIVLAYEASSCGFILCDEAEAQGMKCWVLAPTKMEKSVEQRKHKNDDRDADDVVEKLRGHILAGNRLPTVWIPDTHMRDDRELVRSRMDVVEKQTQLKTQIQMLIKRHGLEKPSGSGVGWTIRYRRWLEALSESDRLGNGTRTALRSLLRQLSFLEAEIERMEEPIRKLAQQPRHKPIIEELTQEHGVGLITAMVYRTEIGYAGRFRRGRRVGKFVGLTPTSHESGQQQDRKGHISRQGPPRLRKILCQASWVHVQRDPQAKRFYQQLVSRNPKKKKIAIVAVMRRLAVRLWHRMRAAELGMMAVTEMN

SEQ ID NO: 431035 - protein, 375 aa, unidentified
MKEKVRFLGLDVHAETIAVAIAEPGGEVRSLGTIANREESIRKLVKKLGSVEQLRACYEAGPTGYVLYWQLAELGVKCEVIAPTLVPVKAGDRVKTDRRDAEKLARNYRSGDLTAVWVPDESSEALRDLVRAREAAKQDQLRARHRLSKFLLRSGQRPAPGVKTWTQIYMTWIRQIRFVQMAQESTRLDYLHEVEHMGERVARLEQAIAEAAKLAPPGLQEVIKGLQALRGIAHISAVTIAAELGEFSRFEGARQLMGYSGIVPSEDSSGERTQRGSITKTGNAHLRRIAVEAAWSYRLRPCVGPALRKRQEGVAEEIKEIAWKAQHRLHKRYCRLAATRKDQRKIITALGRELLGFIWAIGIKAEAAARPPRSA

SEQ ID NO: 431036 - protein, 332 aa, unidentified
MHYLGLDISKDTVDTYSDACGHLKIENTIQGIQTLLAHLQTNGLNQENTHICCEATNVYYLLVAKTLHQNGYAVSVVNPLAIKGYAKMQLKRIKTDKQDAKLIAEFAKKEEPQYWQPNNQTGKAIQSLHRRTEQLNSLLVAEKNRQETADEYTNASVEKMIAALEEELENIREQIQAIIESDEQLKAKQKILATIPGVGKNTAQILLSVLVDLEKFRTSKHLISYLGLSPIIRDSGKYKGAQKVSKMGDKTLRKSLYMPARAACTRSKLWRGWFDKQVARGKHPKQVYVMMMCKILRYAYTCLKTNAPFDATLHKKADKAERSWKTVKGEAL

SEQ ID NO: 431037 - protein, 450 aa, unidentified
MAAKTKRTRPTKSISSPKTFHPDAAGIDLGATVHYVAVPAGRDPRPVRHFGTQTADLNTLADWLKECCITTVAMEATGVYWIPLYQILEDRGFEVRLVNARHVKNVPGRKSDVQDCQWLQYLHSVGLLNGSFRPPAAICAVRSLLRHRESLMRSACQHLLRVQKALDQMNVQLHHAVSDITGLTGLAILDAIVAGEPSPAALARLRHYRCQKSELEIAKALEGDWREEHLFTLRQSLEAWRFHQRLMEECDQQIAGHMDALEDQEDVTAQPPSKAHAKQADEPMRQQLVAKFGVDLTEVEGISLQTALVFLSEVGTDVSKFASAEHFASWLGLCPDNRITGGRTHDAHTRKVKNRLATALRMAVQSLHRSKGELGDWFRRLRSKLGTKAATTGAAHKLARVLYAMVKHRRPYDRSRLGNPEVRRARKERSLRRQAEALGFALTPLAGEVS

SEQ ID NO: 431038 - protein, 270 aa, unidentified
MTFRPHALHLKAELFVKSSRVHVRDDGFTRCNFHLKFFIMVSRGIDISKSSFVAAYPSTNGNPTKTFPNTTARMRELIGTLAVAEHHCVMEATSNYGCCCTCYIRTVLPSVLPPPKKKQIKHFSRMMMPVTKTDEKDAYMIAMYGEKMNPPIYKMPSQATIRILTTEGFTYFDNAKQLSRFIGICPTYQQSRTSVNIREHINRNDDERLRSLLYIAFWTALRYNSRECYIRLKANEKPFKVALIAVTNKLVRPVLTITTINSIYRWICPG

SEQ ID NO: 431039 - protein, 354 aa, unidentified
MTKITKVHFGGEQIYCGIDVHKLSWRVNIRSEEFELEDYSQQADEEVLVSHLRKNYPGAAYELVYEAGFSGFSLQRSLQSKGINCMVINAADVPSSDKDKRRKSDCIDARKLSKALVSRSLKGVFVPEQEMEHIRTLVRQRSKLVEDQTRCKNRIKHLLLFSGLKVEEDDSWSGRYIKRLETLDCVTVHLRQALDLALQEYQSIRKVTLQATRQLRLLSRQEPYAKIISLLRSIPGIGPINAMILLSEIQDMGRFKTLDKLCGYAGIVPDLHSSGDEQSVQGITHRSNHYLRVAIVESSWSIIRKDPAMLMYYKQYCIRMHPNKAIIKIAKHLLSRIRYVWQKEEPYQRGRIDF

SEQ ID NO: 431040 - protein, 350 aa, unidentified
MVMIGTDSHKRTHTMVAVDDVGRRLGTKTVRANSDGHLDLVCWSAQFGDAVFAVEDCRHLTRRLEADLLVAGCRVVRVPTRLMAAERRGTREPGKSDPIDAEAVALAALRYRDLPVAELDGPAREVKLLSDHRRDLVVQRTRIASQVRWFLHELDPDLVVPSRGMRRQCVVAELEARLRGFDGVVARLTRELLIRCVELNRQINRLEAELRHLVRTLAPSLLAIPGCGVLSAAVIIGETAGVHRFRNKDAYARFTGTAPVPVWSGASAGKVRLNRGGNRAMNCALHMIAVTQARGIGPGRAYLAKQEARGKDKTAALRLLRRRLSDTVFTALRADQLNNNLQPVTLPAAA

SEQ ID NO: 431041 - protein, 386 aa, unidentified
MTQHSHIAASHQLDYERTLILAVEVSGRSWVVAAQVPGLRQKGVKQQLAPRADALMAAVEGYKRRAAAAGMAVERVIVAYESGGSGFWLARWLQQRGVEVYVMQPSSVPVDRRMRRAKSDRIDADMLLRTLLAWLRGEPRVCSMVPVPDEATEDARRPIREREELIRARVALVNRIEAVLTVLGAGEYNPLRRDCRERLGQLRTALDQPLPPHARAQIERLLDRLDLIRQQVADLEAQRDRAVEGETVGQAERMIQHLARVRGIGVQTATVLVHEAFVRRFRNARALGSYAGLTGTPYSSGGTHREQGISKDGNRRLRATLVELAWMWLRYQPGCALSRWFHDRLGGSRGRLRKVMIVALARKLLIALWRYLQDGAVPQGMELKPA

SEQ ID NO: 431042 - protein, 342 aa, unidentified
MNKVAIAAIDLGKHSFHLHAQDDRGHELYRKKFNRVALIQHLMNLEPCTVVMEACGGAHFMAQEAAKLGHTPKLIAPHLVRPYVKSNKNDFADAEAICEAATRPAMRFVPAKTQAQQVLAMSNSIRESFIKDRTATANRIHAALLEVGISLAPGFKSIKELPALLEQSSLSERIKKNLMLLHEHFNYLDGRVKAQDKDVECQAAEDDLATRLMTMPCVGPITSTVLAAELGDGKQFKCGRGYAASIGLVPKQHSTGGKSVLLGISKRGDRNQRRLLVQCARVYLIQLERQKGALADWVRRLLASGHHSNLVVCALANKLARIAWAIAAHHTEFEAGPTAMNA

SEQ ID NO: 431043 - protein, 347 aa, unidentified
MSITMIGLDTAKSVFQVHGVNETGKVESRRKLRRSELIPYFEKQEACTVVMEACGAAHHWARVLSSLGHEVKLIAPEAVRPFVKKGKKNDPADAAALCEAASRPAMMFVPVKTIEQQGILALHSARSLLVKQQTMLANAMRGLAMEFGLTVPQGIGRLEELLALVDTDKTFPEKARQVFTRLFGQCCALAASISAFEEEIVAHARQDQTARRLATIPGVGPITASLIAATVVDIGLFKSARHFAAWLGLVPRQYSTGGKTRLGRITKAGNREIRRLLVLGATSMVYRAPQWNSVVGMWTRGILVRRPARLVTVALANKMARIAWALMTRKEVYRAKGRVAAATEAAV

SEQ ID NO: 431044 - protein, 359 aa, unidentified
MSTQRKEFSFKGQKIFVGLDVHLKSWTVTVLSEQSVLKKFTQDPSPAALYKFLSNTYPGAEYYSVYEAGFCGFWIHWELHNLGINNIVVNPADVPTMGGERLRKTDAVDSGKLARSLRAGELRGIYVPDSITTEIRSLIRLRDSLTKDQTRHKNRIKSHLRYLGIDIPAEFCNSGRRWTNRFVLWLKELKLETDYGRKTLDLLIAQYEDLRAQQLNMMKELRALSKNERFELPLRLLMTIPGIAQVSGLTILSEIDDIARFKDSSHLASFVGLIPMCYSSGEHDGTGNLTVRRHAQLRWLIVESAWIAARKDPVLAAAYVEYCRRMKPSKAIVKIARRLVNRIYFVLKHQHPYVNCYVS

SEQ ID NO: 431045 - protein, 419 aa, unidentified
MFKIYRFNCCGLDVHKTWIYACIGITSKVGLTEYKRQRFSSFSKGLRELAAWIQSFGCKEVCMESAGKYWIPVFNILEKADLWVTLAHPKYTKPLRGNKTDRKDAKWICDHFICDLIKPSFIPPRDIRELRDLVRYYKKLTNILTGEKNRAHNCLTVSNLKLDDVFSDVFGKSARSITQHILDHPGEKFDVTPFVDKRCKTPVAEIQDAVDGAISTEQAVKLREVLAHIDELTAHKERIKAELLRLAGKYEVALNLIRTVPGFSADPLTAVTVLSEIGADMSVFPTAKNLVSWAGVCPRNDQSGGKVKSTRISKAGSWLKPTLVQVANAVVKSDKHPEFKGRYRRIKAHRGHKKAIIAICRMFLTAIWNILSKLEPYTAQGYLDPNPPLTREISAEDALKLLKSRGYIIKGELPMPAAA

SEQ ID NO: 431046 - protein, 436 aa, unidentified
MNEPEFAAWVAIDWAERKHSWQMLIAATGRREQGQLDHKPQAIEEWATGLQQRFPHALAAVCLEQSRGPLVYQLAKYAHLVLYPAHPATVARYRAAFFPSGAKGDPGDTALLLEILLHHRQHLRRLDPDTPDTRRLAMLTELRRKLVDERTRHSNRLTAGLKLYYPQPLDWIENIDAPLGCDLLQRWPTFQQLQRAHPDTLRRFFHQHNCRSHQRVEQRIQAIRESTVAVHDPVLLEAGVAATSSLVALLRCLNEQIAALDRQIGELTPQHPEANLFAGLPGAGPVLLPRLIVAFGTQRERFQSAAELAAYSGIAPVSRQSGQSKTVVFRRACPRFLRQTFHEFAACSMAKSSWARTLYRSQRDRGKHHHAAVRALAFKWIRILFRCWKDHTPYNDARYLHCLEQRHSPLTSSDTQPGCSDPSHNGECKRRLDPAE

SEQ ID NO: 431047 - protein, 371 aa, unidentified
MKSIIYIGMDVHKKTYSLCALLKETGEIIGETKIPADVSLIIKFIENAKKSVDSDDVQIKTGYEAGCLGYSLYWQLAEKGIECDILAPSTMHRSAKNKVVKNDRRDAKNIAANLANGTYKSVHVPTDEDVEIKEYIRMMHDFKIELKKVKQHINAFLLRFGHQYPGKSKWVPAHIKWLKELELSDMHREILDEYLSQLEILSEKIERFKHRLEELSQKETYNEKIGQLRCIKGIDTIAAMTMHAETSDFDRFPTANAFASYCGLTPGEDSSGDSYHRLGITKQGNSMIRTTLVEAAQVLVRGTIGKKGKKVKSKQKDQDVKVIDYADKAVIRLQKKYHRMIFRGVKRNIAITAVARELACFVWGIETGHIS

SEQ ID NO: 431048 - protein, 369 aa, unidentified
MVSSRFLNGVKCATMEGVTHHLNEAQEETEMNITTIGLDLAKNVFHVVGLDEHGHEKMKKRLSRRQVLKHFAQCPACVIGMEACASSHYFARELRQLGHTAKLIPPQYVKAYSRGQKNDTNDARAIAEAVRVPSMRFVAVKTVAQQDLQALIRLREGAINARTAGANRVRGLLGEYGLVTGKSLGALHRALPLILEDASNGLTEVFRRLLNQQRQHLLELDAHIAMLTAELTALSKQDDRVGRLQTVPGYGPIVASVFASVMGDGAQYRRGREASASLGLVPRQHGSGGKNVLLGISKRGDRYLRSLLIHGARAVVYAARKKDDPLSRWINRRRETRGMNKATVALANKLARIGWAILRHGTTYQPAPA

SEQ ID NO: 431049 - protein, 304 aa, unidentified
MFGIGIDVSKATLDVAVHGEQFRQFSNDKRGFVRLIRWLKTWPIKQVVLEASGGYERAALDVLHAAGLPMVRINPARARRFAQGTGRAAKTDRLDATVLAQMAHLLPLTRYVPPAPWQQRLAEFAQCRRHLVQMRVSEMQRLRRLVDPDLIAMKQRYIAQLSDDLKQLDKAIAEQLEGQPGWKNIGALKGVGPILISTLASELPELGSLGSKTIASLVGLAPMNRESGTWQGQRRISGGRAVVREALYMAALTAIRYEPRLRTFYAGLKAKGKASKVALVAVMRKMLVILNARKRDAEVALGCP

SEQ ID NO: 431050 - protein, 430 aa, unidentified
MTNLKHTPSDSVLVAIDVSQRRNDVLIETPGVSRHRRLVVLNNRVEHDRFIDRLRDIGRPVIVGFEATGNYHRPLAYRLLQAGFELRLVSSVALARTREALHNGWDKNDPKDAQIILHMLKIGATQTYCDPICSGINDIQELSKTHEVISKAKTELWHRLLTHYLPLYFPEIARFAGNSRSDWFLAFLEQFPTPAGITVLAKEHFIDQAWDVVGRKVSKARLLGDIYETARSSIGLPVAIDSPAVTMFRLIIAEGRSLIRQRDAIEQQAHTALADNVDYRRLRQIPGIGPIIAMTILAEAGDLRRFRHHRQFLKFCGLDLATHQSGQFRGQTKLSKFGNARLRRAFWVAAQVAIRQRDNGFRAKYERYIARDNDNADLKRKALTAITAKMARTAHAVIRTGSDYRPFFEGPMPSGRTSLSRCREGATATL

SEQ ID NO: 431051 - protein, 355 aa, unidentified
METSYDGRQVVGMDLHRRRSVLVRMTEDGRRLGTAKITNSPQELRREIARAGKAPQVVLEATYGWYWAADTLAEAGAEVHLAHPLGVKAFSYRRVKNDERDSADLADLLRMGRLPEAWIAPHEVRELRELTRYRHKLVHLRTSCKDQVHGVLAKLGVTVTCTDIFGKAGSAWLDGLRLPQPYAGKVTSLRHLAGELTTEITMLSEVIAALLAGDRGYQVIQQLPGIGPVLAAVIVAEIGDVTRFRNAAQLCSWAGLTPRHRESDTKIARGHVTKQGSRLLRWALIEAIQRLPRDSVIGSVKDAIIARRGKEARNIAKVAAARRLLTLVFYGMRDGQIRCLSRPAGPPAAAPARAA

SEQ ID NO: 431052 - protein, 480 aa, unidentified
MASDTMNRKQRKELARRLQSANPGLEVVHSRAAGIDVGNMTHYVAVRPDQDPEPVRRFECFTADLHRLADWLEACGVATIAMQSTGVYWIPLYEILEERGFEVYLVNARHTKNLPGRKSDVQESQWLLKLHTYGLLNNSFQPTAEIRVARTYWRQRGEHVHGASTCIQRMQKVLTQMNLQLANVISDVSGLTGQRIVRAILAGERNPKNLAELSDYRIRASREQVAKSLEGNWRPELLFVLKQEMEMYDTYQRRIAECDRELEAHLKSLAGKIGPKPTEEAPSFETGPGKKAQTTRLTQGGKKAPGNRPQFDLRSELYRISGVDLTRIDSIHVLVAQTVISEVGLDMSRWNTEAHFASWLGLCPDNRISGDRVLSRGTRHVVNRAATALRVAATTLLKSRSYLGAQYRRLRTRLGAPKAITAMAHKLARLVYRMLKYGQEYVDKGMQYYEERHRHQQVEHLKKTAAKLGLQIVEVQTMGA

SEQ ID NO: 431053 - protein, 415 aa, unidentified
MHYFVGIDIAKSFHVACVVDSNDKVIKKSLKFNNDEKGFSELLVLLNSIDDTSRFTIGMEATNLFFENLYLYLKEKGFKVVLLNPYQTNRFREMDSMKKVKNDNIDALMIAALIKSGRYSNAYVSEDMYQSVKALYRHKQSLLEEMKKHKRQISTLLSVVFPEMEQVIKDPFNVTGLALLQKYPTAKHYEYASVDRILKTFRGIKGNNFNEEKAKKLLELAKHSIYQGNGKDERAYVIQSHIRVIKLLLKELEELENEMLKIFKQAPELDKEDEQEVIDIIDNLRSIPGVSDKTIFALMSECGDLSRFKNASHFIGYLGLYPTLEQSGNKLVYGHIAKRGAKLAKKALYQAAIAAIRHNNELNKLYRDKISQGRAKKEAVIIVARKLAQIVLAIYKNNVAYNPQRVFQAQRKNAS

SEQ ID NO: 431054 - protein, 457 aa, unidentified
MSPFSGDLQLIEPDAAAVDVGSRSHWVAVNPERDPNPVREFGTFTTDLMSLADWFAQCEVKSVVMEATGVYWVSLYNLLEERGFKVYVVDAHTVRHLPGRSKSDVKDCQWLRRLHSYGLLRGCFRPPAQIRQLRNYQRSRSNIVDAAAQQQLRMQKALTLMNVHLHHVISDISGLTGLAIVRAIVGGERDPKQLARLRDPRIVASKETIQKSLEGNWQEELLFDLKIALESYDHFQSQINAYDEQIRRELKEVPSKVDLRQQALPAGRLRVCRKRPGMSQQDQLELRAELYRISGVDLTRIDGISLQTAQKVFFEIGTNVSAWDDEKKFSSWLGLSPNHRISGGKVLKRSSRKVVNPLSTALRLAARTLRNSHSALGANFRRLIAKIGMPKAITAMARKLAVLIYRMLKYGTQYVDKGMQHYEAKYQATKIQYLRAQAATLGMILLPKQSAGAGATT

SEQ ID NO: 431055 - protein, 346 aa, unidentified
MEINRVGVDLAKNIFQLHGADCRGKTVWKRQLSRGKWLELLCDTVKPGTEIGMEACAGAHHWARLLTHRGYAVKIIAPQFVKPFVKSNKNDANDARAICEAMDRPDMHPVSIKTVEQQDIQAAHRVREEIKSHRIAKANQIRGLVTEYGLVAPQQLSSLRSAIPGWLEDADNGLTLLFRQLLHGLWQDLWALDQRMAELDKQIAVIAQENPTAKRLQQLRGVGPLIATALVATVGDGKQYRNGRDMAAALGLTPRQHSSGGKDRLLGITKRGDAYLRCLLVHGARSAVRTAKDKEDRLSRWIINLQSRRHANVVAIAMANKMARMAWAMMTKGVDYDPDFNPVSAS

SEQ ID NO: 431056 - protein, 430 aa, unidentified
MHDEVYYRRCAGIDVHKKVLVVCLRIDRKSETRTFGTLTHELRNMVAWLKDNGCQMAAMESTGSYWKPLYNIFEQEGLPAMVCNAHHIKNVPGRKTDVKDAEWIAKCLSQGLLNPSFIPDREQRELRELTRFRQSQIQERSRNINRLQKFLEGANIKIGSWLSDVEGKSATELLELVIGKPDFTVDDVAARMHGKLKSSAQELFLSLEGYMTPLQRELFAHIMEIIRQQTAQIEKTDAMIKRNLSDNYKAAVKALDEIPGIGEISAEQIIAEVGTDMSRFRTPQRLSKWAGVCLGNNESAGKRKSGKTPPGNKTLKSTLTQSAQSAKRKKNSFFHAQYNRLVTDRGKNKATMAVAHSLLIAIFFVLSGKQFVDLGADYYTNFNREKKINSHVKQLSKLGVNIPEDVMRNIMIEAMRKPDISRASPKNKTA

SEQ ID NO: 431057 - protein, 338 aa, unidentified
MELYAGLDLHSRNTYIGIMDKAFNRVFKKRVSNHLELILETLDPFRDQIKGFVVESTYNWYWLVDGLMDAGYSSAHLANPAAIKQYEGLKHSDDQHDAFFLAQLLILGILPQGYIYPKKERPVRDLARKRMFLVQHKTAHILSLQSLIQRCCAMKIRGNDMRHLTVKDLEKWLKEEYLVLSAQANLDCINFLKQKIQELEKAIRKKVKLKRAFHNLKTVPGIGDILALTIMLEVGDIGRFPKVGNFTSYCRCVPAQRLSDGKSKGHGNRKNGNRYLSWAFTEAAQLSRRYNKRFRRYYNRKVAQANTSLATKALGNKLARICYYIMRDQVPFREGLSC

SEQ ID NO: 431058 - protein, 316 aa, unidentified
MSNISMICAGIDVAKDRLEVAVHPGGARLDVGNDAAGLQALDAFLDTHGVQRVGFEASGGYEWRLMAHLRQGPRPAARLQPAQVRAFAKSRLQRAKNDRLDARLIAAFTAALERLPELPEARFDNLAAELTYLEQIEQQIALVKTFAEAALTDSIRRRHQRQIETLTKKREAEIERIAKAMRADAQLSRRLDLLVSIKGIGLRSALALVIRLPELGQASREEVAALVGVAPFDDDTGKRCGIRHIDGGRERLRKAVFMCAFTAARHNPDLAAFYKRLRQKGKDHKLAVIAVARKLVVLANAVVARGSEWTPRYQHP

SEQ ID NO: 431059 - protein, 345 aa, unidentified
MNILAMDLGKNNTVICLYHAQSGSHKFSKIKTDPQEIHDFLTEHSADKVVFEICSSAGWIYDICYALRLDVEVANPNTQAWRWKNVKNKNDKNDALKLAQLSAMNQLPTVHMPKPSVRQKRSLIQYRQTLVGRVVAIKNNIRSILDKQGLSMLAGKSGWTKKSLESLNIEALPFEKCDVYNLWRGQLYIELQMLQSTQKALADVTAELDKQAESNVEIKLLQSAAGVGPRLAETVVAFIDEPQRFTSGKQVGSYAGLTPRQYQSGSMNRQGKISGQGNKLLRALLVEVSWLGLRHNGWMRQTYERLLRGSSSRKKIAITAVARKLLVRCWAMLRDGMPWQVKAAA

SEQ ID NO: 431060 - protein, 370 aa, unidentified
MAEPTTLFVGLDVHKETIAVAHASPDRSSDVVYVGQIGPREADIDKLLRRLHSHASRLVIAYEAGPCGYGLYRTLAKKGISCMVVAPSLIPKKPGERVKTDRRDAAQLARLLRSGDLTSISVPTIEDEAVRDLSRAREAAIRVLKDAKLRLKSFLLRHGLHYSGRATWNEAHLRYLAKVVCPTPAQQIVFQESLRAVSEQTERVRRLEDELVEIAATWRLRPIVDAFQSMRGVQSHTAVTIAAELGDLTRFDNPRQLAAFVGLIPSEYTTGESRRLGPITKAGNGHARRALVEAAWAYRYPAKVSAHLQQRIERCPKPVQEIAWKAQVRLCKRYRRMVARGKNPNIVVTAITREILAFLWAIAREVPIGH

SEQ ID NO: 431061 - protein, 482 aa, unidentified
MWSPADVVTTWSVGGRVSVGRREPRGGLFIVASSTRIRFCICPVAPAGGRASSIGRGWKGVLRETQDNEEIIERVAALDIGKAELVCCARVPDESRSGGRLQEVETYSTMTRSLLVMADRLRQLGVTRVVMEATSDYWKPPFYLLEAHGFETWLVNAKDVKHLPGRPKSDKLDAAWLCKVAERQMIRPSFVPPPQIRWLRELTRYRVDLVEARTAEKQRVEKLLEDAQIKLSVVASDIFGVSGRQMMAALVAGERDPKVLAQMAHGRMRGKISVLEEAFTGHFTAHHAFLLGRMLTRVDGISADIAALDSEIDQQIFPFAAAVDRLDEIPGVGAAAAQVIVSEVGLDMSRFPTAGHLVSWARFAPKVSESAGKKKGTQSTGHGNRYLARVLGEAAVVAGRTDTFLGERYRRIARRRGPNRAAVAVGRSILIIAWHLLADPDTRFADLGASFYDTHINPDRKKRHYIHELQALGYRVTLEPAA

SEQ ID NO: 431062 - protein, 408 aa, unidentified
MRIIGLDIHRAFAEAVAWKDGKLSRMGRVIMRRDSLEAFAKQLSEDDVVVIEATGNAASVAAVIGPHVSRVVIANPKQVRLIAHAKIKTDTIDASVLAQLYASGFLPEVWIADEATQALRRQVTRRNQIVRQRSRLKNIIQSILHAHLIPSCPHQDLCGPAGRAWLSEQILPGDERLAVERHLREFDRLGDDLKVIERDLARSALADESVRRLMTIPGIDMVVALALRAAIGDVERFAGPEKLVGYLGLNPSVRQSGPGPAYHGRITKQGRGHARGMLVEAGWAAARSPGPLRSFFLRVQTRRGQHVAAVATARKLAILIWHLLTKGESYLWARPALHARKLRNLELKAGHQGARGQKGTAHAYNIKSQRDQERRWVEQAEAAYARFVAGWNPRGAKARTGAAKEERR

SEQ ID NO: 431063 - protein, 401 aa, unidentified
MKTVLSVDVAKNKSMIMLMNSDGEILIDTKEIKHNLEDFEKAKEEIKEINPENLTVFMESTGTYHLPVERYFKENGFNTLVINSLTTKNNYDTIRKTKTDKKDCYRLAKLFFVNEVEYHELSKKDLYANLKAMTRQYFYLLQQNVSCKNRYKRLLNICFPELEKIFKSTRIYDDTALNFIKEFPHAEIVKEKRIDALYNNLYKTNGRNLNFYKRLSETIKIASANSYPGVDKEHKDVKNLSDMAKIVQNNNNVINELRDKIIETAKKSPYYEIINSFYGIGEILTAEILGELGDITRFDSPKQLIAFCGLDPTIKQSGKSINVKGAISKRGNKYARYILFNCSQMVVKLGASNYPEHPVYIYYQNKKAEGKHYYESLTACSTKILRMLYSMCKNNKQFLEN

SEQ ID NO: 431064 - protein, 336 aa, unidentified
MYVGLDVHKRFNQATVVDDNGVVLRECTVQNKDKELDRFLQTLAPGTKLALEACSVWEPVYDFIQSKGLDVCLIHPKKTRLIAESRNKTDRNDATMIAQLLRANMVYRAYVPDKETRKLRFLVRHRKSLVKQKKYVKNKVHAILAREGITHGLSDLFGKRGMTILENIPLRNENRFAVNQLLDSLKSIKQQIVEADEYIAIQSSGIREIELLKTIPGISTYSAAVIYSEIADIKRFSDWKKLCGYAGITSSVYQSGDTKRFGPISKQGSRMLRWILIQCVQHTVRKPNSAQKLYMRVLKKKGHKKAIVAASRKLLVYIYIMLTQDKKFNELRVNSA

SEQ ID NO: 431065 - protein, 419 aa, unidentified
MKKSEPKKLKVVNEKTLIVTIDIGKVVNMGYCRCPDRTEVKPFKFHNNREGFNKFWGCVSEIKAAKGLEEIVVGLESTGAYGEPLMHYLQDKPVRLVQVNPMHTKKLKELQGNSPNKTDNKDPKVIADIIELGHALTVVIPRGTAAELRRLTQARERSIQRRTALFNQLQDLVFTTFPEFLQVMKNVKTKTAQYLLRHHPTPQDILEYGLEPLTSTLKRVSRGKLGAACAKTLYEAAGKSVGIKEGQASIVLEIQEILLAIEAGERSVALFEEKLSEHLKQIPYSPSILSIKGIGEITAAGLIGEVGNFTKFSAASELLKHAGLDLFEISSGKHKGKRRISKRGRPLFRKLLFFAAINTVRKGGIMHRHYQRHLEKGMKKIKALIAIARKLLGIIFALVRDHSKYVADYLEIQNLKLAA

SEQ ID NO: 431066 - protein, 336 aa, unidentified
MNTLDKNSATFLGIDAHPTTHTALAINRFEEEKGILTFDNTKDGIATFLSWLPTIEANMEKVIIGLEGGGNSRHALVANLLKDYQNIYEVNPLYTKQRRMFGTKGDKTDPRDAKLIAEVLTRKLSELPKITKHDLSAHMLVLKKTVWFYEETTAQGVSIQNQLHQLRREADLSIDTTEKKVLRMMVVNLEKQLKNVRKTQKKCEEQLLVLLDKQGKNLTTIKGIKTILSAKIVAHSGGIERFANLDSFIQYAGIAPREKSSGKTKRHSKSKTGNRKLNHAFYMAAMVQLRWNTKAKEYFEKKIKEGKTKKHALKCLMKRTACITYGMLKSGEDYKG

SEQ ID NO: 431067 - protein, 387 aa, unidentified
MARKRTLSTLDTSIAYEAVGLDLAKEDAAIAAFGPDHEGPYLIDRIPYDKLYELLADMAPTLVAMEPCSGAHQIAEQIQELGHEVMMISGRHVQAWVKDHCNGQKTDLNDAFAILNLAYDRWLTPIRGKTREECRLLALQASYRQLKGQRTKTMVHVKATLHAWGFPIRTGSFNQKALHELIDANREAFGDEVVETLHLMINRVHDLDHDIATVLKLLTEATQRDPRASLLRSIPGFGVLTTSRWCAVVGDIARFDTPKQTMAFIGLVPNNRITGHHTETSSGREARGQGKMSKRGDKMLRSLCILGAGALCLMVRNDRLPDCPFVASIKERLASPRPWFKVLVYVAAKLVRIATALLKYGETFSFEKAGISRAVLKQWELEQAKAA

SEQ ID NO: 431068 - protein, 555 aa, unidentified
MVHATGGRLSRGDRRRNEKLRRLREAVPESVAILAIDLAKAKQVVVVTGPGHQVLARRTFVCSPWGVDQMIEFAQMAASDHGLEHLVVACEPTGHRWKPVLERCIRRSLTLVCVQPMLVAREREREDYTRDRSDPKDATLIAHLARDLRCYLVVAPDADWARLRHLGVRRHAKLVERGAARQQLADLMGAYWPAALEAASDLDSKTLLACLAVSTDPDVVAIMSYPAFAAAVAEVLPRVGGERRCHRVIQAFYAATSDPRKIPGEQPGAAERAAFALADLLHATTQVAEVEDRMAGMLRAFGYAELASDIPGLSEVGAAAILAETGDPARYDSGRAWAKHAGACPRDNASGRHQGKTRVSGRGRPLLRTAAWRAVWPLVQRNEVFAARYRHLTGREENKLTDAQARTAIAAALLRQLWWVLRHRVAWDPVAAGGIAEEVVPAAETRHDGLGWGSPPRPWVEPETEPGRPTPLPYESPDEGCWAEPGCSLGWAGEAGGSTPRDVAALARRPSTSTSTWLQRREGSSCPAGYRFTIGRWIEGSPRRTRSPAVTGVSR

SEQ ID NO: 431069 - protein, 352 aa, unidentified
MNVIHYIVFDVHKKSVSYCVKDAAGKILEEGKLRATRQALRQWAGDRTEPWHGAMEATLFSGWIYDTLKPFATELQMGHPAMMKAIGASKKKNDKIDARQTADLVRCNLLPACYVAPTEIRELRRMLRYRNVVVAQAVRMKNKMSGLLMEVGAEYNKQRLHGKKYFTELLGSLEEVPESVKDLLRLSRGALELFETTQKKILDRLQKEPRLVRRLEGLQSIRGVGVVTALSWALEICDPHRFPSIADAVSYCGLTSALVSSADKQQRGPLSQQRNAHLQTVLIEAAKLAPRWNSQLAAVHEREMNRGNRNRATLAVARKLVAYLLAVDKSGKPFQVQTPPAPATETEVPAVA

SEQ ID NO: 431070 - protein, 312 aa, unidentified
MEKLSYGGIDVSKDRLDVVVLPEERFFSVSNDAAGWAELVARIRPLAVSAIGIEPSGGYERGIIRALLAAGLSVRRINPNKLRQFARARGVLAKNDRLDARLIAEYVAIMPTRVVQRDEAVEKLAEVVTMRRQLRDEHVTVENQAAHIEDAMLRRLNKRRLARLEADTRLLDKRLAEMVATNAALAQRYELLTSMPGVGPVLAFTLIALLPELGQMSRKQIAALVGLAPYDFDSGKLRGHRSIYGGRMAVRNVLYMAALSGCRYNPALKAFHKRLAAADKKSKVVIVAVMRKMITTLNAMLRDNVEWQPKSA

SEQ ID NO: 431071 - protein, 356 aa, unidentified
MAIAIGIDVHKKTSTFFAYGEDGEPLEEFNKRFKRVASNRDGYTEVLVWLGNSDCDFLMENSTKTHDVYWILQGLGYKNLYVAHSVDLKRITKSSKKTDHFDAEKLATYMRVKQQNIDQFRTCYICTPEDMRIRRLCRIAKQELFDMGRIRRRIRSHLLLTGREWMGGLNTKWECEALMNEDDPGLRHLGRQLNECRLRRDAAEEAVVKAIKGNEKMFPIYEKLKEIPNFGDITAAYLAAVIVDIDRFENPKKLAAYLGIVPRMRDSGETENHCGLTRSGDPAARWLLIQATFRLVNSSAPDSQLKAFFAEKNGGSIEERKEADTSGLLKRPALVATANKLIHIIFALLTHPDRHW

SEQ ID NO: 431072 - protein, 349 aa, unidentified
MEQNEVILGVDTHLDTHVGAVISDTGRLLGTRSVSTDTAGYLDLLTWANSFGHLRRAGVEGTGTYGAGLARVLRDHEIEVLEVNRPDRAMRRSKGKSDPTDAENAARAVLSGRATAIPKEQSGAAEAMRAVSVARRSAVKAKTQAINQLRALLVSAPQEIRDRLLKVKTAACVEGCARLRSLGKTPMLQTLTTTLRLLAKRWLTLAEELKALDAMLDSLTSQHARRLRERFGVGPQTAAVLVAVAGDNPERLKSEAALAALCGTSPLQASSGKTVRHRLNRGGDRSANNALWTIAMVRMRSDPRTRAYVDRRTKEGMSNKEIHRCLKRYIVRELYPLILADLADSTRVA

SEQ ID NO: 431073 - protein, 356 aa, unidentified
MGEGSWVGLDVHARSVVAGVIDAVSGEVRSLRVPPGSEATVAWLQSLPAPVRVVYEAGPTGYRLARACEAAGISCVVAAPSKIRPAADRVKTDRRDAERLARLLRLGEIIPVRVPGPEEEAARDLVRAREDARGDLMRARHRLSKLLLRHGAVYDGTAWTRAHDQWVRKQRFAGGPLSIVFDECYGRMVDAKARRDALDKAISELAATPEYVDVVERLVCLRGVSTLTAFALTVELGDWCRFRPESLGPFLGLTPSESSSGERRRQGAITKAGNSHARRLLIEAAWHHRQPSRRSVTLERRRTGKPLAVCAQAERSGRRLHGRWQALEARGKPRTIIVVAIARELAGHCWALATMD

SEQ ID NO: 431074 - protein, 354 aa, unidentified
MSQKLNSEIAVIGIDIGKNSFHIVGQDRRGALLLRQKWSRGQVEARLANLPPCLIGMEACVGAHHLSRKLQALGHDARLMPAKYVRPYSKGEKNDYRDAEAIAEAVQRPTMKFVATKTADQLDLQALHRVRERLVSQRTGIINQIRAFLLERGIAVRQGLHFLRAELPGILAKCTDVLSPRMLHLIEDLATDWRRLDERIEGLSDEIGALARHDKGCERLMTVPGIGPIISSAIVAAIGTGDVFSKGRDFGAWLGLVPKQISTGDRTILGPISRRGNRYLRALFVQAAWVVLVKIKPEGWERYGLRSWIEAAKQRLHHNVLAIALANKLARIAWAVLHKGRAFECVKTNASRAA

SEQ ID NO: 431075 - protein, 341 aa, unidentified
MTSVATDSTTTQTHWYGGIDVSKDSLEIVWLAEDQDQTHRLCLPNSPEGFQGLLELCQQRPCKCILLEASGGYEQRLVLALALAKLPVVVINPKRARDFAKAAGRLAKTDRIDAQVLALMAKTLPPEIRPMPDEQLLLLKELTTRRDQLVQFQTAEKIRLQQEPNRIVWQSIQRLLQNLQRQIARIEAEIRQLIQQSPVWQAKEQLLRSVPGVGEQTAACLLAHLPELGQLNRRQIAALVGVAPLNRDSGRFHGHRAIWGGRLKVRNVLYMATLTATRFNPVIQQFYHRLCEAGKPAKVALVACMRKLLILLNAILRTGQPWNPHLPENPTAQETRNRPEK

SEQ ID NO: 431076 - protein, 411 aa, unidentified
MEVVHERCAGIDVHKATVVACVRMPGARPGERHSETKTFATTTRGLTELTHWLVGHGVTDVAMESTSVYWRPVYAVLENTVRLILVNARHVKMVPGRKTDVRDSEWLAQLLECGLLRASFVPPRPVRDLRDLTRLRKTLIRERGHHVNRIEKTLELAHIKLGCVVTDLMGKTGRAILQALSAGIDDPDQLAEYAQGLLRKKRAALREALVGHLTPHYAFLLQQHLALIDTLETHIVTLDARIEEAMAPFAEPAALAQTMPGVAVRAAQAILAETGVDMQPFPTAAHLASWARLCPGTHESAGKRQPTTTGKGATWLRATLQEVAWAAVRTKKSYYRALYHRIKGRGGPKKAIVAVQHAMIVALWHMLKRRVAHHDLGADYFERRNTARIRRHHIRRLEQLGYDVVLVDKAA

SEQ ID NO: 431077 - protein, 317 aa, unidentified
MFFDVALPDGQGYRHYKFDNNQAGFSALLKVLSSESVVVMEASGPYYLRLASFLSQQGIGVSVVNPLVIRRFCQMRLSRAKTDKKDSIMLAKYGCAEKPALWQPPKEHEIVLQQMEAILANLHKEHTAVNNQLESFTSSGMLDKKLEQLLRKESAHKQGLIDQLTLEIEELAKKHYSSLLASLESIPGIGRKTAIMLLVASGGFSRFSDYRKLSSYIGICPRIFESGTSVKGKARICKMGMSGMRAVLYLCAWSAKRYNKACSELYGRLLAKGKAKKVALIAVVNKLLKQAFAIATKLTIYNENYVRKPCFCTQFIG

SEQ ID NO: 431078 - protein, 377 aa, unidentified
MKRIKFVGLDVHAETIAVAVAEQDGDVRSLGVIPNREESIRKLVKKLGPVEQLRFCYEAGPTGYVVYWQLTALGAKCEVVAPTLVPVKSGERVKTDRRDALKLARNYRAGELTPVWVPDAAHEALRDLVRAREAAKKDQLRAKHRLGKFLLRHGRRPPTGVKPWTLNYLSWVKHEVHFEQMAQEATLLDYLHEVEHAELRIARLDLAIEEAVKLAPAKMRAVIDALQALRGVARVSAVTIAAELGEVSRFTGARELMGYGGIVASEHSSGESTRRGSITKTGNAHLRRVVIEAAWAYRHRPNIGETLRKRQEKVSEEIREIAWKAQHRLHARYRKLTVRGKAKGKVVTAIGRELLGFIWAIGVQAEALHKKTEQRAA

SEQ ID NO: 431079 - protein, 402 aa, unidentified
MNSVGIDISKGRSTIAVMRPFGEIVISPFEVRHTDSELSELARRLKSLNGETRVVMEATGNYHAPVAKLLHDAGLYVSVVNAKLVHGYGNNDLRRVKTDRKDAVKLANYGLDRWLTLPRYVPEENTRLLLKNCYRQYRQYSKVQTVLKNNLISLLDMTFPNANRLFVSPARADGSEKWVDFVAEFWHCECVSERSLKSFVNKYWRWCRKHGYNFSEEKAHAIYDEASGHIGVMPKSETTKLLVEQAVSQLSATSAALAALKQEMQSLSSQLPEYPVVMGMFGVGPILGPQLIAEIGDVRRFYSKKALVAYAGIDAPPNDSGDVIGRHKSMSKVGASSLRRTLFLIMSAYLQNSPPNEPVYQFMDRKRAEGKPYRVYMMASANKFLRIYYATVKAYLEILEQI

SEQ ID NO: 431080 - protein, 438 aa, unidentified
MSNKVIFNLDDLFISVGIDVGADFSWMSIALPNQQFVGKPYKILHNSIDSLTTAVSKIKEAEELYSLESRIFLESTGIYHYPLFCYLRDKGFNCSVINPIITKNSTNINIRKVHNDRFDSKKAALVGLKPDLKVSLMPSDLALNCRNLCREYYDLMDNRSAYVNKLQGELRMAFPQYLGIFSKVTINTSLTLLETYTSPSAFLEADKQEIIDIIKSTARFGLTYAQNKYNAIIQAATDANQFGYIIDSNIKRIRLYISFIRKYDEEINSILESLHELVDANEDSDFVKQIHLIETFKGAGFLSAVSIMGEIGDFSAFSKPKQLFAYFGLDPAVKQSGKFEGTKVQMSKRGSAIARRVIHTLTLQSISISRNREAKNPVLREYYLKKCDSKPKLVAMGAVSHKVCNMIFAILRDNKSFEIITPQEHIKQYNASKCDMAA

SEQ ID NO: 431081 - protein, 311 aa, unidentified
MKMAQTDSIIALDVSKDRLDCLDADTGEVFQVENSVSGRATLVRRCRGRTVQLVLEASGGYERPVIHDLCGAGLSVRLVDPRKVRLFARASGRWAKNDRLDAEMIAAYARVIPGSDRQVDPAQERLAELATYRRQLLAEQTMVTNQAETLRDPELRRLTARRLASLKAQLARLDKRIAEHIGASPPLADRAHLLQSIPGVGPVLCTAFLAFLPELGKLTRHQVAALAGVAPMDNDSGRRKGARSIYGGRPALRAVLYMAALAATRCNPALAVFYKRLRDAGKKPKVAIVAVMRKLVIMANALIRDQRVYAA

SEQ ID NO: 431082 - protein, 387 aa, unidentified
MPQLSDLSRSPVALEQDATLIAVIEMGQSSWLVAGIVPGIERQPLKKLAPDQDTLLQLLYRWRKEAIQAGRTIKRIAVAYEAGRDGFWLARWLHTHGIEAHVIHPSSVPVSREHRRAKTDRLDAELLKRAFLGWLRGEPKHCSMAAIPSIEDEDARRPSRERQSLVKECTRIVNRVKASLARLGIRGFRLAFAQASKQLQTLRTPEGSAIPANTLAEMRRDIARLLFVKQQIKEVERMRVKRLEQTHGERRTAMVRLLARVVGIGVESADLLVQEVFSRELRDRKAVARYAGLTGSPDESGRKRRELGLAKAGNARVRRSMIELAWGHLLHQKDSPLAQWYRKRTADARGGTRKTMIVALARKLLITLWRMVTTGEAPTGLLLRPTP

SEQ ID NO: 431083 - protein, 355 aa, unidentified
MSQEKYIGMDVHQATISVAVMDGNGKLVMECLLETKAETILEFVQGLRGTLSLTFEEGTSAAWLHDLLKPHVSRLVVCDPRKNALLKEGNKSDRIDARKLAELLRTNQLKAVYHGEHGIRTLKELGRSYLTLSKDVTRTMNRIKSLYRSWAIPCAGTSVYAPRHRAEWLAKIVEPGVRIRAERLYQQLDGLQSIRQQARRELLQESHQHPAVELLRQIPSIGPIRSALLVALLQTPHRFRSKRQLWAYSGFAVETHDSGEYRYVRGKVQRNRERITVRGLNDNHNRDLKNLFKGAAISASTRPGPLHDFYVARVAKGMRPTMARLTLARKVAAITLTMWKKGVSFDPQQLSRQSV

SEQ ID NO: 431084 - protein, 356 aa, unidentified
MAPIYIGVDFHARQQTCCYLKTETGELVIAELKHQDKEQVHAFYQQFQEPVIVGLEASGYSPWFETMLEQLGCEVWIGHATEIRRRARWRQKNDRRDAELIWDLMVHDEFPCLHRPAVASREVLRMLRYRQKLIKLRTMTKNSLQAIALQAGLAKGPQLFSAAGQEQFKAVAMSAVLQWQRDHWFELLKPFNQQLLETMVWCKAQGKDDVQIQRLRTHPGIGLLTALCILHTLQPVSRFRNARKVAAYAGFDPVERSSAERQHFLGISKAGSRMLRYLVVEAVQTAVRHDEDLKRFYKRLADRRGRPKAKVAAARKLLIRAYIMLRDEIDYAEFRRRAVAARLARRSQGPTNVPGY

SEQ ID NO: 431085 - protein, 428 aa, unidentified
MNKHSFSKLAAITPHTLIAGVDIAKNIHWARFTDYRGIPLGKALKVLNNKEGFENILTTINGVCKQHDLSKVILGLEPTGHYWKPLAHYLTRQGIKVVLINPYHTKKAKELDDNSPTKNDKKDALTIARLLRDGRYSQLYLPQDVYGELRVLANTRVSLMKRNNALKNTIKAVLDEYFPELVTVFKYPLKGKACRQILKSFPFPSLILELGRDKVLTEIKKAVKKTIGQKRVEKLLRTAKDSIGVTYGMQSARLKLTLLIQELELMEKQLDQLEQAMEQVLTLTGYKEIILSIPGIGIITAASFLGNTGDPLRFTHPRQISKLAGYNLIEDSSGENKSKTTISKRGRKQLRNVLYQMARTTVAVNSEMKELYHYLKTRPRNPLKKKQALVVISKKIITIIHSLLKKQSRYQKELVFNQFRLNQMKQVA

SEQ ID NO: 431086 - protein, 410 aa, unidentified
MQRMFRVCAGIDVHKKMLTVCRLRVEWGAEVAKEIRTFGTTTRELLALLDWLVAEGCESVALESTGVYWKPVFNLLEAAVPVVLVNAQHIKALPGRKTDVQDCEWIAELHLHGLVRASFIPPREIRELRDLVRTRTKLIAERAQHANRIQKVLEDANLKLSSVASDVVGVSGRAMLERIIAGATDPQALAELARGRLRPKRPQLREALTGRVRAHHRLLLRTHLTLMDQLDAAIATLTTEIEERLRPFAELRERLDAITGVGPEVATVFISELGTDMSAWPTPGHAASWAGLCPGHHESAGKHKRGRTRKGNRWLRKAFVQAGLCTQRANGTYMQAHYRRIRARRGPKKAAVAAAHSLFVRCFMLAATGEEYRELGGNYFDERRKQAVTQRLVRRLEDLGYAVALTTNAA

SEQ ID NO: 431087 - protein, 370 aa, unidentified
MQFIGVDLHTNRFTCCYRDEGKGKKETATFELSAYGMQQFYSSLKPQAHVLVEATIPTFCFVRLIEPYVKEVIVANTYELKQISLARKNTDKIDADILCRIIKMQVLSGEQAVSPVTVPPEDIQELRGLFTTYRLYKKETTQIKNRIHSLLKEKHYGFTQEQIFSQKSRKMIRELESGEGSKGSIMHRQINLLLNSLEKLESDIDFLQEMILEHAEPHMREIQILTSMKGVSVFIAIAIIADIIKVDRFKNSKAFTSYLRSAPRVSNSNTSVKNGGTNKKGRKLSATLITQSLNHVLEASQKLSRWYADLAQYKKAGLVRTGLRRRVFAEIFQMLKKGEYHYGREKEKHETKIRDYKRFLEKRKNLLKIA

SEQ ID NO: 431088 - protein, 410 aa, unidentified
MEVVYERCCGLDVHKQSVVACRVAPGPDGAPRKQVRTFGTMTADLLELSDWLTEAAVTHVAMESTGVYWKPIWNLLEGSFELVLANARHIKAVPGRKTDVRDCEWIADLLRHGLLSGSFVPDRAQRELRELTRYRTSLVRERTAEANRLQKTLEGANIKLAAVATDILGVSVRAMLAALMEGTADAATMADLARGRLREKIPQLEQALAGRFGPHQRFMVAQQLAHLDFLDAAISRVSTEVAERVREDEPAIAHLDTIPGVGRYVAEALVAEIGTDMTRFPSADHLASWAGMCPGNNESAGKRRSGKTRKGSPWLRSLLIQAAHAAARKRDTYLSALYRRLAARRGKSRAAVAVGHAILVIAYHLLQRGTDYKDLGPLYFEQRDRDAEQRRLVHRLERLGFKVALEPTAA

SEQ ID NO: 431089 - protein, 341 aa, unidentified
MKNKSFIGIDISKNVIDVSIFCEETPIKDFSHDVFNNSRKGFGEMCTWLKKNHVVLSNCLFGMEFTGSYSMELEKFLNARNYQFCMLSTHVVKHYPMGPKDKSDKIDSAKIADFLYRYNGTECVKPYNMPDKTMQRLKALMNERKFLVEQRTCFMNRRQLCITKEDAQLYDGYIKKISRDIENIELEEQKLLATDDSLLSTYKNLLTIPGIGFVNAINVIVITRNFTAFETARQYASYVGVAPHFRTSGTSVKWRPRPSARCDGQAKADLSMAATVAVQYDAELQSFYNRKLGGKQDSDTKRKALNAVKFKLVLRMFATGKQNRKWEPLDSKSSNEKLAIS

SEQ ID NO: 431090 - protein, 366 aa, unidentified
MKKSLIYVGLDVHKDSIVVAMATGRQLAVVVREIPNDWCQFLKVLDGLGATERLRVCYEAGPTGFDLARRLNAASVCCIVVAPSLIPVRPGQRIKTDRRDARQLADLHRAGQLVEVNIPEVETEAMRDVERARDDAKNAERAVRHQLDKFLLRHGRSWSRTKWTRLHWAWIERQEFSTEAFRRVLADYVRAVQEATARIERLEKDIEELVETWALAPLVKSLQALRGVRLITAVILTAEIGDYARFGTPRELMAYLGLVPSEDSSGQRRRQGRITRTGNGHVRRILTEASWNYRFRPRPSRAIRKRRESVPPKIVAIAEKAEQRLSRRFQHLTQRGKSSQKVVTAVARELAGFVWAIAQEVTSKAA

SEQ ID NO: 431091 - protein, 328 aa, unidentified
MRTLGIDVSKNKIDLCLLTAGPGGKKKHKVLTNEPAVARKVVDWLNAQKCVPESVTVVLEATGIYHENLAYGLHEAGVSVCMANPCRVREFAHGMDILNKNDAVDAFVLACYGELKSPAVWVPPSPEVRKLRALLRQRDAPREDVQRTVNRLEKANSTSTPQEVIRSLERTKSWLNEELARIEKLITDHTDNDPGLKADLDLLKSIKGVKEQVGREMLALLKDGTFKSASQVAAYLGLTPVEKTSGSSVRGRPHMSKTGPSGVRVKLYVAALTASRWNKQAKAIYERLVAKGKAKKAALGAVMSKLVHLCFGVLKTRLPWDENYVATA

SEQ ID NO: 431092 - protein, 355 aa, unidentified
MTSTQYIGMDVHKESISIAVRNAAGKIVMECVIETKASTILQFMDGLRGDVQVTFEEGTWAAWLYDLLKPHVTKVVVCDPRRNALLQEGNQNDRVDARKLAELLHNNQLRSVYHGNHGLRTLKELVRSYLTITQDVSRVMTRVKAVYRSWAFPCTGKQVYAPHHRAEWLAKINEPGVHRRAEFYYQQLDALRCVRQQVRRELLAESKKHPAWKRLCGIPSIGPIRAAVLLGILQTPHRFRSKRQLWTYSGVGIETSSSADHQVVKGQLERKKKPVEIRGLNRNFNHDLKNLFKGAAIVAATKPGPFAEFYAELVAKGMRPEMARLTLARKIATIVLIVWKRGVCFDAQHLKPQTA

SEQ ID NO: 431093 - protein, 416 aa, unidentified
MDAIVERCAGLDVHLDTVVACVSYGKLDIKPKKEVKTFSTTTKGLLELLDFINQKECTHVAMESTGIYWKPVWNILESGAFDLIVENAKKIKNVPGRKTDVKDAEWIASLLRCGLIEKSFVPPERIRDLRDLTRLRKELLGEVNRNKNRIHKVLQDANIKISSVLSDVFGETGKSILNQIIGNQCITEEFIYSLYEGRGKSKLKSTLMEMYEALNGKIRGHHVILLGMHNSNIVFLEKQINELEKEIDILLQKERDSLELLETIPGISKISASSIIAEIGTSMDVFKTEKHISSWAGLCPKNNESAGKKKRSGIKSWNNWLRSMLCECAWSATKKKDSRFKNKYWSMVPRMGRKKALIAIANMMLRLIYHLLKTKSTYKELEIQYFIDKDKRREDRIIKELKSKGYLVEKDSLQMA

SEQ ID NO: 431094 - protein, 340 aa, unidentified
MNLTTLGIDLAKTSFSLVGMDQHGKVVLRKTLSRAKLLPFIAQCPTCLIGMEACSGAHYWAREFTKLGHKVGIIASKFIAPFRKGGKNDNNDAEAICEAVGRANIWFVPIKTAEQQAQLCVHRVRQGLVSERTALINQLRGLLSEFGIVMPKGRYPAQREIPLILEDANNGLPMLARQMISNLWDRIKIANEQVLFYDRELHKQAHHHPVAKRLLTIPGVGEQVASAVVASVPDPSLFKDSRQFAAWFGLVPKQHTTGGNVRLGRITKQGDRYLRMCLVHGARSVLANLKDKQDKISCWARELIARRGYLRAVVAMAARNARLIWTLMVKQEDYKVIAAN

SEQ ID NO: 431095 - protein, 372 aa, unidentified
MPSVTKKRVPITPASVGDEYDYVVGVDTHAATHSYAIVVAPTGALVSEQSFPTTPAGVARACDWIARRTGGDVTGVLISAEGTGSYGAILGEELAKVGYRVVEAPTPRRERGRGKTDAMDAVTAARGTLVMPMTRLRDRRGAGGTAQDQVALQVLTTAREQLNAERVRAINALTALVRSHALGIDARRALSTTQIKEIARWRRRSEATGIATVRAEAVRLATRVVQLDTELKTNRDQITAIVETRAPELLALPGIGAITAAVILCVWSHPGRVRSEAAMAQIAGTCPIPASSGNTERHRLNRGGDRRLNWALNTIVLTRMRDDTETRVYVERRTAEGKTRREIRRCLKRYTTRQIYRSLNAAHSPGELAPAA

SEQ ID NO: 431096 - protein, 401 aa, unidentified
MQTIWAGIDSGKRAHHCVVIDHAGTVLLSQRVENDEVELLELIAAVTELAVDSEVCWATDLNAGGAALLIALLTAHGQRVLYIPGRIVHHAAATYRGDGKTDAKDAKIIADQARMRTDLQPVRGADQVAVDVRLLTSHRLDVIHDRVRAINRLRATLLEYFPALERAFDYSKNKAALTLLSRYTTPDNLRGVGVTRLATWLKSRGCRNSAKVAQAAVDAAHAQHTALATEVVGSALVTKLAARITAIDEELAEIDAKIAEHYGQHEDAEILLSLPGFGPVLAATFLAQIGGNLDNFDTVDRLACVAGLAPVPRDSGRINGNLHRPRRFNRRLLRTCYLAALSSLKNSPASRTFYDRKRAEGKSHKQALIALARRRINVTWAMLRDHTPYVEPATDSILLAA

SEQ ID NO: 431097 - protein, 356 aa, unidentified
MIKDSIVFVGLDLGDRWSQLQVLDQEGEVVEESRLPTRESALRRKFTTTGRWRVAMEVGTHSPWVSRLVKELGHEVIVADARKLRLIYRNPRKNDRIDAEYLARLARLDPQLLSPVHHRSPETQADLALIRSRDALVRVRTMLINHMRGMAKSFGKRLPACSADSFHHKVREAMPQPLQPALEPLLDTLGEMTERIRAYDRQIEDLCQSRYPETKALRQVGGVGALTSLAYILSLEDPARFRKSREVGPFLGMVPRQNQSGGADPQLRITKTGDVYLRRLLVGSAQYILGPFGPDCDLRRWGLSLAERGGLNAKKRAVVGVARKLAVLLHRLWVTGEDYQPLRQITPAAQPALTVN

SEQ ID NO: 431098 - protein, 404 aa, unidentified
MKGPIVSIDVSKGKSDYQAFKDLNVKYTGSRSIKHNKEGFDEIVNLVREMEKKLETEVCVVYEATGVYHRVLKKVLEDNNIKQFIINPLLSAKTRKNDSLRSPKTDKLDPKSIAKTYYSHSLHNSHKQETIYHELRELSRYYEDILVHIRKDKVAFRAQLDIVFPGYDTLYDDLYGPVALAIIEKYPHPEILQKKKINTVSKVIQNKTCHRQAVSDTMADKAIEYSKTIYSGCDKDDIEVLILQRFIKKLNEDMAEAERTIGEMIKLAQELPDFNIIKSIPGIGDNLAARIIAELGDMTRFKKKNELVAFAGLDPRISESGQNDGDHMHITKKGNKRLRCLLYLAVTCSIRLKRDDNSIKDFYIKKKQQSNPMCSKAAKTACASKLVRIIYSMCKTGELYQYNK

SEQ ID NO: 431099 - protein, 353 aa, unidentified
MMNITTVGVDLAKEVITVCSMDTHGHVLKTRDLRAAEFSTWLVQLPAATVLGMEACSSAHHWARKMQSLGLIPKLMAAEFVQPFRKSRSSKNDHNDAEAIAIAVKQPQMRFVAIKTEAQQARLAWHRCREGWKEERTALINRTRGLLLEFGHPLARSSKAFTVGLQAALHHDALPAQFRTLLTQVQQQLQQLDQQLAQCDRSIALSAKQDESSQRLQAQPWIGPISADAFTATVGNARDFKNGRQFAAWLGLTPRQYSSGGKTKLGRISRRGDAYLRTLLVQGAKSTLQSVLKKAPDLLSHMQQWILRLYGRVGYHKTLVAIANKHARQVWAMLAKAEAYDQEAWKRMGMANT

SEQ ID NO: 431100 - protein, 518 aa, unidentified
MAKSKRQHIQKVKGRRFTDEIRNLNLEKVLVIPIECGKNSHKALVANYFGDILYDSFEFANSNTGVKMLDSIIQDISSSVNAQKIVVGIESTGHYYENLYRNLITLSYDVAIVNPSSVYSQRTGQLNWCKTDEIDLCAIGQVLIDNQATETKLSDGLYYNLKHLARLRRDEVNKRARLKIQIKVLCDHIFPGLQKAKVFSDFWGKASVLLLENYPTPASIISLGVNRLARFFKKHNTKLGLTTAQRLVNLAKNSLTTDASNIYAHLFNLKFKIQDLKMADEKIRKLNIELASCLIKTPGLLLLSIRKINVPSAAEFIAEVGPLSQAGNAKKIISRAGLNPSRFQTAEYERTDNPITKHGSNHLRNISLTIAHNLVGDDPHLVNQPANPYFRNFFDHLVIEEGKDKRVAKVACANKFIRVACAMMIQKMLFCPPTWKQDLVADDPLIKLSKFLQDNDAKDMFDDIVHIAKEQLPDDYGSYVKQKESDIDSLVSSLTNDTERDPDNFLGPMPLEFVEVKG

SEQ ID NO: 431101 - protein, 351 aa, unidentified
MKTQQTATAKLFIGIDIHKRSWKVHCSTDLSSGKTFSMPPDPEQLYAYVQKHYLGYKVTTAYEAGCCGYYAHRCFKEYGWDSLVVNPADIFRRGKERHTKTDRIDAQLIARELKDGRLVGISVPDKQREQLRSLFRRRNDLVKDMRQIKSYIKMQLLYYGIQIPDAFDNDHWSHKFREWLDDLLFEYESGNEVLRSRMRSFRFIDKEFRAVSTLLRKYTKQYCKKDYMLLRSIPGIGPIVASGILSELGDLRRFNNIKHLAGYVGLCPGIYQSGDTIRHTGVSMRAHRLLRSYFIEASWQAIRTDPVMQGYYRKHQGKNIKKVIVKIARKLLSRTLAVIKTETPYEIGVVG

SEQ ID NO: 431102 - protein, 410 aa, unidentified
MDVIVERPGALDVHNASVVACVRLPAEKGRRDEQVAEFSTTTRGLLALHDWLWAHGVRQVAMEATGSYWKPIWAVLEDDFECLLVNARHVKQVPGRKTDLKDAQWLCQLLEAGLLKASLVPPKPIRTLRNLTRYRKSQIRDRQREANRLHKVMQETGIKLDCVASDLLGKSGRAMLDALVAGTTDPEVLADLARGQLRKKLPALREALNGRFSPEHSLVVGRILAHIDFLDESIVQLSEAIEQQIAPLAPAVELLCTIPGVGRRAAEVIIAETGGDMSAFPTAKHLTSWAGVCPGNDQSAGKRRSGRTTKGSKWLRGTLIEAAKAAARTKDTYLQAQYARLRVRRGASRASVAVAHSILTACWHMLQTGELYNDLGGDYFARRDPARTTKRLVAQLERLGHIVTLEQAAA

SEQ ID NO: 431103 - protein, 413 aa, unidentified
MDVLHSRCCGLDVHKSSISACILLREAGRVQKHQRRFGAMTQDLHELAEWLQQFGVTQVAMESSGVYWKPVWNILEGQFTIVLANAQHIKNVPGRKTDQKDAEWIAQLLQFGLLRPSYVPCEIIRDLRDLTRMRASLSQEASRISSRIQKVLEDANVKLASVATNTLGKSGRAMLEDIIVGEDDPEHLASLALGHLREKIPQLRLALEGKIRSHHRFLLRRLLDQLQFVEHEIALLDERLEEIGQQRPELAQAVARWDTIPGIDRVAGWALLAEVGDKMAQFPTAEQLASWAALCPGNHESAGKRLRGATRQGSPWLRRMACQCAWAAARTKNTYLSSQFRRLAARRGKKRAIIAVAHTLIVIGYHLHKNQRNYDDLGGDYFDRIHSDGLKRYLVKRLQQLGHKVTLEPIEAV

SEQ ID NO: 431104 - protein, 455 aa, unidentified
MESNQASFKILHPHAAGIDVGSRSHLVAIDQNKDNVREFGVYTKDHLEMISHLHHHGVTTIAMESTGSYWQTLFSALQQAGFDVLLVGGSQTKNVKGRKTDVIDCIWIQKLHSLGLLSGSLLLSDTFQQLRTYYYHRQHLVQQSARYSSKMQKALRLMNIRLDVVLNDITGQSGTAVIEAILAGHREANYLVSLVSDRVKKSRQEIADALQGWWREELLFELQASLEFYRLYESKIKECDQVIERFLVKYAPQVEVTLDEKKQLKTHRKRAGKHAPGFNLSQLAYQYFRTDLFAVSGISYNTVLCLLTSLGHDIHKFPNAKSFACWLGLVPNNKVSGGKVISNRRPSGRSTIAKALRHAANSIGNQKDHELTPFFKRIAFKKGRIAAIIATARKLAVIIWNMISKGEAYQKERVELNQEKQRSLKLKHLDKKLHALQLTQEELKKLFVKHSLSLR

SEQ ID NO: 431105 - protein, 322 aa, unidentified
MPAAGEYLGIDVAKAELVVARAGQGDTTTYPNSAAGHQALLRDVTTPAPPALLVVEATGGYERGVVAALGSAGLPVVVVNPRQVRDFAKATGQLAKTDAIDAQVLAAFGARVQPAERALPTEAQEELRDFLARQQQVQQMLLAEKTRLQQALGRKARQPLRRRITRHIAFLERELAVLDHDLDALLRDSPLWRAQDDLLQSVTGIGRQTARILLGLLPELGRVSGREIGKLAGLAPINHDSGRRRGQRHIRGGRPRIRAVLYMATLAAIRYNPVVRAWYERLLAAHKPKKVAITACMRHLLVVLNAMLKTHTRWQASLPTTA

SEQ ID NO: 431106 - protein, 357 aa, unidentified
MSMLAGQVDIVIGVDTHRDTNTAAIIDAATTGVLAHTDCTTDALGYKRLLAFADKHGPGRWVWAIEGTGSYGAGLTTFLLERGEWVVEIDRPGRPARRNRAKNDELDAVRAAREALSREHLAAPRARGDREAMRVLLSARQGAVVARTRAIAQLKALIVNAPEALREQLRRGTTDQQLDRCARLRTLPSHSVEHRATVRAIRAVARRALMLEAEAAEHETELEQLVTAACPGLLELPGVGTITAAQFLVSWSHSRRLRNEAAFAALAGVAPIPASSGQTVRHRLNRCGDRQLNRALHTVALSRLQHHAPTKAYASRRTTEGKTPREVKRCLKRAIAREIYRLLEAHAQAEKKINQAA

SEQ ID NO: 431107 - protein, 415 aa, unidentified
MKANIRTHYAALIGLDWADKKHDVCLMLPNTGKFEYSQFTHTPEAIEDWALALHKRFPRQPISICLELKSGPIVYALLKYPWFDLYPVEPATLAKYREAFTHSGAKDDPSDAFLMVDFTRRHNDKLRIITADDEETRILLRQVEQRRLLISEKVRLTNRITRALKDYYPQPLGWFNDIDTVMFCDFIKRWPNQSKVCRAHKSTLVKFFHEHHVRSQSRIDKRLEGIRASMPLTEDNAVIEPSQHYVLCLIEMLKRILNTISEYNQQIAERFEAHPDYEVFHSFPGAGAVYGPRLLTAMGSRRDRFESSDELVRQIGVAPVVKRSGQSTWIHWRYNCPKFVRQTFVEWANQSIHYSYWARLYYEKQQAKGKAHQTILRGLAFKWARIIFRCWKNHEPYNEARYLLALKEKGSPLVT

SEQ ID NO: 431108 - protein, 391 aa, unidentified
MFLLGIDIAKLNHVASCIDFSTNEVVFSNFKFKNDFKGFSALLNKIKSFDAKNLIIGLESTSHYGENLINFLFIHNFKVALINPLQTSHLRKANIRDAKNDNIDSLNIAKSLIFTNLNFVSKKNIECFSLKKLTRFRSNLIKQRSKAKIQLTSLLDLLFPELQYLFKSKIHSKAIYSLLKKYPSAEEIAALKDDEISNLLYASSKGHFKKEKSIELKSLAKTTVGIKDTSISLHLIQLIELIELYTKQIKDIEIKITDIVKNLDTTLLSVPGISVIACAIILGETNNFENFSSSKKLLAFAGLDPKIRQSGNFNASSCRMSKKGSPYLRYALIFTAWNIVRHSEKFNKYYSLKRSQGKSHYNALGHVAHKLVRILFTLIKKNISYQEEKLE

SEQ ID NO: 431109 - protein, 339 aa, unidentified
MRLYAAFDLHSSNSYLGISDEKGKRIFKKKLPNDPTTIKETLKPFKAEIEGIVVESTYNWYFLVDLLREEGYRVHLANVMKTQQYSGLKYSDDKNDAFWLVEMLRLGILPEGYIYPKEERPMRDLLRKRGHLVRLRTSLIVSLQNIIARNLGGRLKANDVKILTTDRVSPLFQGNEDLALAGKVSKEAIDFMTRQIKAIEATIGGRIHLSNPYDRLLSMPGVGKILAFTIQLETGSIDRFQKVGNYVSYCRKVPSGRFSNDKKKGTGNRKNGNKYLAWAFSEASDHARLFDAESRKYYQRKLQKTNAPIAHNALAHKLSRAAYYIMRDGVIFMPDKAFS

SEQ ID NO: 431110 - protein, 340 aa, unidentified
MQKSVKFYLGMDVSKLWIDIVVMCVEDHQKQPAISGHFDNDATGIKVLHKWLKKHNVSFDENSLLVIENTGVYHRLIWEYCSSHGLPLYIGNATHIKYSFGLARGKNDKIDSERLCAYAFKNADEIKVTPVLNPVFLKLKDMMTSRSRLLEQKNSIKVYLGEMKLSNSKEMQMIIENAHKAALEGLEASINFVEKQIKQIIKENAEIENNYKLLITVPGIGHLTAVYIICCTNNFICKISGKQLSSYAGVAPFGNTSGTSIKGRHKVHKMANKELKKLLHMGAVSAITHYPEFKDYYERKVKEGKHQLSAINAVRSKIALRAVAVINNQAPYVDKYKKAA

SEQ ID NO: 431111 - protein, 390 aa, unidentified
MRQPKDDLSRSLVAFDQNTTIVAAVELSSRTWLVGGVVPRIVRNPLKKLMPDEQALLKLLYRWRDEAKKAGQKIKRIVVAFEAGRDGFWLARWLRARDIEAYVIHPTSIPVSREQKRAKTDRLDIGLLIRSLLGWLRGEKKHCSMAAIPTLEAEDAKRPQREREQLVGKRTGIVNRMKASLVRLGIRGFNPKLRKAPPQLAALRTPEGGPIPANTLAELQREMAHLRFINEQIRQIKNARLKELKEAPHRASNGVVSQLERINGLGIDTSDMLANEVFSRDYRDQRAIGRYVGLTGSPDESGKRRRQKGLAKAGNARARRGMIQLAWRFLDHQKNSALAKWYRARATEGKKRKTLIVALARKLLIALWRFVTTGEVPPGVILRPASRLAK

SEQ ID NO: 431112 - protein, 345 aa, unidentified
MDITTVGIDLAKNVFQVHAVDARGKVVLRKQLRRSQVAEFFVNLPPCLIGMEACASSHHWGRTLERFGHTVRLMAPQFVKPYVKTNKNDAADAEAICEAVGRPNMRFVPIKSIEQQAILSVHRVRQGFVKARTAQANQIRSLLGEFGLIIPQGIRHVAQRVPALLEDASNELPLAFRQMIERLTEHLKVLDEQVRDFERQIVEWHRGSEVSRELEKIPGIGPLAATALLASIADARSFDSGRQVSAWLGLVPRQNSSGGKSTLLGISKRGNVYLRTLLIHGARSAIVAAKRQSECKNPWLKNLLNRRHANIAAVALANKNVRTVWALLAHGRTFQADYVPIRIAA

SEQ ID NO: 431113 - protein, 447 aa, unidentified
MPLQEVAAYMKVLHERVAGIDVHKDMIKVAIRSPGARPWTRKTEILTFRTFYGVLQEMARELRRRGVTHVVTEASGVYTEPVYYALCEQDFTEVMVINPAHARALKGHKTDAKDCARLAELLECGLLQGSYIPPAELKEVRDLTRYRIKTVQARTSEIQRLGKALESAGIKLGSVASDITGQGPTAMIEALIDGERRGPVMADLARGRARTAAKMADLSMALEGRFTDHHALMCRLHLDRIKIHEAAVTDLDTRIKDKAAPWQREMDLLKTIPGFGDVAAWTWIAEIGPDPHRWFAASGKLASWVSLAPGNYISAGKRKHSRTGDAGAYIKPVLVQAAWAAVKGRGRLRDRYNRLVRRFGGPKNPGAKKKAIVAIAHTLLKIAYAVLRSGTPYQDLGAGFYTRRESPAQRQAWLEHQLQELHPGCTVTVTIAPPPGHAPEAALPPGP

SEQ ID NO: 431114 - protein, 403 aa, unidentified
MNMNAVGIDVSKGKSMVAILRPFGEIVSTPFEVKHTVSGIRSLIGHIKAIDGESRIVMEHTGRYYEPLVRELSQADLFVSAVNPKLIKDFGDNSLRKVKSDKADAVKIARYTLDSWTELRQYSLMDEIRNQLKTMNRQFDFYMKHKTAMKNNLIGVLDQTYPGANTYFDSPAREDGSQKWVDFATTYWHVDCVRKLSLNAFINHYQKWCKRRKYNFSQSKAVEIYEASKEIVSVLPKDDLTKLIIKQAVEQLNMASQTVEQLRTMMNDAASKLPEYPVVMAMKGVGKSLGPQLMAEIGDVSRFTHKGAITAFAGVDPGVNESGSYEQKSVPASKRGSGTLRKTLFQVMDALIKTKPQDDPVYLFMDKKRSQGKPYYVYMTAGANKFLRIYYGRVKEYLSSLPK

SEQ ID NO: 431115 - protein, 349 aa, unidentified
MLTIGIDPHKQTHSGVAVDPLGVQIAQRTVAARRDGFGQLLEWGRKLDSARVWVLEDVRHVSGGLERFLIDRGETVVRLPPRLMADARQAVRERGKSDPIDALAIARAALREGVETLPTARLAGAELEIRLLALHRERLVDTRTRLINELRWQLHDLWPEWEIPKRVLIHPGWQTKIARRLSRAAATSVQVRIARDMIARVRELTRTITELYEQLAGLVKQVAPQLLAEKGLGVLIAAKLIGEIAGVDRFTSDAQLARISGCAPIPVSSGRTDRHRLDPGGNRQLNHAFHMLALTKILHDPRTAVYLAKQRRNGKSTREAIRSLKRHLVRRVYHLLSDPNSVPITICLT

SEQ ID NO: 431116 - protein, 368 aa, unidentified
MEQISDEVFYERCAGIDVHSRLLVVCLRIGRKSETREFGTLTHEIREMVAWLKENGCQMAAMESTGSYWKPIYNIFEQEGLSAMVCNAYHIKNVPGRKTDVGDAQWIARCLSQGLLNPSFIPDREQRELRDMTRFRKSQIEDRARNLNRLQKFLEGANVKLSEWVSDIDGKSATKLLELIIGKPDFSIDDVAANMHGGLKSTPEQLFHALEGSMTHSQREFLTHVMNVIKEQTAQIEKTDAMIGRSLSDNYKAAIKALDKIPGIGRVSAEQIVAESGTDMSRFRNQHAFSKWMGVCPGNNESAGKRKSGKTPPGNATLKSTLTQCAKTAKKIKRASSVRNTAGWFLIAGKIGLLWRLPIPLQSRFILC

SEQ ID NO: 431117 - protein, 382 aa, unidentified
MEHGVTPTVALSDIQERTIHIALELSKSRWLMGIHSPIADKVSRHSVAGGDADALLRRIGGVRETLERRLGASARIVCCYEAGHDGFWLHRLLLNHGVESHVMDPASLPVDRRARRAKTDRLDLAALLRTLMAWDRGERQVCRMVRPPSPEQEDRRRRSRERERLVKERVQHIARIKGLLMTQGIRTFDPARADWAERLEAMRTGDGRDLPPALKAEIARECRRLWQAIEMIRAVEREQAAERSQDADAREARLIQLAGIGPISARVLVDEVFHRDFANRREVAGYVGLTPSPWRSGGLQRDQGISRAGNPRARRTAVELAWLWLRHQPDSQLSRWFCDRVGATRGRFKRIMIVALARKLVVALWRYLATGAPPEGARIATA

SEQ ID NO: 431118 - protein, 431 aa, unidentified
MEKIHGNAAGIDIGSMKVFAGTEDGAVQSFGTFTSDFKILAKYLKEKEVNTVAMEATGVYWVILYDILSEEGFDVWLVDGRQTKQVPGRKTDVKDCSWIQQLHSYGLLSRCFVAEGSLKELRSYQRLREDHIRSSAMHINHMQKALIEMNIRLPEVLSQIQGKTGIALIEAILSGERDKATLLSLCYSSVRKKKKEELIKALEGYYTEAGLFALRQAYHAYHFYRKQIQECDVKIQEVLQAINKEKEIGKGEVPRKPIRHHKPNVENLGGHLLKIFGDKDASLLSGITDYTWLQVYSETGDDLSRWPSEKHFTSWLCLSPGQNNSGKKKRRARKGRPQAGQIFRKIAQSLLQSKHIALGAFGRRIRSKKGSPIAIKAIARKLAVLYWRLMVKGSTYVERGIVHYEEQLKNQKKKLLNKLALELDIQLVPQT

SEQ ID NO: 431119 - protein, 350 aa, unidentified
MMIIGCDYHPAFQQIAFLDTDTGELQERRLQHPEEAEQFYRDLSAQGVKVRVGMEASGQARWFERLLAELNIELWIGDATEIARKRERKQKTDRQDAQHILRLLLKDDFPRIWVASWENRDLRQLLWHRHRMVQARTRIMNQLQAVALNEGLRCKKRLWRESGREQLESFRLAPWASRRRHDLLELLDRLSPTITELTQTIEQEAEKCLEARRLMTHPGVGPLTALAFVLIIGRAERFQCGKQIASYLGLVPLEESSGNRRRLGHITKQGNALLRFLLVEAAQVSARSIPEWRNKYFHLAMRRGRKIAKVAMARRLAVQLFWMWRKGWDYEQVRKFGSHAGQPGHRDGGQ

SEQ ID NO: 431120 - protein, 340 aa, unidentified
MRQVATIGLDIAKSVFQVHGVDAEGGVVIRQKLTRARLLKFFEKLSPCLVGIEACGTAHHWARELIGLGHEVRLMPPSYVKPYVKRQKNDMADAEAICEAVTRPTMRFVPVKSPAQQSVMVLHRTRSILIRQRTQISNAIRSHMAEFGMAAAIGRQGLQSLIEVVEDPADERVPLEARGCLAMLAAQLRLLNEQVLETDRLIRSNARSTEVGRRLMEIPGVGPLLASALVGTIADPRAFKTGRNLAAWIGLVPKQNSSGGKERLGGITKQGDRYLRQMLVVGALAVVRYAVRNGTRRPWLVQLLARRTPKVAAVALANKTARMVWAIMTSGERYREPLAA

SEQ ID NO: 431121 - protein, 342 aa, unidentified
MNNVTIIGIDLAKHVFHAHGAHIDGSVAFRKRLTRAQMLPFLSAQPRCMVVMEACASAHEWGRAIQQLGHDVRLIPPSYVKPYVKRQKNDTADAEAIAEAGSRPTMRFVAVKTEEQQARSMVFRTRDLLVRQRTQLINALRGHLAEHGLVAPQGPAHLKTLAKALDATDVAMPQLVRDIGRTYLEQIEHPNSKIADLEKTLRREAQFGEETRRLQTMPGIGPITAMAVEAFAPPMQTFKRGRDFAAWLGLVPVQHSTGGKQRLGRTSKMGQRDIRRLLIIGAMAVIRWASRRGARPGSWLSRMMERKPLMLVAVALANKMARAIWAMQTKKEDYRDPDLAAA

SEQ ID NO: 431122 - protein, 343 aa, unidentified
MQVVRIGLDLAKYVFAVHGVDARGKVVLRKTLRRDSVSCFFANLPPCLVGMEASNGAHYWARVLTDLGHQVRLMSPQFVTPYVKSNKNDRNDAEAICEAVGRPSMRFVPPKSAEQLAVQAIHRIRRRLVSDRVKLVNQVRGLLAEHGIVIPRDITQFRRGLAQIIASCAGGLSELVRSLMRELQEELVELDRRIASYDRRIREIFRNSEPCQRLGKIEGIGPITATALIAAVGDRTCFKNGRQFAAWLGLVPKQRSSGGRARLFGISKRGDRYIRTLMIHGARAVLGRARGKQDPRSLWLGKLRQRRHPNVAAVALANKNARIVWAMLSGDTAYEPALSVKAA

SEQ ID NO: 431123 - protein, 442 aa, unidentified
MKNESKNEFSLVHPNAAGIDIASGIHYVSVPSDRDSNPVRKFESFTENLHEMANWLKKCKIETVAMESTGIYWVQPYLILEDYEFDVYLVNARHIKNVTGRKSDVLDCQWIQQLHSFGLLNKSFQPENKIRELRTYIRHRKSLTQSYATQVNLIHKAFEQMNIKLNMVLSDICGKSGQLIIKAILTGERNSEVLAELADKQVKATKEEIIKALTGNWRGEHLFELKQAYETYLFIKDKISECDVQIEKVLSNLKPEDSDELEDGKANRGVYSKNRLNFNGTIYLRSVIGTDVTKIFGISELLALEIISETGTDMTKWPTKKHFASWLNLAPNNRISGGKLLKPKRVKKKNKAGQAFLLAAYALQRSNHWLGSFFRRIKSKHGPAIATKATARKLALIFYEMVKYHKDFVPINNEEYNSAYTQYRIKLLKNQASKLGLVFSEV

SEQ ID NO: 431124 - protein, 418 aa, unidentified
MTKRKDSTLIQIVHPICCGLDVHKDKISACLITVDDTGAEQHELREFTTFTHDLQKMKKWLIENKCPIIAMESTGVYWHPVYNTVEDTLHVTLVNARHIKNVPGRKTDIADSKWLAGLLRHGLLKGSFIPPEKVREWRELSRLRKTYTESLADYKRRVHKLFITANIKIDSVVSDLFGMTGLNLINLLCNNSELTVKKVQGCTKGSLKKRVPELYNSLHGYFKDHHRFQLVGMMETINMFQKRIEQINVRLESLTREHKGLLERLDEIPGIDKKSAQSILGEVGITLDDFRSMSAFVSWAGLCPGNNESAGKRKSGRNAVRNHPFKTILVQVAWAAIKKKDSYYKAKYYKLKARRGAKKAIVAIAHRIAKAIYNIIKNGDSYKDLGEDYLSKPTKQRVLKNLMRKANELGMKLVPCEN

SEQ ID NO: 431125 - protein, 348 aa, unidentified
MLIIGCDYHPGFEQIAFVDTETGECGERRLTHREEAEQFYGMLKGRSVRVGMEASGHARWFEGLLSDLQFELWIGDAAEIRTKRVRKQKTDRQDAQLLLRLMMEDRFPRIWVADAENRDLRQLLWHRHRLVQMRTRVMNQLHVVALNEGLRRKKALWRPAGRNQLESLILAPWASRRRRDLLDLLDQLSPKIQELTRALEDEVEKRPVTRRLMTHPGVGPLTALAFELVIGSPERFHCGKQIASYVGLVPSEESSGDRRRLGHISKQGNSLLRYLLVEAAQVTVRSHQHWRSKFFHLAMRRGRKIAKVAMARKLAVHLYWMWRQGWDYGQFEKLGSYAGEPGNRQGVQ

SEQ ID NO: 431126 - protein, 341 aa, unidentified
MAMFAGLDVGGKRTAVCILDDAGRIVWRGMADTHPEMIEAVLRRFKSGLTKVGLESGPFTPHLFRSLAAMGYPMICMDARRAADAIKSRRIKSDKGDAWALAEMLRTGWFTSVHVKSVDTHRLKALLGARDQLVKVKRSLGNQVRGLLRPFGLRLPSRAGMKKFAEAAYQATRDDPVLGASIKALLEALASIEAQLSRLDDALKELSRRNEVAWRLMSVPGVGPITALAFIAAIENVERFKRTRDIGAYLGLTEKRYQSADTDVGMGISKQGDAMARHYLYEAANVLLTTVKRRFALRSWGLKLVKTIGPKRARVAVARKLAVLMGRMWKDGAHFEAAVAA

SEQ ID NO: 431127 - protein, 369 aa, unidentified
MAECIFVGLDVHKDSIDVAIAEDGRDGEVRHYGKIGGDLASLNKVIRKLQSRGAELRVVYEAGPCGYEIYRHLSKLGIDCMVVAPGMIPKRSGDRVKTDRRDAIMLARLHRAGELSPVYVPREEDEAMRDLVRGREDAKDAEKKAKQRLGAFLLRRGKRYELGKPWSRAHRRWLGDQSFAHPAQQIVFQEYVTAVEQCQAWVERLTEQIRILVPTWRLAPAVEAFQAMRGVSLIVAATMAAEVGDLSRFDTPRQLMAYLGLVPSEHSSGGSVHRGSITKTGNGHARRVLVEGAWSHRFPARVSRALGDRQEGLPESVRAIAWKAQVRLCGRYRHLQSMGKPKQVVVTAIAREMAAFLWAIAREVAIPAT

SEQ ID NO: 431128 - protein, 371 aa, unidentified
MNQNMLFVGLDVHKEKIAVATAEGRRSGEVRFEGTIVNKLDAVRRLVEKYARRHGQLQFCYEAGPCGYAIYRQITKLGHDCTVVAPSLTPTRPGDRVKTDRRDAVTLARLHRAGELAAVWVPDEAHEAMRDLVRARTAAMENQRRARQQLQGFLLRHSRIFTAGCNWIKRHRRWLATVRFDHPAHQIVLQDDIDAVDDAGARLARLEAQVAELMPQWSMAPVVEAIQAMRGVGFIAAVTVAAETGDLRRFESPRQLMSYLGLVPSEHSSGSRTRRGGITKAGSKDARRVLIEGAWTYRSNARIGPVHQSRLGGLPKPVREIVWNAQVRLCSRYRRLAARGKPQTVVTTAIAREMAAFIWAIARHVQPAETV

SEQ ID NO: 431129 - protein, 322 aa, unidentified
MRYIGIDVSKATFVVAYSSDKGGEIRTFNNTTAGIRQFIGTLPKDGSIHCVMEATGNYSALLLYMLNVAGITVSMENPLKVKNFARAMLSTVKTDKIDARLIALYGEKMNPQPFKVQGEAILRLRQKRTVIRQLTKQITAMSNLRGSLACLPVPDKGATHTVDETIKFLEKKRDRLQAELTDLVEVEFSRQLALLTTIKGIGITLATALIITTGGFTYFQNAKQVSRYLGICPTYEQSGTSVNIRGHINRNGDAYTRGLLYVAAWTASRFNTKCGETYTRLRQNGKPGKLAMIAVANKLVRQAFAVVAHDKEYIDGFVSNRP

SEQ ID NO: 431130 - protein, 379 aa, unidentified
MKKHITFVGLDVHKDSIDVALADAGRDGEVRFYGTIGGDLESLFKVVRKLQSTGAELRFAYEAGPCGYTIYRALTGKGFDCIVVAPSKIPKKSGDRIKNDRRDALNLARLHRCGDLTAVYVPTAEDEAMRDLTRSREDAVKALRVARQELLAFLLRHGFRYSGKSYWSKAHLNWIAAIKMPHRGQQIALQEYVHAVQERLERVYRLTQQIRELIPQWQLAPLVSGLQALRGVSLIVAATTVAELGDLTRFDSPKQLMAYLGLVPSEHSSGGTTRRGGITKTGNGHVRRALTEAAHTYSHPARESRVLLARLDGLPQEVRAISWKAQLRLCGRFRALMARGKNKKTVITATARELAAFMWAIACALLPTAPSKPQPVPAN

SEQ ID NO: 431131 - protein, 393 aa, unidentified
MFYLGIDIAKNTHVASLMDEKGKTIFKGFSFSNTTEGGKSLLEIIKNYSEFTNVTVGMEATGHYWLSICSFLYDYNFYAIHVINPIQTDGWRKGAEIRKRKNDTIDSVLIADLIRYGDFVETTLSNEDLYSLRNICRMRNYLIQSAGDLKRKVICVLDQVFPEYQTIFSNTFGTTSKQVLLDFSSPSDFEELSVETLTETLEKLSRKKVGQSTAEKLINSAKNSFGITFSKESFTFQLKLLIEQIKFIDNQVKECETKIKELMEKINSPITTIPGIGPVLGAVIISEFGDISRFDKPSKLVAFAGIDATVSQSGEFEGTHNVMSKRGSPYLRKALFQAALVASNSDPVLKDYYQKKRAEGKHHKTCIGAVSRKMCNIIFAVLKNDKPYEVPKQ

SEQ ID NO: 431132 - protein, 339 aa, unidentified
MKDQDVSDVVRTKKRTAMRYIGIDVSKATFVVAYSSDKGGEIRTFNNTTAGIRQFIGTLPKDGSIHCVMEATGNYSALLLYMLNVAGITVSMENPLKVKNFAKAMLSTIKTDKSDARLITLYGEKMNPRPFKVQGEAILRLRQKRTVIRQLTKQITAMSNLRGSLACLPVPDKGATHTVDETIKFLEKKRDRLQSELTDLVEVEFSRQLALLTTIKGIGITLATALIITTGGFTYFQNAKQVSRYLGICPTYEQSGTSVNIKGHINRNGDAYTRGLLYIAAWPASRFNAQCKETYTRLRQNGKSGKLAMIAVVNKLVRQAFAVVAHDKEYVDGFVSNRP

SEQ ID NO: 431133 - protein, 387 aa, unidentified
MIYVGIDIAKNTHWASAMNSDGEILLEPFSFQNNNEGFQKFISKLSSFDKQKMLIGLESTAHYGENIISYLFNLDYKIGIINPIQTSNLRKSNIRKTKNDKVDTFIIIKSLTLNNYNLVTTRDINNIKLKGLSRSRHNLIVMRSRSKIQLASFIDQLFPELNKFFKGNLHLNVSYQLLKEYSSPKQISSLHLTKLSNILHDNSHGKYNKEDAIRLRELAKNSVGIDNPTLSLQIKQAILQIELYTKQIEEVEKLSKQILDEMESKLLTIPGMSYNQATAIHGFIGDISRFNKSCQLLAYAGLDPSIYQSGNFEARSTRMSKRGNSLLRYHLVYAAHNLVLHNKTFKEYYDLKRSQGKTHYCALGHCAHKLIRIIFKMLKSNVDFDLD

SEQ ID NO: 431134 - protein, 411 aa, unidentified
MEVIHPRCAGLDVHKDVIVACVRCVTAPQHREVRSFGSTTSELLALADWLAEHGCTAVAMEATGVYWKPVWHVLEDEFELVLANAAHIRNVPGRKTDVNDATWIAELLAHGLIRPSFVPPRQIQELRDLTRTRKQLVREVSQHSLRIQKVLEDANLKLGSVLSDVLGKSGRAMLHAIIDGQDDPATLAALAQGTARHKTAELREALRGRVSEHHRDLLRLHLQVIDALQATLVNLDATVGKALAPIRSSARLLTTMPGVSDLTANVIVAEIGVDMARFPTAGHLISWAGLCPRSDESAGKRRSTRVRHSGTWLKTTLVTAAWSAVRVKTGYLRAQFLRIKARRGAKKAILAVAASMLTAAYHMLRDGTEYRDLGAAFHDQHDRSKTIRRLLKRLSDLGCDVPLEQHMATAS

SEQ ID NO: 431135 - protein, 353 aa, unidentified
MGIDLAKRVFQVHAASKDGRPVLRKKVSRAQLLGFLAKQPPAVVAMEACATAHDWGRAISGLGHDVRLVPPIYVKPFVRRQKNDAADAEAIAEAASRRTMRFVALKTEEQQARSMILRTRDLLVRQRTQLVKCAARPSGGAWGCRRPGFAQVKVLATAMRDTGSLHPLVRELGQRYLDHIARLDVEIAELDKRLRRSSKDDETAKRLQSMPGMGPITAAAIEAFAPPMATFKRGRDFAAWLGLVPRQHTTGGKPRLGRTSKMGQRDIRRLLIIDAMTIIRWAVRRARPRGRGWPECWPRSRAWWRPSPWPTRWPVRSGRCSARAKTIEDQRWRRPDRQAASAGASAMREVEDR

SEQ ID NO: 431136 - protein, 369 aa, unidentified
MSESTMFVGLDVHKESIEIALAPSGGSEVRSYGSIAGDLDAVDKAIRNIRGKHRQLNFVYEAGPCGYALYRHLTKRGFACAVVAPSMIPKRSGDRIKTDRRDAIMLARAHRAGDLRAVYVPGPEDEAIRDLTRSREDAMISGKRARQQLGALLLRQNIRYPGNRAWTQAHQRWLARIAMPQPVQQIVFQEYLHAVDEAHQRMERITEQLRQTVACWRMAPVAGALQSLRGVSLIAASSVLAELGDLTRFDNPRHLMAFLGLVPSQYSSGPRQQMGHITKTGNSHARRMLVEAAWAYRFPARISRGLRDRQENLPQAVTDIAWKAQMRLCRKYRRMAARGKLKQVITTAIARELSGFIWAIAREVKPTSI

SEQ ID NO: 431137 - protein, 384 aa, unidentified
MCFIKNNKRFGKVKKIDHDIEGFKRLLEDIQKLEAETNEKVCAVFEATGVYTKPLERFLSKNSIKTYIINPLESARKRKEKIHNKKTDKLDPISISKVYYDKEEMMELKKKDETYNWLRKKNRLYEDQLNHLRKYKVTFQNQLSICFPGYLDLFKDGYSDIPMTILKKYPHPDLLKNKKAETVARYLEKNTCHTHKVSLEYALKIIEFAKKTYPGCEKDDVEVEIFKILLDKVIETQRECEKTLNEMITVASTLEEYRYISSIDGIGPNLAARIIAEIGDIEEFKSREALVAYAGLDPHIYQSGDQDGKHLKISKKGNKYLRCLLFLAVGCSIRGAKDNPVNRFYQKKKQQSNPLNSKAAKTACTAKLLKIIYGICKNKTTYER

SEQ ID NO: 431138 - protein, 343 aa, unidentified
MKLTRVGVDLAKNVFQVHGVDRAERPVWCKRLKRNRWIEEIEQNVEAGVEIGMEACGGAHHWARLLQSKGYRVRLIAPQFVKPYVKSNKTDANDAQAVCEAMSRPSMRYVAVKSIEQQDIQAVHRVRASLISERCAKANQLRGLAYEYGLVAPREIAALRVAVPAWLEDASNGLTVRLRALLSGLYADLRALDERVRELDKEIRAIGRENEAVGRVQQLRGIGPLIASALVAMIGDARQFKNGRHVAVALGLTPRQHSSGSKERILGISKRGDSYVRTLLIHGARSALRTAPGKNDRMSRWALALAKRSHVNVAVTALANKMARVAWAMLKHGTAYEPNGLAA

SEQ ID NO: 431139 - protein, 345 aa, unidentified
MNKVFPASSSTVFCGIDVSARSLSVALIRPDGSVSQREFANSASGHKALLGWLGKLNAMVRVSLEATGVYSLDLALALDAAAGIEVAVLNPKLANRFAQTLCRSVTDAAAAVVLAEYSQRMPFTPWQRPGIEELRLRTISRYIEALVVDLAELKNRLHAAESASTTPRAIIVDLKQAQAAFLRRLAKMRREAMKLVQAKVALRQRFQLLVSIPGIAEISALPILSELALLSPTMTVRQWVAYSGLDPVHHVSGTSVHKPSRISRAGNRRLRRALYMPTLSAVRHDPHIRAFYQALRQRHKTGLQALMAVARKLLHAIYGIFKSGRPYDGRRLFPQVQLAVESFAR

SEQ ID NO: 431140 - protein, 372 aa, unidentified
MTSIIYVGMDVHTTNYTLCCYSMEDDRFFAEVQVEPDAKNILKYLARIEKQQSRDCRMVCGYEAGCLGYSLYHQLHAHGIDCVILAPTTMMTKPGKRIKTDRRDARLISKCLAFHTYSPVYIPTEVDDAVKEYIRMRDDANSALARVKQQIIAFCIRHGKIHDGKSYWTNKHLEWLSSLDLGNKILSEVLQEYLIRHYQLREQVDMYDMRINELTQAEPYRQKVEKLGCFRGIAAHTALSFCVEVGDFRRFATAQQFASYLGLVPGKCSSGDKQQYTGITKAGNSHLRKLLVETAQVFGRSATKSGKSVALKERQAKCDSLTVAYADKANARLKKKYFKIAMRSKVNIAKTAVAREMACFIWGMMTDNISCA

SEQ ID NO: 431141 - protein, 487 aa, unidentified
MSRAAPALRTDGIRTLRINLGIDVACRAAHRATCTDATGEVLISGRRFTTTADDLERLWAALPATDDVIVIMEPTRNAWVPLAAWFQHHGATVVLVPPEQSSDLRDYYNKHTKNDRLDSRVLARLPLLHPEGLRPLSDTGPAHPLRRAVRRRSSLVERRTASFYRLDALLELTGPGWGDALGTGTYCKAALAVLQRTGADPHAIRRLGPKRLTALLIRHSRGQWREDHAEKILGAARETLRLWPDGLLDYAELAEDIAAEAQIAEQLNTQITALEDRIAVLYQEADPAGIMASGPGLGITTAAGILGRLGDPNRFTSLSAVRSFTGLVPRISQSGLTGHHGPPTRAGDPGLREAVFKAADLARHVDPTLASRYHDLVVNKGKHHNSALCTLAAMVITRLAACWRNGTLYELRDTDGREITEAEGRAICTTRYKVDKTDRAKVLIRRRSQRLKNPTTSRRDQESLSAPAAGPSADHPTNAAQRTPQRA

SEQ ID NO: 431142 - protein, 344 aa, unidentified
MKKITTRTICRSSRLQDRQLTIGLDVGDRSSFYCVIDGKGEVILEAKVATRVEALRETFGRMPRSRIALETGTHSPWISRLLSELGHEAIVAHARDVRLIGESRRKDDKIDAQVLARLARIDPQLLSPIQHRSAEAQADLSVIRARYALVRARTGLICAARGLTKSFGERIRGRNPKAFRPEMGETLSPQLRVALTPLLHALETITERIREYDDQIEKLAEEKYPEVALLKQVKGIGTLIALTYILTLEDPRRFRKSRDAACYVGLQPGRRNSGQSEPQLHITREGDSYLRMVLVQGAQHILGPFRGGLRSPAMGTEAGGAWRQKRQEARHRSLEERPGAANPV

SEQ ID NO: 431143 - protein, 344 aa, unidentified
MQITTVGIDLAKNVFQVHGANERGKTVLRKQLRREQVAAFFANLPSCLIGMEACGSAHHWARKLQALGHTVRLMAPQFVKPYVKSNKNDAADAQAICEAVTRPTMRFVPIKNIEQQTVLSLHRVRQGFIKARTAQANQIRGLLAEYGLVVPQGIAYIALRVPDLIEDATNDLPGTFRQLIDRLLEHLKLLDRQVHEIEAQIKAWHRDDEISRRLEQVPGIGPITASALAATVGDAKNFDNGRQLAAWLGLVPRQHSSGGKAKLLSMSKRGDAYLRTLLIHGARSVIYRATQRNDHDSWLVKLTMRRNANVAAVALANKTARIVWALLAHDRQFRPDYTPAIAAA

SEQ ID NO: 431144 - protein, 404 aa, unidentified
MATRPQIWVGIDVGKHAHHACGVDETGKTVFSQKFGNEQAAIEALIARAGQAADQVWWAIDLTSPMALLLITVLLAADQTVTYVPGRVVNSMTGSFRGEGKTDAKDARVIAQSARLREDLNQVVMPDELVVGLTQLTSYRTDLMADWVAGINRLRALIGSIFPALEAAFDFANRTPLILVAGMCTPAEIRAAGIDGVTTYLVENGAWKPGIAKTAAAALDAAGRQSLALPGEADTAMLVKRIARKLLDLDREIKDTDKLITARFREHPWAGIIESLPGMGPGLGAEFLVGTGGHLANFASAGRLASYAGLVPVPRDSGRVSGNLHRPKRYNRRMRRVFYMAALSSLRYENGPSRRFYDRKRGERLIHTQALLALARRLVDVLWALLRDGREFSLDAPVPTAATA

SEQ ID NO: 431145 - protein, 358 aa, unidentified
MAVNEGTRRIVGGVDTHKDLHVAAVVDEQDRVIGTRSFATTRQGYRQVLAWMRAFGDLQRIGVESTGSYGAGLLRFMEQAGIAVLEVTTPDKQDRRRRGKNDDLDAQNAAHAAFAGQRTVTPRSRDGMIESLRVLMACRKTAVSARRVALQMIQNTIVCAPDSIRDQLRSLTRMQLVRTLAAWRPDLTAYRDLDSAYRIGLKSLARRYLELHDEIADLDAMIAAIVDELAPNLVARNSIGHIGAAQLLLTAGDNPERLRSEASFASLCGVSPVPASSGKTVRHRLNRGGDRAANSALHIIAIGRLRTDHRTKDYVARRIAEGHSKLDAIRALKRYLAREVYTLISQRRREINATRIAA

SEQ ID NO: 431146 - protein, 335 aa, unidentified
MKEITTVGVDLAKSVFTVHGVDAMGRVVLRKTVRREQLMELIAGLPPCLIGVEACGGAHEWGRKFQIHGHRVGIMMARFVAPYRKSSKNDGNDAEAICEAVARPNMRFVPVKSAEQQAILSLHRVRQGFIEQRTATINRIRGLLAEFGIVLPQRAEQVRRAAVVMAEGLPVLAREAIADLRAHLTYLDERITRYERQLVSLARQREAAVRIQRLPGVGPLTASAITASISDGHEFANGRQFAAWLGLVPRQYSTGGKPRLGRITKRGDPYLRTLLMLGARAVLQSAAQKTDRLSRWALALRARRGYHRAIIAVAAKNARIIWALLVKNRDFVLPA

SEQ ID NO: 431147 - protein, 333 aa, unidentified
MKKYLFYVGIDVSKAKLDINILDSSTLKSEHFIIENNIKSILIFIKKLDRKVDKESTLFCCENTGVYTNHLSGILVKLNLDLWIVPAIEIKKSKGISRGKNDKTDAKDISYYSYRNIDKLKLFTFASIDIQKLKILYTEREKMLKALLLIQATKESKAFTDKIIFKEVSQINQTLVKSIKNSIHKIESKIKEVIKANDQLTKQAQLIKSIPGLGEQTSVYLIIATKGFTAFKNWRQFACYSGVAPFEYSSGYSIKGRTRVSHMADKKMKTLLQMCAMTTLKYDPQLKEYYNKKKTEGKNSMLVLNNIRCKLISRVFAFINRETPYINTYKFAS

SEQ ID NO: 431148 - protein, 424 aa, unidentified
MHSKKATLMKEWKQITHYAGFDWARDHHSVVIVNQQAEIVSDFQFEHSVEGWKSFCEKTAPFSNLAVAIETSQGAAVDQLLQYGYALYPVNPAAAASYRQRKAPSGSKTDHLDAWALADALRVDGHGWKALQPMDELSCQLRLLCRDEVGLIAQRTLLVNQLQQALLEYYPAALEAFDDWVNPSTWDFVVQFPTPEALVKAGKRRWEKFLHTHRLWRSETAPRRLAVFSQADQFKASAPITKAKSQLALSLCQLLRTLQQQLDQYRKQIELLFKSHPDHDLFGSLPGAKKVLAPRLLAAIGSDPSRYTTFEVLQCVAGTAPVSFESGQVHKAKIRWACDKFLRHTVHLWADCFRKASAWGQTYYQKKRQDGMSHACALRCLGQRLLKIVFRMITDKKPYDAEFHARNQKKYGSWVLELVEKSPA

SEQ ID NO: 431149 - protein, 362 aa, unidentified
MIVIGTDTHKRTHTVEAANSATGELRGGLTAPARTPGFAQLLDWGRELDTERIWAIEDCRHVSGSLERFLLSRGERVVRVPPKMMGQSRRGERTRGKSDQIDAAAIARAAIKEGPETLPAAHLDEKALQLKLLLDHREDLVRARSSDQQRLRWHLHDLWPDYEIPAGALDRLVWLDRIAGRLARAEQTTRVAIARELVVEIRRRTRRASELQRQITALAGDYAPRLLELPGCAGLTAAKLIAETAGAERFSSDAKLARLAGVAPIPASSGKTNRHRLDRGGNRQLNAAFHRIAVTQGRIHPAAREFLARKEAEGKGRMEALRCLKRHLVRAVWNALRDPESFEPHSRKLQATPTLAVAAGLT

SEQ ID NO: 431150 - protein, 397 aa, unidentified
MYIVGIDIAKRKHEAAVIDGEGTVIIKPFSFTNNCSGYNRLLAMLTKAKLPLDEVSFAMEATGHYWLALFTRLQKEGFRVQVINPVQTNSIRNFYIRQAKTDPRDALLIAEVIRFGHFSESTLHPENIYELRELCRGRHAIVSMQADVKRKVVALLDQVFPEYETAFTNMFGDTSMAILQTCPTPKELSEMPFEELCHLIEVSSHKRFRMAKAQELQALARNSFGFAMAGDVFSTMIRLYAKHLDFLKQQVREMDRKIAEIMDTLDTPITTITGIGPTLGAYILSEIGDISRFSSAAKLAAYAGIDPTMRQSGEYNGVRNRMSKRGSPYLRHAIWLATSSAVLHDPALKLYFQKKRDEGKPYMASVGHACRKMVSIIYAVMRDNKTYTPHIPNEISA

SEQ ID NO: 431151 - protein, 345 aa, unidentified
MLHVGMDLSRHRLDVRVLDEGGATVAEVAVAPTGPELRRLAARFSLEGPVRGVIESMNGARFVHDTLELAGWEVEIADAQKVKGLAPLACKTDRIDAWVLAELSRRDLVPAVWLPDPGVRAHRERARFRLHLVHHRVGLKNRIHASLIAFGHPCPTTDLFGREGRRRLGELSFPEPWGSDIAACLNLIDHLDTEIAQIEADLRREGADHPYVPLLMTVPGISWILAYTIAAEIGDIARFASPKKLAGYSGLCPRVFQSGSQDRRGKLTRQGPKHLRWALVEAAIHAARHPIYVDHYQATKIRLGRQRGAKVARVEIARKLCEAIWHMLTKGEPFAPAGPTQILAA

SEQ ID NO: 431152 - protein, 368 aa, unidentified
MATCRLQATSVLAPTVSRLGVYCERRRYGTGSDPPAGHWTRIHQAQITACAITEESGGEKRIEQRPFGAFKRDRQALAAWAAALDPDEVVMESTGIYWKSPYAALEAAGIRATVVNARHVKQVPGRKTDVGDAQWLATLARAGLLRGSFVPPAKLRELRLIARQRQKLVGLLSSEKNRMHKVLTDAGIRLGVVVSDIHGQSARAMIKCLLAGQPPEEVLKLASRRLKASREELHDALQGELTGSHVFVLDELLRHIEGLEAGIARFDAHLLGELASEMNALALLQTLPGVDVIGAAMLLVEIGSDMSAFGSPDRLASWVGVCPGNNESAGKRKSGACARAISTFADFSVSSLTRPVGPNQRSSPSSSR

SEQ ID NO: 431153 - protein, 350 aa, unidentified
MQYLGIDVHSKASVWCLLDTNGEISARGRTPTTHEHLFALACELSARGPVTAGHEVGTQVYLVHDAFTQAGVEIQAFNAAHLRIIAASRKKTDKRDAYWIARTLQTGMTPHPVHIPRGEARELRRLLALRNDVAEDRKSWQLRARAHLRARGVVLPPGKSHIQKQIAKMTANPTGFEPELISALGLCERPIDLFDEELEHIDNVLALRTHDNPIIQRLRTIPGVGPLVATHLYAAIDDIKRFPNAKSLASYVGLVPSLRQTGDTARYGKITKQGSPELRRLLVQAAHAALLSPRSSADPLRAHYQHIIDNRGRKKIAVVAVAHLILKIAFHVWRDETSYDPKRLRYFTAN

SEQ ID NO: 431154 - protein, 409 aa, unidentified
MHKASVTACVRVWEGRKLIEHIAEFQTTVAGLLALGDWLAALGVRQVVMEATGVYWKPVWAVLEDSFDCMLVNARHVKQCPGRKTDVLDTQWLCQLLEAGLLKASFVPPKPIRTLRNLTRYRKTQIQDRQREAARLHKILEDTGIKLGCVATDILGKSGRDMLDALVAGTTDPNVLAELARGQLRKKIPALREALVGRFEDEHALVIGQILAHIDFLEEAIDRLSVDIEERMLPFAAQRDLLMSIPGVKQRVAEVLIAEIGVDMSVFPTPKHLASWAGVCPGNDQSAGKRRSGRTRKGSKWLRGTLTEGALAATKTKDCYYAAQYQRLRGRRGHSKAITAVGHSILTAAWHMLNNGELYRELGGDYYQRRDPETPDPPPRRPPAIPRPHRHPSTAPAGRVIQAFALTPA

SEQ ID NO: 431155 - protein, 423 aa, unidentified
MGKIIPICCGVDVHKKFLVATILTGDHLIPECKQKHFGTSYRCLLDFRQWLLDSNCREVCMESTGKYWVPIWNVLEDSFHVVIANPKWVSAVKGSKDDKKDSRWIGNLFRMGLVPGSYIPGKEIRILRELTRYRSKLVSMRASEKNRYQNAFTVCNLTLDGVVSDMFGKSATEIANYLLNTDTVDPEHCVSFLKGTLKKKADAVIEAVEGFSMTPEQRERVRIIQGHFADIDKRITQIDNLINQQVADHEAAISLLCTIPGIDRRLAITILSEIGTDMSEFGTSRRLCSWAGLVPGNNQSAGKKKSVKITRAGVYLKPALVEAAHAAVKSAEIQPYFRIKYERIMKRRGKKRAIIAIARMILTSIFAMLQTGEVFHPSDLQQYDMPENLQKKRTLSAAKDAVKLLVSLGLVVEGSISLVSLAG

SEQ ID NO: 431156 - protein, 370 aa, unidentified
MSSIAYVGLDVHKDKIAVALFVGNERNPTVEDDFDNTLVEVKKRFRRWSNRYDDLRCCYEASSCGYVLQRWLTDMGIHCEIASPSLIPTLPGDKRKTDRRDAKKLGRLYRAGELSFVHIPTEKEESVRSLVRCRETIRYDLLRSRHYVLKFLQLRGLSWHGGRNWTTAHMRYLKSLKFEGPNQIAWCEYMCLMEYKLSRLEELDRQIEELAFSDAYAQMVGSLRCFKGVDTHTAMVLVSEIGDISRFANAEQFMSYLGLAPGSYQSGNVSRDCPITKAGNSHCRHVLVEAAWHYRHCPYVSRELKARQAGQDVRVVAISWKAQHRLHKKFTRLCARTHRNKAAVAVARELAGFIWAVGTLVFNVGLSKAA

SEQ ID NO: 431157 - protein, 337 aa, unidentified
MERQYVGIDFHRRRSVIVRLNAAGDRLAVTRVTNDPLAISAAVAEAGPVPEVVIEATYGWYWVVDLLRANGATVHLANPNALNWGERRVKNDVIDATDLADMLRLNRLPEAWIAPPGIRELRELVRYRAKLVRLRSGLKARVHAVMAKEGVLPTVADMFCDKGNAQLDAMTLGPNYELRVASLRELIAIYDREVAMLERDIHRHLRHHRGYAAVQAINGIGRTIAAVLVAEIGDVMRFPNPEALCSWAGLTPKHRESDVKARRGEITKQGSRLVRWSLVEGIARYHGGPKLSSDYHRIAKRRGVNKARVAIARKVLTLVYYGLRDGEIRCLARAAAA

SEQ ID NO: 431158 - protein, 340 aa, unidentified
MAITTIGLDIAKNVFQVHGEDAGGRVIVQKRLSRAGMEAFFSKLAPCALALEACGTSHYWGRRLTALGHEVKLIPAAYVKPFVKRNKTDARDAAAICVAAGRPDMRAVAIKSEEQQASRGLERARELLVKQRTQLMNHVRAMMAEFGIVAAQGHRGFAALAARLKGPEPGVPATLAEALRALLAQAEALAPTIEAMERQIVSLARADAAMRRLMTIPGVGPLTAHAVVAAIGEGKQFGSARDFAAWAGLTPRESSSAGKRKTKGVSRQGESRLRKLFALGAATLMRNARARPERATAWRRGILARRPMKVAVLAQAAKTARIAWAILTSGAPYAAPANAA

SEQ ID NO: 431159 - protein, 344 aa, unidentified
MNQIIRIGMDTSKHIFQLHGVDAAEQVVLRRKLRRSQMLAFFAKLPPTVIGMEACGAAHYWARELRKLGHEVKLIAPQHVKAYVKRNKNDGRDAEGLCEAMSRPTMQFVPVKTEEQQAVLMLAGVRQQLIVRRTQLGNAIRGYAAEFGLITAKGLDKIEPLLARIAQDNTAPAMARELLAFQGRDYARLQTELKAIEARLMAWHRANATSRRLAQIPGVGPIGATALVMKAPNPRLFRSGRHFAAWIGLTPKDHSTAGKTRLGKITRAGDEMLRSVLVAGATAMIKQAKHGRGSPWLLALLKRKPPKLAAVALANKIARIAWKLMVTGESYDGTRLPGASALAA

SEQ ID NO: 431160 - protein, 398 aa, unidentified
MTESSDYESVQVFIGVDVGKDTHHAVAINRSGKRLFDKALPNDENKLRSLISDLKQHGQILLVVDQPATIGALPVAVARSEGVLVGYLPGLAMRRIADLHAGEAKTDARDAAIIAEAARTLPHALRTLKLADEQIAELSMLCGFDDDLAAQTTQASNRIRGLLTQIHPALERVLGPRLDHPAVLDLLQRYPSPEKLASLGEKKLAAQLCKLAPRLGKRLAADIAQALAEQTVVVPGTNAAAVVLPRLALPLITLRKQRDEVALAVEQRVLAHPLYPVLTSMPGVGVRTAARLLTEVACRAFASVAHLAAYAGLAPVTRRSGSSIRGEHPSRRGNKALKRALFLSAFAALRDPLSRAYYTRKMSQGKRHNQALIALARRRCDVLFAMMRDGTFYTPQAS

SEQ ID NO: 431161 - protein, 322 aa, unidentified
MSGSSVMVGIDVASTHVDVAAIGIELPSALAQVPNDADGHSALADGLARLAPGLVLMEATGGYEAALACALQAAGLRVAVINPRMARDFARAMQRLAKTDRIDAATLAEFACVLARRPDCERFIRPLSEPEQQDLAALVTRRRQLVAMQLSERQRLRLARPVARPSIEAMIEAIKRQLDDLEAEMARHVEAHHAQMARLLQGVAGIGKVAAATLIAELPELGRLNRREISALVGVAPYARDSGQSRGRRRISGGRFEVRRALYMATLTATRHNAPIRAFYERLVAAGKLKKVALIACMRKLITHLNAIARDHLIDHPKPTIA

SEQ ID NO: 431162 - protein, 344 aa, unidentified
MDHFAGLDVSVKETSICIVDDTGRIVREVKVGSEPEALLKVLRNPAYRFKRIGLEAGPLSQWLFSALAEAGLPVVCVETRHMRAVLKAQINKTDRNDARGIAQMMRVGLYRPVHVKTLRSQKLRMLLTHRKLLQSKAIAIDNDLRGTLRNFGLKVGMVGTVRFEARIRELVEDLPDLAALIEPLLIVRRTLREQVVILHRRLLAIVRDDGVCRRLMTIPGVGPVVSLTYRATVDVPARFRKSKSVGAVFGLTCSRYQSGEVDWSGEISRCGDEMMRTMLYEAAQSMMHSKKWCWLKAWAMQIARRRGMKKAIVALARRLAVIMHRIWVDGTEFRWTREQAAAAA

SEQ ID NO: 431163 - protein, 365 aa, unidentified
MDQIVGHVGIDTSKDNLVCTFVKRLSDKASWRGTFSNDDSGFLQVLEKTPSDVAFVIEPTGNYSLGFVKYATAVGRPVLMAPPRKAKSFLQSVQSRAKTDKIDSCGLALFAQSRELKPYPLKSATVQEVDELLSARKGLTNAITSLGQQSKALPHASSLLEPALASIKAQLKLIDKQIAKASKTESELWDVISHLRKVHGIGPVVAPAVATRLVSKRFETPAQFVAYIGLDVGVAQSGKHKGQLGITKQGDAELRRLLYVAAQATLRTKSSPFKEQYKTLRASGRKHKEAITIMARKLAKLCWSIAKNRTDFDPDRIFTRPPRTMSGVAEQDTFGQPDRSEPFTDKCDTSEVEVSVKDRKDEVNP

SEQ ID NO: 431164 - protein, 385 aa, unidentified
MVYIGIDIAKFKHFASVVSSDGKIIVKPFPFENSRQGFMKLIEEIENFQNCLIGLESTGHYAENLIQFLYERNYSVAVINPIQTDSLRDSNIRKTKTDKVDTMLIVQCLMLKKYSLVSSKNIDLIRLRRLSRFRLEMVQQQTRIKTQLTACLDIVFPELAHFFKGNLHLKVAYALLEKYSSAKSIRSARIDGLTNLLYNNSRGKYNYEKALQLKSLAKDSIGLDNPVIELQIQCLIKQLRLYQKQINDIDISIMTIMEIINSPILSIPGVGYTLGAMIISEIDDIKKFSNPSKLLAFAGLDPVVKQSGNFQSNSLKISKRGSTYLRYAIYRVAFSIIYNNETFHNYYLDKRSQGKNHRVALGHVCNKLVRVIFKILTDEIPFNLS

SEQ ID NO: 431165 - protein, 350 aa, unidentified
MNVNHYIGFDVHKKSVSYCVKTADGKIVDEGKLRATHDVLRQWAGGRPEPWRGAMEATLFSGWIYDTLQPFAAELQMGHPALMKAIDASKKKNDKLDARKIADMVRCNLLPACYVAPVEIRELRRMLRYRNLVVGQATRLKNKMSGLLMEVGAEYNKQRLHGKQYFTELLDTVAEVPESVKDLLRLSRGAMETFETTQQQLLARLRKEPLLSRRVMLLESIRGVGEVTALTWALEVGDPHRFSSVAHAVSYCGLTSALVSSADKQQRGPLSKQRNAHLQTVLVEAAKLAPRWNPQLAALHARELARGNRNRATLAVARKLVAYLLAVDKSGQPFEVRSAPATETEAQAVA

SEQ ID NO: 431166 - protein, 387 aa, unidentified
MQSVTSATAVATTVRAKDITLFASLELSKSKWVVTINSPGSEKFSKHVIEGGDGACLLDLLSRSRAKAEQRYGVGVKATVIQEAGLDGFWIHRLLLADGIESHVVDPASIAVARRHRRAKTDAIDGETLLRTLMAWARGERRVCSMVLAPSPEEEDRRRLTRERGTLLKERIQHTNRIRGLLSGQGVRDYNPLRRNRFERLEALRTGDGRELPAMLKAEIRRELDRIALATTQLAAVERARDALIRTDAEEPNNPAALLLKLKGLGPEFASLLWLESLFRSFGNRRQVAAYGGLAPSPWQSGGVERDQGISKSGNRRLRKTMIELAWFWLRHQPDSALSRWFQVRVGAAKGRIRRIAIVALARKLLVALWRYVTQGVVPEGVVFKAA

SEQ ID NO: 431167 - protein, 562 aa, unidentified
MVLLVRFFPDGSPDPYYSGENKPVDQHGSFGLAAKTLAKPPRVLGIRAAIPFGRVRSIVARRPDRERSQKDSNHVPDAMKAAKPSQAPRTTAKRSVPAAGPIRPAKDLPVINPHAAGIDVGATEHYVCVPADAVGADESSVRSFGAFTGELGQLVELLLACQVTTVAMESTGVYWIPLFQKLEAAGLEVVLVNARHLKQVPGRKTDLKDCQWIQRLHSYGLLNASFRPSDVICRLRTFMRHRANLIEFCSQQVLHMQRALDQMNVHLHHVISDLDGDTGLRILDAILSGQRDPKELVKLRDPRVRKSTVSEMEAALLGDWRPEHLWVLQQAREAYRFFHGQIAALDQQVEALLPQIVTAPPALPESQRPQNPQAAPDAQRPRRKQKKKGNAPALDFTEELTRICGVDLTRVVGFNLLSVLILISEIGVDVSPWRSAKAFCSWLGLCPGNKISGGKVLSSRTARVSNRAATLLRTLATAVGRSDTWLGSFHRRMKSRLGPAAANTATARKLACLIYHLLKYREPYIEVDRVLYEARIQRGRVAKLKKLASELGFDLIENKQAA

SEQ ID NO: 431168 - protein, 340 aa, unidentified
MRRLYAGSDLHGNNNLMGIVDEQGKRIFKKRLPNEPQLILEVLKPYKEEIVGVVVESTYNWYWLVDALMDEGYKVHLANPSAIEQYSGLKHADDKHDAFWLGEMLRLGILPEGYIYPKEERPVRDLLRKRSHLVRLRTSLMISLQNILSRNLGRKMSVNDVKAVKEDRVSPLLEKNEDLALAGRVSKEAIDHLTHQIFKIEWVVQKKVALKPEYRYLPGVFGVGKILSLTIMLETGPISRFPTVGDYVSYCRKVPSQWMSNGKWKGSGNRKNGNKYLAWAYSEASEFARQLYPEARAYYQRKMQKTNAPVAHSALAHKLARAAYYVMRDHVPFEPQKLFG

SEQ ID NO: 431169 - protein, 359 aa, unidentified
MAKARTLVGLDVHAAKVVAAILDSETGELRFQRLGGASEPVARLCGSLAGPVKASYEAGPTGYGLARALDAAGVECVVAAPGKIPRGASDKVKTDRRDAEHLVRLLLAGKLHPVRVPGPAEEALRDLVRAREDVRQDLMRARHRLSKLLLRHEVRFDGRAWTERHRAWLARVELSQAPAQATFVDYLGAVEALVHRKAELERQIAALIPTSPWAREVGRLRCLRGVDTLTAVGLCSEIGDFERFAKAGQLMSYLGLVPSESSTGDSRRLGSITRSGSRHARRLLVEAAWHYRNQPRVGREIERRQQGQPAAAVAIAWSAQRRLHRTWTRMRSRNKRPTVTTVAVARELAGFCWAIARIE

SEQ ID NO: 431170 - protein, 457 aa, unidentified
MTKGGDVLGVGIDWSEEFHLVALGKPGEGVIEIERVEHSPKAIDALIAKVAELEPDPAEVRVVIETRHGMLVERLVDAGYIVVPVNPDLVARRRGPAKKKDDAEDARIACLIALDRFERLRPLIPHGDTAGELRAIARDDARATKDERRLLNRLRQDLITTFPAALAIAGNDLGAPVFLRLLERWPTANALAQAPREEIVAFARSCKHGWPERFADRIEAALQSDTFVARDYLVRAKADTIRLAAVQLLAIGAQRRAWERRMGELLLGAPRRGKAKRPREDELGQGFPGGEIYLSFPGLGDRLAARIAGEIGDHPEQFDTPNSLQCYGGKAPVTRRSGKSELVVACRLAHNRYLGDAVQQWAFCSLIRSGWAREFYDSQRARGKGHHAALRALGNRWLEIMWHCLHKGVFYDEGIHVANRNRALGEGSLRLPDAVVVDKGCLIAAASVPTNVRRRVS

SEQ ID NO: 431171 - protein, 373 aa, unidentified
MPRYSTAFGMDVHLRSTTVCALDAETGEAVARRFRGNPWGEVAEWMSGFPGPSLAAYESGYLGFAPQRELSGLGVDCVVAAVSKVPRSAADLSSKNDRNDAARMAKAILSHDISPVWVPSPEIEGLRDLAGAHDAATARLAAAKQRLLAFLARRGYVYGGTTPAGNPRKYWTYGFLRWLDGIRPADDGGIRALAALRNEVEAADETREAVLAEYRAAVAAGPLSAEVEALQSIKGCGFVLAAAFASEVGDFSRFRSGRQVTAYFGLAPKQRSSADSVRLGGISGAGNALVRRLAVEGSWRYAQAGHQPKLMPKGSGVPLEIRMHGRKGSERLLRRREEMLERGMPQAKANAATAAELVRWLWALGMMCREAGE

SEQ ID NO: 431172 - protein, 425 aa, unidentified
MEAILERVCGLDVHQASVVACVVTGPPTGRARREIRRFGTFTRDLLELRDWIEARQCTHVAMESTGVFWRPVYAVLEGSFELVVGNAYHMKNVPGRKTDVKDAEWIADLLRHGLIAKSFVPPKPLRELRDLLRFRRKLIETRANERNRAIKVLESANVKLSTVATDIFGKSGMAMLEGLAGGETDGEELANHALGRMKKKHADLVASLTGKFGEHDRFLLRLCLRRLKALETDIAAIDRKAAKYLKPYQQQYEALQTIPGVGATVAATIIAEVGVDPTTFKTPQHLAAWAGVCPGNNESAGKHLGTGTRKGNPSLRTALIEATMGACRTRDSYLRDKYYRLKARRGHKRARMAIAHKILIAAYHVLFEGATYKDLGAKYLDRLGGERARKQLVGRLERLGYDVTLVAKALQGPEIATESTANTFS

SEQ ID NO: 431173 - protein, 420 aa, unidentified
MSKRAQRHEQVKGSKGPIPEGMAVLGLDIGSQTHVGRFWAAPGVREKARSFANTAAGAAALLAWLDERTGGDRSRVVVGFEPTGSYWQGFVGRLVAAGVSVRVIAPAHTKKYKELFDNSPNKSDAKDAGVIAELTKRGHGLLLRQPHGAYADLRALNEGYHRATQRITALQNQAREVALGLFPELGAAIDPFSATGRALWAATPTPAAWLGKRRSTRERLVRQASRGRLGAAFVAQLSEKARDSLGGTEAVAPRVAELTFLMAELERWEGHRAALEAALSTTLDSCPEGAWLTSVPRLGRASAARILGETGPLTDFASGQAVLKHAGLNLYASSSGKRTPERVCYRITKRGRSRLRHVLFFAALRLVQRGGIFHAYYRRLVDDNGVIKVRAVVAVMRKLLRVLTALARDHAAYDPASVPT

SEQ ID NO: 431174 - protein, 351 aa, unidentified
MEKIRKGGKGTKEIFMGIDVHELTYRVSMFFEGEELSNATYPSDPKHLKRLLERYSAFRIHAVYEAGPFGYSLYDWLKSQGVTAIVTPPSKIPVASGDFVKTDKRDARQLAHLLSGGLLKAVPIPDKRKREDRDLLRTRDQLVDQRRRIFMQIQSKLRFHGIPIRCRILITTKNRKMILEYPGMGASLRAAFGYMLDSYDYYTERLKCLRQAVLTLSEDEAYRDGVAILKGIPGVGIITALSFLLELPDMRSFDSNEKVGSYLGLTCSEYSSGESQHQGRITRCGNSRIRGLLIQCAWKLIAGDDAMKRFYERLKRRRGGKRAIVAVARKLSGRMRTVLIRNEPYQVGLVQ

SEQ ID NO: 431175 - protein, 337 aa, unidentified
MTLYCGIDLHANNSVVAVLDEDDRTVYEKRLPNDLAMITGVLSTYQSDLAACVVESTYNWYWLVDGLMAAGFPVQLAHTSALPQYQGLKYTNDFSDARQLAHLLRLGILPTGYIYPKAERALRDLLRRRLLLVRQKTMHHLSLQSLIARHSGQRLNAYQIKTLSQPQIADYLSGLALLSGEITHQAWAWLDGAIRRIEQELQQQIQPRQDYQLLQSISGVGPVLGTTIALETGTIERFASAGNYASYARCVKSEKISNGKRKGQGNKKNGNKYLAWAFMEAGHYSAIWNPRIKRYYQRKKARVHILVAKKAVANKLARACYHMLKRGEKFDVARAFS

SEQ ID NO: 431176 - protein, 312 aa, unidentified
MTERCYCGIDVAKERLDVQVLPHRQRFSVDNNATGWAELVERLHALAIAAVGIEPSGGYERGIIRTLLAAGLSVRRINPSKLRQFARARGILAKNDRLDAQLIAEYVSIMPTRAVQRAAATERLAEVVTMRRQLCDEHVTIENQAAHVEDAILRRLNKRRLARLKADIHLLDKRMAEIVAADAILAQRYELLTSMRGVGPTLAFTLIALLPELGQMSRKQIAALVGLAPYDFDSGKLKGHRCIYGGRMPVRNILYMAALSAARYNPVLKIFHNRLAATNKKPKVIIVAVMRKMITTLNAMVRDNAAWQPRAA

SEQ ID NO: 431177 - protein, 387 aa, unidentified
MISVGIDVAKRTHEACFMDAEGQEVGRPLRFPNTVGGVATLNDRLRRLGQPVSIALEATGHYWLALHERLTGEGFSVQVVNPIQTDAYRRTTVRKVKTDRRDSWVIADFHRIGRVRPSYVPDTTTIQLRELTRFRFKLVDQVGDAKRKALTILDRVFPEYERLFSDVFIATSRQLLRTATTAEEFAGFDLEELAALLRRGSRGRFGREKAQVIQMAARDSLGLSSLGPVASLELRWLLDQIEFLEKQTAQVEAAIEELMAAQEQYLTTIKGIGAVLAATILAEIGDIHRFNRLESLVAYAGIDPAVYSSGEFTGTQAKLSKRGSPYLRRALWLAATSARRFNPDLQEYFEGKIRAGKPYGIAMSAVCRKLLARIYVVLKENRPYEVR

SEQ ID NO: 431178 - protein, 345 aa, unidentified
MKITTIGIDLAKTVFQVHGVDERSKAVLRKQVKRKDFVSFLANLEPCLIGMEACGSAHYWARKLIQLGHTVRLMAPQFVKPYVKTNKSDRNDAEAICEAVARPNMRFVPVKTAEQQAVLALHRARQGFVKARTAQANQIRGLLAEFGIVIPQGIGQIAKRLPEILEEGENGLPGMMRELVERLGENLKQMAKQVGELERQIKLWHHENEHSRKLEAIAGIGPITASAYVASVGDAKSFKNARQVPAWLGMVPRQDGTGGQAKLGRISKRGDVYLRTMLIHGARSVIAQIERKPDQADEWLKKLLARRNKNIAAVALAAKNARIAWALLANERSYQSDYVANRAAA

SEQ ID NO: 431179 - protein, 354 aa, unidentified
MIIIGADYHPAFQQIAFVDTETGELQERRLEQPEGAEKFYRELVVQGKRVRVGMEASGHARWFERLLAELNIALWIGDAAEIRRKRERKQKTDRQDAQHILRLLLKDDFPRIWVPSWENRDLRQLLWHRHRMVQARTRMMNQLQAVALNEGLRCKKKLFREAGRKQLEAFRLAPWASRRRQDLLELLDRLNPTIATLSQAIEQEVEKCPAAQRWMTHPGVGPLTALAFVLIIERADRFQCGKQIASYLGLVPLEDSSGNRRRLGHITKQGNSLLRFLLVEAGQVTVRSLPEWRSKYVHLTMRRGRKIAKVAMARKLAVRLYWMMRQGWDYEQLKKFGSHAGQPGHRDGVKSNIE

SEQ ID NO: 431180 - protein, 399 aa, unidentified
MSVVGWDWASQAHDVTVLNDAGGVVDRWAFPHTEAGWVMTLARLRRHGEPGDLLVIIEKTSGLVVDRLLAAGHPVVPVHPTAFYAARPRWGASGAKSDPGDSYKLADYLRTDGHRLRRLEPADPGLRELQALVRLREDQVRARTAATNQLWAMLGNYWPGPRDLFCSLASPIALAFLTAYPTPQSAARLGQARMAAFLRRNSYRGGKEPAALLARLRAAPQASVVLPAATLAAMVSAHVQQLRSLQAAITSIERLIAGRVAAHPRARLLGKLPGVGMINLAQLLAEVGPILDRASSAEQAASECGAAPVTRASGKTTGVYFRWAASTRARKAITAFAHNARMQSPWAAKLYADARARGKRNPHATRIVARAWIRVIWACWHTAVPYDPAIHHARQRFTT

SEQ ID NO: 431181 - protein, 311 aa, unidentified
MYYIGIDVSKKDLSVFDGKDLNFINKEGLKSFKKYLKKKYRLSEIAIIFEPTGIYSQYLKEFCAENSIKAYIINPKQSHNFARALGIRPKNDKIDARTLYKFHKLIDLKDIKVPKIDQQAKTLSGYLVSYEFALKQRVALSNHLESLRDQELIALMKKDLKRAKKLEDKLFHDILEYVRQNQNLKEDYQRLLTISGVGDKTAIALLTLFKTYQGTNRAQITALAGLDPVKRVSGTSVKYKVKISKNGKGIYRKIFYLPTICATVHNQKIRVFYQRLLANHKIKKLAIIASMRKMLLIAHAMYRDKTEYVSA

SEQ ID NO: 431182 - protein, 412 aa, unidentified
MEAIIDRCCGIDVHKKTIVACLIVGKPNEKPRKTIKTFSTMTRDLLSCKDWLESEGCSHVAMESTGVYWKPVFNILEESMEIILANARDIKNVPGRKTDVRDCEWIAQLLRHGLIRGSFIPPKPIRELRDLTRYRRKLIQQRSSELNRIHKLLEDANIKLSSVVTDINGVSAQDMIYHLIKEDMTPKQMAELARKRLRNKITELQKALEGRLRDHHRLILKLSIEMIASYDQTIEELSLEIDKRMEPYREQSDRLQTIPGVKKRIAEVIIAEIGVDMSRFPSHAHISSWAGVSPGNNESAGKRRSGKTTRGNKWLKGTLTEAAWSASKTKGTYLSTRYKRLASRRGKKRASLAVAHSILIMAYHVIKEQCTYNELGGDYFDRLNEEHLVKRLSSRIQALGYKIEVQKLPVAA

SEQ ID NO: 431183 - protein, 474 aa, unidentified
METIVERPAALDVHKAQVTACVRTPAEGGGREAHFAEFPTTVAGLLTLRDWLAAHGVTQVTMEATGVYWKPVWAILEDDFELLLVNARHVKQVPGRKTDMSDAGWLCQLAEAGLLRASFVPPKPIRTLRNLTRYRKTQIQERAREANRLHKALEDTGIKLDCVATDILGVSGRAMLDALVVGTTDPAVLAELARGRLRAKLPALREALEGRFDRLHALWIGSILAHIDFLDEQIASLTEAIAEQIAPFEQAVELLCTITGVQRRTAEAIIAQIGVDISIFPTAKELASWAGQCPGNDQSAGKRRSGRTRKGSKWLDWTLEEAALAATRSKDTHLAAQYARLRPRRGHKKALGAVKHSIIVACWHMPSTGQLYNDLGGDHFARRDPEKTTKRLAAQLQRLGHTVTLQEANAAQGSTASSCQGECRRSVSTALGRQLEEGRAGAAPRQAHRSPPRRAASRANRACPPADHRQGQIG

SEQ ID NO: 431184 - protein, 410 aa, unidentified
MVRKASTNDWSTMSRIWAGTDCGKTHHHTLVLDADGKTLLSRRVANDESELLKLIGDVLDLADGDKTTWALDMTGGEPGLLIALLVNHGQELVYIPGVAVNRATDSYRGQGKTDARDARVIADQARMRRDLQLIRPGDEATIELRLLTDHRVDLVADRTRTTNRLKALLNSMFPALERALDLGNAGPLVLLAGYQTPAAIRRAGTRRLTTWLRNRKVCNAAALAEKAIEAAERQHTAVTGEKAIAKMVHTLAREVMALNEKIIETDKLIEGRFREHELADVIQSMPGIGTILGAEFLAAVGGSLDAFPTADRLAAFAGVAPAPRDSGQVSGNNHRRTRYHRRLQRVFYTSALISVQHDPNSRKFYDRKRAEGKRHVQAVLALARRRVNVLWSLIRDRRCYQIAPPVTEPA

SEQ ID NO: 431185 - protein, 344 aa, unidentified
MNITTVGIDLAKNVFQIHAVDERGKTVLKKQLKRDQVATFFANLPPCLIGMEACGSAHHWARKLTSFGHTVQLMAPQFVKPYVKTNKNDAKDAEAICEAVARPNMRFVPIKNIEQQSVLSLHRVRQGFIKARTAQGNQIRGLLGEFGLIIPQGISNIAKRVPELIEDASNELTGSFRLLVKRLMDHLKELDKQVGELELQIKTWHRASEASCKLEMIPGIGPITASALVASVGNAKNFDDGRQLAAWLGLVPKQHSSGGKSTLLGISKRGDSYLRTLLIHGARSVIFRAQQKADKSSWLHKLLERRNPNVAAVALANKNARIVWALLANDRNFKADYTRAPATA

SEQ ID NO: 431186 - protein, 437 aa, unidentified
MSEKKSVEIRVSVDVGYRRHSVAIGLPSGEVLEEFEIAHRPEGFAEFFSRIEKHQKVRDCEVAVAMEGFNGCARPLDAMVRRRGYRLYNINNLKLARFKEIFPGAAKSDRIDARKGLELFQLSDHLPLAKEVLQEVKGTPRENEVLKRLTRRRRRLVDERVRVISNLQTDLQAVCPGLLEITKNAGNQWFLNFLVSAPTLPQLARLRPATLRKIPAVGRKYAGLIEDWQKRAHFSEEVEWVGEMIQEDAQRCLELDEKIKALRAKIKEVAKDSKIAKTLLSIPGFGTICTAELAGEIGTIERFSKEGSLALYIGMSTLDNSSGKYQGSKQPKHVNTRAKAAMMVALDRHRKYVPESQRYYEKKRSEGKKHNQAIRALGRHLCRIIYKLLKEEREYEIRPEKGNTKTKVSPRSLIKRQIRKPKISDKGKNNKIYQQST

SEQ ID NO: 431187 - protein, 331 aa, unidentified
MKNVKETIGIDVSKLTLDVFLHNGKQHQQFSNDRKGYLKIVSWLKSKHLGKDDVFYCFEHTGWYCILLSFFLKEKNLDYCCVNPIEIKRSMGLKRGKSDKADSKEIAHYAWLRRFELEPSIPPSANIIELQRMMSLREQLVKQLTAMKNLSKGMAVLIESKQEDVSMGMIAETINHVEVQLSKIEKAMEALLKSDSQMNTNYKLSRSVKGVGIVLAVQMLLHTHNYTRFASWRQFSSYCGLVPFPYQSGTSIHGRNKIHPISDRKMKSLLSMSAISAIQHDKELKMYYLKRVEEGKPKMVVINIIRNKLVSRIFATVNRGTPYVELNQFAA

SEQ ID NO: 431188 - protein, 372 aa, unidentified
MIQKFHGLDRHKNHSTISVLNREGQEVEFLSKCPDLRGYIEQLGPEDAVVMEAATGSFFWADQVESTGATCYILHPYKFKIIRDSWNKTDKHDARNMAKALWVFLVTGEFGIPTVYKPSVAVRELRRLFSQYYLLNRQVTLLKNTIQAILAENGVSLTYCQKTMLSSDTDAIKMLNSYDLSAASSLSIQINLEILWKVEEQKTNLKKEILFAGEPFADEVRLLITIRGIAPLTALAFLADVADIRRFKTLRKMNAYLGLVPRVKESGGKSKTGRINRESRQLTRTLFTQSVMHFADASPYLRSYYSNLISQRGVGRARIALIRKICGIMRRMLLEQETFRWMQPSNFERKLKRYECQLKKIKKIKEEERKSA

SEQ ID NO: 431189 - protein, 344 aa, unidentified
MVYHTALDVSLRSVSICIVDDNGVIQFEDKVVSEVEEIVSCLKRFSPDIRSVGFEAGTLTQYLSYGLQAAGYEVICMEARQVSAALSAMRNKTDKNDARGIAQILRSGWYSRVYVKSMESHLTRALLSCRKTALRKCIDLENEIRGLIRLLGIKLPASLKHGGFDHMLRELIQEHVIMADALIPLLDARLALYDTYLKLDSQVTAMARRDAICQRLMTVPGVGAITALTFKAGVDDPTRFRHSRTVAAHFGLTPRRFQSGEVDNPGHISRAGDADVRSALYVAANSLVLRSEKWTYLKAWGLRLSKSKGHRRAVIAVARKLAVILHRMWIDKTDFRYSSTEVTT

SEQ ID NO: 431190 - protein, 424 aa, unidentified
MKVTYQTCCGVDVHKSFLVATIVKTTGGIEPSYQKKRFSTFNNSILEFKQWLLDNDCHDVCMESTGKYWVPVFNLLEDDINVVIANPKWVKAVKGNKDDTKDSKWIGDLFRLGLVKGSYIPCKKVRILREYTRYRYKLVSCRSSEKNRYQNALTVCNVALDSVVSDIFGKSSTSIIDYLLEQSGSSINHEEIASKLLRSLKSKEDAVIESVEGYQMTDAQKYRMRLVRAHMDYITAEINDVDKMIENMISSNPDFENAVRFLCTIPGVKRDSAITIISEIGTDMSQFSGSKRLCCWAGLTPDSNESAGKKKSVWITRAGVYLKPALVQCAHAAVKSDKSPYYKKKYEALVKRRGKKRAIIAIARMILTAIYQMLSTGEQWNPSDLYKIDMPVALVEKQKAKAIKQAKKLLQREGLLPPDEPLAS

SEQ ID NO: 431191 - protein, 315 aa, unidentified
MDDTGHVVLRKRIARGELLPFIAKLSPLRIGMEACGSAPYWARRFRQHGHEVRLIAPQFVQAYVKSPKHDARDAEAICEAMSRPTMRFVSIKQPEQQDLQALHRVRERLIKARTALVNEIRGLLNEYGMVLPQGITKFRTLIVSKLQNEQAKPTALSTEVFCQLYDEFLSLEKRIAYSAEKLAAMGQAHPECQRLQTIPGIGPISATAILAAISDATQFNNGRQFAAWLGLVPREHSTGGKPRLLGISKRGDRYLRTLFVHGARATLRWVDSKQDDRSRWLKALIARRGKNRAAVALANKNARIAWALRAQALST

SEQ ID NO: 431192 - protein, 429 aa, unidentified
MRTESTPGARGPVFCGVDTHADSHWLCVLDWRGRRVLSRRFPADAGGYEALAGAIAAAGEPACVAMEGTSSYGAGLTRHLASLGMPVREALSPARTQRRRPGQGKCDESDAERAARAAMSGSRLGTPKSQDGWVDGVRCMLAARSGAVKARTSAINTARSLLTTAPEGLRSRFRGMGGPRLMEELPSVRSEGALGAALGALADLWAAARDAALDMELAIEASLEENCPALLAMYGCGPVSAAKLAVAAGDNPGRLRSEASFAAICGACPIPASSGKTVRHRLNRGGDRQANSALYEIARQRVMRDPETAEYAERARGRGKSDREVMRCLKRYVAREAYRALMHPHEVRRPEDASALVAARRAAKVSQVRAASILGTSEKYISMLERGQREFKPIRRAYEAWVEAGLPLDWDRQAFEAERKMDSKKHLAK

SEQ ID NO: 431193 - protein, 365 aa, unidentified
MGWMAPWRHLSAKMVVVKDHQQREPSMGDITTIGLDLAKHVFQVHGIDGAGDVVVRKRLRRSLVLTFFSGIPPCLIGLEACATAHHWARELTALGHQTRLMPPSYVKAYVKRNKHDVADAEAICEAVRRPSMRFVPIKTVEQQSALMMHRARDLLIRQRTMLVNALRGHLAEFGLIEAQGLHKVVRLIAIVMDEKDNRVPEPARQVLKVIVNQIEDTQTRIAELEAQVLAWHKSNPNSQRLATIPGIGPIIATAIAATVADPSIFRSGREFAAWLGLVPRQNSTGGKARLGGISKRGDRYLRRLLVNSAHTVLLCSKQAKTDPWLTSLLDRKPRLVAAVALANKTARVAWAIMSRQDTYRAAVTA

SEQ ID NO: 431194 - protein, 469 aa, unidentified
MGFEPEHAQWPPLRLARVSRELVSVVVVSPLLLHEFDNQEEDEVRSVGRSIGLDVHRDFCEVAVAQDGEVRSSGRVDTTPERLELFGSSLHPRDRVALEVSGGAWEVARILERHVARVVVVSPADTGIRQARAKTDRLDARTLARLLAAGELDGVWSPDERCRVMRRRLSRREQLVRARSRAKNEIHAVLVRRLVGRPPASDLFGVRGRQWLAELDLPLEESETIDACLRHIEFLDSEIATVERQIASEALRSAEIRRLMTVPGVNMICAASFMAAVGEIHRFPNPRMLTGYLGLDPRVYQSGSAPATGGHISKQGSASTRWALVEAAWSVVRQPGPLHAFYSRIRARRGHGIAVVASARKLACLFWFLLTRGEDYAHQQPSLTARKLRLLEIRAGAPTLKGTPTGVWATRQAMREAERRLGEQAEASYAQTVSDRQAAAPKKGGASVTPGRASQKPSKGKVARQTTSP

SEQ ID NO: 431195 - protein, 390 aa, unidentified
MPKFNDLSRSLVAFEQDSTLVAAIEMSSTSWLVGGFVPSRSRDPQKKLPAKAQALLDLLSGWCEEARAAGQVIKRTCVAFEAGRDGFWLARWLQERGIEAYVIHPTSIPVSREHRRAKSDRLDLGLLKRSFLGWLRGERKHCSMVAIPTREEEDGKRLLREREALTADKTRLVNRMKSLLVLHGIHGFKLKQRKAEEQLARLVTAEDKPLPPDALAELHRLVERLRLAKQQMAEIDKTQRERLAKAPEAGPNPLILILARVTGVGLMTAETLVREVLTRSMRDRRAISRYAGLTGSPDESGKKRREQGLAKAGNGRIRRALIQLAWRLLRHQPQSGLVQWYRARTADGRRDTRKVMIVALARKLLVAFWELVTTGKVPEGMKLHPAPVAG

SEQ ID NO: 431196 - protein, 402 aa, unidentified
MAYDFVIGVDVGKYFHHACVLDPQGRQVLSKRINQHESSLRKLFGQFIADNASVLVIVDQPNNIGRLTVAVAQDMGADVRYLPGLAMRQLSRIHVGNSKTDVRDAYVIAHAGLNLPDALRSVDRVEEVFTQPKVLNGIDEDLARAYTRLINQMRSALVGTNPAFEHVLHGQMIHRKWILHLLAKYGGPTKIRRIGKTRLAAFARSHKARNPEPVIDAMLAAIHAQTVSIAGAEYAELGVAMSAKDALAKLEHRKEIEAQVLKLIQDIPQTEILLSMPGIGPRSAAQILMTAGDMSDFPDAAHLASYAGLSPRTNQSGTSIMSNSPNRAGNKKLKNALWQSSFASIRFHERSRQFYERKRKEGKRHNAAVVALARRRLNVLFAMMRSGELYRDISTVREAAAA

SEQ ID NO: 431197 - protein, 378 aa, unidentified
MDRATNSTAPADRLFCAVELSKNSWLLGIQFPDRQKASVYPLKGGDSEGLMAKLVAACDRWTKVSGKKPSIILCYEAGYDAFWLARFLRARGIECLVVDSASMQVNRRSRRAKTDRIDLGKLLRALIAWCGGERHVWSVVRIPSVDEEDLRRSHRERSRLITERTAHINRIKGLLFAQGIRGINVKARYRTLRVDKLVTGEGRPLPPRLAQEITREIDRLGLVQQQIAAIEQERDESPTTCKETEKKRAQLLLLKGIGPTGSAVMAREVYYRQFSNRRQVAGFLGLATSPYDSGQMERSQGISRAGSGPVRATMIQMAWLWIKHQPKSALAQWFVQRTEGQNGRIKRIMIVAVARKLAIALWRYLEHGLVPQGATLTR

SEQ ID NO: 431198 - protein, 313 aa, unidentified
MPVAPSNPIIGVDVAKNELVIYQADSDLLEAIPNTKTSIKQWLKALLGPVSIAIEATNIYHLEFADLAYAAGCTIYMVGGYELKHYREGVKIRAKTDALDAKLLARYLKNEAEELHPWTPPSPLYRQLLSLFRRRAALVQARVGLVQSWSNEPLLKAAFAEQIKSMQRLETMIEKTINDQLKQAGLLGELKRCLKVEGIGFLTGARLLTAFQRGEFSNADAFIAFLGMDLRVSKSGQKDGRRSLTKRGDPEARRLLHNAAMSASRTIAWKGFYEAQRARGFSTTQALVMLARKLARVVFALLKGQSEYQAKVS

SEQ ID NO: 431199 - protein, 286 aa, unidentified
MVAGIDVGKSMHYVSINQKVKRFSSKEINKLKKHLKENKIKNILLEPTGVYSIPLIEKLYKEFNVYVVPTYLIAKFKGNRFQKNDSIDAKILETYYYTQEKQFTKYKVDKKYIIAKKLNLMISERESLLKAKTREFNRLRSELYVIDEKTHDLTKAKLIKYALNTENKLIHLRVNRIKNIEESIELLEEKINKYVDSHKFIKEQIKAIMTIPKFSYYDACIIVSKIVDIKRFKTVKAFKKFLGFGVAKEESGTSIKRTKKIISHKVFKAKMYLFILRNMQKSGIIT

SEQ ID NO: 431200 - protein, 338 aa, unidentified
MKIMNVGIDLAKNVFAVHGVDENGKAVLVRPSVRREQLLELVAKLPPCVIGMEACSGGHHWARAFTALGHTAKLMAPKFVAPYRMAGRRGKNDAADAAAICEAVQRPNMRFVPIKDIDQQGVLCIHRARQGFVEERTATINRIRGLMSEFGMVLPKKADTVRKQAAQALENLPGWAKRAIDDLLTHLQTLDERVTEYDGHIKELAKADARSVRLMKMPGIGAITASALTASIGNGHDFKCGRQLSAWLGLVPGQYGSGGVVRLGYITKAGDPYLRTLLILGARSVLAAAGTKTDRMSRWATSVYERRGYGKALVAIAAKNARIAWALLAKGEQFTKPA

SEQ ID NO: 431201 - protein, 348 aa, unidentified
MSTIQIGVDLAETVFEVAVSEAPGVVTSRRRLSRAAFPRFLAAQPPAAVLLEACGSAHRWGREAQRCGHRVTLLHPADVARHRDGNKTDRADAKALLEASRNHALTPVPVKSVEQQAVVALHRIRQGYLRTRTARINALRGHLRELGHSMPVGARRVTLEARVALADEAVPDFLRQALFELIAEIRSLEEKAHAVRASLTSLLHHMPDAKRLMTVPGVGVLTATAMVACVGDIHRFRSGRHFASWLGLTPREHSSGSSRKLGSITRKGNSYLRMLLIHGARSALRAGAVTDTPDDLRTWAKEVSIRHCHNVAAVALANKLARIGWKVWRDGRDFERREPQEEGHTTNC

SEQ ID NO: 431202 - protein, 343 aa, unidentified
MQTITTIGFDIAKSVFQVHGVDAAGEVVIRRQLKRRYVLAFFQSLPPCLVGIEACASSHYWSRELQALGHTVRLMPPAYVKPYVKRQKNDTADAEAICEAVTRATMRFVPTKTPEQQSCLMLHRTRHLFIRQQTAVINSIRAHLAEFGIVAPVGRKGVTELLHVVADPSDKRVPEVTRACLAALGAQLLSLKEQILEFDRMIMAWHRSNQTSKRLHYIPGVGPMLATALVASVVDPRTFRSGRNFSAWIGLVPKQHSSGGKDRLGSISKQGDRYLRSLFVAGALAVIRYAKIHGTGHRPWLTTLLARRPTKVAAIALANKIARMAWAMMAKGERYKQPVALAA

SEQ ID NO: 431203 - protein, 333 aa, unidentified
MKSDTVHIGVDVSKEKLDIYVPAQGGRCAVTKEVDNNIAGFRELRELARKAKATVCVEPTGGYELELIAFMHKFGVAVAYADALRVRQFARAEGCLSKNDAIDAALISRFADKIGVRLLEAGDVEAVELKRKVKFRQAMLDSRTAIVCRLETETDADVRAMLKAQVRHLDRLIARIERSCLETVSRNEAMRERLRRFTEVGGVGDLTAIAILSGLPEIGSLSDARLNRLVGLAPEQDQSGKRNGARQIWGGRRDVRNALYMAALASIMWNSILGSYYRKKRAEGHPHKWAIVPTMRKLLSLLNRIARDPSFKPAPEPESTKRDARAGRKKKTA

SEQ ID NO: 431204 - protein, 482 aa, unidentified
MADRKKSTFQRLTNGRLNRKQRRELERKLSAEDPGLEIVNRNVAGIDVGNESHFVAVPPGRDAQPVQEFGSWTADLERMADWLKACGIETVVMQSTGVYWIALYDVLEARDFKICLANARHTKNLPGRKSDVQESQWLLKLHTYGLLRNSFRPPDEIRALRSLWRLRDRHVKDAARAVQHMQKSMVTMNIQLSNAISDITGVTGQAIIRAILAGERNPEKLAKLRDRRIQATEEEVARSLEGNWREDMLFELRQAVEAFDFIQKQMAGCDQRLQTLLAELPAREVEAPGVATEAAGKPARKKRADRKQKNAPRFDLHTELVRVCGVDLTSIDGIDVMTAQTIVAELGTDFSRWQDEAHFASWLGLSPSRDISGGKVLKQGTLKVKNRVATALRTAANTLLHSDSYLGARFRSLRVRRGAPKAIKAMARYLACLIHRMFTRGQAWVDRGAQEFENRRTQRELSALQRKAAAHGFKLVNLQVLA

SEQ ID NO: 431205 - protein, 436 aa, unidentified
MSMTFARLLDPAFEDDDDPFRFYDPSGEPLEDRLYLPCGIDPHSKVCGVVFVHPLPHRQDILAQRVIPNNDLQGVTWLIETGLRLAPRFGAHPIYVFETTGPFWRPYRHFLHRAGLATATVSARQSKSARSTSTRKTKNDLKDAYNIAKVFKQGESHATRIPPEPIASLREYTRLHLFFVEYSVAIQNRMYNIKYQIHPGFDAHFSKPVLSTTLALMKEELVHPEKLRACELSHLTQVIQRASHGRLGESLAQELFESALTTFTIPYTPNALSFNLKLLAEAYEHIHQAILPQLKERIEGCLRELPFEHHLDEIPYFGPIVIGTFLGELGHPGWFRTVDSVVAWFGFDPAVSESANKPAGTTHLTKRGTKYGRRIMWLVARNWAHYTPQGRSIFRKEFYRNKLSYDGAICVLAAKLVRIAFAMVRDGSHFDINKAF

SEQ ID NO: 431206 - protein, 483 aa, unidentified
MAKRKMSTFERLQKMNRKQRRELGRRLNSENSGLEVVHPNAAGIDIGNESHFVAIPPDRDTTPIREFGSWTADLHEMASWLKAHGIQTVAMQSTGVYWIAVQEVLEQAGLEVYLVNARGTKNLPGRKSDVQECEWLRKLHTYGLLRNSFRPPEEIRTVRTIWRQRDRWVKEAGRSVQHMQKALTTMNVQLANAISDITGTTGQAILRAIVAGQRDPWELAKLRDIRIAASQDEIANSLHGNWKEDVLFELRQVMEAYDFYHKQIADCDQELKRYMAAVPTREITEKQNLPTDASPLPLKKAHRSKPKSTNNHKKKPSFDLVPELQRTMGVDLTRIDGIDVITAQVIFSEIGPDFSAFPNENHFASWITLAPQHDISGGKVLRHVHATGRQRVANALRMAAQSLWRSNSYLGARYHRLRMRLEGPKAVKAMARYLACLVYRIVTKGQAYVDRGAAHYESKRQEKELIALQRTAANLGLKLVPTA

SEQ ID NO: 431207 - protein, 358 aa, unidentified
MEQEVLSIALGVDISKDSLSVCLCFLGLDLTKGYEPGGDLPNNKQGFNQLDKWLVKHGVDKSLLNVVLEATGVYHESFAYHMHTEGYRVCIMQSGRVKRYAQSLDQRSKTDALDSRMLSMLGSERKLTSWTPPSESMQSLRFLSRERADLIKERTVEKNRSHAKDIAHFKSSKSTSRYKKRMKLLNIQISEIEDEMESLISLDKQLKKKITYLTSIPGVSTTTATIIIAETCGFALFTNAKQLVSYCGFDVVLKESGSYKGQTRISKKGNKHIRAALYMPALTALRLNPTLKTFYERLKPKKAKPIVAVVAVQRKLLVLMYSLWKTEMFYDPEHEQKKAARAEALTAQDRNKNELVTS

SEQ ID NO: 431208 - protein, 427 aa, unidentified
MSERKSLELRVSVDVGSRRHSVAVGLSDGQVLEEFEIRHRCEGFQEFFSRIEKHQEAQGCKVAVAMEGYNGYARPLDSLVRQRGYRLYNINNLKLARFKEIFPGAAKKDRIDARKGLELFQLRDHLPLAKDVLQEVTGSPQENEILKRLTRRRRRLVNERVRVVNNLQTDLQAVCPGLLEITTEASNQWFLNFVISGDTILQLARLRKSTLLKIPAVGRKYASLIQQWQKRAHFSEEAQWVSEMIQEDARRCLELDERIKTLETKIKEVAKSSKIANTLLSIPGFGAVCTSELAGEIGTVERFSKEGSLALYLGMSMLDNSSGKYQGTKQPKHVNTRAKAAMMTAVDRHRKYVPESQKYYEKKRTEGKTHNQAIRALGRHLCRIIYQMLKEQREYRVRSEKGDTQGRVDSRSCVKTKIRRPKISAHS

SEQ ID NO: 431209 - protein, 413 aa, unidentified
MVRSGGGWLEIFCGIDWSEAAHDVAVVDETGRLLARRRIADDAAGFTALTELLAGYAGRPERVDVAIETGRGLLVAALRAAGHRVFAINPKAVDRYRDRHGVAGAKSDPGDARVLADILRTDRDRHRPLPADSDLAAAVGVLARAHQDAVWARVQDANRLRSLLREFFPAALTAFADLTTNTALAVLAAAPTPTAAARLSRANLTDLLRVAGRGTRPTEAVRLAEIFTVDQLRQPPVVEAAMGQAVRAIVRTLTAANQSISDLEAALAAAFDQHPDGEILRSLPGLGPILAARVLSEFGDDPTRFPDPASRRAYAGTAPITRASGRSRVVLARHVRNKRLADACYLWAFAALNRSPGARAYYDTRRAAGDRHNAALRRLASKLLGQLHHCLTTSRPYDEALAWPQPDTTPAAA

SEQ ID NO: 431210 - protein, 356 aa, unidentified
MSEGSWVGLDVHARSVVAGVIDRGSGEVRSLRLPPGCDQMVAWLQTLPAPVKVVYEAGPTGYRLARACAEAGIHCVVAAPSRIPPTADRVKTDRRDAERLARLLRLGEITAVRVPDLDEEAARDLVRAREDARGDLMRARHRLSKLLLRHGLVYDATAWTRTHDAWLRRQRFPSGPLAIVFDECYGRMLDAKNRRDALDKAITELAATPPYADVVERLVCLRGVSTLTAFALTVELGDWRRFRPESLGPFLGLTPSENSSGERRRQGAITKAGNSHVRRLLIEAAWHHRPPSRRSVTLQRRRDGKPLAVQAQAERSGRRLHQRWHALEARGKPRTIIVVAVARELAGHCWALATME

SEQ ID NO: 431211 - protein, 392 aa, unidentified
MLTSTMVNSSLIGKAGVGEASVASRADTSWRREIDRVQVSKAVTERDPRRPRGTSPNSRLNRRLPTRTASSHLQVREITMSESVYVGIDVAKETFHVATCPNILKTCLPNTPEGHRQLCQTLKNQTIALIVLEATGGYERPIAAELLNASLPVVVVNPRQVRDFANGMGQYAKTDPIDAQLLATFAQIVKPASKTHSTPQTDELSEFVRRRRQLNDLRTQESNRLLMIHHPKVKKSIQKMVKTLDFQINEIDRLIREYIDTNDDFKNKDRILQSTPGVGPQTSAMLIANLPELGQLNRQEIAALVGLAPWDRSSGKYDGKAHIWGGRKDVRSVLYMAAFTACRFNPAIRELALRLKQNGKAYKVVLTACMRKLLIILNTMIRNQTLWTPKIS

SEQ ID NO: 431212 - protein, 346 aa, unidentified
MQSVTRVGIDLAKMFIQVHAVDAVGKLVCNKQLSRDKFIAWCNQLPAGCLVAMEACSGSHAWARKLIALGLDAKIIAANHVTPYRLEGKGGKNDANDAAAICEAASRPSMRFVPVKTLSQQGMLCVHRYREGVKEERTANINRIRGLLAEFGIIAPQSPNKLRERLAEIIEDADNDLCGIARMVIQEAFSHWDEIDKQLEWCAQRISAHVKENQQAQAAVQLMGVGPVTASAAVVTVGDFKQFKNGAQFGAWLGLTPRQNSSGGKTKLGRITKRGDVYLRMLLIQAAKAAVMTAHKRDDPISRWLLQLREKSGWQKAAVAMANKNARILWAVMTKGCDFDPRYVSV

SEQ ID NO: 431213 - protein, 348 aa, unidentified
MNILAMDLGKSKTVICYYDSENGKHKYGKVRTTPQRIHDVLAEHQPDRVVFEICSAAGWVYDICTALKLEAQVANPNTQAWRWKNVRNKNDKLDALKLAQLSAMNQLPTVHIPRPAIRRKRSLIQYRQTLVGRVVQIKNSIRAISDKEGYSMLSGKAGWSKKSIEILNEMTKPLERCGVEDLWRGQLYVELQMLSGAEKLLSEVTSKLDAMGETDSQIKLLRTACGIGPRLAEAVAAFVDEPGRFKSGKQVGSYAGLTPRQYQSGAMNHQGKISGQGNKVLRSLLVEVSWLGLRHNKWMNQTYRRILRGSESRKKIAITAVARKLLVRCWAMLRDGKCWREEGVKGAA

SEQ ID NO: 431214 - protein, 442 aa, unidentified
MEVIYERVAGLDVHKDTVVACLRTHLGRTAERECRSFGTTTDELLALRDWLAAAGCQLAAMEATGVYWMPIYKILADGDLTLLVANAAHIKGVSGRKTDMNDAMWIADLAACGLIKASFVPEEGVHEMRTLMRTRKQLVREQTSHAQRIQKTLTEANIRLDSVISDIMGLNGRRMIEAMIGGLRDPRKLAALADRRLKATPKQLYDALHGRLTDHHRFLLKLHLTQWDALDLSVQEIDREVDARLTQMQASRPADDPELAVADEHVKDEEVTADKARFPELIDLMLTIPGVAKVSALTILSEIGPDMSRFPTAGHLVAWAGMCPGQNESAGKKRGSRLRKGAPWLKTMLVQCAWAATRAKTSYYRAQFYRLRARRGPQKAICAVAASILAAIYHMIKNGTPHHDLGVDYFERRAPETKAKRLTAQLKKLGYQVTLTPIPKAA

SEQ ID NO: 431215 - protein, 327 aa, unidentified
MTVPDAVPSGAPTPVECWVGIDVAKTHLDVAIWPTRERLRVTRDEAGLVALIAWLRPRAPALLVLEATGGLETLVAGTLIDAQLPTAVINPRQARDFARALGYLAKTDVLDAEVLARFGQAIRPDPRPWKDEEAQALTALIQRRRQVVGMLTAEKNRLAIAHRHVRPDIQTTLDWLESRLKDLDDDLQRRLRVSPVWREQDNLPQSVPGVGPVTSVTLLAALPELGTLDRRQISALVGVCPFNRDSGQSRGRRMIFGGRAAVRTVLYMATVSASRCNPVIKVFYQRLRAAGKPAKVALTACMRKLLTILNAMLKAKTSWQPLAECRS

SEQ ID NO: 431216 - protein, 426 aa, unidentified
MFQRDYNRQVAKRQRIRKATLIVGVDIGKAFNAVGFMNKEGNVLGSCAKLYNNREGFEQFVDMIEVLKTKHHFRDVLIGMEPRGHYWRKLAYFAKDHGYEVRFVRTTALKHHREIDESSSAKSDRRDALTIANITREGEYIDTVIEDGPLRQLRTLSKARERLLRYSVSAKNSLHAALDDYFPELHEIFWSMGSRSLWAILEQCPFPQDVMLMDVSTLQELIARSSRKKAGSAHKAEKLTEAAQKSIGVKQIGNADRYRVQMCLEEVKRTVLSLKNIDKQLKCLLKETTVASYLMSIPGIGPLSAAVFLGELGDPTHFHNARQIVKYAGYDPQESDSGSHIGRKFISKKGRWLLRKYLFFMSMRVVVLSNYFQEYYLRKLETKNRVGQQPRRKEMLCAVAIKLIKVIFALLRDKREFVDLVPAAAA

SEQ ID NO: 431217 - protein, 269 aa, unidentified
MTFRPHALHLKAELFVKSSRVHVRDDGFTRCNFHLKFFIMVSRGIDISKSSFVAAYPSTNGNPTKTFPNTTARMRELIGTLAVAEHHCVMEATSNYGCCCTCYIRTVLPSVLPPPKKQIKHFSRMMMPVTKTDEKDAYMIAMYGEKMNPPIYKMPSQATIRILTTEGFTYFDNAKQLSRFIGICPTYQQSRTSVTLREHINRNDDERLRSLLYIAFWTALRYNSRECYIRLKANEKPFKVALIAVTNKLVRPVLTITTINSIYRWICPG

SEQ ID NO: 431218 - protein, 346 aa, unidentified
MEHYVGIDVSLELLSVCVVDGRGKIVKEAKVASEPEALVYFLKELGFPVNRIGFEAGPLSQWLHAGLTQAGFEAVLLETRHVKAALSAMPVKTDRKDAFGLAQLLRMGWFQQVHAKSIGSQEIRALLVARKQLLGRLLDVELSIRGILRGFGLKVGQVTRKTFEARIRELVTGHTTLERIAEAMLSARATLKAQYEKLHKAVLAIVREDAVCRRLITVPGVGPVVAVTFKSAVDDPSRIAKSKAVGALFGLTPRKYQSGEKDVTGGITRTGDEMVRTALYEAANVLLSRITRFSKLKRWGMDVAKRRGSKRAKVALARKIGVILHRMWIDGTTYRWAEAKPMAAQG

SEQ ID NO: 431219 - protein, 316 aa, unidentified
MALLLIFVGIDVSKDALDVHLLPGNASWRVDNTEQGWKQLMAWLERHGEPAQITIALEASGGFEKGCARKFAEAGYTVSILDPVRVRRFAEAAGQFAKTDAIDARVIARFAQTFTTTPAVFDQATERLAETVRWRRQLIEQKTALDNQLRGLTSTSLRRATRGLLTRLETLIERISDEIAKQIQANPAWTAVTKPIHSIKGVGPVTVATLLAELPELGRLDRRKIAALVGVCPYTRQSGKSDAKRMIRGGRLGLRNALYMAALTAMRYDPTLKAFSERLRAAGKPGKVAVVAVIHKMLTILNARVRDALAAIPTNT

SEQ ID NO: 431220 - protein, 319 aa, unidentified
MEAVVERCAGLDVHQGSVVACVLLGAAGRKPRKEVRTFATATADLVALRDWLEDLGVTHVGMESTGVYWKPVYAILEGHFALIVGNAHHIKAVPGRKTDVKDAEWIADLIRHGLVRASFVPPPAIRDLRDLVRLRRSLSEGLTTERNRTLKLLETANIKRASVASEVFGVSGLAMLRALVENAASPEQMADLAKGKLRRKLTPLARALEGRLTEHHRFVLDLHLRRMAAIEADLAALDARIEAQIEPFQRQRALLRQIPGVDDRVAATIIAEIGIDMSVFGNAMRLASWAGVCPGNYESAGKQRRGTTRRATSTSRRLW

SEQ ID NO: 431221 - protein, 410 aa, unidentified
MEVLHRRCAGLDVHKKTVVACVRLAEENKVVTEVRTFATTTAGLLALSAWLSENGCTHVAMEATGVYWKPVWHVLSDGEFELVLANAAHVKNVPGRKTDVSDAAWLAELLAHGLIRGSFVPDGQTQELRTLLRTRKQLVREKTRHTQRIHKTLEDANIKLESELSDVLGKSGRAMLEAMVAGETDPVRLAALAHSGVKASQATLQEALRGRVTQHHRFLLRLHLGQVDAIDTAIVTIDGEIEAHLAPFRIGVELVSTIPGVSGLSAEVIVSEIGLDMSRFPTDGHLLSWACLSPRNDESAGKRRSTRMRKGSPWLKTTLIQCAWAAKRKKGSYLQAQFLRLKSRRGPQKAICAVAASILTAAYHMSKDGTLYQDLGADHFKRRSKTTQTQRLVKRLQHLGYAVDIKPLAA

SEQ ID NO: 431222 - protein, 337 aa, unidentified
MKYFAGLDVSMEETHVCVIDREGKVILEVRTPTVPKAIAAALAKGPALERVLFETGRMAPTLFHGLTALGLPVVCVESRQAYQALRSLAAHKTDRNDARGLAHLARTGFFKPVHVKSLPSHAVRALIIARKKLVGQRVTLENQIRGLAVAFGVRLPRGLSPGFAENGMAVGRGIPGLDGAMRGLLAARDAILKAIVAIDADMKTLERSSAACRRLMTIPGVGRLTALAFAAAIDDPGRFRRSRDVGAYLGLVPRRYQSGEIDYTGSISKCGDGRLRTLLYEAANVMLTRYRGSLALKTWALDIARRSTMRKARVALARRLAVIMFAILKHGTEFEPA

SEQ ID NO: 431223 - protein, 411 aa, unidentified
MGRVVIGMDPHKSSATIEIINDREKILDTGRYSTDTAGYRAMLAAGRKHRDRVWAVEGCNGIGRHLAQRLVADGEPVVDVPAKLSARARVFSTGQGRKTDPVDAHSVALVGLRTQGLRTIAADDATVALRLLIDRREQLGVTRVQVINRLHRLLLELLPGGAKKHLSVAQAKALLGKVRPRDIAGKTRRRLAAELIVDLASLDAKIKAADKELHQLITATGSTLRDLHGIGPANAARLLGDVADITRFADKARFASWNGTAPLDASSGDQHRHRLSRAGNRRINRVLHIMAVVQLRTDTEGRRYYDRKVAAGKTNMEAMRCLKRRLSDIVYKQMRDDAQQIATGPGGHVGAATDSSAVNSNPDVDASEKSCPGPVNTNATRVKSSRPDRSSARSRRPKTAPARSRRQAHSA

SEQ ID NO: 431224 - protein, 317 aa, unidentified
MTQTITTTAGIDTSKLKLDIAVHDRAERWQVANALPGWRTLAANLAKAGVTRIGIEATGGYERGVVEHLRAADFIVLVLQPIQVKAYARMHLRRAKNDALDAALIAACAAAIEQPSIVPDPRLAELAGYLTFLDQIEEDIARFKTRLEHIDEPRLRCLVTNDVARLKARRAAQMLLIERQLRAHHDLARRLDLVLSIPGLAVRTVLAIIIRMPELGQVSREQAAALAGLAPFDDDSGKHKGERHIAGGRGRLRRSLYAAALPAAFRWNKALVALYARLTASGKPHNVALIACARKLLIYANTVVQRGTPWTERAVAP

SEQ ID NO: 431225 - protein, 350 aa, unidentified
MKVTYQTCCGVDVHKSFLVATIVKTTGGIEPSYQKKRFSTFNNSILEFKQWLLDNDCHDVCMESTGKYWVPVFNLLEDEINVVIANPKWVKAVKGNKDDTKDSKWIGDLFRLGLVKGSYIPCKIVRILREYTRYRYKLVSCRSSEKNRYQNALTVCNVALDSVVSDIFGKSSTSIIDYLLEQSGASINHEEIASKLLRSLKSKEDAVIESVEGYQMTDAQKYRMRLVRAHIDYITAEINDVDKMIENMISSNSDSENAVQLLCTIPGVKHDSAITIISEIGTDMSQFSSSKRLCCWAVLTPGSNESAGKKKSVRITRAGVYLKPALVQCAHAAVKSDKSPYYKTIPMKKP

SEQ ID NO: 431226 - protein, 316 aa, unidentified
MEAIFENCCGIDVHKKTLTACIMIGREGKITKKEIRTYSTMTEDIEGLRDWLKSEGVTHVAMESTGIYWRPVYNILEEGFEIMLVNARHIKNVPGRKTDVADSEWLCRLLRNGLLNGSFIPPIYIRQLRDLTRYRSKLNNNIAAEKNRLQKYLEDANIKLSSVATDTLGVSGRLMIRDIIKGNTDAVGLSELAKGRLKNKKEELKKSFNSRVTEHHRMLIEMSLKHIEYIEGMMVKLEGEMDELIKKQDLANDLELLDTIPGVDKIGATAIVAEIGADMSKFPTDAHISSWAGMSPGNNESAGKKKAQVPRMETYG

SEQ ID NO: 431227 - protein, 351 aa, unidentified
MKILALDLGKFKTVGCAYDGASGEHRFKTSGTTRTGLAQLVKEVKPDRVVIEVCNIAGWVCDLLRGLGVEVQVANTSEDAWRWRKVKKKNDRCDALKIAQLSAVNQLREVHIPNIEVRQWRALIAFRQQLVRRRGKVKNHIRDLLVSEGQILPRGAKCWTQLGQAHLEALSKDFSELGMDELWRGQLKVELRQLQELQREIDQLEEKLDAIAKTEPRLALLRTIPGVGPRLSEAIVALLDQPGRFRKGREVSAYLGMVPKELDSGETVRRGRITKHGSRLVRSLLVEVAWAGLRYNPWVRETFQRISGGKKSRKKIAIVAVGRRLLVRCWAMLRDGTSWRPPVTTHRFAKT

SEQ ID NO: 431228 - protein, 349 aa, unidentified
MYYVGVDYHKRYSVATVLDSAGEMLARKRLDNRLEAFRELLGSYDKAEVEAVVEATRSWGIPVDMLEQLASRVILANPGEVKLIAKGRIKTDKVDSLALAKLLRVGWVPEAYLRPRTNREHQLILRVRCFLVQLRTRVKNRIHDLIDRQDEPIRETAASFSDLFGKKGMVWLKGLDLSHPCGTLLCRLLAAYDALDAQVRQSDRLVAELFAADDDCQRLAKTPGIGTFFAVLIKTEVGSIERFANSARFCSYAGVVPSTESSGGKVWHGRIIKQSNRWLRWTLVEAVIPATRADAGLRAHYEYYRRTKGSKVAKVVTARRLGCIVYRVLKEKQPFYERPVQSRGYRQAG

SEQ ID NO: 431229 - protein, 391 aa, unidentified
MNNAYGSVAYGGMDVHYKFSNVTWRDGVGEVVRRERLDHRDRARMRARLAGWPSGTPVVLEASFGWGWISDELERAGLEPHLSNCYKVEQMRKARGLAKTNEKDADLLSLLPAEATRWWEVWRAPPSVRDGREWMRHRAGLVAVQTETKNRIHALFHRHGVFYEETTDLFGGRGRRFLQTLARDGRHAGGVLPPGALETLRGQMRMLTHLRAELATVAWHLHGRLVRDPLVRRLDGIPGFGLILSHTLAAEIGDIGRFRNHRRLASYACLAPWSKDTGEADRTRAPLGRHLGDRGNRTLKWAFIEAAHGAVRHGGRWRAMFDRATRGGKKDRGRGYIQVARELVKVVHVVWSRGVEYCETPPPRPGSGRPRRRRRTSRPGTGQPSRAMVPA

SEQ ID NO: 431230 - protein, 416 aa, unidentified
MKKRTYKTKKVNQINWGQLKERIAGEAVALAIDIAKVKQYAKLCNENNDVSELFRWKHPEETPAVLEAIKSLSCPVVVIVESTSTYGDAIRYQFSQLGFDIHQASAKRVHDAKEVYDGVPSLHDAKAATIIARFYQDGLTTPWRALSESERRLNALRREFDMHQGQYQRNQGRLEAFLSRHWPEVTYLLDLNSVALEHLLIKYGSVRQIASHAKEAALEMKKSSRSLLNPQKINQVIESAKTTLGVPCIEAERLNFQALAREMSHSRVQGKKAKKALEAEIDSDSELFEMGRLIGRVTTAVLLSFHLDPRNFSCAQAFQKAMGLNLKEKSSGRYVGQLKLTKRGSAKARQYLYFAALRLLQKDPVVKEWYLKKMNPKAKNKTVIALMRKLSKALWHIARGQAFDPTKLLSVPKKAA

SEQ ID NO: 431231 - protein, 411 aa, unidentified
MHNRQNYLYVGVDLHKEHHTAVIINCWQEKLGEIQFENKPSAFSKFLLEVETYVSAGVSVVFGLEDVGGYGRALAKYLVDHEQVVKEVNPALSFLERKSHVTTQKSDSWDAECVARILINKLNQLPDAKPNDLFWSIQQLVSRRNALVKAQSALKNQLHIQLNHHYPSYKKFFSELDGKTALAFWQQYPSPSCLEGANIKQLTAFLLDVSNNTCSVKKASEILKLVKEDGQTMKEYQETRDFLVRSIVRDIEFKKKEMKYIERELNQLVKLLDYQLETMPGIELVTASALIAEIGDVRRFPNANKLARFAGIAPVYFGSGGKGKTHKSKQGNRALHALFYNLAVQQVQVAKGSKLPRNPVFHAYYQKKLKEGKTKGQALVCIMRRLVNIVYGMMKYKTAYELPIVEEKEVV

SEQ ID NO: 431232 - protein, 343 aa, unidentified
MQTITTVGLDIAKSVFQVHCVDANGDVVLRRQLKRRYVLTFFQKLPPCLVGIEACASSHHWSRELQALGHTVRLMPPAYVKPYVKRHKNDATDAEAICEAVTRPNMRFVPTKTPEQQSCLTLHRTRHLFIRQQTAIINSIRAYLAEFGIVAPVGRNGVEQLLEVVADAKDTRLPEIARACVAALGTQLLALKAQILAFDRRIMAWHRSNETSKRLDEVPGVGPMLATAVVASIADPKAFRSGRDFSAWIGLVPKQNSSGGKDKLGSISKQGDRYLRSLFMTGALAVIRYAKIHGTKHRPWLTALLARRPTKVAAIALANKIARIVWAMMTRGERYKKPVALAA

SEQ ID NO: 431233 - protein, 413 aa, unidentified
MVRSGGGWLEIFCGIDWSEAAHDVAVVDETGRLLARRRIADDAAGFTALTELLAGYAGRPERVDVAIETGRGLLVAALRAAGHRVFAINPKAVDRYRDRHGMAGAKSDPGDARVLADILRTDRDRHRPLPADSDLAAAVGVLARAHQDAVWARVQDANRLRSLLREFFPAALTAFADLTTNTALAVLAAAPTPTAAARLSRANLTDLLRVAGRGTRPTEAARLAEIFTVDQLRQPPVVEAAMGQAVRAIVRTLTAANQSISDLEAALAAAFDQHPDGEILRSLPGLGPILAARVLSEFGDDPTRFPDPASRRAYAGTAPITRASGRSRVVLARHVRNKRLADACYLWAVAALNRSPGARAYYDTRRAAGDRHNAALRRLASKLLGQLHHCLTTSRPYDEALAWPQPDTTPAAA

SEQ ID NO: 431234 - protein, 343 aa, unidentified
MQVTTIGIDLAKNVFQVHGVDANGKVVFNRPLQRSRVLAFFAKLPPCLIGMEACASAHYWARELKKLGHEVRLMPARDVKAYVRRGKNDSVDAAASCEAVQRPTVRTVPVKTPEQQAQLMQHRVRDLLVRQRTQAINALRSHMAELGIVAAQGYDGLKELLAIIADAGDGRLPENARASLSGLVQQIASCQAEIGALEKRLVTQHRKCADSQRLETIPSIGVIGATAIVATVPDASIFKTGRDFASWIGIVSRQNSTGGKQRLGPISKQGDRYLRRILIVGAFAVLRQARAHPEKYPWVAQLLAHKPAKVAAVAVANKTARIAWAVLTKKENYRAHPTTAAAA

SEQ ID NO: 431235 - protein, 400 aa, unidentified
MSKRLDQAWCGIDAGKGHHWAAVVDDTGATLWSKKIDNDESAILAALGEILDLADEVRWAVDISGTASALLLALLAAHGQHAVYVPGRTVNRMAGAYRGEAKTDARDAYVIAETARHRQDFASIGVPAQLGADLALLTAHRSDLVADRVRMINRLRDVLSGIFPALERAFDYSDHKGALILLTGYQIPADIRRRGRARLTTWLAKRGVRGADKVAATALEAAQAQYTSLPGEDVAAQIVVDLAVEILALDDRLKRLDRQIREIFRTHPQAEIIESLPGMGPKLGAEFVVAAGDLSAYADAGHLSSAAGLVPVPRDSGRRTGNLHRPTRYSRRLRRVFYLSAQTSIIREGPNRDFYLKKRGEGCKHVQAVIALARRRASVLWALLRDNRAFTPAPPVTHAT

SEQ ID NO: 431236 - protein, 351 aa, unidentified
MTCKKDVAIVRTIGIDTGKNTLHMIGLNEKGAIVLREKVSRNRIAARLVNIPPCLIGIEAGMATHYMSRDLLALGHEVKQVPPAYAKPFRQGHKNDFRDAHAVAEAVQRPSTRCVPIKTDDQLDLQGLHRVRSRLIGDRTAVINQVRGFLLEHGIAVRQGPRSLRQQLPQILATRTDVLSPRMLRIIGDIVDDWRYLDDRIERVTDEIEGLARTDVNCGQLISVPGIGPIIASATVAAVGNGTAFAKGRDFAAWLGLVPKQMSTGDRTILGRITKRGNRYLRMLFVQGARAILLRPKSWAKHSFGPWLTAAARRLHRNILTIALANKLARIALTVLIQGRSYETRIASTAA

SEQ ID NO: 431237 - protein, 464 aa, unidentified
MQRLRLGVDIACRAPHQASLADEKGVFLWSGRRFRTNAEELEALWRSLPENSEVIVVMEPTRNAWVALASWFRRQGATVVMVPSEQSADLRDYYAKHTKSDRLDSRLLARIPLLHPEGLYAHEHLGPAEPLRRATRLRSSLVKRRSKVIGRIDALLEVLGPDWHRAFDRDLANLTPLRFCAAGYTDPHLCRRIGRARLARFLHRHSHGHWGERQADALLGAATETLAVWGDELDYGELADDIAVEARLALALSEEIKELEQRIAVMLRALDPEGILRSVPGVGPVNAAQILGRLGDPGRFRSLAGARSFSGLVPSLSASGSNGRHGGPTKSGDALLREALFMSADVARKVDPTLAQRYHRLMTVAGKHHNSALCHLSAALLTRIVSCWKSQEPYVIRDTDGTVITPEEGRRIVASRYTVSAVLREKRRTSRKNEGTGRRSKESPGAPSTDPSPSDATRNPAKVA

SEQ ID NO: 431238 - protein, 456 aa, unidentified
MLRDAIGIDPDSQGCQCALVKLGECQAQQRGYPATEEGMERFIRWVKEKEDVIVAIEGSNGQSKPIEKALRYAEIVFYSFKPSDVGKFRRVVLGQNKNNKKDAESTARYAMALEAQGKLDKWKRVWSPDEELQGLTRSYSQKTTESTRSINRLWKLLREASVDLYLALGGEHPDIDINENILQNEGILALLIEKPDIFEWKTLSETDFLSVMGNFNYKGRKKLIEELQKVSRSFRPVSPAISLMIKNTTEQIILLKRQLKEIKKMIEKQTKDNKAVKTLEQHRGIGTMTAATLYAEIIDIRRFVKDDNLASYSGLCKREYKTGKNEKEIPNYFFNRRLKNVFMTAARNYVLFNTGSHLTGYYRNNVKGGMKKTDARKRVARALVRVFFKELYSLVEQDNNSDKIEDKKMGKENDMANGLSRSDKYHSNISFPSPIKNNTEGREKVKREKTEKLVMK

SEQ ID NO: 431239 - protein, 430 aa, unidentified
MTTVHPTASNDEPAWFVGFDWGSEKHRVALFDRTGNLIGRRDVAHSASAYAELGDWLLRTTQASPAEIAVAIETTHGPVVDALIDRGFRVYAINPKQLDRFRDRYSVAGAKDDTRDADTLARSLRTDPEAFRALSPDNPLIVQLREASRTAAELTRDLGRLTNQLRDLLWRYYPQMLALDDNLAAPWLLELWQHAPTPAKGARLHKETIARILKTHRIRRLDADQVRTVLREPPLPSAPGVTEAATGHIRLLLPRIRLLNSQIKAVHTEIDVLCQQLAGPQTIEPGESVPGQSIEQRDVAILHSVPGVGRIVGATLLAEASEPLRRRDYHAIRTLAGQAPVTKRSGKSCFVQRRLACNKRLANAMYHWARVAVMCDPRSKQRYAALRARGCSHGRTLRSVADRLLKLLCTLLQRQVSFDPNHNAKQVAAG

SEQ ID NO: 431240 - protein, 277 aa, unidentified
MTNNPANTPTESLSRLFAGVDVGADELVLVIRKNGKPFDPQKYANTRSDRARLVKKLIKLPGIKVCLEATGIYHFDLAIALHDAGIPVMVVNPKASHNFAKVLMKNSKTDVVDADTLAEYVERMDFVAWTRPSNQTLALRGFARRIDALTGQKAAAKNHLHALSATQETPKALLRDAKLAISQLEKRIDALAAEAMILIDAHPELKRVFELLTGIKGIAQTSAIALMGELLLLPPNLSHREWVKFAGLDPKAFESGKSVHKKMRLSKAGNRHIRSAL

SEQ ID NO: 431241 - protein, 373 aa, unidentified
MNYNTVYVGMDVHKENFTLCSFTIEEDKASHIQKTSSDYKQVLKYLEFLRNIYGDDANFICGYEAGCLGFTLYHQLTNHNVRCVILAPTTMMEQRGKKKIKTDKRDASLIARCLAQHNYSPVHIPTAQDEETKEFLRMRQDHKLAFKRVKQQILSFCLRHGYRYEDGSHYWTVRHLNWLRSLKIEDLNQEILDEYLLTYDYLYNKIERLDERIEELAARNEYKENVKKLSCFLGVKTQTALSVIVEVGDFQRFASAEKFASYLGLVPGEDSSGNDQTRLGITKAGNRHVRTLLVETAQSYSRGVIGHKSKELKARQAGNTLQVIAYADKANERLRRKYYKMVLGQNKKHNVAKTAIARELACFMWGMMTDRTV

SEQ ID NO: 431242 - protein, 402 aa, unidentified
MRQFNAEQIQIETASGLGTVRQAEAMRYYPAYIGLDVHKENIVVAVARAGRRAPVIWGEIANKPKAIAKLIKRLNEEFAGEVLLFCYEAGPCGYGVYRQLLDLDHDCQVVAPSLIPKKPGEHIKTDRRDASKLARSVRSGDLTGVWVPDQEQEAMRDLTRARDDLKAQERKARQQLNAYVLRHGHGWPANRSRWTQTHYNWLESLKFAHDWQQVVLQEYIDAVKAASRRVADITAQMERVLPEWSLAPVVDSLVALRGIDKLAAMVLLAELGDLSRFDSPRQLMAYLGLVPREHTSGPRRRQGGITSAGNGHARRMLVESAWSYRFPARQRAHLKRKATRASDEGKIIAWKAQKRLCGRYRTLTQAGKDTKLVCVAIARELIGFVWDIACREMAKVNQAAAR

SEQ ID NO: 431243 - protein, 364 aa, unidentified
MAKQVRRADFLLEPEQLREPFELVSASLGAAEVLMKRELIMSSPSPAINIGIDVSKEKLDVAVHESDTHWTSKHEFTEFPQLIKQLRSLMPTRIIVEASGGLEHLLVSYLATAGLPVIVINPRQVRDFARATGQLAKTDRLDAFVLARLGATLQPAVRQLKSAETQELEALVNRRAQLVEMLTAERLRLQQAQQQRRQAIITDLKAHISWLQKRLEQCEDDLSQLLRSSPLWRATDQRLQSVPGVGPITSLVLIAELPELGHFPNKQLVALCGLAPHARDSGKWHGKRTTRGGRARVRTALYMATLVATKHNLVIKTFYCRLLRAGKEKKVALTACMRKLLVILNAMFRNQTSWQQPSGLIPGT

SEQ ID NO: 431244 - protein, 348 aa, unidentified
MRFYTGQHRYYCGIDLHARTMYLCILDHENGKVVLHRNLRCEPQRFLRAIEPYRDDLVVGVECIFCWYWLADLCTQEDIPFVLGHALYMKAIHGGKAKSDKIDAHKIAVLLRGGAFPTAYVYPRGMRATRDLLRRRLLFVRRRSELFTHIRLVFHQLNLSAPPERLRERRNRVGLLEAIPDPVVRANVEADLALAERLDEIIRSLERTIGRQAKVDDPETLELLKTIPGVGRILALTLLYELHDVARFPKVGDFLSYARLVKSQQTSAGKVKGTSGAKIGNAHLKWAFSEAAVLFLQKNPRGQRLIGRLRSKHGKGKALSILAARLGRTSYFMLRRSTAFDMERFLKN

SEQ ID NO: 431245 - protein, 328 aa, unidentified
MIQLGIDVGKSKIDLCLRPDGPEGRRKTKVLPNGPDVAVKVLEWLTKQKISGTDVQVVMEPTGTYHEYLAYGLHEHGVRVVIASPARVRAFAHGMGILTKNDTVDADVLARYGALRQPDAWQPPSPAIRELKALLSRRDALVRDVGREQNLLEKLLSSRRSQLVEASVRKILHALNDELQAVQKLIDDHINTHPGLKRDMKYLTSVTGIGPATGSTMLAVLRGNHFSNAEQAASWVGVVPREKRSGSSVRGRSRMSKNGPPEVRAKLYMAAMTAIKHNPYLKGFYERLIGAGKAKMSALGGVMRKLVHICYGVLMKQQTYDENYVAAA

SEQ ID NO: 431246 - protein, 436 aa, unidentified
MLAVELPEVVVVDEVHEKDGFVDRVAAIDVGKDELKVCVRLPGDVPGRRRQEVRTYRARTAAILELSDWLRCEQVSLVVMEATGDYWKPPFYLLEDDFECWLLDAKQVKHLPGRPKTDREDAIWLAKVAERGMARPSFVPPKPIRRLRDLTRYRRALTQDRTRNKQRLEKVLEDAQIKLSSVVSDLYGVSGRAMIGALIGGQRDPKALAQMAKGRMRSKITVLQDALTGQFGEHHALICQMMLGTIDSLTAQIDQLSASIEQAIAPLQHQVDQLDEVSGIGLICAQDIIAEIGVDMAAFATSAQLVSWAKFCPQVKQSGGKAPRNGATGKGDPWLAAALGESVIAASRTRTFLGERYRRLSRRRGKKRALVAVGNSMLTVIWHLLSDPEARYQDLGADFYQSHVNQRRRERSLIAQLEQITGKKVALQAKPELPAA

SEQ ID NO: 431247 - protein, 452 aa, unidentified
MVSRVKTSGKQMEAIASNTAGIDIGSEEHYVAVDSDSSERPVRSFGCYTPDLEEMARWLLECGVKTVAMESTGVYWIPVYQVLEQHGLEVMLVDARHVKHVPGRKTDVCDCQWLQQLLSYGLLRGCFIPPAEVQPVREYWRQRASHIESISREILHMQKALEQMNVQLHKVLRDITGVTGMKIIRAIVSGERRPLVLAAMREPGCKKSESEIMKALSGNYREEHIFALTQALELYDVLHEKVVDCDKRVEQCLCTFASKADPATMPPKKSKRGSRRKNQPHFDLEKHLYRITGVDLTAIDGIESLTAQTVVAELGFDLSDFATEKHLCSWLALSPEHRITGGKVKTRRTRKTANRVATALRLAAQSLHSSKTALGAFFRRIKAKKGTPKAITATARKLACLIYRMLRYGMEYVDLGQREYENRYQEQEHKLLQKRAAALGYTLTPLPNGGVS

SEQ ID NO: 431248 - protein, 365 aa, unidentified
MIVIGADPHKRSHTAAAVDAASGELRSSETVAARDAGHAALLDWARALDAERVWAIEDCRHVSGGLERFLVGRGERVVRVPPKLMAGARRGGRERGKSDAIDAVAVARAALREGIETLPAVFLDEQALAIKLLLDHREDLVGESTRAQNRLRWHLHDIDPELAPPERSLRHQHVMRSLASRLARREQTMRVRLARVLVRRCAALRRELETLERELAERVREHAPTLLELPGCGPLTAAKLIAEIAGAERFQTDAKLARHAGIAPLPASSGARHRHRLDRRGNRQLNCAFHRIAVTQARIDPQARAFLERKRSEGKSNREALRSLKRHLVRRVHRLLSPAPNRPSRPSPSSPIMVTTAPPVMPCLT

SEQ ID NO: 431249 - protein, 412 aa, unidentified
MEVQYSHCAGLDVHKDTVVACVRHLANGTPRREVRTFKTMTKELLALSDWLASEGCTHIAMEATGVYWKPVWHILSDGDFTLVLANAAHVKNVPGRKTDVNDATWLADLLAHGLIRGSFVPDEQTQEMRTLLRTRKQLVRESSRHVQRLQKTLEDANIKLDSVISDVMGLSGRKMIEALIGGESDPERLAQLAHRRIKATPEMLREALRGRVTQHHRFLLRLHLQQIDAINAAIEQIDQEVDQRVEPFRTTVLLLTTIPGIDELSAGVILAEIGRDMSRFPTAGHLISWAGLCPKNDESAGKRRSTRMRKGAPWLKTTLVQCAQAAARKNASYLQAQFHRLRARRGAKKAFGALAASILTTVYHMLISGELYHDLGPAHFDRRAKASQTHRLVTRLQNLGYAVQITPLPAAA

SEQ ID NO: 431250 - protein, 471 aa, unidentified
MSTTPTRAKRHREVRIVAKRKVPLPPQLKRVNLNAAGIDIGSEEHWAAVPPGRDTEGQDVRRFGAFTGELCALADWLKQCGIQAVAMESTGVYWIPLYELLVERGFEVRLVDARQAKNVPGRKTDVLDCQWLQELHTYGLLRGAFRPVDQVCILRSYLRQRSMLVAYASHHIQHMQKALEQMNLKLSHVVSDITGLTGMGIIKAILGGERDLVKLAKLRDPRCKSSEATVARALEGHYREEHLFALRQAVELVEFYQQQTTACDRQIEACLQQFEEKSSETPVTTRRRKRRRGGIAFDACSYLYRMTGVDLTQIDSIEANTALTVISEIGLDMSRWPTEKHFGSWLGLAPGSKVSGGKRLSGRTKHSANRAAAALRLAAQSLNQSQSALGAYFRRLKARLGAPKALTAAAYKLARIVYRMLKYGAGYVDQGEAAYEERYRDRLLRNLKRRAAQLGFQLTAIELNSGQAALT

SEQ ID NO: 431251 - protein, 331 aa, unidentified
MKFRAFIGIDVSKSTIDIHLRNAGRHSVFVNDLEGFEVMVEWLMDILGQVCPEEMMFGMEHTGLYSELLISFLNDHNFPFTVLPGLEVKKSMGIRRGKSDKADSKDIAEYIYEKREKIKLFRMPSRNLEPIRKLASYRERLVKERTAFKTRLGEYQKVYGKESYEIYTESHKQIIACLDKQIKGMEAEMERLIKDDQEMLRQYQLVKSVKGIGPQTAIMMIVLTKAFTAFPDWRKFASYAGIAPFPNQSGTYMGKTRTSKLANKRIKALLTMCAGVAVQYNPEMRLYYEQRVNEGKNKMSTMNIIRNKLVSRIFAVIERGTPYVETMKYAA

SEQ ID NO: 431252 - protein, 414 aa, unidentified
MLKIVYRVCCGMDVHKSFVVACIASTNEQGVTTYKSKRFSTFTGDLRRCAVWLAANNCKDVCMESTGKYWIPIYNILERTCNIVLAHPKYVKAIRGKKTDKRDAKWIADIFKHDLVAGSFIPPADIRQLRDLFRYRRKLTNFATGEKNRAQNCLTVSNFKLDDVFSDVFGKAASAITARILKNPSEKITDVSGFRTKRMKATDEEILAAVDGEMCAEQAEKLRIIRTHMDSLELCKLNLESLILSTAEKYLPQLNLVMTAPGIQSFAAIGIISEIGVDMSVFPTSKHLCSWAGLTPQNNESAGKKKTTRISRAGAYIKPLLVQCALCAVRAKQFPEVRNRYLALKKRRGHKKAIIAIARMLLTVIYNMLKKNEPYNPELYRKDDRPPAHREVSMEEAIFILQRQGYLVTAPPTT

SEQ ID NO: 431253 - protein, 405 aa, unidentified
MGAEQVARGWAGIDVGKAHHWVCLIDEAGSTLWSSKVVNDEAAILDAIAEVLARAQQVSWAVDITGTSSALLLALLTAHGQGATYVPGRTVNQMSTAYSGEAKTDARDAYVIAETVRLRGDLTPVDVPATLVAELRLLVTHRTDLVADRVRMINRLRDVLSGYFPSLEREFDYSTSRGAVVLLTGYQTPAAIRARGRARLSTWLRARKVRSAEQIATAAVRAANAQHTTVPGQDVAASIVAEIAAALLELDQRIRVLDARIGDTFHAHPQAQIIESMPGIGTILGAELIAAAGDLSRYVDAGHLASAAGLVPVPRDSGRRTGNLHRPMRYSRKLRRVFYLSAQTSMMREGPNRDFYLKKRGQGHGHVQALIALARRRVDVLWALLRDNRVFEIAPPTRKKLPQTA

SEQ ID NO: 431254 - protein, 482 aa, unidentified
MAKRKMSTFERLRSGKMNREERKEWQQRLYAEDAGLEVVHPDAAGIDVGNASHFVAVPPDRDERPVREFGSWTADLRRMAEWLKQCGIRTVAMQSTGVYWVAMQEVLEGEGFEVYLVNARGTKNLPGRKSDVQECQWLMKLHSYGLLRNSFHPPEQIRAVRTIWRQRDRLVKEAGREVQQMQKALTTMNVQLANTISDLSGVTGQAIIRAILQGQRDPHQLAKLRDRRIAASETEIAHSLEGNWREDILFELQQVVDAYDFHQQQIAACDVQLQRYLSALPMRSRPGGGEPSRAEAPSEKSKKPRKHKLPKNQPVFDLAAELQRTMGVDMTAIDGIDVMTTQVILSELGPDLSASFPSEDHFASWLELAPRRDVSGGKVIRHISRKSNNRVANALRMAAQSLWRSHTYLGARYRHLRARLGGQKAVKAMARYLACLVYRLLTKGRAYVDRGAAHFENKRTERELLALQRKAAELGMAVVAVS

SEQ ID NO: 431255 - protein, 377 aa, unidentified
MGEHTTYVGLDVHKETIVVAVGFESGEVIDGGTIRNRPEAIAKLVEKWGTEETGYVYEAGPCGYALYRELRKLGATCVIAAPSKMERAPGDRVKTDKRDAKKLARQLRSGSIPTVWVPEPEDEALRDLTRARQTAQEQLQAAKNRVTKLLLRLDIRPSEGVKAWSRAYWDWIRSLVLSYPAQRVVLAEGLSAIQEAEARVDRLTKHVEEMAKTASRSKVIEGLLTMRGIGILTATTLVAELGDISRFESPRKLMSYTGLTPTEDSSGGRVRRGHISHVGNPHVRYVLGEMTWHHARPLTVGKKLQRQRKGQPREIVELAERADGRLHRRYLRLIHRGKSAPAAATAVARESLGFIWAIARLAQGLAVEPPRRQPRAA

SEQ ID NO: 431256 - protein, 360 aa, unidentified
MLQTVATVVGVDPHKRVLSAVALDGRGGRLGQWQGGATRRGVEELLTWAKGCAPGAAWAIEGSNLYGRRLAMALVEAGADVRDVCPTRTAERRRRRPGRGKSDSLDAEAVARERLAHPDLPRAFKVADPGPPAPAREALGVLVRARHQVVDRHRRLLNEAEALLNELPAHLAERLPGRKQIPPRLAAAARLRLTGDRLTDLRLRLLRAQAREERALAAERDALEREIAAVLDELGTTLPALFGLGPLGAAQLLVETGDPRRFRSADAFAAYTGTAPIPASSAEAHGYPIHHRLSRFGNRRLNSVLHIMAVTRLRAHSETQAFIASAISRGKSRRDALRIVKRRLARRVWLTMMGDATRDP

SEQ ID NO: 431257 - protein, 297 aa, unidentified
MSQTQNAAIAVVGIDIGKNSFHIVGHDDRGAIVLRQKWSRGQVEARFANTPPCLVGMEACVGAHHLSRKLNSLGHNARLMPAKYVRPYSRGQKNDFRDAEAIAEAVQRPTMKFVATKTADQLDLQALHRVRERLVSQRTGIINQIRAFLLERGIAVRQGQRFLRAELPRILATPPDVLSPRMVRMIEDLAGDWRRLDERVESLSNEIETIARQDAGCERLMSVPGIGPIISSAMVAAIGAGDVFTKGRDFAAWLGLVPKQISTGDRTILGKISRRGNRYLRVLFVQAAWVVLIKPKA

SEQ ID NO: 431258 - protein, 344 aa, unidentified
MDHFAGLDVSVKETSVCIVDDTGKIVREVKVASEPEALLAVLKNPFYHFRRIGLEAGPLSQWLYSALAEAELPVVCVETRHMQALLKAQINKTDRNDARGMAQMMRVGLYRPVHVKTLRSQKLRMLLTHRKLLQSKAIAIENDLRGTLRNFGLKVGMAGTVKFETRIKELVGNSPELAALVEPLLVVRRVLREQLVILHRRLLAIVRDDEVCQRLMTTPGVGPVVSLTYRATVDVPARFRKSKSVGAVFGLTCSKYQSGEIDRSGRISRCGDEMMRVMLYEAAQSMLYSKKWSWLKAWAMQIARRRGMKKAIVALARRLAVIMHRIWVDGTEFRWTRGQTAAAA

SEQ ID NO: 431259 - protein, 345 aa, unidentified
METMYYIGLDVHKRTISYCVKDVSGRVYAEGSVPATRFDLDHWKKTLPQPWTAAMEATVFTGWIYDHLQPHAAALKVAHPLMLRAIAAAKKKNDRIDAKKICDCLRCDFLPECYMAPTAIRERRRTLRYRNLLVRQMVQMKNKISMLLMEAGVSYNKQKLHKAGYFRELLATNPDINEGLGSLLRVCRETVVRLQRTESALVRSLERDSLLMDRVERLMTIPAVGPITALTWALEVGEVQRFSSIKKAISYCGLCGAEKSSGSTVQRTPLSKQRNKHLQTTLIEAAKMAPRNSAELAMLYDKEKQKGNANRATLAVARKLVAYLMAVDRGQRNFQVVETSNCIAA

SEQ ID NO: 431260 - protein, 343 aa, unidentified
MEYYAGIDVSLESSSLCVVDATGRIVREAKVASEPEILITWFQSLGFALSRIGLEAGPMSQWLYAAMKQAGLAVELLETRHVRNAFKIMPVKTDRKNARGIAQLMRLGWFRPVHCKSLPAQETRSLLGARELLQGKLHDIELSLRGTLRGFGLKIGKTTPKTFEGRVRTLIADHPTLTLIADSLLRARAVLLDEFLKLDKKVHTLARHDPRARLLSTAPGVGSMVALTYAAAIDDPARFKSSKTVGALFGLTPKRYQSGETDVTGRISKIGDAAVRTALYEAANIILERPVKGGWLKAWALGVAKRAGMRKAKVALARKLAVVMHRMLVDGTPFNMEKAAAKP

SEQ ID NO: 431261 - protein, 372 aa, unidentified
MRLTSGWMCIKKRWRVAIAAPERLGEVRYYGTINNEAQAVRRLFQKLQGLYGNILSCYEAGPCGFGLYHQLTAMNIKCQVIAPSRIPKSPTDIIKNDHRDAISLARLLRAVELTPVWIPDLTHEAMRDLIRARAAAKRDRRVARQRILSMLLRTDKHYAGKHWTGKHRTWLANQSFSQPSQQIAFQHYCQSLEQIEDRILQLDQEISRLLPEWPLCNLVCQLQALKGVGQLIAITLVAELDDFSRFSNPKQLMAFLGLVPDEYSSGNSIRPRGITKVGNSELRRLLYEAAWSYRTPAKVGAWLIYYRPDSVTQYSKDIAWKAQQRLCSRYRSLTAKGKKSQVAITAVARELTGFMWDIALAAQSSFSQQKQN

SEQ ID NO: 431262 - protein, 454 aa, unidentified
MAQGSGLTRGDRNRNRKIAALRQVVRRDRAVLAVDLGEDKQAAVLVDHEGRVLARKIVMVKAHRLGGLVAWAAQRAAAAGFAGLAVACEPTGHRWKALMGLADGAGHGFCCVQPLAVARAREGDGYTRDNTDHRDAYLIGRLVIRLDCYLPERADEAWARLRHLGARRLGLVADVVACMAQVQDLLACAWPAALGVAARPLESTTWLAAMGVVTDRCCGDPARLRKTGHDRFAAAVRRELPRWGASRAYRKIVTGLWDALADTGGVAAQRRGALERVHLLMGDWRSLLARLAEVEARMCAVLGELGLTGLAASIDGLSAVGAAAILAETGDLSRFASARAVVKHAGLNPAENTSATLAGRTRISRRGRPGLRTAAWRACWAALRHNRVLAAKYAHLTGRGSGPRLAGGQARAACAAALLRWLWAVITRRQAWDPRIAAGTIPARAGAVTAPAAA

SEQ ID NO: 431263 - protein, 368 aa, unidentified
MNTVKFIGMDVHKKTITIAIIDEGRQNQSRIYGTIANDLDALDKFCRKLVSTSTRLYFVYEAGPCGYGIYRHLTAKGFDCMVVAPSMIPRKSGDRIKNDRRDATMLARLHRAGELTAVYVPDAQDEAMRDLSRAREDAVMVAKKAKQRLKAFLLRNRVVFAGKSQWSKAYFNWLADIAMPYPAQQVALQEYIDAVHESLNRVGRLTDQIRQLVPAWRLAPIVSALQAARGVSLIVAVTMLAELGDLSRFDKPSQLMAHLGLVPSEHSSGDSIKRGGITKTGNGHVRKVLVEAAWSYRMQARVSRLLLKRQQGLPDQVCQIAWKAQLRLCARYRRLVAKGKVKQKVVTAIARELSAFLWAMAKQVQPLA

SEQ ID NO: 431264 - protein, 347 aa, unidentified
MEARIMHATTLIGMDIAKYSFELWGVDDHGKHTLHKRIHRDQLSLFFSNFPRCTIAMESCAGSQHWARELKNLGHQAMLIPAQHVVAFRQGSKNDRNDARAIAEAAQRPQMRTVPVKTAEQQDIQALHRIRERLVNNRTSLVSELRGLLMEYGIVCAKGYQKFRLWLKNQFIVCLETLSLMAQQTFNMLRDELYALETRIAELEKRILEVFKSNPVCQRLATVPGVGPLIATALVASVADPQRFKNGRQFAAYLGLVPRQHSTGGKPKLLGITKAGNNYLRKLLIHGARSIIYHHRKKVDQRSKWVKELVERCGINKTNVALANKNARVLWKLMTTPEEVFKEKLAA

SEQ ID NO: 431265 - protein, 386 aa, unidentified
MQASTVATPTAKYCGTIFVAIELSQRSWLVTLHSPDKDKISHHKLEGGDHAGLLALIDRVRERAARALGGVPAVVSCYEAGYDGFWLHRLLLAVGITNYVFDPASIAVDQRARRVKTDRIDGERMLRTLMAYLRGEPRVVRIVRVPDAGQEDARRASRERGRLVKEQTAHTTRIKALLRLLGMAVGNPHRRNWLSWLAAQRDWQGQAVPPQMLSEIRHEHARLMLVRERLNALAKTPAQADPTPAVAQMTERSELLLRLKCLGPAFATTLTSEVFYKDFRNRREVGSYFGLTPSPWRSGGIDRDQGISKAGNPRARCAAIELAWLWLRHQPDSKLTLEYRERTLDAGKRIKRVAIVALARKLVVALWRYLTTGLVPEGAVLKAVRV

SEQ ID NO: 431266 - protein, 353 aa, unidentified
MDKITRVGVDLAKQQIQVHAVDAAERVVVARALRRDKFAQWCAQLPAGCIVAMEACSSAHHWARKLLAMGLAPRLIAANFVTPYRMEGKGGKNDAADAAAICEAASRPKMRFVPVKTCAQQGILSVHRLREGYKEERNACINRIRGLLAEFGLVFAQGPKALGEQLAGVLEDATNELPGVARLALERAFAHWRALDAEMAWCDARISQHVKEDPQAQQAQRVMGIGPTGASALAASVGDFKQFRSAAQFGAWLGLVPRQNSSGGKASLGRITKRGDEYLRYLLVQGARSAVAAAAKKSDPISRWIVQLQARVGWQKTLVAVANKNARILWAMLSRGHAFDPHHVPTKPAPATT

SEQ ID NO: 431267 - protein, 493 aa, unidentified
MSPRAKKADPSSKTSPTPQPTSGPGKRLTRWEVINPHAAGIDVGATSHYVAVPPDSVADNEKNVRVFGAFTPDFHSLVDWLKTCGVTTVAIESTGIYWVALYQILEASGIEVVLANAKAVKRAPRRKTDVSDCQWLQQLHSYGLLSGSFRPCQSICQLRTLMRHRANLVSSASREVQHIQKSLQQMNLHLHHAVSDVMGATGQRILKAILAGQHDPEALLALRDENITKSTPAQMKAALQGDYRPEHLFVVAQALEAYEFIHRQMDESDKQIQSVLELIGPTASAKAATASESDNQKQPEKKKKKTRQSRKHNDPKIDFAPQLKRIFGIDLTQTLGMRVLSILVLLSEVGFDLSKFPNAKAFCAWLGLCPNNKVSGGRVLSSCTSKVVNRIASMLRLSAVAIGKTQTCLGWFYRRKCAQLGPAGAATATARKLAVILYHLVTRREEYVEPDLIQYQLRYQRHRTVKLLKQLETMGYEVSIKEKSETQTIVTTA

SEQ ID NO: 431268 - protein, 419 aa, unidentified
MQAILNICCGLDVHKDSVVACILKTREPLSVERRNDDVEKEIRVFATFPNDLLLLRAWLESENCCHVAMESTGVYWHPVYDTLEGACAGNMELIVTNPRHMKNVPGKKTDIKDAQWIASLLRAGLLAGSFIPPQEVRELRQLTRYRKNIVQDIGMQKNRIEKTLQQTGFKLSTFLSDVFGVSGRNLIRVLIDKGCLSDLDVDTETKRISSAKKDDIKRAISGKLTEQQRHFLQLQIKMLDELSTHLTAIESSIAVLSTKFKLEIDLLDTIPGIAVTSATAIIAEIGTDVSKFPTAQHFCSWAGVVPGDNKSAGKRKSTRITFGNTYIKGLICECAWSAVRMRDTYLSKFYWKIKQRRGAKKAVIALARKILVIVYHLLKKRSAYDEEKFEVAKQKQETRRLKKLLADATKLGFALVPAA

SEQ ID NO: 431269 - protein, 343 aa, unidentified
MKLSRVGVDLAKNVYQLHGVDRFGKTTWKRRLKRHQWLKVLLDNTEPGCVIGMEACASAHHWGRELQSRGYTVKLMPPQFVKPYVKSNKNDARDAEAICEAMSRPNMRFVTVKTVDQQDIQATHRIREDFKVRRTAKANQIRGLVAEYGLVAPKRLSSLRAAIPCWLEDAENGLTHYFRSLLQGLWDDLLLLDDRMCEMDKTIKRLAKDNADCVRLEQLRGIGPMTSTAMIATVGDARQYHKSRQMAAGIGITPRQHSSGDKHRLLGISKRGDVYLRTLMIHGARSVVASAKHKDDPLSRWVTEIATRRHPNVAAVALANKNARMAWAILRNKTDYDPDFAIG

SEQ ID NO: 431270 - protein, 347 aa, unidentified
MRFYTKQHKYYCGIDLHTKKMYVCILDAGGEVVVHRNINTDREAFLNAIKPFREDIVVAVECMFTWYWIADLCAEQNIPFVLGHALYMKAIHGGKAKNDKIDSHKIAALLRGGMLPQAYVYPQKMRSTRDLLRRRNHFMRKRAELYAHIQNTGSQYNLPDPLGRIARPQNRHGIVEKFDEPSVQQSIGVDLEMISAYDPMIAQLERYIIETAKHHDPVAYALLQTIPGVGRILGLVILYEIEDIHRFPSVQDFASYCRLVKCAKESGGKKTGSSGKKIGNAHLKWAFSEAAAIFLKGNEPGKRYLDRLTNRYGKAKALSILAHRMGRAVYFVLKNKEAFDQQKFLGL

SEQ ID NO: 431271 - protein, 301 aa, unidentified
MTGIDVSKRYLDVHAGDEIRRYKNEREGWTKLAEETQGPYVIEATGIYHIPAAKFLWQQGDVVYVVSPLQVRRYAQALMTRNKTDALDAYVIVEYAKAAGDKLRPWTPLDADLGAIRVLVSYARGVIKQSTANRNRLHAIRFAYPERAEAIAETVAILRKTGNRFYREALKVAYENPTIAQWIDNMTNVTGIGERVALTVVAYGGNLTRFEHAKAFAAYTGLTPMLAQSGEKERRARISRMGPGALRQAFYIAARVAVMKDERYRNYYRKKREEGKAHLVAMTAISRKLAVVAWKKAVGRP

SEQ ID NO: 431272 - protein, 412 aa, unidentified
MNAVGIDVSKGKSMVAVLRPLGVVVAKPFEVSHTAAELGKLANFLKSLDGETKVIMEHTGRYYEPVAQVIHERGVFVSAVNPLLIREYGGNSLRRVKTDKAEAKKIARYGLDNWVELREHTPMDTIRYELKTLNRQFHLASKNRTACSNNLIALLDQSFPGVRDWFDSPVRKDGSQKWVDFAMTFWHVDCVRSVSQAAFTERYRKWCKRHSYNFNAAKAEQIHREAREMIALVPKSATAKLLVQEAASQLFNLSRMVEVLRAEMNRRAAQLPEYPVVMGMYGVGESLGPQLMAEIGDIRRFAGKQSLVAFAGVDPMPNQSGTKESRSNRSSKRGSPYLRKTLFNLMSMLLQLAPADVPVYQFLDRKRAEGKPYYVYMTAGANKFLRIYFGKVRDYLVSLDAPQHDTSSANPQ

SEQ ID NO: 431273 - protein, 412 aa, unidentified
MRVAHPHCAGIDIHKKSMTVCIFADETNGSQPAYHKRSFATHSDGIQELNAWLQQFQVTEVGMEATGVYWKPVWNALEGKYGLHLCNPEHIRAIPGSKTDLRDGTRITDLLAYGKLPESFIPPLWQRELRDLTRMRTRLKQEVARAANRIAKVLEDAQIKLGSVASDILGVSGRLMLNALVKGETNETVLSEMAKGQLKKKKAELRQVLRGGVHDHHRFQLRLLLKHVEEIEEKIFQLDCRIAKYLEPYEEIVQRLDAIPGVDRIGASIILAEIGPTVEPWEEARKLACWACLCPGNRISAGKRMSGRMRPGNRWLRSAFCQMAWAATRKNGSYFKTQFRRLAGRRGKKRAALAVAHTLLIIIYHLLRDPKLEYRELGEDYFDKRDAEHAATSLVKRLQKLGYEVAIKRNAA

SEQ ID NO: 431274 - protein, 354 aa, unidentified
MLKYSVGLDVSSRDIHACISAIDAEQKIKVISSKVIENKPKGFEILIGWIEKNRKQKDIPLIVGMEATGIYHEECAYYFYDKKYSVCIVLPNQAKKFLQASGLKSKNDKIDAKGLAQMFAERAFALWVPMDKFYYHLRALTRQQESLQEIKTGVVNQRSAAKRSAFINKEVIKQLNETIKFLEKKIAEIEKKITTHLKSNKEIEDRVQNVLTVTGIGIVTLAILLAETNGFLLFKSNRQLISFSGYDVVENQSGRHRGKTKISKKGNSHIRRSLFFPAFTAVSHKSKPFLDLYNRTFEKHKIKMKSYVAVQKKLLVIVYTIWKKNVAFTQEYITDNTREKELASTSLDSLVQAE

SEQ ID NO: 431275 - protein, 442 aa, unidentified
MKTKPPEKIQKATSPSTRGHWNEMNRKQRREMMRQIQSEDLSLEVVHPHAAGIDIGNESHYVAVPPTRDSQPVRHFGCTTVELKALAEWLKQCGIRTVAMQSTGVYWIAVYDILETAGLDVYLVNARDTKNLPGRKSDVQESQWLMKLHTYGLLRNSFRPSQEIRTMRTYWRQRNDLIRAAVSHIQRIQKALTQMNIQLGNVLSDVSGVTGQAILKAILAGERDPHKLAALRDPRVKASEEQIARYLEGNWQEDLLFVLKQEQEAYEFCQQQMAECDRQLQQYLQQREDRSRGASLPQEMRKGRLVRKKGNKPMFALRPELFRITGTDLTQVDGIDVVTAATILSEAGWDMSKWEDEHHFVSWLRLCPDNRISGNKVLGKGRLPTNNRASIALRMAASTLRLSNTYLGAQFRRFRTKLGAPVAIKARPLSWRDWSTACSATG

SEQ ID NO: 431276 - protein, 343 aa, unidentified
MYYIGLDVHKKTISYCVKDAAGGVHQEGRIGSARRELDAWIRTLPQPRTIAMEATIFTGWIYDHLLPHAAAVKVAHPLMLRAIAAAKKKNDRIDAGKIADCLRCDFLPECHMAPTAIRERRRVLRYRTLVMRQAVQMKNRIAGLLMETGVSYNKLRLHRMGYFEQLLATSDEVSDSIRPLLKLSREHIDRSIRMDAALLRSLEHDPLLTDRLRRLRTVPGVGPITALTWALEVGDTSRFRSIKQAISYCGLCSAEKSSADKVMRTPISKQRNKHIQQVLVEAARLAPRYSEELALLYERERQRGNSNRATLAVARKLVTFMLAVERRGTDFVAAEEFRRTAAA

SEQ ID NO: 431277 - protein, 345 aa, unidentified
MVTTIGIDPHKATHTAVAIDESETVLGEITVPADRYQTKTLMEWASELDGDGRLWAVESAGGLGYLLSQQLIAEGEHVIDVPAVLASRVRVLSSGKSDKNDPNDARSVAIAALRQPALAAVQQQDHAQVLRMLAKRHLELTSLRTQAVCRLHAVLMLLKPGGMQRRLSAKKASRMLGGMRNLDAIGEQRRLLAKAHLGDIRRLDRDIKANQTLIRHAVAASETTVTDVYGVGPIVAAFLIGYTGDPTRFATSDHYAAYNGTAPIEVSSGGKKRHRLSLRGNRRLNHAIHMAAVTQIRHDTPGRVYYDKKLTEGKTKKEALRALKRRISDAVYRRLVTDQQQATTS

SEQ ID NO: 431278 - protein, 367 aa, unidentified
MNKKDLLRLCVGIDVSNLRLDVAISALDGQIAPHVLATTHFENNSSGHTKLEEWIERKRIKDIPLQVVLEATGVYHERLAYHLVNNGYALAIALPNRIKKYCESTSVRSVTDKISAKQIAEFGLLKSPKNWEKPQPVIRNLKLLTREKNALLEEKTAVNNQMHAYDKRYNDDKSAIIRSMKRIQMIDEQLAEIEKEIKAVIKKKENAWLDEKIKKICTVPGLGYTTVISIVAETDAFSLFHSSRQLVCYSGYDIVFKESGTSVKKKTRISHRGNKYIRKALFFPAFSAKSHDPKMSIFYERLFDRQQVKMQAYTAIQRKLLVLIYTLWKKDEAYNPNFVWTGKADTGSGGNQPVRNNLSDWNGPREG

SEQ ID NO: 431279 - protein, 387 aa, unidentified
MPQPNDLSRSLVALDQDSTLVAVIEMGQASWLVAGIVPGVNRHPLKKITTDQEQLLQVLRRWENEAVTAGRMVKRIAVAYEAGRDGFWLARWLRARRIEAYVIHPSSVPVSREHRRAKTDRLDTELLKRAFLGWLRGEPDHCSMAAIPTLTEEDAKRPGRERESLVGERTRITNRIKGALARLGIGNFKPMLRNAPQLLETLRTPEGAALPPNTLAELRRDMARLSFVKQQIKEIERARLERLQRAPGEPGNAMVRLLTRVVGVGVETADMLVHEVFSRNLRDRRAVARYAGLTGAPDESGKKRRERGLAKSGNARVRRGMLQLAWGFLVHQPDSVLAKWYRARTADARGATRKTMIVALARKLLIALWRLATTGEVPEGLGLRAAA

SEQ ID NO: 431280 - protein, 340 aa, unidentified
MKLTAVGVDVAKRVFQLHWVEPETGEIISKQIKRAGFLEHFANRAPCLIGMEACGGAQHWARRLTELGHQVRLMPGKAVKAFVSGNKNDVADARAIWMAVQQPGVRSVAVKSEAQQAILALHRMRQQLIKFRTMQSNGLRGLLTEYGEVIAVGRAALNKAMADVLARLSERLPAALVNTLREQWSRLGELDVQVAEIERRLSEWMKEDKACRTIAEIPGVGLLTATAAVATMGDAKVFKSGREFAAWLGLVPGQVGTGGKVRLLGISKRGDTYLRTLLIHGARAVLTHAKEPGPWVEQISKRRPQNVVTVALANKMARTIWALLAHDRSYERSYVSVKPA

SEQ ID NO: 431281 - protein, 449 aa, unidentified
MAKLEMDIINTHCAGIDVGSRSHFVAVGQSLQDVKEFGVYAEDLTAICMHLKNYNITSVAMESTGSYWQNLYVELVKQGFDVTLCNGKFTKNIKGKKTDVKDARWIQKLHSIGLLTGSFLPDDSTETLRTYCRQRTNWLQLSVEATHKMQKYLKLLNFRLDVVVKDVCGLTGIAIIADICNGNLDPQQLAAHRHGNCRKSYDEIAKALKGNNRKDYLFGLKQEYDSYLFFQNKIADCDKQINSFLKEQINTDVVKKKLRTDDKVHKRVNKNALKGIDLNQASYQYFGGVDLMKIEGLSHATILTIMSEVGPDGFKKFQTAKQFASWLRLAPNNKISGGKVLSNKVPKGSNRLKIALRNAANAIGNLKETHLSDFFKRVAYRRGRTAAVSATARKLAVIIWNMIFHKLPYTPPTEYLFLDQKRKKRVIEKMKRNIAKLNLKPEDVGFVTA

SEQ ID NO: 431282 - protein, 346 aa, unidentified
MKLSACGIDLAKSVFQIHGVDLHGKPCLRKQLRRAELLMFFVKLEPCLIGMEACGSAHYWARKLSEMGHTVKLMAPQFVKPYVKTNKNDAADAEAICEAVTRPNMRFVAVKTEQQQALLAVHRARQGFVKARTAQANQIRGLLAEFGIVLPQGLCNLGPKLASLSDDATGQLPGSFCKLLQRLAENLKELDCQVGELEKEIQLWHAQNEASRRLAEIPGIGPITASALVASIGDVRCFKNGRQLAAWMGLVPRQHYSGGKQVLLGISKRGDGYLRALLIHGARAVLRHAEHKVETATSWLGHLLSRRHKNIAAVALANKNARRAWALLMHDERRFRADYVPAGAGT

SEQ ID NO: 431283 - protein, 357 aa, unidentified
MKRDSYIGMDLGDQKHEVCALNAAGDIVQRDPVVNTAEAITKYFSRLPKGTPVAFEAGTHSGWISRLLESLGLHVVVAQPRKLRALWGRDRKNDASDAVLLARMLRADPQLLHPIVHRSEQAQIDIMTLRSRDVLVQTRTKLVNAARGFAKSLGHRLPAADARYVAAKARKDLPPVLHTALLPLLDTVETINAQIKALDQQIEAVARVRYPETMRLREVSGVGPLTSLAFVVTVGDAARFRRSRDVGPYLGLVPKQDQSGSLDKQLHITKAGDGYLRRLLVGSAQYILGPFGPACGLRSFGLRLALRGGKNAKRRAVVAVARKLAVLLHKLWVSEVAYDPTRGLVTETLVGLQPQRA

SEQ ID NO: 431284 - protein, 427 aa, unidentified
MHYTQNDKIRQATEGTIVVGVDIGSEKNYARAFKGNGIEITRKAFFFPNTLEGFKSFEEMVTKLTVPLAEKKIIVGVEPTGHYWFNFADYCQEKQMTVVTVAPQHVKHSKEMDDNTQRKDDRKDPRVIAKLVIEGRYCIPYRPKGIYAELRVAYNRRCEIVEAETRAKNRIRRWFDLYFPEYRTVYGNVAAITGIVILKQAPLPQDIVSLGVDGILQIWRTNKLRAAGIKRAKTLFEAAQRSICPPDAGRAVRMQLWQLLEEYEYIRKQLQEADIMIGIVTADIPEVNELMKIPGIGLITAAGMISEIGDMRRFDDPRQIQKLSGLAIIVNESGKHKGQSEISRRGRKRLRKILFQAALVLVRSNKEFKTIHDYFTTREKNPLKKKQSLMAVAAKLIRVCFGMVKNGTPYDPTKVLKDIRRAEPKAA

SEQ ID NO: 431285 - protein, 311 aa, unidentified
MTSAGIFVGIDGAKAQLDIAIRPSGEYFTAPHDDPGVSGVVQRLGALQPTLVVLEATGGFELDGASALGAAGVPTAVVNPRQVRDFARSTGLLAKTDRLDAQVLAHFGEVLRPAARSLPDAQAQELSAVLLRRRQLVEMLVAEKNRLPMATRRIRPQLQRHIEWLQQQVADLDRDLGALIRSSPLWRAKDDLLRSVPGVGPVLATTLLASLPELGTLNRQQIAALVGVAPLNRDSGTWRGRRTVWGGRAHVRAVLYMSTLVAVRHNPRLRSFYVRLRDAGKVPKVALIACMRKLLTILNAILKHQTPWALP

SEQ ID NO: 431286 - protein, 318 aa, unidentified
MPESIVVGIDVAKRTFDAALGVAGSIKTFTNEDAGHDALVAELGGQSVELVVMEATGGLERDLACALQAAGFAVAVINPRQGREFAKAMGYLAKTDRIDAKALAELAQVLSRHPERERFVRALPSAEQQTLQALVARRRQLVTMQVAERQRLSTSHAVARSSIEAMIIAIRAQLHAVEAELAAHIERHHGDLARQLGGVRGVGPATVASLIAEVPELGRLSRREISALIGVAPFNRDSGQMRGKRTIFGGRAQVRRGLYMCALSAIRFNAVIRAFYERLVLAGKPKKVAIVACMRKLLTILNAMVRSGKSWDDSLHSA

SEQ ID NO: 431287 - protein, 363 aa, unidentified
MTSMTTTAADVTGGVDTHGQTHHAAALDSVGRQLGDREFPTTPAGYRALLSWLQGYGHLERVGVEGTGTYGAGLTRQLRAAGVTVVEVDRPDRKARRAQGKSDPLDAYSAARAALAGTATGVPKARDGRVEAIRSLRVARSSAVKARSQATNQLKALIVTAPVDLREQLRHLTTTTLVAACARLRPTGDIADPEQATKTALRRLARRHQHLSEEITGADTDLRTLVAAAAARLLALPGVGTEVAGQILVTAGDNPDRLRSEAAFAHLCGVAPIPANSGRTHRHRLNRGGDRGANNALYIVVLGRLRYDSRTRAYAQRRTTEGLSKPEIIRCLKRYVAREIFTALTSRTADNQSRRVAATSTAA

SEQ ID NO: 431288 - protein, 346 aa, unidentified
MRYFAGLDVSLEETSICIVDETGRIAKELRAASEPEALVAALRDVGLTLERIGLEACSLTAWLHDGLMQAGLPAICIETRQANAAMKTMPNKTDRNDARALAQIMRTGWFRQVYVKSRQCRQWRSLLVARRTIINEMRSIENVVRAILREGGVKLGTPSRADFVERARILAGDDSVVTPLVEPLLAILGTMLRELARLTKLVLDTVRKEEICRHLMGVPGVGPITALAFRATIDRPERFQHSRDVGAHLGLTPARYQSGETDIQGRISRCGDELARTALYEAAHTLLTRSRKWSSLRAWGMKIAKHRGMARARVAVARKLAVILHRMWADGTKFRFGKQPAAALVA

SEQ ID NO: 431289 - protein, 458 aa, unidentified
MSHFYLGIDISKGYADFAMLDPNKNPVLEPFQLDDTAEGHRTLYQVLAQFLEQHPQAAIYAAAESTGGYENNWLSSLSSFQAGMNLHCARLNPCGVRNNSKASLNRITTDSISAREVAEYMITHPHKVIYDQEDRFATLRKHYSFISILTRQKTQLLNQLEQQLYSSNPDILPYCQDKMPQWVLSLLQKYPTARDLAQAQVSSLAKVPYVTESRAKKLIQQAQNSVASATDSVSAQLVASMAEQIRHLDKTINTQVKVVEKYCSLPELELLKTVPGIGSMTAVGLILHIQTVHRFPTVKHFCSYFGVHPQFKQSGDGTWAFRMSKTGHPEVRRLLFMVAFSSIKHNPLLREYYHRQLQKGLSKMAALGACMHKMARIIYGMLKGGQAFDSEIDRKNRERTSACKPSKSQESSQRRYQGYDSRAPISRRQKQKRREQGEPQSACGTGVRGHHACSLGSS

SEQ ID NO: 431290 - protein, 350 aa, unidentified
MVVVGADVHKRSHTFVAVDEAGRKLDQLTVKAEAKGHDKAVRWAEQTFGADLKWGIEDCRHLSARLEMDLLDAGQRVVRVPPKMMAEQRRTARTYGKSDPIDALAVARAVLREPDLPEASHDEASRELKLLVDHRDDLVKQRTGDVNRFRWHLHRIDPTIDPGPKTLNRAVKRRELVEYLADKDGIDARLARELLADIDTLTGRINALEQEITVLVTNLAPVLLELPGCGALSAAKIVGETAGVDRFAHEAKFAMHAGAAPIPVWSGSTRGRVRLNKAGNRQLNAALHRIALTQIQHEGIGRAYYEKRLAMGDSKTEAMRCLKRRLARTVYNILKNNPSTAAANDLAAAA

SEQ ID NO: 431291 - protein, 442 aa, unidentified
MRQKKSVRKKEMKLPKHLEHINRYAAGIDIGSKSHFVAVPEGTDDQPVREFSTFTTDLEKLAQWLISCGIKTVAMESTGVYWIPVFEILESKGLEVKLVNARHVKNVPGRKSDVLDCQWLQQLHTYGLLQGAFRPADEVCTLRAYVRQRSTLVRSAASYIQRMQKALTQMNLHLHNVVMDITGTTGMRIIKAILNGERNPEVLAAMRDGRCKNSAATIARSLKGNYRPEHLFSLTQAVELYEIYQTKIADCDQRIMEQLKCFDDSNDTPPGNVGDALMRMSGVDLTSIDGINTTTALKIISEIGTDMSRWKSSKHFASWLGLSPGTKISGGKVLNSATKPSANKAAQALRMAAFALFNSKSALGAYLRRQRTRLGAPKAITATAHKMARFIYAMLTMGTAYVDAGQEYYEQRYRMRIIHNLKRKAQEMGFELVAIHKETAVL

SEQ ID NO: 431292 - protein, 391 aa, unidentified
MVCVGIDVAKDKHDCCILDSDGMVRADCFTIPNNMDGFKQLLQTIRNCTKKSDKIKVGLEATGHYSYNILGFLLDNGLPTYVINPLHTNLYRKSLSLRKTKTDRVDARTIATMLLSDVDLKSYTDIAYHNEELKSLTRYRFDKVQECAKLKQSVSRLATILFPELEGLVSSIHGTSIYALLGEYPGAKQISEVHLTKLTNLLTTASKGRYGKEKAIQIREAARASIGSVMPAKSLELKHTIKLIQELASEIDEIEDSIQKIIDELNPPILSIPGMGVNSAAVILAEIGDFSNFSSPDKILAYAGCSPSTYQSGKLTNCYAHMEKRGSRYLRHALYNATKYVCHWNPVFAEYLAKKRAEGKHYNVALSHATKKLVRLIYALQKSGKAYLVAA

SEQ ID NO: 431293 - protein, 342 aa, unidentified
MEELYYIGLDLHKKIIAYCIKTVSGVTVSQGTVAATRSALLKWIESLPKPWVAAMEATLFTGWVYDFLKPHAKELFVAYPAMLKAITAAKKKNDRADAEKICDLLRVDLLPLCYMAPAEMRELRRVLRYRNFIVRMATTVKNKMSGLLMEVGAEYSKKRLHGRSYFGNLLETVEDVPSSVKELLKLSRAGLEMFAAVQKKLLAALRENGLIRDRVRRIMTIPGIGEVTALTWVLEMGDPQRFSARQAISYCGLCSAQRESAGKEIRGPISKKRNKHLQSILIEAAKLAPHWNPHLALVHERELKKGNRNRATLAVARKLVTYMLAVDKTGIDFVIAHEADAA

SEQ ID NO: 431294 - protein, 413 aa, unidentified
MEIVYHICCGIDVHAKFLVACLLRDGVKQTKRFSTMTGDLIKLRDWLVSEGCMRVAIESTGVYWKPVFNILESALPVILVNPEHVKALRGRKTDMKDCGRLAEFLSVGLLEPSFIPPPHIRRLRELTRYRESLVRTHTAIANRIQKVIESGNIKLGQVASDVLGASGKAMLRALAAGETDPVVISELARGTLRKKLGDLQLALRGEMNEAQRFVLGELLQRVNELETAEYKVGRQINQAICDREHPELFKAWELLQTIPGIGEQVAEVVIAEIGANLREVFPTAAHLASWAGICPGNKATGGKRISGKMRKGNRYFRCAVVQAAWAATHTKQTFLCAKYRRLVRRLGKKKALIAVAHTLTVIIYNVLVRNEPYNELGADYFDRKLPDRQRKYLVKRLEALGYTVTLEQNVQAA

SEQ ID NO: 431295 - protein, 349 aa, unidentified
MFCVGLDVHQRRSSVCILDQNGKKVKEFEVLGPWDRLLEELAKLPRPLAVCFEASTGCGWLYERIAPLAQRVEVAHPGQLRLIFRSKKKNDRVDAEKLAKLLFLGEVPRAYIPEAQVRAWRGLVEFRRRTVDKRTRAKNGLRALFRGCGVQSLHPRKGLWAKRGLALLRELELPCAQDRLRRDLLMDELDQYNLQVKRIEAELDRIAQDHAGVALLRTIPGVGARTAEAVLAYIDDARRFARNKQVGAYFGVVPCQDASSDVNHLGHITRQGPATVRKLLVEAAWQAIRRSPTLRAYYQRIRQGKKERTKIALVATAHHLLRVMHALLRTGEPWRETEKEVAAAMTPAA

SEQ ID NO: 431296 - protein, 341 aa, unidentified
MSELALVGIDLGKNTFHLHGQDKPGRELFHKKLSRQQMMKFFGNLPACTVVMEACAGSHFVARELMAMGHKAKLISPQFVRPFVKSNKNDFVDAEAICEAAARPTMRFVTPKTEVQQLLSMMHRMRESLVHDRTKVVNQMHGFLLEFGISLPKGPTMMKRLASILSEHELPIRLTVLLQRLHKHFSYLDEQIKEMDKELIGQLADDDLGSRLLSIPCVGPITASLLAAEMGDGKQYGCSRDFAASVGLVPRQHSTGGKATLLGISKRGDKNLRRLLVQCARVYMLRLKYQHGALADWVRSMLCRRHSNVVACALANKLARIAWAIAAHHTQFETGPEALAA

SEQ ID NO: 431297 - protein, 430 aa, unidentified
MKSNTQNAKIEAITEKTLVLGIDVGSETHYARAFDYRGIEYSKKPFKFSNTEAGFVTFKEWILDLKDRHKKDKVVPGMEPTGHYWFNLGKFLQDNEMKPVLVNPHHVKKSKELDDNNPTKNDRKDPKVIAGLVREGRYMIPYLPDGVYADLRTASNIRFQLQAELTRIQNRISRWFNIYFPEYKTVYGKPDAKSGMLILKAAPLPEDILMLGIDGVNQIWRDAKLRAVGKARAKTLIEAAEHSVGSKEGAVSARMEIRMLLEDYESRNTRLQEVMVLIEELVKGIPMAEKLLEIKGVGIRTVSGFLAEVGDISRFNNPKELQKLVGLALVENSSGKHKGETTISRRGRKRLRYLLFEAAMSLVAKNPEFRELHNYYTTRRLNPLKKMQSLMVIAAKLIRVFYAMLTKGADYDPKKMVSDIKRPAVYLQAV

SEQ ID NO: 431298 - protein, 361 aa, unidentified
MTETMTWVGLDVHARSTHCAAIDSLTGELSRARFGVGVEPVVQWLGELQGPIRAVYEAGPTGFGLARAAQRAGIDVMIAAPSKTPRARGDRVKSDRKDAELLARLLLAGQLKPVTVPPDWLESVRHLARVREAVRRDLGRGRQRVSKLLLVEGRVYPGATTWNREHRRWIASQQFQHAPTELALIDLLAAVDGLTARREALDERLSRLAQDARLWPTVARLRAFRGIDTLTALAVHLELGGNWQRFRSPAKLASWLGLTPSLEQSGESKTQGQITKTGSAIARRLLVEAAWHYLRQPRIGVTLRNRQVDQSDHILQIAWRAQCRLHRTHQRLREREKPGNVATVAVARELAGFLWAAATAP

SEQ ID NO: 431299 - protein, 402 aa, unidentified
MEKFAGIDWASAEHALCVVDGTGERLRERLVNHSEAGIAALCRELVSLEVERVAIERPDGILVDRLLEAGLTVIAVHPNQAKAARERYSVARGKSDRFDAFVLAELARTDAHRLQAISPDSDETKALRALTRTREDLVGVRVELANQLRAQLEAFWPGALIFADIDSPISLAFLARYPSPADARGLGPKRMEAFLARHRYCGRRSPEELLERMRSAPAGRAGEIEAEARRAAVLGLVAALKPIVTEIAELTSQIRGALAAHPDGAIFQPLFRNAKTAICPATLIAELGDARSRYPSDAALAADAGMSPVALESGKRRAATFRRACNKRLRVAVATLADSTRHWHPWAREVYRRARKRGQDHPHAIRTLGRAWLRIIWRCWQDGVPYDPALHGNFRKLQHMGG

SEQ ID NO: 431300 - protein, 335 aa, unidentified
MHIARAKDGLGRHLGQLEIETDPRGYASLLAWAQGFGPVVTFGIEGTSSYGAGLTRFLRAQGQAVIEVLRPVRRDRRFGGKSDPIDADAAAGAVLAGRATAVPKAGDAGVEMIRALKIAKQSAIKARTQAVNAVKGLVVMAPDPIREQLRNLKTPALVRTCSAYRVDRASDPTSAIKLSLRSLCRRYVALDQEVRSLEKELDALTIRLVPQLRQLFGVGQDVAATLVLAAGNSGDRLRSEASFSMLCGASPIPASSGMVQRHRLNRGGDRQANAALHHVIIVRLRHDKATRAYFAKRKADGKSKKEIFRCLKRYVAREVYRTLVDPREEAARSAA

SEQ ID NO: 431301 - protein, 450 aa, unidentified
MSTSVRILIHPLSSEHTPLVQIKPATRWSKWKVRCVVEVVHPRCAGIDISKKDAKVCVRIQGGGGRRTSSTVTTWESMTNQVLALRDHLVAAQVSVVVMEATSDYWRPFYYLLESDFQVMLVNAREAKNVPGRKSDVSDAAWLADLGAHGLLRASFVPPEPIRQLRDLTRARTVITRERTREVQRLEKLLEDAGIKLSSVASDITGVSGRLMLQALIDTGGAIDPAGVADLAKRRLRSIDDLTEALTGHFSGHHAFMARLFLDRIDSHSRDIVALSARVEELMEPFLPIRVLLESIPGFSQIVAEIFIAETGGDMRQFPTAGHLASWSGVSPGSNESAGRIKSTKTRPGNRYLKGALGIAALTAARCKNTFLSAKYRRIASSRGPMKAVVAVEHAIIVAAWNMLTGGEFYRDPGPDFYTRRDPGRAQARAVKQLEALGFHVTIEPLSAAG

SEQ ID NO: 431302 - protein, 429 aa, unidentified
MDELTARLDLFRQMKTSIRGSENFLVVGMDVAKSNHHAFFGTPNGRTLRKDLAFDNSIASFDKVRALATELCRQHGLIDVVYGLEPTASYHKPLAEYLISQNEHVVYVSNVAVAKNRALLDGRWDKNDKKDAANVADLVGQGRCLFYDLPDDNLRELKSLIAFRSKQKREEHALRMRLRNNLLAQYFPEMDKYHPGRGQQDDVILSVAQYCLDPREIASMEFDAFLKIVSTRKMRIEQERRLRQLWEAAKVSAGCRAHDAAKWEAQSLVIKLKTARELIKENERRIQLLARQFPEHDSLMSIPGFGPVISAMVLAAIGNPFRFQNRKQVLRLAGLDLSAERSGKTSDSAKPVISKQGKAALRYALVQAATVAAALNADIRSYFSRLLKGREFERGINLKMKVKLASKLLIVAWTLMKTKEQFKSSCFKV

SEQ ID NO: 431303 - protein, 317 aa, unidentified
MSGEEVSVGVDVAKSSLDVAVSNSTEVRRFANDEDGVSSAAGCIAAMNPVSIIVEATGGLEMNLVAVLQSACLPVAIINPRQVRDFARATGMLAKTDAIDARILALFGIRMKPEIRSLPDKEAREMGRLLTRRRQLVEMLTAERNRLLQADDDIRPGIETHITWLEEALSGIDDDLESRIKRSPSWREKDSILKTVPGVGKVVSSTLLIELPELGRLNRRKIAALAGVAPLNRDSGTMRGKRTVWGGRARLRAVLYMAALVASRRNPVIAAFYQHLVAAGKTKKVALVACMRKLLTILNAMMRTMTAWHPRMAFMET

SEQ ID NO: 431304 - protein, 346 aa, unidentified
MIHAGLDLSRKRLDYCLLDAAGQRLAAGAVPPTVAGLALLTGRVAAYGVRVQAAIEAMTGARFVHDQLERAGWDVAVADAQKVKGLAPLACKTDRIDARVLAELSRRQLVPAIWLPPPAVQAARERARFRLHLVRQRSRLKHRIHAALLAHGVAPVCSDLFGRQGRAVLTTLALPEPWREHVTTALALIDDLTQRIHTLEATLRLHGAQHPDVPLLCTAPGIGWILGYTIAAELGDIHRFATPARFVGYTGLCPRVYQSGERDRRGQLSKLGPRYLRWALVEAAARATRHPVYAARYQRLKQRLGRQRGAKIAQIDLARRLAAALWYMLTRRQPFAPGGAADALTP

SEQ ID NO: 431305 - protein, 338 aa, unidentified
MQIKKFIGIDVSKKTLDITIVDSQGKQIYYERIANDSKSIKICFMSFMKNLNLNYNESVFCMEYTGIYNLPLVKWLKKQSALIWMESGTQISKSQGLVRGKNDKVDSLRIALYAFSNRHNIKLWKAPREIIEKLSVLLSLRNRFIKAKKQLSVTIEEQKLYLDKNTIKTLKKLNADPVNELMKSIQKVEKEIMELIKTDERILKIYKIATSVDGIGMITAVNLITTTNEFLSITEAKKYACYSGVAPFEHSSGSSVRGKTKVSHMANKKTKTLLHLAALSAIQVKGEIKEYYKRKVEQGKNKMSVLNAVRNKIIQRVFACVKQDRFFEKNYQFNLVKP

SEQ ID NO: 431306 - protein, 357 aa, unidentified
MNKSKQLDFKGQDIFIGLDTHLKNWMVSIMVNESPFKTFSQDPRPKTLRNYLAKNFPNANYHSAYEASFCGFKIHRDLLNLGIKNIVVNPADIPTTDKERKQKEDLRDSRKIAKQLSQKDLTAIYVPEIEIEGDRSFIRYRKTLTKEIARTKHRIKSQLYYFGIEIPTKFSEKSYWSKNFTSWLQEIDLPTESARMTLNGHLEMAEMLRKKQLSTNKEIKKLSEKKIYKENYNLLISVPGIGGLTAMIILTEIGDINRFKNLDKLCSFIGLVPMTNSTGENEKTGDITVRSNRMLRKALVESSWIAIRNDPALILAYQKLIKRMEPQKAIIRIAKKLVNRILYVLKNKKAYVQAIVK

SEQ ID NO: 431307 - protein, 314 aa, unidentified
MEAPLIFVGIDVSKAQLDVAIRPSAQSLSVTNDRAGIKSLIKHLKKLRPQLVVLEATGGLERQVLSALIAGEIPVVMANPRHIRDFAKSIGQLAKTDRIDASVIAHYAEAVRPKPRPLPDEASLELRALSARRRQVLDMIVAEKNRLATASKVVKKRITAHIAYLEQELNDADQDLDRFIEKNAAWKENQQILCSTPSIGPVSSRTLLVELPELGALDRKKISALVGVAPFPRDSGTLKGRRTIWGGRASVRGVLYMAALVATRCNSIIRDFYKRLKAKGKPFKVALVACMRKLLTILNAMLRSNTPWNVDFVG

SEQ ID NO: 431308 - protein, 349 aa, unidentified
MTIVEDRPVITGGVDTHADLHVAAALDPLGGLLGVQEFPATATGYAQLLGWLGGFGDIALVGVEGTGSYGAGLARHLAMAGVRVVEVDRADRQDRHRAGKSDPLDAVSAARAAQSGRAAGEPKGRDGTVEAIRALMVAKRSARAERTQAINQARALIVTGPDELRARFAGHRPAQLVEAIAALRPRPGDVPGYATRVALRELGRRARFLDAQLDRLDELIGPLVTARAPGLLRLHGVGPDTAALLLIAAGDHPERLRSESSWAHLCGAAPIPASSGKVSRHRLNRGGDRQANHALWRIVITRLGSRPGHPATRAYVERRTKEGLSKKEIIRCLKRYVAREVYRQLRAES

SEQ ID NO: 431309 - protein, 341 aa, unidentified
MDHYAGIDVSLECSSICVVDGGGKIVREGKVASEPDALTAWFRVLGLSPGRIGLEAGPLSQWLFTGMRQAGLAVELLETRHVRNAFKTMPVKTDRKDAHGIAELIRLGWFRPVHCKSIGAQETRVLLTARKLVQKKLHDFEASLRGLLRGFGLKVGKTTPNRFAGRIMELVAGHPSLEVIAEALLAAHAVLLREFKGFERRVRTLARHDARARLLMSTPGVGPIVALTYAAAIDDPGRFKSSKQVGAHFGLTPRKYQSGETDYTGRISKIGDGGVRTALFESAHLIITKPIKGSRLKSWAMRLAKRAGMKKAKVALARKLAVIMHRMLVDGTEFDFAAAAA

SEQ ID NO: 431310 - protein, 337 aa, unidentified
MSVYVGIDVHRKRSQVAVVTGDGTVVLNKNVVNGSTPMLRLIGELPSGTPVAFEAAFGWSWLADLLEDYGFEAHLVHPLRCKAIASARLKNDKVDAAMLAQLLRADLLPEAWLAPAKVRQLRALLRHRVSLVRLGTQLRNRIHAVAADHGYDRSASYRAGPGRGWLAELDLPPASREIITDALTVIDALAVLTDRIDGELHQHAKADPRVKALRTLPGVGEFTALVIVAEIGDVTRFPSARKLASWAGLTPTVRGSDLKVRHGHISKHGSVWLRWVMNQAAQTAKRSPEFAASYAAIAKRRGKKIATIAIARKLVTRAWHLLAEMETAEASTPPRRP

SEQ ID NO: 431311 - protein, 351 aa, unidentified
MLIIGVDYHPSFQQISFLDQETGECDDRRLNHSDGEAERFYKELKQRGVSVRVGLEATGYSRWFERLLAELGFEVWIGDAAEIKRQRGRKQKTDREDGRLLLRLLLENRFPRIWVPNPENRDLRQLLWHRHRLVQMRTRIMNQLQAVAMNEGYRWKKKLFSEKGRALLEKLPLAPWASRRRKELLELLDQLDPKIAELTKAVEQEAEKRSEVVRLMTHPGVGPITGLAYVLVIGTPDRFPCGKKIGSYTGLIPSEDSSAGQQRLGHISKQGNSLLRYLLGEAAQAAARCNPDWRRRYVHLTMRREKSIAKVAMARKLAVRLYWMWRNGWQYSQLVAFGSNAGKLGTGHGVK

SEQ ID NO: 431312 - protein, 414 aa, unidentified
MEKQWNIVCGADIHKKFLIATILSRDCTKITKRFGMTLDELLNFKNWVIENGCEQVAVESTGTYWVPIHTVLEGSIGLIVGNAYKIKHTPGNKNDLGDADWIAELCLNGMIEPSRIFPKADRDLRRLTRIREGYVNDMTREKNRIHNALESCGIKLSSVLSDIFGKAGQSILSGLLEGRTIDDILKGVNLKRIKATAEEIREAIKGSLDFTQILLIRGSLEQMEAIQKRIDEICREIKSRIAYRKEDLKIAMSIPGVGFTSASTLLAEIGDITDFKKPEQLAAWAGLVPSVYQSAGKLITGSITKHGSRHIRWILVQVARVIARGRNSKLKRFFLRVKSKKGSNVAVVALARKILCILHHLLTNREMYKEDGINKKVKIDIGNEFSQREMDLEEMIKYIVRAGYEVRKGSAGDG

SEQ ID NO: 431313 - protein, 427 aa, unidentified
MPYKIAGIDVHKRMLHVVVSDVQVDGEFDFTRRIFGSLPEALRSLAAWLVEQQVQEVVMESTAQYWKPVWGALERYWKPICQTQEGALAMSGTLHLAQAQSNRGRRGRKKDFRDAERLVKRLVAHELVLSFVPDVEQRLWRTVVRTKYQITRNRVQLQNRLEALLEEAHIKLSSLVSDLLGASARRMLAAVADGETNPETLAALADRGLRATQEQLQDALGVCQELNPVYRRLIRMVLDEVASIDKRIEQLNQEMANLVRPHEDQVRRLAEVPGLGVDSAQQVIAEVGATAATFPSEKHLSSWVGACPGDEESAQVNRSRRSPQGNRHMRRILNQAANAAVKYKGSIFQILYRRYVPRMGHNQTIGIIAHKLCRLVWKILHRGIRYQERGPAVSKASKQKRTRKMIQALRRLGYRIEPSPSQSAITA

SEQ ID NO: 431314 - protein, 385 aa, unidentified
MCLCKCSGYRIEPLGGGMPPPKAGCGKPDVPSVLCKTVLKCGPPQPNWIQPEQSPGPNKPESTRKGSPMSTDHSVNVLGIDLSKDSIDAHILPDGKSWQVSTDPDSLAEWVKQLPKGITLAVMEATGRLQNIPAAVLAKANIPVAIVNPKQVRDFAKAIGQHAKTDAIDAQIIAQFGLKIQPSPRPVPGETQMLLAELVGRRRQLISNIVAEQNRLKTANAKPIRRNIEASIRSLNRLLKKIDSDIDEQIRNSPMWSVNKKLLLSVPGVGPVNAHVLLAQLPELGSLSRRQIAALAGLAPFANESGKWRGKRFIRGGRARIRTALYMAALSASTHNPTLRNFYHRLLENGKQKKLALTAVMRRLLTILNAIIRDQKPWRQCKINP

SEQ ID NO: 431315 - protein, 342 aa, unidentified
MDHFAGLDVSVKDTSVCIVDDTGKIVREVKVASEPKALLAALKNPVYHFKRIGLEAGPLSQWLFSALAEAELPVVCVETRHMQAVLKAQINKTDRNDARGIAQMMRVGLYRPVHVKTLRSQKLRMLLTHRKLLQSKAIAIENDLRGTLRNFGLKVGMVGKVKFEARIKELVENLPDLAALVEPLLIVRRVLREQIVILHRRLLAIVRDDEVCRRLMTTPGVGPVVALTYRATVDVPARFRKSKAVGAVFGLTCSKYQSGEIDRSGRISRCGDEMMRVMLYEAAQSMLRSKKWSWLKAWAMQIARRRGMKKAIVALARRLAVILHRIWVDGTEFRWTREQAAA

SEQ ID NO: 431316 - protein, 425 aa, unidentified
MKVTQIKQEINSEKVLDVAFDVGMDKLNPVFEIGQLRYADDCGNRSNPINTKLKEIMQIAREHGYGTLRILCEPSGGYEKALLRIAHQMHFYTAYVSGEASSKFRMVVHGDPGKSDERDSQPLLAIASQGKLLTHRVLPAEYELLRELNREYDWVSNNRVMVRGEIHTLLVRLFPDLPVSSDFLYEPGGRALAREYGWNPRRIVDAGPGQLEQCLKTACRFVRRQTIAKIWQAAWQSTQYHEDENGILDYVTERLQRRYEEIERLDQQRQALCSRLEELYLRLREKDPRLPRAVAGVVKLYMLARIVGETGPLSDFQSIRQLYRFAGLNLCERKSGKYEGKTKISRKGRVPLRRILGRAVLPLIHKGGLYDAWYHLPEDKTKKGKSLAALMRKFLKLLFGWYRSGGEFDFKRVFTSASEYAIQAA

SEQ ID NO: 431317 - protein, 459 aa, unidentified
MNRKQRREMQRKIQSQDLNLEVVHPDAAGIDIGNEVHYVAVPPNRSSEAVRRFGCTTAELRAMADWLKQCGIQTVAMQSTGVYWIAVFDILEEAGLEVYLVNARETKNLPGRKSDVQESQWLMKLHTYGLLRNSFRPPQEIRTLRTYWRQRGDLVRAAGRHIQRMQKALTQMNIQLANVLSDISGKSGQAIIKAILQGERDAGELAALCDGRVQASQEEVAGSLEGNWQDDLLFVLQQEQDGYEFCQKQMAECDRHLKQCLQQRADRSQGASLPVEKRKERRKKKKGNYPQFDLRASLFRMAGADLTLMDSIDVMTAMTILSEVGWDMSKWKTEDHFVSWLRLCPDNRISGDKIIGKGRLPTNNRVTIALKMAASTLRTSQTYLGAQFRRLRTKLGPPVAIKAMAAKLARLVYRMLRFGMQYVDQGAEFYEAQHRKLQISHLKRKASQLGFQIIEASAA

SEQ ID NO: 431318 - protein, 370 aa, unidentified
MTRSTKHVGLDVHQATTVTSVREDSGRVIARSVVPTEEAPLLEYFRGMRGAIHVAFEEGTQAQWLHDLLVPVVDQVVVCDRRGESKRGTKADQIDADELSDLLRCGRLRPVYHGGRDGAGRLTLRELAHNYQALVEDATRLMGRLKALYRARGIKTPGRQLYQSADREAWLARLPEPGARFRAATLFAQLEPVQALRPAAKRALIAEARRDPSWAVLRRIPFLGPVRVAQVLATAQTPWRFRTKRQLWAYAGLAVVTQTTAQYEIRDARPVRRRRPPLTRGLNRNHNRVLKNVFKGAATAAAAREGEWRAWYEARLARGMRPEMARLTLARKLAALTLRLWKTGATYDATAATDDANAATTLTTPARSVR

SEQ ID NO: 431319 - protein, 376 aa, unidentified
MRDKTFVPTDYDVFAGLDVDKKSISVTFTSHQGFIRSLRMPYSVEHLLNHVRKHFPDQKVAFAYEAGPTGYGLYDGLEAEAYRCLIASPSMIPKAPGQRVKTNRLDSVGLAENLRGGQLKSIHVPSPVYRELRHLTQLRDTFVSEMVGMKQRVKSLLLLEGIAFPPAPAGSQWSFMVKAKLRKLPCSGTVRFKLDELLDSLEFNEKRVVKTTQEIRRFCQNDPELSRCIEYVMSVSGIGRIVASQLLARIGDWRELRNIRQLGGFLGLVPTEHSTGDRTDRGSITHTGDGRLRSKLIQASWSAIRQDSELREFFASVCKTHARHLASRVAIVAVARKLSVRISVVLMKQRPYEVREKVCSAPLTQEETSPQGTTRR

SEQ ID NO: 431320 - protein, 370 aa, unidentified
MSKIIRIGIDTSKSVFVLHGVDAAEQPVLRRKLRRGQVLEFFAKLEPTKIGIEACGAAHQWARELTALGHEAVLLPPQYVKPYVKRNKNDAADAEAICEAMSRPTMRFVPVKTAEQQAALMLAGRRDGLIRRRTQLSNTIRGYAAEFGLIAAKGLDKIEPLLTRIAADQNLPELARELFADYGRDYAELGKQVAKIEAKLKAWHKNNELSRRLAELPTIGPIGASMLVMKVTDPHAFGVGRNFSAWIGLTPKDHSTAGKMRLGVITRAGDEALRSVLVAGATAVIQQVRKGRGHPSPWLLELLKRKPPKLAAVALANKIARIAWKLMVSGERYDPQRAAGRFVPPTGRIAPRSPRQGRFAPPAGVAVGQP

SEQ ID NO: 431321 - protein, 343 aa, unidentified
MVSGVFGGVDTHADVHVAAAIDDNGALLGIESFPTDEAGYRRLGEWLVGFGPVIRVGVEGTGSYGVGLARHLHTVGVSVVEVDRPNRQRRRRLGKSDPIDAETAARAALSGSAKVTPKRRDGAVEQIRVLLVARRSARMQRTATLNQLRSIVLCGPDEVRVRFKDRAKTGLVSEAAAMRPRKGPDPVTYTTLVVIRSLARRIRDFDDEIAGIDDAIKELIDATAPSLLDCYGIGIDTAATLLVAAGDNADRLTSERSWAHLCGVSPIPAGSGKTSGRVRLNRGGNRQANAALHRIVLVRMASDPETRNYVQRRSAEGLSKREIMRCLKRYVARQTYKHLPRAA

SEQ ID NO: 431322 - protein, 347 aa, unidentified
MTIIRVGLDTSKHVFQIHGVDENERPVLRRQIRRQDVAKFFAKLAPTRIGMEACGASHYWARVLRGLGHEVVLMPPQYVKPYAQRNKNDKIDAEAICEAMSRPMVQARFVPIKTVEEQAALTMLSARDLLVKQRTMLINAIRGHAAEFGVTVAKGPQQVTELLRRLASDECVPALAREMIGVLASQLPVLEARLKAIEARLVAWHRQNATSQLLATIPGIGPIGGVSFALKVPQPPVFRSSRHFAAWIGITPREHSTAGRQRLGHISKEGDEDLRRLLVLGATAVIQQAKPGRASPWLLGLLARKPKKVATLALANKMARTIWALMISGEVYRPEGGGSGGLSRLQT

SEQ ID NO: 431323 - protein, 406 aa, unidentified
MGQVIIGMDPHKRSATIEMVNDREKVLAQGRFGTDRDGYRTMLKLGRQHKDRVWAVEGCNGIGRHIAQRLVADGETVVDVPPKLSARARVFDTGQGRKTDPVDAHSVAVAALRAKGLRQVTVDDVTVALRLLADRRDGLGHARTDLLNRIHKLLLELLPGGAKKFLSAPQARALLNTVRPRDLVGRTRRRLTSELITELVQVDKKIKAADKELNELVATTGSSLQDLHGIGPSGAARLIGDVADINRFATRGHFASWNGTAPLDASSGDQQRHRLSRAGNRRINRALHIMAVVQLRHDTEGRAYYRRKLAAGKTSMEAMRALKRRLSDIVYKQMIKDAKKAGTGPGGHVGATLQSSAADPIPMIDTSEQSLPGPADTQPRTNAVQLGRWSACQGSGLMMSMLVVAL

SEQ ID NO: 431324 - protein, 357 aa, unidentified
MKKLFIGIDFSKEKLDATIILACGMNEIGSREYGRFPNNTTGYRKLCNWVKTNAWNTIAEEWLFCGEDTGSCSIGLSKWLYGKGYDIWIENAYAIKHSSGIQRVKNDKADSAIIAEYAWRQQDKVVPFEPLNESLAQLREVFLYRHKLVGQRVAMELRKEDKSQSNKSKAISFINRKSKHLIAEINKTIAECDKAIDSIIEADEELKENYAIITSIKGVARQNATCMLVYTNNFKKFGYDPRKIACYYGVAPFGKQSGTTVNTPAHTSHFANKLIKSLLGQAAHIANIYNPEIRDYYQRLISKGKKPQVALNNVKNKLIRIIVALVRKKVPYDQNTYKYYEEREIIERKKNEKLIYC

SEQ ID NO: 431325 - protein, 427 aa, unidentified
MSYRIAGIDVHKKMLAVAVADVEVDGDFQFERQKVGTTPIDLRRLAHWLVEHEVDEVVMESTAQYWRPVWEALEQHWRPQRRARDSAPRLAGTLHLAQAQSNRGPGGRKRDFPDAERLVKRLVAQELTLSFVPDAEQRLWRTVMRRKYQVTRNRVQLQNRLEALLEEAHIKVSSLVSDLLGISARRMLQALADGETDPAALATLATARLRATPEQLCDAFQACPTLHPVYRRLLKLTLEELRVIEDHLGQLDQQMADLLTAHHDAVQRLAEVPGLGVDSAQQIIAEVGATAATFPSSKHLASWMGACPGNEESAGVNYSHRCPKGNRQMRRVLNQAANAAVKAKGTIFAIVYRRLVPRLGHAQAIGAITHRLCRLIWKILHQSVRYEERGPAVSEEAKKVRARKMIRELRSLGYHVERLSAPSGSPA

SEQ ID NO: 431326 - protein, 461 aa, unidentified
MNRKKTANKVEKPRRQKLNWKALEIIHPDAAGIDIGGSEHWVAISPDRDENPVQRFDCFTSDLERMAKWLLDKGVRSVAMQSTGVYWMPVYEILEQAGLEVYLVNARHTKNLPGRKSDVEECQWLLKLHTFGLLNNSFQPTDAIRVARTLWRHRSNLVGEASSAIQRMQKALTEMNVQLHNVLSDISGVSGMAMIQAILKGERDPWALAALACPGVKASQADIAKSLHGNWRKELLVVLRHEVELYQMYQDKIAECDQELRIHLQSLGSKIDTQAQPLGPRPKGKKAQGNTPKFDLRSELYRITGVDWSQVNGVDVMVAQAVIAEVGVDLSAFPSERHFASWLGLSPMNEQSGGKILNRRTRKVVNRAAMAFRNAASTLLRSQSYLGAQYRRLRTRLGAPKAITAMARKLACLFYRLLRHGQPYVDKGTEYYESRYREQQIRSLTKRAKKLGLEVVEPQAA

SEQ ID NO: 431327 - protein, 344 aa, unidentified
MNYCGIDLGKKSSCFHIVDEERKTVTAGKLANNTLAIRKVFGNRDRLKIVVEASCKAFWMADRLRELGHEVVVVDPGRTKAIGAARIKHDKLDARILAELCQTGLLAAVDIPTQAQRMARLPFTSRDTLVRSRIVMTNSVQSILDGEGVELPTKWVGGFSSVIRSAIPRMPPAMVALVERLLRGIDELSKLIDECDKEIEQVAENDPDIKLLRTVPGVGPLCAAAFVHVIRDPGRFKSSRVVGAYLGLVPSLYESGQTSVKGGITKHGNCQLRSLLHICATALMRTKRDTALKRWAVGLSTRIGRKKAKSAIARKLASVLWAIWRRRRPFEARLPIPQLAAQSS

SEQ ID NO: 431328 - protein, 367 aa, unidentified
MKKISTVAAKQSGNFSEQKLTIGLDLGDRSSWYCVLDEAGAVLLEQKLATTPKAMREGFGGMPRSRIALETGMHSPWVSRVLSELGHEVIVAHARSVRLIGEGRRKDDRLDAQTLARLARIDPQLLCPVKHRSAKAQADLTLIRARAGLVRARTALVNTARGLAKSYGERLRGCNVRNMNPEKAEGLSPELQRALEPLLAGIEALSERIREYNEGIEGLAQESYPQVALLKQVKGVGTLIALTFLLTLEDPHRFGKSRDVGCYLGLQPGRRNSGQSEPQMHISKEGDPYLRTLLVQGAQHILGPFGADSDLRRWGLKLAERGGKSGKKRAIIAVARKLAVLLHRLWVSGEVYEPLRNSKQSPLAIAA

SEQ ID NO: 431329 - protein, 327 aa, unidentified
MYQNFIGIDISKETFVVAQQSKKRTQEFNNSLIGFEEFSSEYQELLPETLVILEATGGYEMSLVRYLLSLGAFVHRADTRKVKYFIRSLGTRAKSDRVDALGLAEYGYERHARLERFVLQTQEQEELQQLVQRRLDLKHLLVQEKNRYQAPNKNQTIKKTCEELISSIENQLKPLEEAINQLIKDFPEIQAKQQVLQEIDGIGQVIANSLLALLPELGQVNRRQIASLVGLAPHPCESGKKIGYRCTQGGRHSVRTILFMGAMTAARSKGKLGDFYKQLVNRGKKKMVALTALMRKMIVIANAKIRDWYKQQFQEVATAQQSFQNSQ

SEQ ID NO: 431330 - protein, 376 aa, unidentified
MQPINTVNPTIYLAIELSASTWLIAARLPGSEKPHLHRIEGGDTAALFALISSLRARVARRLDAAIGVVCCFEAGRDGFWLHRLLTAHGIANYVLEPTSILINRRARRAKTDRLDAIGMLRVLAAYLRGDRQSCSMVRVPTPEDEDAKRIHRERENLVQEKLRIENRIEALLFTQGIRKRPSLRSWERDLAVLRTGDGREMPRHLRAELDRLRRRLVTILELIREVEAERDEVVTTNPEHQTSRKIVALGENFASLLTREVFYRSFDNRRQIASYVGITPMPYQSGSMDRDRRISRAGNPRARTTMIQLAWLWLRYQPGSELAEWFRKRVGTLAGRTRRIAIVAMARKLLIALWRYVETGVLPAGAEIRPESVAAA

SEQ ID NO: 431331 - protein, 435 aa, unidentified
MIPAVLTHCAGIDIGKRALAVCLMVGPAEAEPKVELREFSTFTRDLEAMKEWLVQASCTHVVMESTGPYWKPVFNVLEDRLVVCLANAEDVKGRKGHKTDRRDAKWLAHLLRHDMIRASFVPPRPIRELRDLTRRRKQLLSDATSERNRVQKTLEDANVKLGSVLSDVFGVSGQQMLEALLEGRGNVEEIANMARQKARQKIPQIIESLSGHRLSEHHRFMIRQSLEHLRMLEVQIMTLDEEIIKRVDSLGLEHLISLLQTIPGLGHDSAVAILAEVGPDMNQFPTAKQLSSWAGVCPGNKKSAGKDFRGHTTRGNRWLRATLTECAWAVSRSKESPLRDKFWRWAVGGKKKAVVAVAHGLLLQVYQILRTQQPLTEAPPPIDEKRRKRIIRHHLRCLGRLGISTGPKGVSVDGAAPPRGRPPRNAQNSPSRGRS

SEQ ID NO: 431332 - protein, 344 aa, unidentified
MDHFAGLDVSVKETSLCIVDDAGRIVREVKVASGPDALLAVLTNPAYCFKRIGLEAGPLSQWLFSALAEAGLPVICVETRHMRAVLKAQINKTDRNDARGIAHMMRAGLYRPVHVKTLRSQKLRMLLTHRKLLQSKAIAIENDLRATLRNFGLKVGVVGTVKFEARIKELIENLPDLVVLVEPLLIVRRVLREQIGILHRRLLDIVRDDEVCRRLMTVPGVGPVVALTYRATVDVPSRFRNSKAVGAVFGLTPSKHQSGESDRTGGISRCGDEMMRAMLYEAAQILLVRSTKWSWLKAWAMKIARRRGMKKAIVALARRLAVIMHRIWVDGTEFRWTRDVVAAA

SEQ ID NO: 431333 - protein, 462 aa, unidentified
MVKNYDSRKDSTKRKSPNMQVMYPNAAGIDIGSESHFVAVPTDTGERSVREFRAFTADLHALADWLTECRITHVAMESTGIYWIPLFEILDARGFEVRLVDPRQLKTVPGRKSDVMDCQWIQQLHSVGLLAAAFRPSESVCVLRSYMRQRAMLIDAAAAHIQHMQKAMSQMNVKLEKVLSDITGTTGMMIIDAIPAGERDAYKLAALRDARCKHSEKEIARALEGNWRDEHLFSLKQAVELFRMYQRQIAECDVEIEKTLNTHEVVGSPDDLPPDLRQGKTQKRNDPLFDARAQLHRMTGVDLTQIRGINAHTALKVVSEIGTDMSRWPTAKHFTSWLALAPGSKKSGGKVLSSRTKATKNRAAHALRLAANALQRSDTAVGAFFRRVKSRHGTPKAITAAARKLAEAIYNMLKHGQDYVERGAAWYESEYQKRVLKGLTRRAADLGFQLVPNQQLTTETTM

SEQ ID NO: 431334 - protein, 317 aa, unidentified
MTSGEAETFIGIDVGKAYLEVAVWNSEACWQVSNDGEGIEKLILDLQALSPTLIVVEATGGLELAAVAAMAAAKLPVAVVNPTRVRHFARSTGQWAKTDRLDAKVLAHFAQAVRPQVRPLRSQEEEYLAALVTRRRQVVAMLTAEKNRCGSTRPQLRDRVEKHIQWLEEELKSLDEEIEDFIHGSPLWKEKEALLRSVPGVGPVTAATLLAELPELGTLNRQKIAALVGVAPLNKDSGQKRGKRRVFGGRAAVRRTLYMAALSATKFNPVIRSFYEKLLRRGKEKKVALTACMRKLLVILNSMVRHHRPWQPYELRP

SEQ ID NO: 431335 - protein, 353 aa, unidentified
MRYIGVDLHTNSFTACYLEQEKPEYIKTFRLQDLGNFIKNLQETDEVALEATGNSCFFYDEVSPYVKRVVVVAPLQFEVIRRSVNKTDKHDARAIAFFLSKDMLPEAKCKSKQCQQLASLLKTRDQLVKSRVSLINKIHGLFNYHGIKIKKEVLTIKAGFECSLGKHDWSHLEKVEIEVISSNLEVIRESLKKLEKEIIAFAQQLPGFNNLISIKGIGAISAAAFVATIGDINDFSNPEKLTAYFGVVPRVSQSNQQCTIGRITKRGSKIGRTSLVQCTWIAIRYSPYLKSFYERVKKSVVLLRLLLLLLGSFSQLFSILLKTTGFSKILQNMKFLIDNNHRRNIYELYNRTK

SEQ ID NO: 431336 - protein, 478 aa, unidentified
MDDRRLVGIDLGITSAHTVRVLAGDGSLVCRRKAIPTLDSLEQVERAALSGTPAGTLLEVVVEPTGPAWLPIAVFFSARGHTVYRVSSTKAHDLRRVLSRHAKSNGIDADTLARLPLVDPAGLHPLGLPDAARAALDRRVRACDRLTQQAASHKRRIKDLVHQLLPASPLTGDLGQADLAVLERWADPHALVAVGRARLQRVLATASAGQQGAQRATQWLAAARAALELYSDHPAIAFTELAAEVTSEVRLLRATQTELELHAGQREACYQRVDPAALARSLPGLATIGGPALVATMGPASRFANASKFRCFTGLAPKASETGQTDRKGQPITKAGNRLLRTTLVRAADHARRQDPQLARIYWTQMVERGKDHLGAVCVVAAHLAERAWTVMDRGTPYVVCDTDGTPVTPAQAKAIIAQQWTVPEEVRRRRRSKKGKAPQQVLNGHVHGAQGATRRPSPSPASLGRRTTQVKPSLPHP

SEQ ID NO: 431337 - protein, 392 aa, unidentified
MYIIGIDIGKNHHEASIVSPEGKQIGHSLRFATTHKGADSLMSFIFNNIGNSSCIFGMEATGHYWYPIYSFLKARGYTIYVINPIQSDSLRKMYIRQTKNDSIDSFLIAEVIRFGQFTTTSMADENILAMRQLCRYRDSVISSRTEIKLRISTIMEQIFPEYEKQFSSLWLSTSMGILEKYLTPENIENAPIDELFEIIKDKSHNKLTMKKAISIREAAADTFGIKIAQDAFSFQLKQLIDRMNFLDKQIEALDCQILEYYEKFDCYLHTIPGIGMIAAATILAEIGDINRFKSSSALVAFAGIDPTVRQSGEFSSTHNHMSKRGSPYLRHAIFLAATTCSFHNSPLNAYYKKKREQGKHHLTATGAVARKLTTVIYAVLRDGKPYEPKKFC

SEQ ID NO: 431338 - protein, 367 aa, unidentified
MSIYFGVDFHARQQFIKWCDTSDGEVHEQQLFHHALEEVREFYTRFQGEVIVGLEASGYSSWFETMLQQIGHQVWVGNPTEIRRRARSRQKTDRRDAELLLELLLKDEFPRLHRLTPASLEVLRQLRYRHRLVQMRTRIYNALQAIALSAGVSLKAKLRTNKGQQRLCQLSLTPACAQQRQEWLSLLSELNRRIAQVEQELEPLAAADPRVQRVRTHPGVGLLTGLALVHTLCPVSRFSNSRKVTAYIGLEPREYSSGERQRFGGISKAGSRLLRFLLVEAGHKAIAKDQHLKKLYHRLLHRRERAKAKVAVARHVLVHSYILLRDEIDYAEFLRRGVAVRSARVGHRLSMPDKLIERSASEQQQSA

SEQ ID NO: 431339 - protein, 404 aa, unidentified
MKGPIVSIDVSKGKSDYQAFKNLNVKYTGSRSIKHTKEGFDEIVSLVREMEKKLETEVCVVYEATGVYHRVLKKVLEDNNIKQFIINPLLSAKTRKNDSLRSPKTDKLDPKSIAKTYYSHSLHNSHKPETIYHELRELSRYYEDILVHIRKDKVSFRAQLDVVFPGYDTLFDDLYSPVSLTIIEKYPHPEMLQKKKINTVSKVIQNKTCHRQAVSDTMADKAIEYSKTIYSGCDKDDIEVLILQRLIKKLNEDMAEAERTIGEMIKLAQELPDFSIIKSIPGIGDNLTARIIAELGDMTRFKKKNELVAFAGLDPRISESGQDDGDHMHITKKGNKRLRCLLYLAVTCSIRLKRDDNSIKDFYIKKKQQSNPMCSKAAKTACASKLVRIIYSMCKTGELYQYNK

SEQ ID NO: 431340 - protein, 395 aa, unidentified
MLYLGIDIGKNNHEAGIVDGEGKQLGKSLRFANDQQGFFSLTSFLEQKVGPGEELRVGMEATGHYWIPLYSFLHGKGFILHVINPIQSDSLRNFTIRGAKTDSIDCFLIAHTIRFGDFSETRLADEDVLTLRNLARFRESLKDSCANYKRQVVTVLDQVFPEYDALFSNMFGESSKAFLKTYGTPEQTMELDTKSLAALLRKASRGRHGTKKAEEIKALAGRSIGVPFCKDAFAFQLKILIEQIEFTEKQIGEIDKKLAQLLKKLNPVILSIPGVGPATGAVILGEIGDINRFDKPKKLVAFAGIDPTVMQSGNFSGSHNRFSKRGSPYLRRAIWLAAVVAARFDPVFKAFYEKKRGEGKAYGTAIGAVARKLAYTIFAILKTNKPYEVRLNPEA

SEQ ID NO: 431341 - protein, 400 aa, unidentified
MNAFGIDVSKGKSTVAVIQPFGVVIAEPFDVFHTDSGLKELVNFIKSLSGETKVVMEYTGTYYEPVANALHHAGIFVFVVNPLLIDDYDTNRVRKVKTDRIDALKIASYVLDKWMNLRKYEPAETFRKTLQIMNRQCIKLNKILVMQKNSLISLLDCSFPNANTLFTSSHRESDGHEKWVDFVVKFPHVDSVTKLSLSAFKTKYQSWCKKEHYNYSESKAEQIHTYARTIVNTLSMTDAVKKMVSDSAKHLNSTLEALGTLHSEMDALASQLPEYETVMKLFAVGKVTGSQLIAEIGDVTKLKSGKSLVALARIDPPPNQSGKDDPKSRRISKRGSSALRKTLFLIMTIYLQQQPADEPVYQFLDKKRTEGKSYKVYMIAAARKFLRIYYARVKEVMPKE

SEQ ID NO: 431342 - protein, 371 aa, unidentified
MTEKIKYVGLDVHKNTITIAIADEGRDQEVRKYGTIDNKATAIDKFVRKLVSNGSTPRFVYEAGPCGYTLYHHLTQKGYECMVAAPSLIPQKSGCRIKTDARDAVDLARLHRAGELTAVYVPHPEDEAMRDLTRAREDAQTAAKKAKQQLNAFLLRNGHVYTGRSNWLTAHFNWISDIKVAHPSQQFTLQEYVDAVHASIDRVDRHTAQIQKLIEQWRLAPVVKALQTMRGVSLIVAATTVAELGDLNRFDHPSKLMAHLGLIPSEHSTGDSIKRGPITKTGNGHVRRVLVEAAHAYRLPARVSRILLKRQDGLDPEVKKIAWKAQVRLCDRYRRLAGKGKPYTVVTIAIARELAAFIWAIGRCVQTVKEC

SEQ ID NO: 431343 - protein, 361 aa, unidentified
MKYIGCDFHPSFQVIAQLDKETGELVRRRLEHGEGQGEVQRFYQALPGSWVVGVEATGSTYWFERLLKELGHEMWMGDAGKIRVQDGRKQKHDKRDARLILRLLLEERFPRIWIPSVAERDLRQLLLHRWHLVRMRARIKNQLQHIALNQGVQKRSKLWSKAGLEQLRKLELEPWGRQRRDELLEMLEQITARIEPLDLAVEHAAADQPRASRLQTHPGVGSVIALATVLTLGEVGRFPDSRSWVSYLGLNPSENSSGQKRWLGAISKQGNPFLRHLLVEGATSAARGDKDLGRVYARLKARKHHGVAKVAVARKLAVRLYWMERTEKSYPEVVRMQGSLSHPVTRVRVETLNRPPASHQR

SEQ ID NO: 431344 - protein, 386 aa, unidentified
MNYIGFDISKYKHDCFIATKTINHQFSFENSKSGFNELLSYFKPLSKTEMIIGLEATGHYGENLKSFLTLHGYSFMEINPFLMKKFSEAQSLRKTKTDKKDAQMISSYMRTVDYKAYHHQSYHISALKSLTRLRFKLISMRTKHYNMMTKVLDVIFPEYKPFMREQGYSETSLYILKHFSSPIRISKLRDTHYEALRKRSMGKFRYPKFVKLKNLALNTIGVTQDHQLFKLTTSIRYVEMINKDIDKTEEQIISLMKQFPTKIETIKGIGVISAATIISEYGDIKLFSNSAEMLSYAGLDSSIKQSGTMATTGKLVKRGSKYLRATLVNISMMVMIYNPIFYDYYTKKKLEGKHHRVALIHLAKKLIRIIHHLETTDEDFDSKKLK

SEQ ID NO: 431345 - protein, 359 aa, unidentified
MILSSVKRRPRGTTRKEGAVKTLYAGIDLHSNNSVIVVTDAEDNVVYRKRLRNELDALLDALWPFSDSLRGVVVESTYNWYWLVDGLMDHGYRVHLANTGAIQQYSGLKYANDASDAHWLANLLRLDILPEGYIYPKEERPVRDLARKRSGLVRQSSANVLSIKNLLARNTGRSMSASGVKRLTDEDVDTLLAGEDLALALKSTLAVLRCIQEQIALLEQTILKRVRLRDEFRNLLSVRGIGDVLALTIMLETGDIRRFETVGDFASYARCVGSAHLSNGKKKGKGNTKNGNKYLGWAFIEAANFAIRYDETIQRYYQRKCAEGKHLLVAKKSVAHKLARACYHILRDQTVFDVARAFA

SEQ ID NO: 431346 - protein, 416 aa, unidentified
MKKDNKFGKKSELSARPAKSRTTGQGETKQVLAELVGRLREKLNPKVASARLPDESPRGLKPNLDRLTVGVDLGDQWSKYCILDLEGETLAEGQVRTTQQDFAEFFQSLNGTRVVIEVGTHSAWAQEVIGDCGHEVVVANPRLMEGSKRRKRKNDRIDAHKLARLGRVDPQSLHPIKHRSREVRQDLVLLRARDALVTVRTELINATRGMVKSMGGRLPSCSSRSFASQAEEGLPVEIRGALLPLVRLAKALSHYIKEYDGKIEELASEKYAHTKLLRQIKGVGPITSLAYVLTLENPERFTQSRDVGPYLGLVPKQEDSGESQPQLGISKAGDRMVRKLLVGSAQYILGRFGPDTDLRRYGLKLCQRGGKNAKKRAVVAVARKLAVLLHRLWVTGDVYEPLRNGLSLPSAAAAAA

SEQ ID NO: 431347 - protein, 405 aa, unidentified
MTFVGIDLHTNKFTCCYRNEKPSNEEKDSKRIETFELTAIGLDQFYKTLTEDTYVLLEATITSFSFVRLIQPKVKEVIVANTYELKQISFARNKTDKIDADKLCRILKMQVLSGEKAIFPVTVPPVEIQELRGLFSTYRLLKKQSTQFKNRIHSLLKENLYGLTQEQIFGKSSRKKIREITTDPVLKFQINHLFELLENLEAGIETLEEKIKERAVPFMREIEILTSMKGISVLIAIAIISDIISVDRFKNSKSFTSYLRSAPRVESSNTTKGNKGTNKKGRKLSATLITQVLYHILDASPKLDKWYTRLTRYKKAGLVRTGLRRRVFSEIYQMLKKREYHYGRDIKKHGEKILQYKKLLKKRNISLKSGFFPTLVEMSFGFKLQYFFLKKIKGTASIHNSFYYF

SEQ ID NO: 431348 - protein, 357 aa, unidentified
MEAQVKKIDFTGHNIYVGFDAHLKSWKVTVMTENTIYKTFTQPPKPEVLYNYLRNNFPGGTYHTAYEAGFCGYWIHGKLLSFGIKSMVVNPADIPTTDKERVQKEDKRDSRKIARSLSNGSLMPIYVPSIQTQRDRSLLRTRSMLVKDLVRYKNRIKSFLYFYGISIDDSFSNPQSHWTNRFITWLESINLDNGSGKKALQVLILEYKNLRASILEITRQIRKLSNTERYKKAVTLLKSVPGIGLLTAMIILTELESIERFNNIDKLCGYIGLVPSTKSSGEKEITGDITPRGHNVLRTALIESSWTAIRNDPSLMKSYLSYTRRMESNKAIVKIARKLLSRIRFVLKNQNPYRCLI

SEQ ID NO: 431349 - protein, 417 aa, unidentified
MAMKIVRFNCCGMDVHKNLVVATIGITDRKTNVTEYFQRSFSTLNSDLYRLKDWLRSHHCSDVCMESTGKYWIPIFNVLEDEINVHLTHPKYVKAIKGKKTDKKDSKWICDLFKHDLIKFSFIPPKEIRELREIARYRYKLVCMRSSERNRYQNCMTVSNVGLASVVSDPFGKTASNIMKEVMKSNVIDDDKILKLVHKNCKNKDKILDSLHGYRIESDQRFKMEKSLDHMEYLDQLIDSCEVELIKRAYPLRRSFQHITQIKGISVLSAILIISEIGIDMSQFGSDKQLVSWAGLSPANNESAGKKKSVRISKAGQYLKPLLVQCALSAIKDKTSYFGRKYSNIKKRRGHKKAIIAIARMMLVSIYHMILTGEEFQPCDYESFMDPKPNANPSLTVEKALNFLKRSGIDISSILVN

SEQ ID NO: 431350 - protein, 448 aa, unidentified
MNEPEEIPDADHEQLIERVAAIDVAKEFGKVCVRLPDPARPGRRISRVWDTDATTNAVLALACRLIDLGIEKVTVESTSDYWRIWFYLLESQGLDVQLVNARDVRNVPGRPKTDKLDAVWLAKLTEKGLLRPSFVPPAPVRMLRDYTRMRVDFVRECTRHWQRLEKLLEDALIKVSSVACKLDTLSTRDMIEALIRGERDPQVLAELARGRMRGKRAALIEALTGRFDDHHGELARMLLDQIDALDRQVDTLTTRIEAVIAVIPAAGVPTTDGDDHDAGEVASRARLTAIERLDEIPGISPLGAQVILAEVGLDMTRFPTANHLASWAKLTPRTIQSGARHRAGKTGKGNPYLKGLLGEAAVAASKTNTFLGERYRRIVKRRGKLKALVAVARSILIIVWHLLADPTKRFHELGADYHTTRINQGRKIRNLVRQLEALGQTVTLQPAA

SEQ ID NO: 431351 - protein, 344 aa, unidentified
MVYHTALDVSLRSVSICIIDRDGVVRFEDKVVSEVDEIVSCLKGFSEEIRSVGFEAGTLTQYLSYGLQAAGFEVICLEARQVSAALSAMRNKTDKNDARGIAQILRSGWYSRVHVKSLDSHLTRALLTSRKTVLKKCVDLENEIRGLIRLLGIKLPGTVKHGSFDELVRPMIQSNTTLADALIPMLDARLALYSSYLKLDSQVLAMARKDAICQRLMTVPGVGAITALTFKAGVDDPTRFKHSRTVAAHFGLTPRRFQSGEIDNPGHISRAGDADVRSALYVAAHSLVIRSDKWTYLKGWGLRLSKTKGHRRAVIAVARKLAVILHRMWIDETDFRFASTEVTP

SEQ ID NO: 431352 - protein, 357 aa, unidentified
MKIIGVDLHTRQQSIAMLDDQTGELVEKELSHEGDQVRNFYAGLPRPVLVGIEATGSMQWFLRLLEELEVEFRVGHPAKIRAAEPRKQKNDRRDARLLLTLLAENRFPAIWMPSAEQRDLQILLRHRDQLVRLRTRVQLRLQAVALSHGLRRGHCLWNSSGQHTLRALPLATHAGEQRDTLLALYAQLQGPIDDLDRQVAREAQQRCQSRRLMTHPGVGPITALATEVFLGDPQRFADRKAVASYVGMIPSERSSGSHQRFGRISRQGNSLLRFLWGEAAIHAVRRDPELRRFYRRKLVQKGMGKARMAAARKLGIRLWIMMRDKIDYLEFCRRGRLQRRGNGAACAGMPGAGQWSN

SEQ ID NO: 431353 - protein, 391 aa, unidentified
MIYVGIDVAKDKHDCFITNSDGEVLFKAFTISNNLDGFSELYQKIESVMDDVTKIKVGLEATGHYSYNLLGYLIDKGLPAYVINPLHTNLYRKSLSLRQTKTDKVDARTIASMLMSDVNLKSYSDTSYHNEELKSLTRYRFDKVKERAKLKTSISRLVCILFPELEKLVPQLHMASVYAMLSEFPGAKQVANAHLTRLTNLLSESSKGHYGKETAITFRDAARASIGSNMPAKSLELKHTIKLIQELDSEIDEIENEIKIIMDKINSPILSIPGISYRMGAMIIAEIGDFSRFDSPDKILAYAGFSPSTYQSGQLDGAYAHMEKRGSRYLRYALYNATKYVCHWDPTFATYLAKKQAEGKHYNVAISHAAKKLVRVIYHLEKTKQQYIKAA

SEQ ID NO: 431354 - protein, 449 aa, unidentified
MKILALDLGKFNTMCCFFDTKTRKHSFLNAPTERNYLNTLFKKHKIDLVVMEACGPSGWINDLAISHGLKTLVCSTNEDAWKWSNVKRKTDKDDALKLARMAAMNELKAVHMPSETHREFRSLVKYRKTLDHRINKMKCTIRAWFVNHGISIDIGEKAWHSGRELINSFRKPLIQCEPNELWKGELDIELTQLDALTTQLDIVVKKLEAIGKNDPRIQRIRTIPGVGPRTAEILVACIDDPHRFTTGRQVSAYFGLVPRQYQSGETDRNGRITKRGNPLARTILVECAWASLRYNEWAKGVYDRICGKQKTRKKKAAVALARKIAVLAWAMLRDEKNWEPKHMIQVTESFGKMKRELKQSLQSMKPKENSDQRKSRLRREAREAKAVAERPKRSVRTATARRSRSKTTVVPTATPPTNTSKRATPKPTTRTNLKPKPKPRRAGKLVSAV

SEQ ID NO: 431355 - protein, 372 aa, unidentified
MNNITVYVGMDVHKESFTLADYTIETEKSIHNRRTPANYKEVLKFLEYLRTIYGNDTNFICGYEAGCLGYTLYHQLTDHNVNCVILAPTTMLEKRSGKRIKTDKRDAELIAKCLGQHNYSPVHIPTAEDEQTKEYLRMRDDHKLALKKIKQQILSFCLRHNYRYEGKTNWTAAHLKWLKALNPEALYKEILDEYLLTYTTLCDKIERLDKRVEELASKDEYRESVKKLCCFIGVQTHTALSVLVEVGDFKRFASAEKFASYLGLVPGEDSSGDDKTRLGITKAGNRHVRLLLTEASQCYSRGSVGYKSKVLKTRQAGNTPQVIAYADKANERLKRRYYKMVLGKCKKHNVAKTAIARELACFMWGMMTDNID

SEQ ID NO: 431356 - protein, 456 aa, unidentified
MDRTTLLYCRRQVKSAGDQKGKQTMTPPPYDLVIGLDRSDKKADLCLINTRTGQRRSEVIDTAPEALWEWLAALRQQHPSARVGLCLEQPAVHLIAFLEAYEWISLHPINPITLQKYREAFVTSRAKDDTKDAEYLADLLLTHQAKLPMWAPQDSATRAVQQLVFHRRAVVDERTALSNRLIALLKQYFPQALELGGQDLWRPLATAFLLKWPSLPAVQKVKPPALKQFYYLHGSRSTKLLDQRLALVAKAVAVTHETAVIASFVLRVQLVCRQLQLVQHSVMEFDRQIAAAYAVHPDRPLLASLPGAGAVLGPRVLASLGAQRERFDSAASLQCYTGVAPVTKRSGGSCHIHRRYLCPKFHRQSFHEYAKESILWSRWAAAFYLQQRTKGCPHHTAVRALAFKWQRVIWRCWQDRKPYEEKIYEAALRKSGSPVVALFDRVELGKSPWKNPVRKN

SEQ ID NO: 431357 - protein, 371 aa, unidentified
MRCYKQPHRFYCGIDLHARSMHVCVLDQAGTVLLDRKLPCHFKTLLDALASFRDGLVIGVECMFGWYWLADRCAEENIPFVLGHALYMKFIHGGKAKNDRIDANKIAHLLRGGNFPVAYVYPKGMRETRDLLRRRMYLVHKRAELITHLEILNAQNNLPPFGKKLSYAANRAELNIPDRFADPSVKMSATLDLDLMDRLDALIAQVELHLTRTAKVDDVQTYHRLRTIPGVGPILALVLLYEMHQVSRFEQVGQFLSYARLVCCAHESAGKKLGWGGKKIGNAHLRWAFAEAACLFLRSSERARQWKQKQEKKHGPGKVLGILAARLARAVYHMLRKQEAFDEERLWNGQVNEGQSAAVSQKQTKARRKVG

SEQ ID NO: 431358 - protein, 356 aa, unidentified
MIKNKLAVAVDPTFHPEPVAPIPGLAAAGAALPGVADPEAALPAECWVGIDVAKAHLDVAIWPTQERLRVPRDEAGLAALMAWLQPRTPTLIVLEATGGLETLVAGMLIEAQFPTAVINPRQARDFAKALGVLAKTDALDALVLARFGQSIQPEPRPWKDEETRALTALLQRRRPLIAMLTAEKNRLTSAHRQVQADIRTTVAWLEQRIKALDDDLQGRLRASPVWRESEELLRSVPGIGPVTAVTLLAALPELGTLDRRPISALVGVCPLNRDSGQCRGQRHIFGGRAVVRTALYRATLAASRYNPVIRAFYQRLCAAGKPAKVALTACMRKLLTILNAMLKAKTPWRPPEECRA

SEQ ID NO: 431359 - protein, 412 aa, unidentified
MQTLVERACGLDVHQATVVACLLIVGQDGRVQKQMRTFGTTTRELVSLREWLLSQGCTHLAMESTGVYWKPVYAVLEGVLEIVVANAQHVKKVPGRKTDVKDAEWLADLLCHGLLRPSFVPPKSIRELRDLTRYRCKLVQSQAAERNRLLKLLESANIKLASVATDVFGVSGRLMLRALIEGKASPKEMAELAKRKLRSKIAELELALEGRLEEHHRFLLKLQLDRLELVEKDLEVLQQRIQQKLEPYAAQLALLDEIPGVDWTLAAVLIAELGVDMSVFQNVSQMASWAGVCPGNNESAGQRKSSRIPKGNVYLKTALVEAAHSAAKAKGTYLRDKFYRLKARRGYKRAAVAIAHKILVAIYHMLSQQVSYNDLGDLYLDKLNKHHLTRNLVHRLERLGYTVTLTLQEKAA

SEQ ID NO: 431360 - protein, 453 aa, unidentified
MGKTTTGGHPGLKMVNPGAAAIDIGSKMHMAAVNPDSTDVPVRAFGTFTRDLHDLADWFRCCGVTSVAMESTGVYWIPAFEILEQHGFHVILVNARYAKNVPGRKTDVSDAGWLRQLHSYGLLRGSFRPEAEIATLRAYMRQRERLVEYAAAHIQHMQKALMEMNLQLHHVVSDITGATGMRIIRAIVAGERDPDVLASFRDVRCHSSIETIRAALVGNDRDEHIFALTQSLELYDTYQAKMAGCDRKLEAAVAALTVKASGTIAPLPKARMKGKQVNAPSFDVRAALYGVVGVDLTQIHGLGPSLALKLVAECGTDLTAWPSAKHFTSWLCLAPGNKISGGKLLSSRTRRSSSRAAALLRLAAVTIGRSDTSLGAFYRRLSSRVGKQKAVTATARKIAVLFYNTLRFGMTYRDPGAAAYDERHRTRVLANLQRRARSLGYLLAPTPDTEAVS

SEQ ID NO: 431361 - protein, 409 aa, unidentified
MTPIVERGAGLDIHQATIVATVRQPDGHGGRTVTTQTFGTMTVDLMTLRDWLQACGVTHVAMESTGVYWKPIYYLLEDGFTVILVNMQHLKIVPGRKTDVSDSAWLAQCLEWGLLKASLIPPPAIRDLRDLTRYRKKQIEDRTQEVNRLHKVLEDAGLKLSTVLTDVLGASGRAMLAALVGGTTDPAVLADLARGRLRQKLPALRAALHGHYRAHHAFLLSQILAKVDFLEEAIAHVTDEIDRQVRPFEPVLMRLTTVPGIARRTAITIVAETGGDMTRFPTAGHLCSWAAMCPGQNESAGKRRSGKTRAGNRYLRGALIEAGWACTRAKGTALQARYLRIKRHRGHKKAVVAVGHQLLEIAYYIMRDGVDYRELGAQYFARRDRERATQRHLRQLEALGYRVTLESAA

SEQ ID NO: 431362 - protein, 387 aa, unidentified
MPQLNDLSRSLVALDQDSTIIAVVELSQSSWLVAGVLPGIERQPRKKLEPSAERLLGLLHRWRDEAVRAGKTITRIAVAFEAGRDGFWLARWLNARGVEAHVIHPSSVAVSREHRRAKTDRLDTELLKRAFLGWLRGERGHCSMARVPTIAEEDAKRPNRERECLVGERTRIVNRMKGTLARLGIRNFKPTLRKAADRLATLHTPEGMPLPPNVLAELQRAMARLGFVVSQIREIEQARQKRLEQQPETGPHAMVRQLARVVGVGIETADMLVHEVLSRPMRDRKAVARYAGLTGSPDESGTKRREQGLARAGNARVRRGMIQLAWRFLLFQKDSALALWYRARTADSRVGTRKTMIVALARKLMIALWRFVTTGETLEGVVLRPAG

SEQ ID NO: 431363 - protein, 414 aa, unidentified
MAGEINKSCGLDIHKRFLIATILSRSGEKQQQRFERDEDGILSLRNWVTSEKCDVVACESTSDFWVPIHDSLIKHLPFIVGNARDMKAFTHKKTDKIDSEVIAKLALNDMVQPSRVFPKKHREYRSYIRLRHKLVQKRTDIKNEAHAILAPEMFNLKDVLTDIFGKNGREILSGISSGKNVDQILQNLSPNVRKKSAQIRELLDREISQSAAIRLQICLKLIKDFDDSIELLGKEIFNYAYGNHKREMEILMSVPGIGELGAATLIAEIDNFKDFASGDKLASWLGLVPNVYQSADKYHNGRITKRGSKVARWILIQIAQAAARTKNSKLKEFFNRKKKSIGHAKAIIALARKIATIIWHLITNDEMYEDETGYVKGEVQRRKIVETEIFSVDERISIISEIFAIVEKKKPDIK

SEQ ID NO: 431364 - protein, 351 aa, unidentified
MPRTSTVHAVSAIGIDMGKNTLHMIGLDSRGAIVLREKVSRGRITSRLANLPACLIGIEAGMATHYVARELAALGHEVKQVPPAYAKPFRQGQKNDFRDAHAVAEAVQRPTTRFVPAKTNDQLDLQALHRVRSRLVSERTAVINQIRGFLLERGIIIRQGLRFLRQALPDILAKRTDVLSPRMVRIVADLASDWRQLDERIEPVTDEIETLAKSDDSCRRVMTVPGIGPIISSAMVAAIGSGAAFARGRDFSAWIGLVPKQMSTGDRTILGRITKRGNGYLRMLFMQAARVTLLRPGSWPKHSFGVWLARAAQRLHPNVLAAALANKLARIAWTVLAQERSYEARVTKPAA

SEQ ID NO: 431365 - protein, 340 aa, unidentified
MTVYAALDVSMEKTTICVINAEGKTVLEASTSSDAEAIAMCLDPYCAELDQVGLEAGPLAEWIARGLGYHGMRVVLMETRHVRAALSAMIAKTDRNDARGMAQLLRSGWFRPVHVKTVPAREQRALLAARSTLVRRHRDVENSVRGLLKGFGLRIARALRGRWDNAVREAIAGNSVLLSIIDPLLVARQAIRDQLAILDKRVRDVARADNVCRRLMTAPGVGAIVALSFRAAVDQPERFKSSKAIGACFGLTPRKYQSGESDRNGAISKAGDASVRLALFEAAHVILTRVSKWSKLKAWAVGVAKRRGAKRAKVALARKLGIVLHRMWIDATDFCWGQAA

SEQ ID NO: 431366 - protein, 339 aa, unidentified
MKLYTGLDLHSSNSYLGIIDETGKRVYKQKLPNDRERILEALNPYRNDIVGVVVESTYNWYWLVDLLMEAGYQAHLANPAAIKKYTGLKYADDQHDAFWLAEMLRLGILPEGYIYPKEDRPVRDLLRKRMHLVRLRTSLIVSLQNILSRNNGFKLKTSDVKALTEDRVAPYLAGSEDLALAGMVSKESIDFLTRQIKKIETVIETKVELKPPYEKLQSVFGIGKILALTIMLETGPISRFAKVGNYVSYCRKVSSKWLSNNKVKGKGNKKSGNKYLAWAYSEAAEHARRSYTQARAYYNRKMQKTNFMAAHNALAHKLARAAYYVMRDEVLFMPEKIFV

SEQ ID NO: 431367 - protein, 411 aa, unidentified
MHNRQNYLYVGVDLHKEQHTAVIINCWQEKLGEIQFDNKPSAFSKFLLEVETYVSDGLSVVFGLEDVGGYGRALAKYLVDHKQVVKEVNPALSFLERKSHVTTQKSDSWDAECVARILVNKFNQLPDAKPNDLFWSIQQLVSRRNALVKAQSALKNQLHIQLNHHYPSYKKFFSELDGKTALAFWQQYPLSSCLEEANIKQLTAFLLDVSNNTCSVKKASEILKLVKEDGQTMKEYQETRDFLVRSIVRDIEFKKKEMKYIERELKRLVNLLDYQLETMPGIELVTASALIAEIGDVRQFPHANKLARFAGIAPVYFGSGGKGKTHKSKQGNRALHALFYNLAVQQVQVAKGSKLARSPVFYAYYQKKLKEGKTKGQALVCIMRRLVNIIYGMMKHKTAYELPVVQEKEVV

SEQ ID NO: 431368 - protein, 352 aa, unidentified
MTVTTLARSVTGGVDTHLDVHVAAALDERGTLLGVESFSTTERGYKKLLGWLSDFGPVELVGVEGTGSYGAGLTRHLQAECVRVVEVDRPNRQRRRLKGKSDPQDAISAARAALSGEAAGEAKTRDGNVESMRVLRVARASARKGRTQALNQMRNLVSTAPDPIRAELRGLSVLHLLERASSYRPGAKRDIVSLTKFTLRMLARRAITLEEEISEIDAILKPLVKETAPELVATLGIGTDAASALLVAAGDNPGRLRNEAAFAHLCGASPLDASSGKNERHRLNRSGDRQANSALWHIVLTRMVYDPRTTEYIDRRRTEGLTKKEAVRCLKRYVAREVFSLLPHEKIGLDSP

SEQ ID NO: 431369 - protein, 422 aa, unidentified
MKNSTAKKLKQVPEGYLIIGVDPHKKKHAVVVMTQDAIVQTKFKFGNSRDGFEEVLQRARAEMLKTGSKGVIFAIETASHYWRNLAYFLDDHGVPFRLVNPFTLKRRREGEDINRRKNDFRDAEMAAELLRTGKFTSTRLLYGVYAQLRATYNAYRRLVKERTRHTNLLKGLLDGLFPEFTQVFKNPCGKTALTMLSLCAVPEFIAGMKLEDFVDSIRKEFKGRAPKVQKLHAIHSIAGISIGIGAAAESVSAELSLLVQRIRLNTEQIERTENVLVSLVNSIGDSRYLLSIRGLSYITVAGLLAELGPLSFYQNAKQLIKMAGTNPTESESAGKRGSRTPMSKKGRPGLRWCIWTAALSLLRHNPDFRYWAEQRQERPVQSHPLKKREVIGATANRLLRLAYALVRKQVLYQVPQMTGVTA

SEQ ID NO: 431370 - protein, 369 aa, unidentified
MSASIIDLQKRSTLMNCEKYIGLDVHQATISVAVMDLTGKLVMECILETKASTILEFLGGLRGTLSVTFEEGTWAAWLYDLLKPHVAHVLVCNPRKNAALKQGNKSDKIDARELANRLRLNDLKPVYHGETGVRMLRELARSYLTIVKDLSRVMNRLKALYRSWAIPCAGRDVYYTRHRSQWLEKIPEAGTRRRAEQLYQQLDMLQHLRHQARRELLAESRKHSITAKLRQIPSLGPIRSALAVALIQTPHRFRSKRQLWKYSGLALETRISGEYVYVHGERRRSKKQISIRGLNKDHNHDLKGLFKATATRASVIPGPFQDFYQRSLAKGIKPTMVRLTLARKIAAITLTLWKKGENFDIEKLKSQAA

SEQ ID NO: 431371 - protein, 403 aa, unidentified
MRHVIAFDISMGKSYMVIYNAQKQCIFEKEIKHSKSEFEELQKKIHELTNETGKSPEIVFEATGIYSRQLERFMQDNQYTYCLLNPLEAKLQCDSLRIHKTDRSDAHRLAITHFTVTRRVSHGTDHLFHQLKSLSRFYSELDGELSMIRSRMHKVIQLTFPELEKMFTSKSDLFLNFVQLFPHPDCVLNLSKTIIKNRIRANTNKKISTIMAEKKAIQILEIAKNSYPAVSQNDVLCDQLKVYARRYQELLHQKEHCINKMVHLAEQRAEYSIILSLPGIGPNTAVRLMAEIGDITRFANNKQLNAYAGIDIRRFQSGKTFYKDKINKRGNKHLRKLLFLIIQNMIKQRRYGRNHIIEYYDKLKTQPYNKCHKVASIACVNKLLKLLFHLITHDIHYDYRLTA

SEQ ID NO: 431372 - protein, 343 aa, unidentified
MSQTPFVAESIVSVGLDVHQYVVQVCVLNRAGQVLRNRRVANDVTAIVAAIHGHGGVHGVALECSTGSAALADALIQRTGWDVHLCHPGYVRRLRQNPDKTDLSDAHLLADLVRVGYLPRVWLAPPAIRDLRTVVRYRQQVVDALRNTKLRIRALLREHRVPDVPQYLWTRRGLLWLRNLKTWPVLAGWVLESHLAEVDSALARLARVTARLREVAGQDALISALLAQAGIGLVTACVLRAEIGHFRRFRTGQQLSRFCGVSPCKASSGARQAEAGLIRGCSRLLRDTLIEAAHRLGRCAPHWQAFRAQLRARGQAGSLIAAAVANRWLRRLFHELCALELAA

SEQ ID NO: 431373 - protein, 354 aa, unidentified
MNIKYIGMDIHKETISIAVMNGEGKVVMESIIETKASTILQCIQGIHGDLHVTLEEGTWAAWLYDLLKPHVTELVVCDPRKNALMKEGNKSDKIDASKLADLLRGGYLRSVYHGENGLRTLKELARSYLTISKDLTRVMNRVKALYRSWGILCGGQQVYAPRHRTEWLNKIGEAGVRRRAEFFYQQLDALRELRQAVRKDLLAESRKQSATKLLRQVPSIGPIRAALLIALIQTPHRFRTKRQLWTYSGLAIETRDSAQYRYVGGQLQRSKKPQQLRGLNQNHNHDMKTIFKSAASMASSQEGAFHDFYQGLLTKGMKPAMARLTLARKIAAITLILWKKGAHFDAEQLKPQAA

SEQ ID NO: 431374 - protein, 488 aa, unidentified
MEATYRRCCGIDVHKKSVMVCVLPPAGERKGEPRKRKFRTYTRDLKQLRAWLKNCKVTEIAMESTGQYWRPIWNLLEGHFEKLLLVNPQHIKGLNGYKTDPKDARWIADLLESDKLKGSWVPPRDIRELRDLTRQRVHVMEDQNRVKNRIEQLCQTGNIKVSSVASDLFGVSGRRMLKAIVEGKRDPGWMADYARGTLRGKKQELELALNGSFTDSQRWLLDKQLQHLEWLEKQVQGLEQEIERRVACQEEPMRRLMTIPGIDRKTAWTLVAELGVDMSVFADAQHLASWAGLCPANRESGGKRMSGRTRKANSYVRRAMCQSAWAASHTKRTWLHSFFRRIQVRKGAPKAVMALAHHILIVAYNVLKRNEEYVELGGDYHDQRNKPKLVSRLVERLTRLGYHVDLKPVESHSSEQPNPVADLVPDLPSEQPQEMAAIANDTPAVAESTAPRKPKRGRPCKCIERGIICKHGSSIKVNSLKEQAHNGS

SEQ ID NO: 431375 - protein, 405 aa, unidentified
MFDTEDVGVFLGLDVGKSSHHGHGLTPAGKKVFDKQLPNSEPKLRAVFDKLTAKFGTVLVIVDQPASIGALPLTVARDAGCQVAYLPGLAMRRIADLYPGEAKTDAKDAAVIADAARTMPHTLRSLELTDEITAELTVLVGFDQDLAAEATRTSNRIRGLLTQFHPSLERVLGPRLDHQAVTWLLERYGSPAALRKAGRRRLVELIRPKAPRMAQRLIDDVFDALDEQTVVVPGTGTLDIVVPSLAASLAAVHTQRRALEAQINALLEAHPLSPVLTSMPGVGVRTAAVLLVTVGDGTSFPTAAHLASYAGLAPATKSSGTSIHGEHAPRGGNRQLKRAMFLSAFACMNADPASRTYYDKQRARGKTHTQALLRLARQRISVLFAMLRDGTFYEPRIPEDVELAA

SEQ ID NO: 431376 - protein, 433 aa, unidentified
MKYKLKQKQNQRITRITESTLVVGADIAKKVHVARAVDFRGIELGKDCVFHNDQEGLSKLATWMKELGQAHGKTNIVFGIEPTGHYWFPLAAYLQEQQQIQVVVVNPHHVNKTKELEDNSQTKSDYKDAKVIADLIRNGKYSEPKLPTKEYAELRILMNLREKVSASLTQVKGRISNWFDRFFPEYACVFKKWEGKASLMTMRAFPMPADIVGKGARDVLVHWKTEVKRGVGIKRAEKLVAAATASIGLTEGSMAARVELSTLLGQYDLFSSQLEEIMDKVLEILEHIPGTKEMLTVPGVGAITVAGFLAEIGDLNNYDHGQQIIRLAGLNLKENSSGKRKGKTGISKRGRSRLRALLFRAVMPMVAKNEEFKTLHKHYTTRSQNPLKKKQSIIALCGKLIRVLHTLGTKQREYSAIDVMGPVRQFQIQQEAA

SEQ ID NO: 431377 - protein, 377 aa, unidentified
MSKDTLYVGLDTDKKHIDVALAEELPGGEVRYWGKIANEASAVARLVKRLQAGGRPLEMCYEAGPCGYGLHRLLNGKPGVRCRVVAPSMTPRRPGDRVKTNRRDSIALARLLRAGELTAVWVPDATHEAMRDLVRARGAGVADLVRCRQRIAGFLLRQDIRYAGKPWTKKHRVWLGQLVPARALPAHRLMLGEALQALDEATARRDRLTDHIAERVPDWSLAWLVDALQALRGFALINAATVAVEIGDPRRFAKPSQLMAYLGLVPSEHSTGNSVRRGGLTKTGNGHTRKALIEAAWTYSRPARAPRGSARHPPAVAAIATKACHRLSLRYRRLTNTRGKRPVIAVAAIARELSGFVWAIAHAAGPAAATPERSTQR

SEQ ID NO: 431378 - protein, 412 aa, unidentified
MIHPLLVGVDVHRKTNTISAMDVSGREVTSRFTVENNRPGTAALAQELRSLAAEGGYDAILLAAEATGWYWWHFFRALDEDPDLQRTPLTLYAFNPRLTAHFKKTYADLDKADLIDAFVVADRLRLGRDLPQPFAYDEPGLRLRFLTRHRFHLVHQLVREKAYFLAHLYLKASEYTHLKPFGDVFGATSRALIQGYPSIEELAAIPFDDLVEIIDQQGKRRFADPADNARQMQAVARNSYPLPPALQVPVNLILQQGLQQIAALKRQMQRTESAIAEALQPWPHTLDTVPGLGPVFSAGIIAEIGHLARFGYDEAKVAKFAGLRWHQSQSADFQAEETPLTHSGNRYLRYYFCEAANSVRMCDAEYRAYYERKFHEVRLPQHKRAIVLTARKLVRLVVRLLTTNQPYRPRRA

SEQ ID NO: 431379 - protein, 425 aa, unidentified
MNSTQNKKLAQVTENNLIVGVDIGEGKHYARAFDWRGVEFSRKAFTFSNTREGFITFQKWVEDVQKKTGKKDLLVGCEPTGCYWLTFQMYLHKRNIRLVTVNPYHVHTVKELDDNSPEKDDMKDPKTIAGLVREGRFTDAYVPEGIYADIREAYICRDQIMKQHVRLANQIQGWLQKYFPEYLDCFKKFDTAGGLMVLQRAPLPEDIIKLGAEGINQIWREAKLRAVGMKKAKTLIEAARDSVGIPGGEAARYELQCLIEDYLLKDRQKDRAEELLRSYLMQVPNIEKLLAIKGVGFETAAGFVAEVGDIGRFTDPKQIQKLAGLEIVKAQSGKKKGCPRISKRGRCKLRRIMYVAAKPLVTWNEGFAAVYSRLRYREVHPLGRMQAKIAVACKAIRVFYAILKHGYDYDPNLLIQNDTIPVATQ

SEQ ID NO: 431380 - protein, 392 aa, unidentified
MLFVGIDIAKRNHEASVIAQDGHVVRKAMRFANSQAGYNKFMDMVRSLSEPVVFGMEATGHYWLTLYTHLRNDGFTVHVINPTQSDALRGMYIRKTKTDSVDSVIIADVIRFGRYCETSVDPGDLQAMRELCRQRFYIIDMASDLKRKVIALLDQVFPEYEKLFSDSFGLSSMELLSQYTTPEEMLSVSSQQLAEVLKKASRGRLGAEKAVEIQDASKNSFGIVMASSSFSLIIRQYIEQIRSLESSVDIFDTEIARLLSGFDTQLTTITGIGSTLAAVILSEIGGDIRRFSSPAKLAAYAGVDPTVKQSGDFSGTRMKMSKRGSPYLRRAIWLASTVAAFKDPVIHALYERKRAEGKDHMTVIGHVCRKMISIIFAVLRDNTPYVPAGISD

SEQ ID NO: 431381 - protein, 356 aa, unidentified
MVIVAIESHQGALHMQISTIGLDIAKNVFQVHGIDAAEKVVVRKRLRRRQVLEFFKALPPCLIGMEACATAHYWARELTKLGHEVRLMPAKDVKAYVKRNKNDAADAEAICEAVRRPTMRFVRIKSAEQQGQLMPHRTRDVLIRQRTQIINALRAHLAELGLVVAQGNAGVNELRAIVTDEQDTRLPIDARASVIVLAAQLEALESVIGAIEKRIKMQHRSSEASQRVEAIPGIGVIGATAIVATVADPTIFRSGRDFAAWIGLVPRQDSTGGKQKLGPISKQGDRYLRRILVVGAIAVLRRAKENPGKYPWLTQLLARRPFKVVAVALANKMARMAWALLAHGGTYRAPELAETA

SEQ ID NO: 431382 - protein, 346 aa, unidentified
MKILALDLSKFKSVGCVYEAESGEHRYRRVNTRPAELDDLLVELEPDRVVIEVSSVSGWVSDLVRALGIELQVVNTNGEAWRWRSVKQKHDQADALKLARLSAMNQLELVHVPAPEIRQWRAVIKYRQHLVGRRTDIKNHVRELLVREGVILPRGRKCWSQEGCAGLEEKARSWDEVGISELWRGELQSELQQLQVIQERIREVEAKLETLAAADDRVAQLRTIPGVGPRLAEAMVALIDDPHRFKRARDVGAYLGLVPRQYQSGEMNRLCRITKRGSKLLRSLLVEVSWVSLRYNPWLRSLYERMNRGSKTRKKIAIVAVARHLAIYCWAMLRDGTTWRQPGTNQ

SEQ ID NO: 431383 - protein, 354 aa, unidentified
MKRVKKELQPGDKVFVGIDMHKLKWHVTVRTANFELFSGSIPGKWEALQRILNRYQGHRIHTVYEAGYFGFWLHDDLVEYGAECIVTPPSLIPQEYGNKVKTDRRDSRKLAHFLAKGMLKRVWVPTEKERYHRQVIRRRRQLIGDRIRTQSRIKAELQLHGLNLSAPHGKWTKIFLGNLGRIRFNNRWMQESFKRLLEQYHFLDEQIAKQTDLLRELSETELYKERVEILMTTPGIGMIAAMELLLELQDVHRFQRADQLAAYVGLTPSQYSSADKIRMGRITCVGKNSLRAMLVQASWALIRKDGVMREKYDRLKSRSGGKRAIVAVARTLLIRMRRMLLDNNPYVVGLVATN

SEQ ID NO: 431384 - protein, 353 aa, unidentified
MPVYVGVDFHVKTQTLCWLDTTDGEIHQHTLDHQREDVAEFYRQWATPVTVGVEASGYAQWFHHLVELAGHRLLVGDAHAIRQFARRRQKNDRRDAQLLLDLLIHGDFPAVHVPPPASRVVLDLLHHRQRLVRMRTMLKNSLQAVALNHRLARGPSLFTSRGRTAFDALPLSRAEDWQRRDGLELVDELNRRIAALNQELDRQVLADPRVERLRTPPGVGRLTALAMVHTLEPAARFSHRRQVAAYCGLDPQERSSGETVRTGGITKQGNRLLRTLLVEAAWSAIRPGQDAALRQFYFHLLAHQPAGVAIVAVARKLALRLYRLLREGIEYDEFRRRGRDARCARGMTETVPV

SEQ ID NO: 431385 - protein, 348 aa, unidentified
MLADELDYVLGVDTHRDEHVMAVVTAPAGAVVAGAAAPANAHGYRELLRVAEQHAPGRRAWAIEGTGSYGAGLSRYLHARGESVLEVSRVPRERRLRGKDDALDAARTARAALASDTLALPRTGERREALRLLLVARRSAVDVRREALTQLRAVIVTAPELLRQELCRLPEGKLLDRCSRFRRTNSAGADELATRIVLRSLARRIQAATVEAAELEREILAHVRALAPTLLDEPGVGPIVAAQLIVAWSHHGRLRSEACFARLAGVAPVPASSGQTTRHRLSRGGDRQLNRALHTIVLHRRQHDPATRDYIARRIAEGKSRRDATRLLKRYLARHLYRLLQQQEPMMA

SEQ ID NO: 431386 - protein, 339 aa, unidentified
MKQEIVTVGLDLAKSVFQVHAIGSDGAVLIRRKRRRTEVIGFFTDLPSCLVGMEACASAHHWARELIALGHEVRLMPPAYVKPYVKRGKTDAADAEAICEAVTRPTMRFVAVKTVEQQAVLMLHKSRDLMVRQRTMLINALRGHLAEYGIVTGIGAGGVTAMLKALHERQEELPAHARSALHGLAAQLRALTSEIDRLEAQILAWHRADETSRRLATIPGIGPITASAISAAVPDASLFRSGRQFAAWLGLTPRANSSGGKERLGGITKQGDGYLRRLLVVGATAVMRMTRKNADRQPWMAQLLERKPAKIATVALANKTARIAWAVMSRKEVYAAATA

SEQ ID NO: 431387 - protein, 418 aa, unidentified
MKVVFPTCCGVDVHKSFLVATIIKTPENSLQPSYQKKRFSSFNSDLNRFADWLYENDCMDVCMESTGKYWVPVFNILEKREIRVVIANPKWVKAVKGNKDDTKDSKWIGDLFRIGLVKSSFIPDKDIRVLRELTRYRYKLTSMKSSEKNRFQNAFTVCNVALDSVVSDMFGKSAAAITDYLTSDENFNAKHCVSLLQGSLKKKADDVLQSIEGYEITVEQKTRIGIVRDHLRYIDTLIDRVDSCINTMVDKYEGYIVLLCTIPGVDRSSAITILSEIGVDMAQFGSSKRLCCWAGLTPGNNESAGKKKSVRISRAGVYLKPALVQIAHAAVKDKSSPYYALKYERIAKRRGKKRAIIAIARMILTTVFVMLSNLEEWNPVDLYRVDMPEPLKEKQLAKAVKQAVRFLETQGIAVLDSA

SEQ ID NO: 431388 - protein, 361 aa, unidentified
MAGTMTWVGLDVHARSTHAAAIDTMTGELTRVRFGAGTEGPLAWLAELPGPVHACYEAGPTGFGLYRAAVGAGIGMQVIAPGKTPRGPSERVKTDRKDAELLARLLLAGSLTRVVVPPAEVEAAREMTRSHDASRRDLMNARHRVSKMLLRHGRVYPKSTTWTAEHRRWLSQQQFPEPASDLVFADLVAAVDGLTSRKAAIALRLSEVATDERWWPTVARLRAFRGIDTLTAFSLHLELGADWKRFERAPALSAWLGLTPSLSQSGESSRQGAITKTGSVLARRLLVESAWHYSRQPRLGATLANRQAGQPDHILAISNRAQQRLHRVNRSMRARGKPHNVAVVACARELSCFLWAAATVD

SEQ ID NO: 431389 - protein, 345 aa, unidentified
MGPMYYIGLDVHKQKISYCVKDSSGKIYAEGWTPATRFDLDRWMKTLPQPWSAALEATMFSGWIYDHLKPHAAELKVAHPLMLRAIAAAKKKNDRIDANKICDCLRCDFLPECYMAPTTIREQRRTLRYRNLLVRQMVQMKIKISTLLMEAGVSYNKQKLHKAGYFRELLATNPDIDEGLCSLLRQCREMVVRLGKTESALIHSLQHDRLLVERVERLMSIPGIGPITALTWVLEIGEVQRFSSIKKVISYCGLCGDEQRLANSVQRTPLSKQRNKHLQTTLIEAAKMAPRYSPTLAMLYDREKQKGNANRATLAVARKLVAYLVAVDRGQTHFLVLDQETRTAA

SEQ ID NO: 431390 - protein, 453 aa, unidentified
MARKRKKDAKQKNAMLPVMRPDAAGIDIGATEIFVAVPADRAAENVRSFPTFTQDLYALADWLTECGVKTVAMESTGVYWIPLFQILEDRGFEVCLVNARHVKNVPGRRTDVSDCQWLQFLHSVGLLRASYRPEQEVCAVRALLRHRESLVQMAATHVNHMQKALDQMNLQLHHVISDITGQTGLAIVDAILAGKRDPFELAKLRNERIKASEEVIAKSLVGDYRAEHLFTLRQSLAAYRSYQKLIDDCDREIRRSLEEFQSPRQPDASAGDNSKTQPKTPSTESVLRSELKRVFGIDLTKIPGIRVGIAQTLFGEIGPDFTKFRSASAFASWMGLCPDNDISGGKVLWVGTRKVNCRAATALRMAAQSLHHSKSALGDFYRRMRAKLGAPKAITAAAHKLARIIFHLITTRQEFDDSRFAADQLRYQKRQDAKLRAKAKAMGFELSPLPQAG

SEQ ID NO: 431391 - protein, 426 aa, unidentified
MISVGIDVSKGKSTVCILKPYGEIVSKPFNITHTQKDLSELSSMLFRLNDEVKIVMEATGIYHLPVLTYLQEKGFFVSVINPYLMKSYRNESLRKAKTDKIDSRIIANYGIDHWFKMKEFQTSGEIYEELKLLGQQYRHYMKLHLLSLAELTHLLDLTMPGIKNLLASWNETNRKDKRSDFVERFWHYDVITSMSEQEFTEEYILWAKEKKYVPSQEKAKVIYTLAQESIPTLPSETSSVKMLVTEAVRVLKEVDATLGLILSRMQEIAKTLPEYSVVREMGGVGNTLAPKLIAEIGDVRRFRNGKALVAFAGIDPPPYESGQFVGCNRKISKRGSASLRKVGYETMRSLKMRSRPEDPVYRYVVKKESEGKSKKSAKIAGLNKFLRIYYARVQIPLHRITDSASNGSVFPVVTEHFSASSDHAFL

SEQ ID NO: 431392 - protein, 385 aa, unidentified
MGIETFIPRDYDVFAGLDVDKKSISVTFTDHQGLLKSMRMPYSVDHLVNHVRKHYGDKKVAFAYEAGPTGYGLYDGLVAQQYPCLIASPSMIPKAPGQRVKTNRLDSRGIAENLRGGQLKSIHIPTTLYRELRHLTQLRDALVSEMVAMKQRIKSLLLMEGLEFPPAPPGSQWSFLVKAKLRKLPCSSVVRFKLDQLLDNLEFGEKQILKTTREIRRFCHNDPELSQCIDYLKSLPGIGWIVASQMMARIGDWRQIKNIREVPAFLGLVPTESSTGERTTRGSITHSGDPRLRSKLIQASWSAIRQDGELLKFFRTVAKKHPRHLGPRVAIVAVAHKLCVRAAVVLMKQRPYEIREKVQSAPLTQEETVPQGTTRRRRVPGEKIS

SEQ ID NO: 431393 - protein, 336 aa, unidentified
MFQLGIDVSKKTLDLCLLREGVKGRVKTRKLKNDFNAVGTVVSWLRKQHCEPGDVHIIMEATGVYHESLAYGMHDAGAKVSLSNPHRSREFARGMDILTKNDKVDAYMLACYGALKEPEPWEPPPENVRYLSALLRRRDALVTDSSREKNRLEKCRATDTPAAVAESIENVLRNLSAELQRLDTLIQGHLGQHPELKKDFDLLTSIKSVGFLLGLNMLVILRCHHFETAEQAAAFLGVVPVEKNSGTSVRGRGRLSKIGSPEIRAKLYLASLCGMRFNPTMKAMYERLCQRGKAKMCAIGALMRKLVHWCYGVLKTQKPFDAKYLVSDEHSACKVT

SEQ ID NO: 431394 - protein, 359 aa, unidentified
MEHLAIDLGGRESQICIRSSEGEILLEHRLQTASVKRYLKGRPPSRVVLETCTEAFAVADAAVAAGHEVRVVPAVLVRSLGVGARGVKSDRSDARTLSEVSCRIDLPSVHIPSQQARDRKTMCGMRDGLVECRTKLINTVRGWLRAESRRLRSGDVATLPSRVRETVKERPPFVERLLLSIEELTKQIAEADVELSAQANADATCECLMTVPGVGPVTAMRFVATVDDVGRFASAHQVESYLGLVPGERSSGDHKRMTSITKAGSSKMRWALVQACWVARRSARMDPMVRWAAEVEKRRGKRAAIVALARKVAGIMYAIWRDGSTYQPDRGAARIDSVGTLEDPIATAAVLADAARLQQ

SEQ ID NO: 431395 - protein, 339 aa, unidentified
MLFAGLDVSSARIALCVMNEAGELVCQASIESEPGVIAEELRPWRDQLSLVGLEAGPTSACLARELRALDLPVTVIDAAHASAALRTGFRNKTDKNDARGIADLMRVRKFRPVHVKSPEAQRDRALLSVREHLRRQGLDLRNAVWSILQAEGLKPPKLTTSRFQQLLVAALEDPDLAPVLTPLVRLIDKTEEEVAELDRQIAKKAKARATCRRLMTIPGVGPLTALTFATGIDDPARFSRSRDVGVHFGLTPRRYQSGDMDWSGSISRAGDAAVRRALYQAANAMIHHSRRWCALKSWAVRLAARRGLKKAKVALARKLAVVMHRMWVDGTDYRVSTAN

SEQ ID NO: 431396 - protein, 338 aa, unidentified
MELYAGIDLHSNNSVLLVLDEQDRTGFAKRLPNDLAAIIAALKSCAGAMHGVAVESTYNWYWLVDGLQDAGFTVQLVNTAAVKQYDGLKHSGDFSDARHLAHLMRLGILPTGYIYPREQRAVRDLLRKRSQLVRQRSAQILSIENLIARNLGAHAGGNEIKRWKDDDIEKMPLLAEQKQALKANLAVMRCLDEQATALERSILAKAKLRDDYQALKTVSGIGEVLALTIALETGDVGRFESPGNFASYARTVNSRHESNGKKKGEGNTKCGNKHLAWAFIEAAHFAVRYDAAIKRWYQKKCANGLAVVAIKAVAHKLARACYHVMKDGKPFDVSRAFG

SEQ ID NO: 431397 - protein, 421 aa, unidentified
MEVTALPAPVFCGVDWAEDHHDIALLDVGGKQLAKQRINDDAEGFAQFAALLSEHGDRADAPIPVAIETSRGLLVACLRATGRPVYAINPLAVARYRDRHSVARKKSDAIDAAALANILRTDMPAHRPLPADSELVQAIAVLARAQQDAVWDRGQAHNKLRSQLREFYPAILDASAEHKHGLCSREARAILAAAPTPTMAARLTRRRLESLLKQAGRVRGVQAAAERLHGVFQRNYLHQLPQVEAALGQQTSALVRQLNTACLNADQLEEATTEAFEEHPDAPIIRGFPGLGSLTGARVLAEIGDDRTRFASANSLKAYAGSAPVTRASGKSCTVMSRKIKNQRLAAVGYLWAFVSLTKSPDARAHYDRRREAGDRHVAAQRNLFNRFMGMLFHCLQHGQLYDETKAFPIQSLEDQSTIAA

SEQ ID NO: 431398 - protein, 348 aa, unidentified
MLADQLDYVVGVDPHRDSHALAVVHVASGAVVFEATVAASSDGYARALKLVDQHAPGRRAFAVEGTGSFGAGLTRFLTVRGERVLEVGRLRRERRSGGKTDALDAVRAARSVLTSERPGTPRAGGERQALQALVAAREGAVNAKRAGLCQLRDLLITTPEPLRSELRPLTRARLLQRLAATRPDGRRDAELRGSMLALRSIARRVLQLTAEERELAREIETLTRRLAPQLLDQPGVGPHAAAQLVLSWSHQGRITSEAAFARLAGAAPIPASSGQTIRYRLDRSGDRRLNRALHMILVTRKRSHPATIAYIERRLQEGKTRREANRCLKRYLARSLYRILEHGGRLAT

SEQ ID NO: 431399 - protein, 386 aa, unidentified
MIVIGADTHKGSHALAAVDEGTGKVRGSRQIKADGPGHLVAVRWARELDEERVWAIEDCRSCSRRLEQALLAAGERVVRVPPNRMGASRKGEREPGKSDEIDALAVARAVVKDGVERFPVAYLNEQAMEIRLLLEHRNDLVGERTRTVNRLRWHLLELCPELEASLKRKALNQPRTLDRVDRQLRKLPTGARVRIAREQISCLRGLNRDVEQLAAELAELVTAHRPQLLAEQGCGALTAAILIGHTAGNERFHSEAAFGLQTGTAPIPCSSGKRTQHRLNRGGDRQLNHALHIIAVTRAQHDPATKEYLARKEAEGKTKKGALRSLKRHLARRFHQLLSEPPADQHPTTEPEPIIEPELPPTPNRPKAQRDVEQITAAPSPMLCIS

SEQ ID NO: 431400 - protein, 430 aa, unidentified
MNESVCEQPLSPKAAAFIGIDWADLKHDVVLRSVGDPTKSEHQIIKSEINALADWIAQMYERFEAKGKVLVCLEQSRGALIYQLMAYELFELYPINPSQLANYRRTFFSSGAKDDRPDADLLSELVMCHRDRLKAWKPDDQLTRELASLNEGRRNAVDRRTDLANEIKSQLKLYFPVALQLLDNDITTALAADLLVQWPTLAELQKVSPGKLRKFFYGHHSRQEKKILERLALIKEAKPLTTDLAILRPNALRVKLLAQQLKSLLPFIAEYERRIAEIFGSHPDRFLFDNLPGAGPALAPRLLTAFGTDRDRFEVAGDLLSLSGIGPVRIASGKKTGKHASVHCRRACPKFLRQSFHEFGECSIRYSPWAQACYQAQRGRGKGHHAAVRAVTFKWIRILFACWKQRTPYDPQRYFQALQTRGSDYAQTTA

SEQ ID NO: 431401 - protein, 419 aa, unidentified
MSFKILKFNCCGLDVHKTWIFACIGITDSNNRTEYKQARFSSFTKGLNELCDWLAKYNCTDVCMESTGKYWIPVFNILEQHNLWITLAHPKYTKPMKGNKTDRKDAKWICDLYMCGMVKPSFIPPADIRELRDFVRYRYKLTCMITGEKNRAQNCLTVSNFKLDDVFSDVFGKSSRSITEQILQHPGEKFDVAPFVHGRCKTPIEEIQAAVDGAISKEQAVKLRQCLNHIDELNKHISEIEQEIFRLSDKYETALNLIRTVPGFDKNPLTAIQVLSEIGGDMSVFPSAKHLVSWAGCCPRNDQSNQKIKSTRISRAGSYFKPVLVQVANALIKSKKHLEFTNRYKRIKARRGHKKAIIAICRMILTAIWHILTDLKPYTPEGFLESRPVKKEKILSTSQALNLLRQRGYVIKDEPLPAS

SEQ ID NO: 431402 - protein, 343 aa, unidentified
MECYVGLDVSLKQTSICVVSGTGSVVREGVVASDPDAIAAFVRSKAPGAIRIGLETGPTSTWLWTELKRLGVPVICIDARHAKAVLKMQINKSDRNDAAGIARIMQTGWFKEVRVKDLDSHTLKALLVSRALLVKIKRDLENQIRGLLKNVGLVIGRAKFNVFAVRAAELIEDRPELIAVVGPLLKARKAIEQQTDDLDRKVVKLARYDAQVRRFMTVPGVGPITALCFKATIDDPTRFKRSRSVGAYVGLTTRRHASGEIDWTGRISKCGDAMLRSYLFEAAGVLLTRVPKWSALKAWGMRLAKRNGLRKATVAVARKLAVILHRMWIDRTEFNWSKQEVAA

SEQ ID NO: 431403 - protein, 412 aa, unidentified
MKDLLEISCGLDIHKEKIVACILTGPLGKPTHSEIREFTTLIPDMLALRDWIISENCHHIAMESTGIYWIPIYEILEDAFSGDITLLVVNARHMKNVPGKKTDMRDSEWISTLLRAGLLNASFIPEKRIREFRDLNRYRKSIIRDITSQKNRVEKFLQSSGFRLSSFISDIFGASGRNIILHLMEHGQIDKMSLDSYLKTKTRKRIDEILMSVNGTLSEHQKSFLKILMCHYDSMKEHLIEIETHLQEDMLPFALQIEQLNTIYGISTTASCAIIAEIGTDMKPFKTAEHICSWAGLCPGNNESAGKRKSTSITKGNPYIKSMLCEIAWVIAGKRNTYLSAWYWRIKQKKGARKAIVALARKLLVIIYTMLKQGTNFDENCFEVRRKNCEQKQLSRYIRELEKHGYTVEAQV

SEQ ID NO: 431404 - protein, 402 aa, unidentified
MANIQCKKSNQGGACIVVYVGIDISKYKHDCFICYDTGEIIVENLSFENNKKGFQQFLNLLKPYDNSNVRIGLEATGHYGLNLKLFLEKNNYTFMEFNPLLIKEFAKSLSLRKTKTDKADAITITQKLMSIPYKPNSKLFYHIYSIKSLTRLRETLVKQRSKYMVQMTNVLDIIFPEFKPFFGNRFSATSLYILEKYKSIEKIENMRDFDSLRKLSRGRFTYSKFVKLKDLTKNSIGESNQIYESQLQLILNLYKEIDIKINSLDIQISTIVKELNPPTLSIPGIGMITCATIIAEFGDISKFSNPNKMLSFAGLEPGVIQSGTMFGKGKMVKRGSGYLRYALMNVAMVVIANNHVFYDYYYKKRKEGKSHRVALSHVCKKLIRVIFILETKHIIFDSSLLR

SEQ ID NO: 431405 - protein, 401 aa, unidentified
MTKQKEMFVGIDTSKNSHQVSFHNPTEIKKDLKIGNNREGFEELTKRLKSYRSEGYRMKVACEPTGHYWENLGYKLKEENFELKLINPFHTSRYKEIFDNTPQKDDVKDSRIIAQLLRQGNTLHENLPKGPYAELRELTNQREDLLEEKSRLRNKLDKWLDRHFPEYPKLFSELFGKTCLGILKEYMGPEKINEASLDKLTEKVISLSHGKLREERAKEIKDRAEETIGHTIAPKAAQIRLLHLLTRIDSFQERINKVEEMIDQRLDELEQSTYLQSIPGVGWWGAAVFLGEVGDPTRLPRAKSVEKIAGLNLYRTQSGKTKSKLSITKRGRSTLRKVAYQLAVSGINNNREFSQFYERKLDRGKAKMSALVALSAKILRVMYGVVKNEENYRPLEERVDS

SEQ ID NO: 431406 - protein, 374 aa, unidentified
MKQKTNLSNRKFIGVDLHTDQFTCCALSENDGVIWRQTFRLTPEALQEFYNLVDDQTVVSLEATSNSFKFKEVIEPYVGNVFIYDPHKLKLISMVGKKTDKVDAHKLAMYLKMQVLSGEKMLNPVYVPSQDIQDLRAWFTNYKLVLKEKQSIQNRIYSIFIQNLYQIEKKQMFTLKGKKVIMEMDLSANMRSELEYLYSIHDFLTAKIKDVKKKIALLGAPYIDRIKILTSIKGVSVFMAIAFIADFAVIERFKNAKHFTSYMRSAPRIESSNQITKIGKTNKHGRKLSISLITQSITHFKKGNPSIARWCESKKDHKSSGKIRMAVCRKVFSEMYHMLVKNELHYHCDSENHELKLKQYASFLTKNGFVLNES

SEQ ID NO: 431407 - protein, 266 aa, unidentified
MYSIGLDVSKSTINCFVPNGEIDLVIDNNEKSLNQFLSKLKKIYKKDIEQIVFIFEPTGSYSTLLKRFCTKKKIKAFIVNPKQSHNFAKAVAQRNKSDEIDAQVLSKMIVIASENDIRVPIYDENVEDIKDYMSYYKFIIKQLVQAKNILDAMNHNQSNKHILKSLEKKIDAFQKESLQIIVKIKKIISQDELLCQSFNNIKTIKGVGDITAIVFLHLLLKYPAANQRQIISLTGLEPTTKPSGTSVRTKPRISKLVQNYIEELCL

SEQ ID NO: 431408 - protein, 414 aa, unidentified
MLYIGIDWATDSHTVTLLAASGEVLETLAIENRLAGFLTLLETIRKHLRELEPAATPDSVSFAIEDRNQRLTDFLLAQDFQGYLIEPSRMKGYRLRYRSSGNKTDPDDSFVLADVLYRDHDQLPRIAPDSDVVRSLKTLLRDRESFVRDSTRLSNRLTACLRQYYPEALGFFEDVAGKTSLDFIAAYPDFAAASCLSRREVKQFLAKHHCHHQTQLERILGVLTLDPTPIPAVIVRTKRRQALAIIQQLRMVQAAVAEYDAEIERLGKENGEVKRFRGMPGGGPIIGAGLHTLFGDDRTRFTSAMAVQSLVGTAPKTIQSGQFRTACFRFGCNRFYRTLLQQMALGALRRSAWAKQFYRGKRREGKTHQHALRCLANLLLKIAYAIWRDRTEYNEDRHMAQIMRHRLRIASNSV

SEQ ID NO: 431409 - protein, 427 aa, unidentified
MKKADLLSTLFVGIDISSRNNVVALLDFESQKTLQSFAVGNNQPGAVELANRLADYLRSRKDLTKLVVALESTSFYGIHVANYLSACDVLAPFHTAVYCLNPKAIKNYKKSFIDLGKNDYVDAFVIADFARANRITTQPWRGSQFLALQRLTRHRLHLAKAMTREKAYMLSNIFLKFSEFSLLDAEDQPFSNSFGATASSVLTDFLSMEEIIEMPTEDLISYICEKGHNRFPNPEKTASLLQQAARNSYRLDKCLYEPLTVSIASSFTLISTYETEIKAVNKAIEKTLKGIDPNAYQSLLSIPGIGPVMAAGILSEIGYIDAFKNQEALAKYAGLVWRENQSGNFQADDTPLSKAGNAYLRYYLIEATSHVKNHCGEFAAFYQKKYDEVKIHQHKRALALTARKFVRLIFGLLANHQLYSSDRVVQA

SEQ ID NO: 431410 - protein, 343 aa, unidentified
MGETYACRQWVGVDLHRRRSVVVRIGEQGEQLSSTRIENSPAALVAEVMKAGPAPRVAVEATYGWYWAVDALQAAGAEVHLAHPRGLASMNNRRVKNDERDARELADLLRINRFAEAYIAPPELRGLRELVRHRQKLANYRRSVKASVHAVLGKCGVIPDLTHIFGPAGQEMLDGLALEQPYSTRVQCQRRLLLLLETEIADVEIRIVRLLKDDPSFQALLRLKGIGPIFAAIFIAEIGDVHRFPSADALACWAGLTPRHIESDTKVRRGHVSKQGSRLLRWALIEACQRNGEDYVVELRRRIVERRGKKATNIAKVAAARRLAHVVYYTLRDGEARCLTRTT

SEQ ID NO: 431411 - protein, 344 aa, unidentified
MNEAYDDKQFVGIDVHRRRSVLVRMSESGELLGWERILNDRDRLAEVMAQAGEHPEVVLEATYGWYWVADAVAGMGANVHLAHPLGVKAFSYRRVKNDVRDAGDLADLLRMGRLPEAWIAPPATRELRELVRHRAKLVHARTSLRCQVHAVLAGQGVPVSVSDLFGVEGSKLLDELVLPQVYRYRIDSLRRLIAAFDVEIDATARLSRERLGQDQGFAAVKTIPGVGPILGAVFVAEIGDVSRFPGPAQLASWAGLTPKHYESDTTVHRGRITKQGSRLVRWAAVEAVQRTEKGTRLWVLRERVAARRGRNIATVAAARELVEMVFYALRDHTVRRLSRPLLAA

SEQ ID NO: 431412 - protein, 339 aa, unidentified
MKKRYIGVDLHRDCFTACLRCEDGREKIEDWKLDELEDFLKKLRRTDEVAVEVSGNTRFFYDAVAPRVSKLVVVNTTQFRVISESINKTDDNDARALALFLSKGLLPEVRLKDKPRLEIASLAQTRESLVRLRTALKNKINNMLSARGMNLKREALGSDRRLEAILKMKGEPVQQAELQVIIEQIRALNASIKKLEKIIDEHGQKLEGYRNIRSIKGTGALNGPVLLSVIGDVHDFQDEGKLASYFGIVPRVDQSNQTRRLGSITRRGNKLARTALIQSALIAKRYSSYLDAYYQRIKRRRGSGRAIVALARKYLGVIYRTLKNGWIFADFTTFTLASS

SEQ ID NO: 431413 - protein, 384 aa, unidentified
MDKSITLHVGLDVHKDSIDIATAAPGRDGEVRHVASTGGELTSLDKALCKLVSRGHRLHVVYEAGPCGFVIWRHLSAHGIDCEVVAPSSIPKRSGDRIKTDRRDAMLLARLDRSGELTAVRVPGAADEAVRDLVRARDDAVRECRNARHRLKALLLRNGITYAGKSAWTAAHLRWLATMKMEHAAQQIGFQEYLHSITEATTRIARLEQAMRDTLADWSLKPLVQALMSLRGVQLIAAMTLVAELQDFLRFDSPRKLMAFVGLVPGEHSSGPKRRQGSITKAGNSAARRMMVEIAWHYQHSARVSPVIATRQDQLPPAITDIAWAAQLRLHSKFKRLLARRVMKNKAVVAVARELAGFVWAIGCQVQTSGWQGIAVEPTTAAAS

SEQ ID NO: 431414 - protein, 449 aa, unidentified
MPQPILAVGVDPAKRLHRAVAVLFPDEVVLDVELPNAFDAVANLDLRLCELANQHGADLVYGLEDHRHYGRLFCQVLTERGRDVRVVNPLWTNRQRAFYGQDKDDAIDGRSIAAVVLRRHLQLPLASDFGEVAQAIREAERSLQDLSKVRTQLGNRLHLQLSDTYTAAYEEYFGKLKSPLALRFFRRFPLPQDLVGHNVEMLASLLLDLAGGKVGPHKGGNRLIAMRSKAQAILETSGAMRALPRTLALELKAELIRQLCDELLANHDRIIRLERMLREQLLPATKQTITTITGISTILAATIIGETGSITRFRSPAAFAVYNGTAPARNSTGGRDRHKARRDCNHRLKRAFYLAARAAVLHDPIAKAYHQSCKSRGLSYVEALKRVARRMSDVVYALLKSGKAYDRSIIEHAIERRREQAAHAARSHAKQSLVHSRPRKSNSPLSQRK

SEQ ID NO: 431415 - protein, 356 aa, unidentified
MSRMAGKARIVIGGVDTHADTHEAAVLDEHGRLLAVEGFPTTPSGYQQLLNWMRGFGAVREVGVESSGAYGAALTRHLVAAGVKVVEVNRPHAHTRNRRGKNDAIDAEAAARKVLAGECTAVPKDTIGIVEAIRQLLLARASAVHARAAALHQLGELVVTSPADVRASLTAKTLAGKASQATRWRPDPARLADPAQAARIALRSIGCRIHALSDEIKLLDAQLSTLVTRAAPKTLALLGVGIVHTAQMLITAGQNIERLRSENAFAHMCGADPIEASSGKTERHRLNPGGDRDANRTLYLIAVVRLRYCDRTRAYAIRRAGDGKSKKEIIRCLKRYIAREIYYTLRADLKNLVSAT

SEQ ID NO: 431416 - protein, 387 aa, unidentified
MYYIGIDISKFKHDCAVIDDSGEIVTPSWSFTNDAEGFSQLKLLLNSLDTETRIGLESTGHYGMNLKLFLESNNFSFMEFNPLLINRFVKSKSLRKTKSDSIDCMMIAHYLMTVEYKPYPPSFYTFEKLKSLTRFRDSLIRQRSRQLVELTNILDKVFPEFKPFFKGRFSATALYILSHYASPEKISNMNSKSYEPLRRLSRGRFSMVDFVELKTLARNTVGSTSDYLLQEMEITIDIYNQLQSKVEEIELQIHDCVLALAPPILTIPGIGAASAAVILSEFGDLSKFNNPSKLLSFAGMEPGYFQSGTSESTGKMVKHGSSHLRYAMMNCAQTVINNEPTFAAYYAKKRAEGKEHRVALTHVAKKLLRVIYTLQTKELSYNPDLVR

SEQ ID NO: 431417 - protein, 319 aa, unidentified
MTDGDVLKRDVVASDPDVLAKWLGKHCPGLVRVVLETGPLSTFLYHGLAERGVPVECICARHAKGVLAARVNKSDVHDAEGLSQLARTGWFKRVHMKASATHIDRAALRIRGQLITTRVAMGNQLRGLLKLFGLRLGAARTPAKRRERLVALYQQRPDLEPLFAPLVASMEVVEEQLRASNRLLETRAAEDAVCSRLMSVPGVGPITALTFTASIEDPHRFARSEDVGAYAGLVPRRSQSGERDVRGNISKAGDPMLRRSLYEAANIMLCRVQRPFALQQWGQRIAESKGNKRARIAVARKLAVLLHSLWLNETEFRWQ

SEQ ID NO: 431418 - protein, 370 aa, unidentified
MSQSSTLFIGMDVHKDTIAVAYVAQDHGAEVTYLGTIGTRQCDIDHLIRKMQSKAKHLIFVYEAGPCGYWLYRYLGKKDYDCWVVAPSLIPKKAGDRIKTDRRDALQLARLARSGDLTAVYVPTVEDEAIRDLTRAREDTLSDLKDAKLRLKAFLLRHDIRYTGRANWSPAHLRWLSEVVCPTPAQQIVFQEYVRAVNEHTERLQRLEQELQDHVHAWRLHPVVEALQALRGVQFTVAVTMVAELGDLTRFDSPRELMKFLGLVPAEYSSGERRQQGSITKAGNTHARKALVEGAWAYRYPAKVSRHLQLRLEKQPTMIQDISWKAQVRLCKRYRQLVARGKHANIVTVAIARELAGFMWAIAKQVPVAA

SEQ ID NO: 431419 - protein, 400 aa, unidentified
MISVGIDVSKEKSTVCILKPYGEVVCKPFELQHNKKSLESLDELLQKLDGEVKIVMEATGIYNLPVLTFLDEKGYFVSVINPCVMKKYARNNNFRNVKTDKMDSITIANYGIEKWFKLKRYEASESAYTELKLLGRRYRHYMEMHIQALQELTHVLDYVMPGIKGLFNSWTESNNRDKLSDFVERFWHYDLITSMSCEEFIEAYNEWAGEKKYHQSKSKAVQVYELASNGIPTLPSSFPSTKMQVLVAINTLRAVDSSLHNILSRMKELAKSLPEYSTVRAMGGVGDTLAPKLIAEIGDVRRMHSAKALIAFAGIDPPPYESGQFIGSKRQISKKGSSTLRKVGYEVMRVLKSHKAPKDSAVYEYIVKKENEGKSKKQAKIAGLNKFLRIYYARVMAVYQ

SEQ ID NO: 431420 - protein, 331 aa, unidentified
MKIRETVGIDISKSTFDAHLHFCGKYKQFSNKPKGFISFMKWIEGCSGLSINEVGICFEHTGLYSLPLACYLYDREITFSMVPAMEIKNSLGITRGKNDKVDAERIAEYAYLRRDVLEPYKLPSTQLLKLQKLNALRARVIKQRTGYKASLTEYKTLLVRKDNLILFQEQERMIRHLDKVIGRLDYEIKTIIDQDEQLSHHSKLITSVKGIGPVLTAYFLVTTNCFSSFNDPRKFACYAGVAPFAKQSGTSLNSKARVSHMANKKMKALLNLASGSAIQADPELKAYYKRRTEAGKSKMSTLNIIRNKLINRVFAVVKRGTPYVPLHQFAT

SEQ ID NO: 431421 - protein, 339 aa, unidentified
MELYGGIDLHSTNNHLGIIDVTDKRVFKKKLPNEPEIILKALSAHKENLVGIAVESTFNWYWLVDLLMEEGYRVHLANPSGMKKYEGLKYSDDNHDAFWLAHLLRLGILPEGYIYPKEERPVRDLLRKRGHLVKLRTSLILSLQGIVQRNCGVKMSANSIKKFKDNEVVPLLAGQEDLELSGRVSKEVIDFLTGKIREIENAVQGKVKLKEPFSYLKTICGIGKILSLTIMLETGSIDRFCKVGDYASYCRKVPTGWTSNGKKKGKGNKKNGNKYLAWAFSEAAEFARRHDNYARSYYNRKLARTDFMVAHSALAHKLSRAAYYVMKDCVAFDPLKLFA

SEQ ID NO: 431422 - protein, 344 aa, unidentified
MSKHAVRGGDVSRLLERFLQLREKARARTGKVFPLIVIQEAGLDGFWIDRVLQNEGIESHVVDPASIATSRRRRRAKTDKIDGETLVRSLLAYKRGEPRVCSMVKAPTPEEEDQRRLCRERKVLTAERVLHVNRIKGLLFCQGICGYEPLRRDRRDRLEELQTGDGRPLPPHLKAQVERELDRLELLLKQIKTVEGERDALLAAAITSMPAPAAMLLDIKGIGPEFAAVLWSEGLFRHFDNRRQVAAYAGLAPTPWQSGAIDREQGVSKAGNPRLRTTLIQLAWLWLRNQPQSALTIWFHERVLRNGGRLRKTTIVALARKLLVALWKYVTTGVVIEGATMKAP

SEQ ID NO: 431423 - protein, 362 aa, unidentified
MTAMSIVSQCHPFVVGVDTHARNHVYAILEATNGALLDTQSFPTTAAGINRAIKWVARRTDADADTLWVIEGAASYGAILAGTVASHGFPVTEAPRMDAKKNRGIGKSDVLDAHRLARAVLPLPVEKLRHPRMNEGIRQGLRILVTARESISKGRTRSVNALNALVRSNGVGVDARRKLTSVQVEEISRWREREEELSLGIARAEAVRLAKHILELEEQLKSNEQKLDELVKVSEAAPLLMEKGFRAVAAAKCLVAWSHEGRVRSEAAFACLAGVNPIPASSGNTVRHRLNRGGDRRLNSTLHMAAINRMTYDAETRNYVEKRRAEGKTDKEIRRCIKRYLARRVFRILTASARAQKAQEAS

SEQ ID NO: 431424 - protein, 345 aa, unidentified
MELHTIGIDLGKTVFHLVGLDLHGELVVRKKFSRTQLLRFTANIHVGLLGMEACGGSHFLGRALREQRHEVRLIPAQYVKPYVKTNKSDYIDAEAIAEAVARPTMRFVPIKTDDQLDMQSLHRVRERWVMRRTAVINQIRGLLLERGITLRKGRHHVHAALPLILEDADANLSGAVRLLLTQLKLDLDQLSVRIDEADAVIQKSAHENEACRRLVAIPGIGPVTATALIAAIGNGGAFHKGREFAAWMGVVPREHSTGGQQKLLGISKRGNSYLRRLFVQGARAVLLQRTKQSSGLSAWLAQLTSRTHRNVAAVALANKLARIAWAVLAKNEQYRPSVMADVAAA

SEQ ID NO: 431425 - protein, 458 aa, unidentified
MGKSLHIQGHKGTKFSQQLRGVNLEQVLIVAIDAAKLHQKALICNYFGDIIEKPFFFSVNDSGVKLFSSKIEHAVAATQAVRLFLGVEATGHYYEDIVREMANRGYLVQILNPYTTFEERASALSWCKTDDLDLVAIAHAIKNNKATENKLLHGLHRQLHVLTRARRSEVRKRSSLRMEIRALMDIIWREYQGFADHSNGKAHKIKVFSDFWGKASLFFMEHYPHPAEVLKLGVIGLRKLSIQHNLKLRDTTIQKLLYIAEQALSRNVLDLRPELLLLQMKLHDLHAFNSKIDALEQEIECLLLQTDGRLLLTVPGLGVSTAAELYAEIGDVFQFSNANQLIKKAGTNPIIKQTGGGAGSYRKISKQGNDHLRYVVYIAGKNLCMHNKDLMPFYERLKQRGKHERAIFVAMGNKMLKIAFAMLRDGSPFQSQCPEYRILEEVNKKLKFSCVMPTLAAA

SEQ ID NO: 431426 - protein, 402 aa, unidentified
MRRATKRGPGPSHLLITPDHAGNVVGIDPHKQTLSATVLDPRGGIVASEHFRVSGDGHRALEAWAKQFGPIARWGVEGASGWGRHTAMFLTGRGYDVRDVCANRTARNDRARQRGKSDTLDSERIAREVLAHPLLPKAFKRAGQDQGPDELHELLAIWHNRRQSILKSRQHLVGEAETLLCELPLQLREQLPASKAVRPRLNALAARNRRRRYDPPTKLRLRMLDEYHVQIAALDREEKQVVAHLAELVRQSGSTLAELCGLDTRSVAELLVEVGDVRRFTLGGFARFNATAPLPASTAEGPGEPVRHRYNPGGNRRINAVLHRMAVTQLRCEPRAQAIYANARANHHTKKEARRVLKRHLSDVVYRRMTSDLAAQHPDPRCVTARPRVAPATARGARRHAA

SEQ ID NO: 431427 - protein, 306 aa, unidentified
MKDLLERCCGIDIHKETAVACIMVGSGKKIRREIRTFGTMTDDIENLKLWLRENKIKKVAIESTGIYWVPIFNILEDEIEVVLANAKHIKNVPGRKTDVKDSEWLCKLLKHGLIQKSFIPPEGIRHLRKLTRCRKSVVADLTAAKNRVIKDLECANIKLASVLSNPHGVTGWKIIRLLARGEDSIEKLTANLNNKIKAPKEDFKKALKSTLKKHDRELLQIRINHVESLLQIIDEIEEQIQKHLKKYVVEIDLLKTIPGMGNHTAAIVLSEIGSDMNQFPSHMHIASWAGLSPGNNESAGKKKVLK

SEQ ID NO: 431428 - protein, 342 aa, unidentified
MTTINYCVGVDIASSTFTAAVGEIPWKVILKPQTFENTEDGYQTLLEWFAQHHLSASETVVCMEATGVYSEGLAYFLYAKGYRVAVQSPLEVKRTFKPYGPKSDAVDSLQIAEYASRHTDKLSFWKPKSEILEQVKALLAVREQFVAQNTAHKNALKAIQRKVVRTPFAEQSYLQLIEQLKKQIQAIDLEVRRLIESDPTFKEMLLLLLSVLGVGLLLAAHFILLAQFSIDYKVLASFLGISPNEHSSGTSVFKHATSRHFGPPAIRKLLYLAACSICIHRPQFGMYLARKTKEGKPARLVLNNVENKLVRIMCAVLQSKTAFVENYHSVQPLVFQNTLTKS

SEQ ID NO: 431429 - protein, 362 aa, unidentified
MHNSTTPGSCQANDPARILAIDLGKFTSVACDYRTADGSHTFTTIKTRPQVLHDLIVKRAPDRVVIEIGSPAGWVRDLCEALDVPLQIANPNHEAWRWKNVKRKTDRDDALKLAKLSAVGQLPTVEIPASHVRQWRALILYRSKLVARRTAIKNSIRSLLDRQGMGMPVGAKGWTNKAMSVLTLEARPLASCDPEDLWRGQLAMELKAYGQVEALIDQAEAKLDTLAAGDERVTRLQTIPGVGPRLSELLVAVIDDPKRFKSRKQVGSYLGLVPRQIASGTMDRQTGITKSGHRLLRSLLVEVSWLMQRYNPELKRFYEQVCRGSKSRRKIAAVATARHLLVICWAMLRDKTEWSPPERLAT

SEQ ID NO: 431430 - protein, 344 aa, unidentified
MSKVIMIGLDLAKNMFQVHGVEASGTVVVRRQLRRGQVEKFFSELAPAIVGMEACGGAHHWARALKRLGHEVRLMPASYVKPYVKRNKNDGRDAEGVCEAMGRPTMRFVAVKSVEQQAVLVIHSTRTILIRQRTMTANALRAGLNEFGIVAAQGLKGLRTLIEQLRNPSDEVIPEVGRATLLLLARQWEALDADIRALERQIERAARADEAACRLMEVPSVGPITASAAVAKVPNARVFKTARDFVAWVGLTPRGRGTGGKHRSGGISKQGDRTLRSLLINGASSHLRQQIARGVKDPWLRDMLARRPYKVVMVALAAKNARIIWALLAKGERYRERAPVPAAA

SEQ ID NO: 431431 - protein, 362 aa, unidentified
MSKSITIIAFDHHAATTVAAVLLPGQRTPALHTLTSDSATILRFVERLRRTGPVQCCYEAGPCGFELQRALTMHESPCDVIAPALIPRRPGDRVKTDRRDAAQLAVLYRAGALTAIHIPTEQEEAARDLLRCREDIRADLLRARHRLSKFLLRHGRRFTATKKAWTKRHSAWLQAQRWPLAPLEQTHRAYLRTVDEAVGRLQAVDLELRDLLTLEPLRPRVERLRCFRGIDDLTALTIAAELGDPRRFPSAPSLMAFVGLVPSEHSSGPKQARGAITKTGNAHIRRVLVESAWHYRHHPFAGHALHQRQRGAPATVIHQAWTAQHRLHRRYRRLAARGKPKQLIVTAVARELSGFLWAALTQ

SEQ ID NO: 431432 - protein, 375 aa, unidentified
MKDKVRFLGLDVHAETIAVAVAEPDGEVRSLGTIANREESIRKLVKKLGPPEHLRACYEAGPTGYVLYWQLTQLGVECAVVAPTLVPTKAGDRVKTDRRDALKLARSHRSDDLTAVWVPDGDSEALRDLVRAREAAKQDQLRARHRLSKFLLRMGRRPVAGMKAWTEPYMAWVRQVRFERPAQQATLLDYLHEVDHMAARVKRLEQAITEAVKLASPRVQEVVKGLQALRGIAEISAVTIVAELGQISRFDTARQLMGYSGAVPSEDSSGKRKQRGSITKTGNAHLRRIVVEAAWSYRHRPTIGPRLRKRQEGVAEPIKEIAWKAQVRLSKRYARLAAAGKDQRKIITAVGRELLGFIWAIGVNVEADSKLRMAA

SEQ ID NO: 431433 - protein, 318 aa, unidentified
MNTNTLQNINIGVDTGKSQLDIYIRPLDIYFNVTNDEKGIKQAIKTIKKYQPERVVIEATGRLEMPFILACDNAKLPYVIANPLHIKKFSGALGQRAKNDRLDAALIAHYAEAIKPKLTQLKSENIRLMSDLVTRRNQLLTMQTMEKNRSQIMPKSVASSIKSLLTMLKKQIENIETRIEKLIETCPDYQAKNELLQSVPGIGKIAAASIISNVPELGYITNKQAASLIGVAPITRESGSYKGKRMIKGGRMQVRTVLYMAMMSAMQCNPVFKQHYQKLLAAGKPKKVTIIACVRKMVVILNSMLRDGCMWDADSAKN

SEQ ID NO: 431434 - protein, 387 aa, unidentified
MQSVTSATAVATTARANDITLFASLELSKSKWLLTINSPGSEKFTRHVVEGGGGDGLLALLSRLRAKAEQGYGVRVKALVIQEAGLDGFWIHRLLIANGIESHIVDAASIAVDRRHRRAKTDSIDGETLLRTLMAWARGERRVCSMVRAPSPEEEDRRRLTRERDTLLKERIQHTNRIKGLLSGQGVGDYNPLRRDRFERLEELRTGDGRELPPMLKEEIRRELDRIALVTTQLAGVERARDMLIRAEAEERTNPAAQLLKLKGLGPEFASLLWLESLFRSFGNRREVAAYAGLAPSPWQSGSVERDQGISKSGNRRLRKTMIELAWFWLRHQPDSALSRWFQARVGAGKGRIRRIAIVALARKLLVALWRYVTQGVVPEGAVFKSA

SEQ ID NO: 431435 - protein, 329 aa, unidentified
MYYVGIDISKRFIDVCLLVDGIKGKRKTKVLPNDLNSAQALAQWLILQKCDPSQAHIIMEATGVYHEHLADGLHQSDILVSVINPHRVREFAKGMGILTKTDKVDAYVLACYGCLKQPENWLPPSQEIRKLKALLQHRDSLLNDKQRIENRLSTLKSTTAPEEVLTSLESIEQNLKDELARIERLIEEHIDKHPRLKNDLKLLKSIDGVGEQIGWNMLAIIRGNNFRSAEQVAAYLGVIPIERRSGTSVCGRARLSRIGPPGIRAKLYMGAIAAISWNSHVRALYERLRLKGKAKMVAIGAAMRKLVHLCYGVLHTQQPYDKNHGVVAG

SEQ ID NO: 431436 - protein, 329 aa, unidentified
MYVCVMNQHGDILVHRNIRTDQRRFLSLIEPYRDDLVVSVECIFTWYWLAYLCTREHITFVLGHALYMKAIHGGKVKNDKLDSQKIALLLKGGMLPQAYVYPADMRPTRDLLRRRMHLSRQRAHLIAHIQNTVHQYNLPALGVRLGKPTERGNVVECFPPGDTQAMVQLDLDLISYYDKQLARLEPQLVKQARTHDAQMHHLVGSIRGIGRILSLVLLYEIQDIDRFPTQGQFLTYARLVRCDKESAGKKVGKRNKKIGNSYLRWAFGEAAVLFMKGNPPAQQWLQKQASRHGKGKALAILSKKLGQTVYAMLKNNRCFDEARFMSHLN

SEQ ID NO: 431437 - protein, 311 aa, unidentified
MTTKVIGIDVGKEKLDVAITTEKRVREWSNDEAGRAELIEWVVAQQVSLVVVEASGGYEAAVVSELVEGGQEVALVNPTRVRAFARAEGILAKTDKIDAGVIARFGATMKPKARARRKKEQVELNEQVTRRRQLVLILTAEKNRLQTASAAMQAHITSHITWLQAEIEALEQQISQAIKANPTWAETARRIESVPGIGFVTAAPLVADLPELGHLNRQKIAALVGVAPFNHDSGKQRGKRRIFGGRTSVRSVLYMATLSATRHNPVIKAFYQRLLDKGKLKKVALTACMRKLLVIINTMVKSGQDWNPSIS

SEQ ID NO: 431438 - protein, 347 aa, unidentified
MKQIIVGVDTHKSTHVAVAIDDQGARLGTLSIPATAHGYAELATWARALGSVRAFGIEGTGSFGAGLSRSLRARGHAVIDVARPNRQWRHLHGKSDGLDAESAARSVLNGQATAPAKSQTGSAEMIRHLKIARDSAVKSRYQAMVTLKTLIINAPEGLRDSLDRIRGRVALIRHAAALRPGDMTSPTASAKMAMRAIARRWLALHEEAQTLEQDLERLVRGKAPDLMDAQGISTMTVAEMLILVGDNPERIKSEGALAKLCGVCPIPASSGKTNRMRLNRGGNRQANAALYRVAIVRMRGHPPTRSYVAKRTADGKGKREIIRCLKRYIVREIYRHLCAPPRAQLSA

SEQ ID NO: 431439 - protein, 370 aa, unidentified
MPRPVFANRLRNLNQENPMLISHYIGFDVHKKSISYCIKTADGRIVDEGRIPATRQALREWAQKRTAPWHGAMEATLFSGWIYDTLKPFATLLQMGNPSMMKAIGAAKKKSDKLDARTIADLVRCNLLPVCYVAPPEMRDLRRLLRYRNLVVGQAVQMKNRMSGMLMEVGAEYNKRRLHGKEYFNELLDRLDEEVPESVKQLLQLSRGALEMFAATQRQLLDRLNKDPLLVKRVKRLQSIRGVGEVTSLTWALEVCDPKRFPSIADAVSYCGLTSALVSSADKQKRGPISKQRNAHLQTMLIEAAKLAPRWNPQLAAVHERELKSGDCNRATLAVARKLVAYLLAVDKSGKPFEVRNPPVKEMEEVRQMA

SEQ ID NO: 431440 - protein, 343 aa, unidentified
MQVITIGIDLAKNVFQVHGVDANDKVVFNKPLRRAQVLPFFAKLAPCLIGMEACASAHYWARELRKLGHDVRLMPAKDVKAYVKRSKNDAVDAAACCEAVRRPTVRSVPVKTPEQQAQLMQHRVRDLFVRQRTQAINALRSHIGELGIVAAQGYEGLKVLLAIIADASDARLPEDARASLSAIVAQLAACQEQIVAIEKRLLAQHRKNADSKRLETIPGIGVIGASAIVATVPDASIFKTGRDFAAWIGIVSREDSTGGKQRLGPISKQGDRYLRRILIVGAFAVLRQARAHPEKYPWVTQLLARKPPKVVAVAIANKTTRIAWAVLTKKENYRARPITAAAA

SEQ ID NO: 431441 - protein, 345 aa, unidentified
MMYVGLDVSSKSFVGHAINERKVVKYRGEVTPTRDGLKEMISEIGAEKKLVVLKTGNQLKWIALSLKKMKGVEVHVVHPNELKWISESNGKTDRIDARKMAELARGDLLPRKVHIVEGHIRELRELISGRSLLQSKRVSLVNAIRGNMLQEGYRLPEKFFQRADWEVRLEKAKLDTTTRLIVKTTMQAIEALKASEDVLTEKIIAIKDERADLLETIPGIGPLTSRVILSALDDARRFDDRKAVAKYGALTPTVYQSGGVVHMGHINRNGRHEVRRVLLQCAHTVARMKSHGSAPLREFFERVMKRRGKKIAVVALARKLLTTAYGVLKSGEAYDPKMLLPVSSR

SEQ ID NO: 431442 - protein, 408 aa, unidentified
MEVIHERCASLDVHKETVVGCLRVRERGQVRREVRRWATTTAELLELGDWLRQAGCTHVAMEATGVYWKPVWHVLEGEFELILANPAHIRNVPGRKSDVNDATWIADLLAHGLIRASLVPPGPIQELRDLTRTRKQLMREIVQHKQRIQKVLEDANVKLASVASDVFGESGRRMLKAISAGQTDARQLAALGDGRLSASRETLAAALQGKVTTHHRFLLSQHLRMIEHLEQTVTAFEGQIEAAVQPFRAAREHLVTIPGVSATAAHVIIAEIGVDMSRFATVGHLRSWAGLCPELHESAGKVMSRRLRHGAPWLKTVLVQCAWAATRNKNNYLHAQFVRLRARRGSKKAIIAVAASILTTAYFLLRNQVPYRDPGALYFARIDQERTAQRLARRIKELGYEVQIRKAA

SEQ ID NO: 431443 - protein, 337 aa, unidentified
MKVTLIGIDLAKSIFQVCGVNQAGKRVFNRQVRRAKLMALLIQHPDATIAMEACGGSNYWGRELKKLSYKVMLIPPQHVKPFVKGNKTDRNDAFAITEAARRPNLRCVEPRTLVQTDMIQVHRVLDRMIRQRTALINQIRGFLSEYGVVVGRGKEKLLATIPDLLEDADNGLTSSGRALFQAMYDDWRQMNESIDRIEKVLEIQANTDEAAQRLMKMKGVAKKISTATIAHAGNGHGYKNGRHFSANLGLVPREHSSGGKQKLGGMTKRGNRYLRRLLIQGAWSVLRNADKNNDRMSRWARQLVARRGKHKAVVAVANKMARIMWSMLYHQTEYRAN

SEQ ID NO: 431444 - protein, 429 aa, unidentified
MRFGSLCKDTTARSSAGLLIGTTASREVVVGQPLWAGVDAGKSDHYCVVIDADGKRLLSRRVANDEAALLELINAITALADGSELTWAIDLNAGGAALLIALLIGAEQRLLYIPGRTVHHASGGYRGEGKTDAKDAAVIADQARMRRDLQPLRPEDDIAVELRILTSRRTDLVTDRTRAINRLRAQLLEYFPALERAFDYSASKAALILLSGYQTPDGLRHAGAARLAAWLRKRKARNADAVAAAAIEAAKSQHTVVPGQQLAAAMVARLAEEVMTLDTEIGDTDAMIEERFRRHRHAEIILSMPGFGVILGAEFLAATGGDIAAFGNTDRLAAVAGLAPVPRDSGRISGNLKRPRRYNRRLLRACYLASHIAIRTDTASRIYYDRKRVEGKRHTQAVLALARRRLNVMWAMLRDHKPYQPTAPNAAAA

SEQ ID NO: 431445 - protein, 442 aa, unidentified
MGSVGRSFGLDVHRDFCEVAIVESGALRSAGRIATTPEALELFAQSLAPTDRVALEVTGSAWEIARIIEPHVARVIVVSPADTGIRQARAKTDRLDARTLARLLAAGELDSVWSPDEWTRVLRRRLARREQLVRARTRAKNEIHAVLVRRLVGRPPVSDLFGVKGRAWLRALELALEEAETVAACLRHVEFLDSEIAAVEREIARQALESPELRRLLTVPGVNVICAATFLAAVGDIRRFATSRRLVAYLGLDPRVYQSGSEPAKGGRISKQGSPAARWALVEAAWSVVQQPGPLHAFYDRIRGRRGNKIAVVAVARKLAALFWSLLTRGEDYAHAQHSLTAKKLRLLEIRAGAPTLKGKPTGTWATRQQMRTAERELAQQAEASYRRMVTDWQAAAAKRGGRERDTGARMNQALKGQVARQAHEPQTPALRHVIDSRPPAA

SEQ ID NO: 431446 - protein, 367 aa, unidentified
MKKDNTVRKSSGVKTRASGRLTIGLDLGDRSSRYCILDAQGEVLSEGSVATTKKGLAEVFASKPRSRIALEVGTHSPWVSRYLADLGHEVIVANARRVRLITDSSRKDDRLDAKTLGRLARIDPELLSPIRHRSEQAQADLMVIRARAALVEARTMLVNSARGLTKSYGERLPSCGTGQVGENLAEPLSAPLQGALKPLLATVESLSERIREYDGQIEQTGKQRYPETELLKQVHGVGTLTALTYVLTVEDPHRFRRSRDAGAYFGLRPRRRESGASRPQLRITKEGDAYVRKLLVQCAHHILGPFGQDSDLRRWGLELALRGGKNAKKRALVAVARKLAVILHKLWVSGEVYEPLHVRKDGKAVAA

SEQ ID NO: 431447 - protein, 355 aa, unidentified
MDKTKYVGMDVHKETISIAVVDSAGKLVKESILETKASAILEFILGLRRNVHVTFEEGTWAAWLYDLLKPHVTNVVVCNPRKNALLKDGNKGDETDARKLAELLRGNFLSPVYHGETGTRTLKELTRSYIAISKDLVRVMNRIKALYRSRGIVCAGILVYAPRHRSEWLARITDAGGRRRAELFYQELDALQALRQEARRDLLNESRKHGATELLCQIPCIGPIRAAQLIALIQTPHRFRTKRQLWTYSGLGLEMHASAQYGYVKGQLRHSKKPHRFHGLNRNCNHDLKNIFKGAAAKAGICVGPFHDFYEGLLIKGRKPAMARLTLARKIAAITLIIWKKGVSFDPQHLKQQAA

SEQ ID NO: 431448 - protein, 606 aa, unidentified
MNAVGIDVSKGKSTVTIRRPGDVVLMPPCDIPHTQSAINALIELIKSLDGETKACMEHTGRYYEPVANWLSDAGIFVSAVNPILIRDFGDDSLRTPKTDKADSKKIARYALDRWAKLKQYGSMDKTRNQLKTMNRQFGFYMDQKTAMKNNLISLLDQTYPGANDFFDSPARSDGSQKWVDFVYTYWHVDCVRSKSLQAFTEHYQKWCKRNRYNFSASKAEKIYQSSSNLIAVFPKDDSTKTLIQQAVTMLNTASQTVESLRIKMDQTASTLPEYPSVMAMNGVGPSLGPQLMAEIGDVTRFTHRGALTAFAGVDPGKNDSGKHNQKSVPTSKKGSPSLRKTLFQIMDGLIKRSPVDDPVYAFMDKKLEQQMGESGEEKDDPFKLKDLKLIFSSKVFWLVALLCVLYYSAIFPFQKYAINMLQCNLGYTAEQAGWVFFVFPLGAAAITPILGNFLDHRGKGATMLIFGALLMIACHLVFALVLPALKGTTAAVIVAYLSIILLGISFSLVPASLWPSVPKLVDNKLLGSAYAVIFWIQNIGLYAFPMIIGAALRISNPGITDPLQYNYTTPMLIFASLGVLALLFGLWLKVEDKKRGYGLELPNIQK

SEQ ID NO: 431449 - protein, 351 aa, unidentified
MQIIGVDLHARQQTVAMLNVETGEVVEKTLQHEGDSVREFYSTLAGPTRVGIEATGSMQWFLELMEELGIDCQVGHPAKIRAAEPRKQKHDRRDAALVLQLLVENRFPSIWMPSREQRDVRSLILYRHQWVRIRTRVQNALQAIALSHGLRRGSSLWSETGQQAIASLPLTRYTAERRTALQSLYRHLEEQIDGLNRKVEEVAWQRPQARRLMTHPGVGPITALATETFLGEPKRFMDGKAVASYVGLIPREHSSGGRQRLGRLSKQGNPLLRFLWCEAVGHAVRKDVELQRFYQHKLVQKGLGKAKVAAARKLGIRLWILLRDQIDYQEFCRRGQLRQKHGGAHAGMPAR

SEQ ID NO: 431450 - protein, 411 aa, unidentified
MRRVIGMDIHRTFAEVVFWEDGRLRPAGRVTMTRSGLESFGRTLGKEDEVVIEATGNAMAVVRMLSPYVARVIVANPLQVKAIAHAHVKTDKIDAGVLASPRAADFLPEVWLPDSDTERLRRLVARRNQVVRHRTRIKNEVHAILHTHLIPPCPHADLFGRLGRIWLSRQAMPDDECAAIERHLRELDRLNEDLGVLDTQIAQAGNNDPAVKRLLTITGVNLIVAAGLAAAIGDVGRFPNPQKLVSYVGLNPRVRQSGLGLAQHGRISKRGRSHARAMLVEAAWAAAKAPGPLRAFFLRIRTRRGHQIAAVAVARKLAALCWHLLTNSTDYQWARPALVASKLRAMELQAGQPARKGNKRGTAYAHNVKALRDAEIELARHAQDAYERFVSQWQRRGSRNRARAPQNEERH

SEQ ID NO: 431451 - protein, 344 aa, unidentified
MYFIGVDHHKQVSVMTVLDEDGRELRTERVVNRRSHIQGFLEPYRPFTAVLEAGRASYVMADLLRELGGEVKMANPLQVKAIAHARIKTDKRDSRTLAQLLRADLIPEVYQRGEWNRRAQRVMRMRAYWVGKQTEVRNKIRALLAQQREEIRLEVEKRDAGLFRPNGLDFLGQLALEGPDKLILEDLLQGHREIQAHVKVTDGLVKALYGELEEAARIDTVPGFARTLSVLVAVEIADIRRFPRPADLHSYAGVIPSTHASGGRTFHGHITKQGSAWLRWAILEAVYPAIKKDLVLLALYKRLARRKGANVAKIAVARRLLTIIYRVLSERRDYIPGLMKQSAA

SEQ ID NO: 431452 - protein, 421 aa, unidentified
MEVVAPRCAGLDVHRSVIVACALLSEGGGRARKLGGEFVTTRAGLERLLAWLQDLGVTHVGMESTGVYWMPVYAVLEPAGGFTLIVVNAQHAKAVKGRKTDVKDAQWLAELVRHGLVRGSFVPPRPIRELRDLTRYRRTLVENQGSERRRLIKLLEMADIKLAGVISDIFGVSGRAILRALITGGQTAVEMSKLARGSLRKKRGQLIDALAGALAEHQRQILALQLARVEADEADIAALDQTIAERLAPYTAQMARLMTIPGIDWVVAATVIAEIGVDMAVFPSAGHLAAWAGTCPGNNESAGKRKPTGARTGNPYLKTALCNAAIAASRKRGSFFKAKYHKLKSRRGGGRAALAIAHKLIVCVYHMLSSTAPYRELGEDYFDKRDTQRAARRYVRRLRDLGFSVLLQPLSQLQPIAANAL

SEQ ID NO: 431453 - protein, 331 aa, unidentified
MDLVYTRCAGLDVHKATVVGCVRVPGPRRGDRQTQTRTFATTLRGLEELTTWLTTHGVTHVAMESTGVYWRPVYAALEGTVQVLLVNARHVQMVPGRKTDVRDCEWLAQLLECGLLRGSFVPPPAVRDLRDLTRLRKALIRERGHHVNRIEKTLELASIKLGTVVTDIMGKTGRAILQALSAGGGPPEQLAALAHGSIRTKKQAALREAVAGRLTPHYAFLLQQHLSLIEALDAHIATLDARIDAAMVPFAEAAALVQTMPGIATRAAQAILAEIGVDMAPFPTAAHFASWARLCPGTHESAGKRRPTTTGQGAVWLRATLQEAAWAAART

SEQ ID NO: 431454 - protein, 433 aa, unidentified
MKVKYEDRLKQKLLAITPDTLVVGVDIAKNYQWARFVDFRGIEHSRALKFKNRKGGFEIILARIQEICKKENFAKVVVGMEPTGHYWKAFANWLEKQDGITVVLVNPYATKQAKELDDNSQTKSDKKDALTIAKLVKDGRYFELYLPHDIYAELRGLSTTRTGLNKRKNALKNTITAILDEFFPEYEEVFKHPLTGKASRHILKTCPFPKSILELGEEGVTAEIKKAVKKTVGRKKAGQLVEAAKGSVGVDYGEEAARLKLRLMLEELELLEKQTEELESQMESALEKTGYAEFLLSIKGIGVVTLAACLGELGDPTRFDSPRQMSRMAGYNLVEDSSGKNKSGTKISKRGRKNLRSVLYQMSLTMVATNDEMKQLYHYLKTREKSPLRKMQALIVVSKKILTLIHTLAKKKESYDPEKVFGTVRREQFKAAA

SEQ ID NO: 431455 - protein, 331 aa, unidentified
MQVNEKFIGVDVSKETLDIAIAATRAHLRIANNAAGFKQLQAWLKQLGVSIRECWFVLEYTGGYEYRLVQFFQSKGIRFSCIPGLEIKKSAGMQRGKNDRIDAQRIALYGYEKRDRLHPHKVCSASVTRLRQLLTQRSSFVKIRKSQEHRLKELTSMMDLKPGDELVKNYRQSIAFAEKMIVKTESCIKELVAKDAAMERNFKLITSIPGIGNINGWMTIAYTDNFERFVDARKYGAYCGVVPYEHQSGKSIKGKSRISHMANKSVKAELSMAAKASVQHDPEMRAYYNRRIALGKHHMSVMNEVRFKLILRMFAVVNKQQPYVKNLGIAA

SEQ ID NO: 431456 - protein, 402 aa, unidentified
MRVGIDAHKMKCTTVMFDGDSVTGSFDFQTTRQGVYEFMEKVPEGSIAVIESSTTGKVLSRMLSGKYEVHMVAPPERKVSIKTDRRDAERIVMEDMLNYLRRCYIPSQYIENIRFVVTQQIQIGRRIARVKNQVHALLEMNMIQHELDDMADIFGVKGLTKLSKIQLPRQDMIALARYLEELKMYVSHHRQLDTEIARIAASDNDVQLLMTIPGINCFTAVAIKSRIGDDVSRFATKKHLCSYAGVVPKANNSGEYISEHNHVKQGDIVLKYALTCAVRGAILANKNSSIKLFYRKISKKGVSPQKAQIAAARKMACIVWKVLSSKQPYTEQDDHMTKRKMKIMSSKAMRIMPTSVMPSKVSELVRNLVDNIDVLGKYPEDSDYIIGKDLSNRNRLKEDILR

SEQ ID NO: 431457 - protein, 366 aa, unidentified
MKVEEGTRFVGIDLGKKGYVLRLIDSNGTITGWDGENNKTGREELYRRLRSTDKVAVEASNIAFIMNKEFKEKTGSEFYILNPNKLPQIFITDKKTDKEDALKLAKELRDKPEEDLPRVFAPTEEMKEMRKVISEYRETVKLHTQKINRLHSVYEHCGITDLKRSDLKTKTNREKNLELLTGYEKEEAKRLMQFIDLAEEQKKELEDKIKQAEKENEKVKTVEQVPGVGKITAYAFVASIGEAGRFLNVTQISSFLGFVPKIDCSSTTNRYGHITKRGNAYLRGLLVQGAWTLVNSKNGGYLQEKYRYLVFRGMSKKKAIVAIARKMAELMFTLLKNNSTYEPRKFTPPVLTASSLADESLRAVAV

SEQ ID NO: 431458 - protein, 343 aa, unidentified
MQVSTIGVDLAKNVFQVHGVDSAGKVVITRQLRRKQVIDFFSKIPPCLVGMEACGTAHHWAREVSKLGHTVRLMPPSYVKGYVKRSKNDAADAAAICEAVTRPSMRFVPIKSADQQALLMLHRTRDLLIRQRTQLINALRAHLAEFGLVAETGREGLAQLAAIITDKSNREALPSAMKQALQAIVDQLAALELQIGTLDRAIHAHHRANDMSCRLETVPGIGVIGATAIASTVTDARDFKTGRDFAAWIGLVPRQHSTGGKERLGGISKQGDRYLRRLLVIGATAVVRHARQHPQKHPWIMRLLAKKPAKLVAVAVANKMARIAWAIMAKGGSYRAPELAAAA

SEQ ID NO: 431459 - protein, 279 aa, unidentified
MENEIHFIGIDVAKAKLDVDMLRPDGRHRSKKFANTPGGHDELVSWLQGHQVIHAHICMEATGTYMEDVAAHLSDAGYQVSVINPMLSKAFVQSQGIRSKTDTVDARQLAYFCREKRPAIWEAPHPVERALRALVLRHQALTEMHVQEQNRRESARDVQLPSIDMHLLWLDTELKRLEKQIKDLTDDDPDMKHRRKLLDSIPGIGPKTSAVLLAYVGLKERFREARQFAAYAGLTPRQHESGSSIRRVSRMSKMGHVSLRRALYMPAIFAPFAWWPPQR

SEQ ID NO: 431460 - protein, 327 aa, unidentified
MTASVASHNQIFIGIDVGGLSFEAAWHRGGSTQYQNRPDAIAAFVARLSVEKQIIRIAVEPTGGHEKALVKALRGAGLPVEMVHTSRFAAYRKLIGAKAKSDTSDARLLAAYAAAPEEVRGRKAGHVVLPQDDVREQLAELAARRDQLKHMIHAETCRLSTVRSPSIRDEITAHLQALRQADRKTHDAMMQLVRQRDELRNAKRLLQTIKGIGDKTALTSIAAVPELGLISNKAAAALVGVAPFVRKSGTMTAPAHIHGGRALVRNAFYMAAVTASRHNPVLAPFYARLIAAGKPPKVALVAVMRRLVVYANAVLRSGQPWKRAEII

SEQ ID NO: 431461 - protein, 397 aa, unidentified
MDSNYAVYCGIDVGKGEHHAVGLTAAGKKIYDKALPNDETKLRAVFDRLASHGSVLVVVDQPNTIGALPVTVARVGGHDVGYLPGLAMRRIADLYPGQAKTDARDAFIIADTARTMPHTLRRVDTGDEALAELEVLVGFDDDLAGEATRVSNRIRGLLTSIHPALERVLGPRIAHPAVLEILSRCGGPTGIRQAGKRKLTAIAVKHAPRMGARLATDILAALDEQTVVVPGTAAAETVLPKLADSLKGTLQQRKAVAEDVERALDEHPLSRVLTSMPGIGVRTAARILIEVGDGSAFASAAHLAAYAGIAPVTRKSGSSIRGEHPARSGNKKLKRALFLSAFSALHDPTSRAYYDKKRAEKKKHNAALICLARRRCDVLYAMLKNKELYRNPTPSAA

SEQ ID NO: 431462 - protein, 391 aa, unidentified
MVCVGIDVAKDKHDCCILDSEGTTLVDCFTIPNNMDGFKSLLQTIQDCSQKSDKIKVGLEATGHYSYNILGFLLDNDLPIYVMNPLHTNLYRKSLSLRKTKTDRVDAKTIATMLLSDVDLKSYTDTAYHNEELKSLTRYRFDKVQERAKLKQSVSRLATILFPELEGLVSSIHGTSIYALLGEYPGAKQISEVHLTKLTNLLTTASKGRYGKEKAIQIREAARASIGSVMPAKSLELKHTIKLIQELASEINEIEDSIQKIIDELNPPILSIPGMGVNSAAVILAEIGDFSNFSSPDKILAYAGCSPSTYQSGKLTNCYAHMEKRGSRYLRYALYNATKYVCHWNPVFAEYLAKKRAEGKHYNVALSHATKKLVRLIYALQKSGKTYLTAA

SEQ ID NO: 431463 - protein, 416 aa, unidentified
MKIYPRTRPIQRYIALDIHKEYILAGGMNTSQVWVLSPHKIEMGKFREWAKKNLCETDAVVIETTTNVWDIYDIVQPLVGHAVVAHAGAVRQIAEARVKTDKEDVKRLIRLLIADIVPEVWVPPQPVRELRGLISYRQRLVKTGAVFRNRLQSLLHSHNLVLPEEGLLSQEWWDEQEKISPLEKLQIGQEIALLEQIEKHKAEVDQELGKQSLGETWGRNAVRLMQLPGIGVVIAMTVLAAIGDIHRFESAAKLVGYSGLGAGVHDSGQEHIEKRITKSGRKELRWAMIEAAWRAVRMSPYWKEQYEKFFHRMRRESQAIVVVARKLLVAVWQVLSKEETDERASEEDLAYKMLLWSWSLSEETRQGLTYKQFAKYALMQLGVQTDITRIVRKNVPRRIAPRDEVLARMAELGLML

SEQ ID NO: 431464 - protein, 341 aa, unidentified
MQISTIGLDIAKNVFQVHGIDGEGRTVLCRRIRRDRLLKLFAGFEPCLVGMEACATAHHWARELTALGHQVRLMPPAYVKAYVKRNKNDAADAEAICEAVRRPTMRFVPIKSADAQSILMLHRARYLLVRQRTAQVSAFRAHLAEYGVVAPKGIAHVRDLLAVLETGGALPLPDLARQTLLLIAQMIDALSQQIRKVEIELLAWHRTSTVSQRLETIPGIGFLTATALAATVGDARAFRSGRQFAAWLGLVPRQNSSGGKERLGGISKMGDRYLRHLLVVGATAIVRYTKRKATAVSLWANRLLERKPARLVTVAVANKMARIAWAVMAREETYRAAPLAA

SEQ ID NO: 431465 - protein, 336 aa, unidentified
MNKNGEVLGIDASKSKLDITLLLNGKAKSKVLQNTPAGHQALLEWIGKSKASKASLHICMEATGVYHEAVATTLHAAGFKVSVVNSACIKGFGHGENIRNKNDEIDAGLIARYCLTMAPELWTPQPLEQRQLRGWTQRVQALKDIRQQESNRVEAHTVSGMKEVAEHVKEHIAWLDDEIKKLEKEIDDHIDRHPGLKRDAELITSIPGIGRATVARVLGHLGDIRRFKSSKAFAAFLGVTPRQATSGSSVRGRTIISKTGNTSLRAALFMPSMVAQRRNPIIGQFAARLLATGMAKRAVLCAITHKLTHLIYGVIRSGKPFDANYLTKGLAIQDGI

SEQ ID NO: 431466 - protein, 349 aa, unidentified
MNRTTYGLDIAENVMQLHRVDTETGEIGRKKLVRAKLSEFFARLQPVRVAMEACGSAHHWARVLSSLGHQVELLPARQVRPFVRSNKDDAADARAIWVAAQQSDIRRVPLKSVAQQASLALHRSRQHWVSVRTATINALRGTLYEFGVTLAGGKHAGLKALTTHRAEIDAKIPATIQRLIDGQLATLKEIGRRIDELEAEIGVQQEQLEEAAKLRKVPGIGLLGATALAATLGDGGAWKSAREFSASLGLVPAHSGTGGKARVGHLSKRGDPYLRTLLIHGARAVIARAKHKPKWLEQLLARRPMNVAVAALANKMARTTWALVAHGREYQREWKSTPPKGCTAQAAAA

SEQ ID NO: 431467 - protein, 314 aa, unidentified
MAQSACVVGVDLSAARWDVACYPHGPTASFATTPAGQAQFLAWLAQVAQSATVACEASGGLERSLLMLLAPTPVSLRILDAGRVRTFANAAGRRAKNDRIDAAVIAHYAATFPGKPAQHDQARAVLAELLNVRDRLVADVTATANQARSSASKTIKSMLTRQLATLTRWVRQAEAEIAAAITADPQLAQRAALLRSMPGIGPANAARLVARLPELGQVGPRQAAALVGLAPYDNDSGGRRGTRHIRGGRTDIRNTLYMAALVAKKHNPVLAAVFERLTAAGKPAKVALVAIMRKLVVILNAMLKAGQTWTLRNA

SEQ ID NO: 431468 - protein, 382 aa, unidentified
MACKGRGRVFGRLTRSMKKYTVFHSVTATPAAANSKVNKSSSLLKLGLDIHREKFVVVAQYDHATPRPPHRFAPAEFVPWVEARLREGFEVHVVYEACGFGYGLYRALLKAGAYCYVIAPQKLDEGNTRVKTDGRDSRALCLRLDRYLAGNKNSLAVIRVPGEEEERARHWGRQREQLVRHRQKMEAQGRDLLISHGLTAPARWWRPQSWSRLCKLLPAWILSHLELYRPVLLALDQQIRTLTIELEKAAPAALPKGMGALSTVVISREICDWQRFNNRRQISSYTGLCPGEYSSGAKRVPRSITRHGNGRLRAALVELAWRMVRYQPQYHAVQKRLTVLAQGAQATKAHRKKAIVAVARQLAVDLWRLHTARCTPAMLGFK

SEQ ID NO: 431469 - protein, 338 aa, unidentified
MVYGAIDLHMRYSQIRIIDETGAVQREQRVVTARERLVQAFAHHGPMRILLETGTESEWVAQTLEAAGHEVIVADPNYAPMYGDLQRKVKTDRRDVAALAEANRRGWYRAAHRTSAEQRATRQLLRTRRRLVQMRSGAVALVRSLLKQDGYRLPTCGAERVPARLAALALEPPLAAALAPLTRTIEATTGEIAALEAQLRLRAASDPVVQALQTVPGVGLVVALTFRAQVDQVDRFTHAGQVSAALGLVPREDSSAERRHRGHITKAGPRELRSLLVQAAWACWRSRRRTALHTWVEQLAARRGRRIAVVALARRLSRILYAVWRDGATFDVTKIAAA

SEQ ID NO: 431470 - protein, 424 aa, unidentified
MNLTQNNRLKQVTSDTLIVGVDVGSQTHFCRAFDWRGFELSRRVFKFSNTGMGFLTFLRWTEELMNRTEMKKVIVGCEPTGCYWLTFQKFLQDHDIQLVTVNPFTVNRSMELDDNSPEKSDLKDPKTIAHLIKDGRYSTSYLPRGVYAEIREASVCRDQIMKQHIRLSNQIQGWLQKFFPEYFECYAAWDSISGLMLLKEAPLPQDILKIGAGGVNQIWRDEKVRAAGIKRAQTLVEAAQNSVGLEAGEAARLEIWILVNDYIHKAEQLKRLDEYLEEKVKEVPNVEKLLAIKGVGMSTVIGFIAEVGDIGRFTDPKQIQKLAGLEIVKKSSGKKKGQPRISKRGRRKLRRTMYESSRALMTWNPAFQDVFLYYRNRQKNPLGGMQAKIAVACKAIRVFYVVLQTGCDFDEEKFRKDIIRPEAA

SEQ ID NO: 431471 - protein, 310 aa, unidentified
MDKIYAGIDVSKSTLDVAVTNQKEIKSFCNDGNGIQQIVDYLKKNVPSLTVMEATGGLEALLAANLDAAQIPVVVANPRQVRDYARSVGKLAKTDNIDARILAEFSRDIHPEPRPLTDEQTKEIKAMLVRRQQVIGMITTENNRLWSADVHIVQAIQRHIAWLKQQLKDLDQDLENQIKNSPIWREKDDLLKSVPGVGPVLSLTLMSALPELGTLNRKQIAALAGVAPFNRDSGKYRGKRTTKGGRTRVRSALYMAALVATRFNPVIREYYQHLLKLGKVKKVALTACMRKLLTMLNAIIRDHRQWHYAS

SEQ ID NO: 431472 - protein, 334 aa, unidentified
MEKITTVGIDLAKSVFSLHGVDGAGHVVLRRSVRRDQLVEVVAGLSPCLIGMEACSGAHEWGRRFQEHGHTVRLMAPKFVAPYRKSGKNDGNDAEAICEAVTRPSMRFVPVKSAEQQALLAMHRVRQGFVVERTATINRLRGLLCEFGVVLPLRSVTVRRQAAAAAESLPELARRAIGDLLDQLRVLDERIGGDDREIEAQARLCEPAQRLMKIRGIGPTTALAIVATVGNAREFKNGRQFAAWIGLTPSQYSTGGKPRLGHISKRGDAYLRNLLVQGARSVMNSASMHQDRMSRWILELQPRRGYYRTLVAIANKNARIAWALLAKGETLRTA

SEQ ID NO: 431473 - protein, 344 aa, unidentified
MTNRSQVGVELFAGFDVSAREITVARRRGQEEKSVVASFANNASGHKALLSFLLQGSERVRVCLEASGNYSLDLALALHAHRQVEVSLVNPRRARRFAESLGERSKTDPVDARVLCEYAARMPWVAWQPPSSLALRLRAITRAIEALGVMHTQEKNREHALASSQALPAMVIQEMQRHQRYLEHRMERLRREALRLIARDRELDRRFRLMLTVPGIGETSALQILGELVVLSDKLDARQWVAFAGIDPSQFTSGTSVEKRPRISRGGSRHLRRALYMPALVALRHEPHLRAFYQRLLSRGKARLQAIVAVMRKLLHALFAMFRFNQSFDGSKLCPIGLATNLAA

SEQ ID NO: 431474 - protein, 406 aa, unidentified
MSQEKPVPTRFIGLDVHQHYLVAIGVDTELNQVLGPRRVPLVHLDSWMCKALTLQDAVVLEMTTNAFQLYDDLLPHVHSVTLVHPPHVKLITRAQVMTDKIAAETLARLHAVGLLPGVWVPSLEVRDQRALIAQRTKMVRLSTQAKNRLHAVLHRHHLPPLPGDLFTAHNRDWWLGLDVSSLERVRIQSDLDTLVFARSQITLLEETLTALAAQDKRVPLLIQLPGIGLISAMTLLAAMGDIHRFPSDKKLVGYAGMGGRVHDSGLSHRTGRITKAGRRDIRTAMVETAHVASRTHAHWKAELARLEPRLGRNKAIMAIARKLLVAVWHVLSKECADRYADPRQVARKLLQHAYRLGRTHRPHGQTAAQYVRHQLDCLGLGADLTAIRYGSKTIALPPSRLTSADN

SEQ ID NO: 431475 - protein, 444 aa, unidentified
MVFFGMILIREVADAPVIMGISKPAGLKSPRGEVKTMNPLFVGIDVSSRNNVVYLMKPDGSKHSSFSVQNNLGGAKLLSEKIVSALHSMQLIDVVIGLEATSIYGDSLVYALREDGSLGRFRRKIHILNPKQVKKFKEAYPDLPKNDFVDAFVIADHLRFGRIAKEVYMDDYRYQALRTLTRARFDVIQNLTREKQRFANYLFLKCSGMAQDKDIQNTSATTIALMEHFETVDDLANADLDELTAFIAETGRGRFANPNAVAKVIQTAARGSYRLPKTVNDTVNQAISVSIASMRALKEQVKVLDKAIEQQFEIIPNTLISIPGIGKVYSAGIIAEIGDIHRFDSQASVAKFAGLVWLKNQSGEFEAEHSQMIKSGNRYLRYYLLEAANSVRRCDSEFRRYYDLKFKEVNKYQHKRALALTARKLIRLVFRLLKDNRLYIPPEG

SEQ ID NO: 431476 - protein, 427 aa, unidentified
MEQTERNRLEEFRQLRKEIRHSEEYLIVGIDIAKDRHHAFFGTATGKTLLKKFVFDNTYQGFSKLLDQTEALRVRHGLSKVVYGMEPTANYHKPLGEGLIELGHSVVLVSGVTVKNNRESMDGRWDKHDGKDSANIADLISQGKCLYYDYPVPELRGLRDLLSLKRRLKKQEHGYRIRIRNHLIARYFPEMDRYYERLGAEGLSIVRWCLSASEIAQFEADAFVEKVTTRRIRMDKRRRLEEIWEKAAESIGCQGVPGVDHEAKVMVEGLKQIREMIKETEQRIEELCKPLLEYHVLLTIPGFGPDVSAKVMAAIGDPDRFENGRQVLKLAGLDLSADRSGKNSDKATPEISKRGKSDLRYALYQAALVASTRNREFMRYATSRIRGRKKEKGIHRKVMVKLSAKMLLIAWTLMKKKEAFNPAYLAA

SEQ ID NO: 431477 - protein, 338 aa, unidentified
MKKGQNTRGYERYMALDIHREYLLVGAWNEEKEWVLTPRRVGIEKFPGWAKKNVRQGDMVVLETTTNVWTIYDIVVPLASRVLVANAAEVGEIANARVKTDKEDIKRLLKLLIGGIVPEVWVPPMEVRELRAFVSYRHRLVKTSTMIRNRLQSLLHKHNLMLSEAGLLDQVWWEAQKNISSLEKMQIRQELVLLQEVEKLKLAVDEELQRQSTSSTWGKQALQIMQLPGMGFVIAMTVLSAIGDISRFENAKQLVGYAGIGAGVHDSGKTHKEKKITKKGRRELRWAGSADVALLEGRIRKTLEAHAQTESGDRGDRPETPDRHLACPEQGRNRHSCQ

SEQ ID NO: 431478 - protein, 413 aa, unidentified
MQVIYERCAGLDIHKKTVVVCVLITLATGAIKKSVRTFTTMTADLLALDEWLGSLGVEHIAMESTGVYWHPVYNLLEAGRQVILVNPQHMKAVPGRKTDVKDAEWLADLLRHGLLKASFIPPQPIRELRELTRYRKTLVQERTQEVNRLQKVLEGANIKLAAVASDVLGKSGRDMLEAIVGGEQDAEALAELARGRLREKLPDLRLALEGRVQPQQRFLLERILAHIDFLEGSMHQVQREIEQRLVPFEEAVTLVQSVIGIHEVAAATLVAEIGTDMSRFPSDKHIASWAGVCPGNKQSGGKRLSGATRSGNPHLKAVLAEVVWAISHTKDNYLSAQYHRIARRRGKQKAILAVSHSVLVIVYHILRDKKPYTDLGADYFDKLDAKRVERHHVRRLEQLGYSVTLTPKEEDAA

SEQ ID NO: 431479 - protein, 345 aa, unidentified
MKNTMIGVDLAKEVIQVCIYTNKRVHTNKEMTHNEFLLWLFNIKPTLIIFEACGTSNYWKQKAIEAGHEAHLISAKLVSTVRQNQKTDKNDALAIVQAAQLPEIRFIKGKTEPQQQLQTVLRLRELSIKQKTALNNQLKALLLEFNIRVSSKNGGLKGTIELLLEDAENGFSSAFRQALNTAWKQYSQLLESIQVYDDCLESSIGEHDDCKRLLKLEGVGTVNAINLYIALGCAELGTFTKGKDASACIGLTPIQYSSGGKANLGSIGRHVKNSILRSQLITGAMSAVSQMVKREAKTKKEAWIQGLVERRGKKCAAVALANKTVRTAFAMLTQGTEYKAELVAA

SEQ ID NO: 431480 - protein, 418 aa, unidentified
MKVIFPTCCGVDVHKSFLVATIIKTSQNSLQPSYQKKRFSTFNSDLNRFADWLRENDCLDVCMESTGKYWVPVFNILEKQAIRVVIANPKWVKAVKGNKDDTKDSKWIGDLFRIGLVKSSFIPNKDIRILRELTRYRYKLISMKSSEKNRFQNAFTVCNVALDSVVSDMFGKSATAITDYLTSDVEFDAQHCISLLQRSLKKKAPAILEAVEGHEIAPEQKTRIGIVRDHLHYIDKLVERVDDCVEGMVQKHEGSITLLRTIPGVDRSSAITILSEIGIDMAQFGSSKRLCCWAGLTPGNNESAGKKKSVRISRAGVYLKPALVQVAHAAVKDKSSTYYAVKYERISKRRGKKRAIIAIARMILTAVFCMLSTGEVWSPVDLYKVDMPEHLKEKQLAKAVKQAVHFLETQGLTVLDFA

SEQ ID NO: 431481 - protein, 406 aa, unidentified
MKGTVEINSIEVLVGLDVGKGDHYATAVDRDGNELLGRSVGNEQSDIEALIDSALEIGSCALVIDQPGSIAALVLCVAVARGIPVAYIPGLVMRRASELYPGQGKTDKRDSFVLADTARMRLEQLQWLTPSAQQITELQILTGYDDDLREESTRASNRLRDLMLSVHPSLERVIGPLLDRESVLAVVERYPTPTQLAKAGKPKIKRLLVKYSSRSSDTITQQIETALKKQTLTVGSERIAGRVISELAKTLRDLKHRRGQLQEEITEIFENHPQAPILLSLPGIGPRTGAQILVEIIDINRFPTSGHLASYAGLTPVTRRSGSSIRSETRNHRGNQRLKNAFWLTAFCSLRHEPSREYYNHKIEQGKKHNAAIVCLARRRINILHAMLTKNETYRTPTNQNLAIST

SEQ ID NO: 431482 - protein, 418 aa, unidentified
MMKLKYSICCGLDVHKTWIFACIGITDSNNRTEYKQARFSSFTKGLNELCDWLAKYNCNDVCMESTGKYWIPVFNILEQRSLWVTLSHPKYTKPMKGNKTDRKDAKWICDLYMCGMVKPSFIPPADIRELRDLVRYRFKLTCMITGEKNRAQNCLTVSNLKLDDVFSDVFGKSSRSITEQILQHPGETFDVAPFVNSRCKTPIVEIQAAIDGAISKEQAVKLRQCLDHIDELNKHISEVEQEILRLSDKYEIALNLIRTVPGFNKNPLTAIQVLSEIGGDMSVFPTAKHLVSWAGCCPRNDQSNQKIKSTRISRAGSYFKPVLVQVANALIKSKKHSEFTNRYKRIKARRGHKKAIIAICRMILTAIWHILSDLKPYTPEGFLESRPVKEEKVLSTSQALNLLKQRGYIIKDKPLAVF

SEQ ID NO: 431483 - protein, 439 aa, unidentified
MAKEVIFETVHENVAGIDVGAEQIYVSPDGKEVTVFETFTSGYHACARYLKEKGIKKVAMEATGVYWIALYFLLEESGMMVCLVNPKETKQVKGRKTDVKDCQWIQRLFTAGVLRHSFIPEGKYMELRMLVRERIDIIEMGSTYVNKMQKCLELMNIKLKEVISQIQGASGIRMIRSILSGERNAASLLSLCDERIQKNKKAKVLKALEGTFNETYLYMLGQNMELWQIHQDRIEKIDAKIAQLLDELSMNKEEVPTGKTKRIRHHAPKIEGLQTTMARLYGVDLSSISGMNDYTVLRLIGETGTDMSRFPTAKQFIAWLCLSPKTHKSGKIKKNVRGTPCNPAGQIFKECAQGLMNSKFIAIGAFMRRIRGRKDSGIAIKAGARKLALAYYNALTKGMAYVEQGTKQYEEQIKRRELISLKKLAKKYNMQLIENQIAA

SEQ ID NO: 431484 - protein, 333 aa, unidentified
MLDESGQIQLEQRVRRNAKGLREVFGELPHSRIAREIGTHSPWISRLLSELGHEVIVANARKLRLIGESRKKDDRLDAQTLARLARIDPELLYPVKHRSEQAQADLTLIRARAGLVRARTGLVNTARGLAKSYGERLRSCNVRNLNPEKAESLSPELQAALEPLLNAIESLSERIVDYNERIEMVAQQSDRQVALLKQIKGVGTLIALTFLLTWEDPHRFGKSRDVGCYLGLQPGRRNSGQSEPQLHISKEGDPYLRTLLVQGAQHILGPFGPDCDLRRWGLKLAERGGRNGKKRAIVATARKLAVLLHHLWVSGEVYEPLHNSQRTTVAAAA

SEQ ID NO: 431485 - protein, 428 aa, unidentified
MNEVDRIRLEQFRQLRKEIRGSEGHLIVGIDVGKDKHHAFLGTATGKALLKRLVFENNLAGAEKLLDQVEAVKVGAGLREVVFGMEPTANYHKPLGDFLIRRLGHVVLVSGVAAKENRKTLDGRWDKNDVRDPANIADLISQGKFLFYEYAEPFLRELRDLLALKRRLKRLEHGYRVRIRNHLVAKYFPELDRYYEQSETYGLAVVRWCLNPRRLSRLEFEEFVRMVAPGKRGGQQSDRLRMIFQMARGSIGCVVGPAAEFEARVMVEGLKQIREVIVETDRQILDRCMEFPEYECLLSIPGFGPDVSAKVLGAIGDPFRFENGKQVLKLAGLDLNAERSGKSSDLARPVISKKGKAGLRYALYQAAFIASTKNRYFMVYFTNKLRGREREPGIKTKMRVKLSAKLLIIAWTLMKKKEPFNPDYLGIE

SEQ ID NO: 431486 - protein, 364 aa, unidentified
MLLNFNNNQTGDNSRPNKLSNIKKEAFVINYTQSQLSIGLDISKESISIFVPKNSLDLEINNTPKDIKSFYSKLKKIYKKEIENIVFVYEPTGSYSELLRKFCADKKINSFIINPKRSHNFAKAYGNRNKTDKIDAKLLSEAIVLAKDGEITIPVINPLVETIKEMMSYYKFTIKQRVMANNHLESISSKDGDKYVIKSLQKEIKILKDKEGEIIDNIKAIIDNDENLSQGYENIKTIMGVGKIGAIVLLHLFIKYPNANKRQLTSLVGLDPIVFKSGSSVDKRIKISKAGSTLYRGSLFMGVMVAVRHNDEMRNFYERLKANGKHTSTAQIAVMRKMIIIAHSLYKNNQQYSSDVYKKACGMS

SEQ ID NO: 431487 - protein, 374 aa, unidentified
MGKHRLAFVAFDSAKNKHAVAIADSGRGAEVRYLGEIDNSPDAVRKLVAKLTRQYERLHFCYEAGPTGYGLHRQLTELGHVCDVVAPTMIPKRSGDRVKTNRRDSVALVKLLRAGELRAIWVPDSVHEAVRDLTRARATAMVDLKTKRQQLLSFLLRHGRGFPDGRNWTKTYERWLAKQTFAHPAQQIVFQDQLEAITTAQARLAALEQQLREIVPTWTMAPVVAAYQALRGVSFLVAITFVAEVGDVRRFATPQQLMAFLGLVPSERTTGDTIRRGSITKTGNHRARRVLIEGAWTYRFSARGQRDLADTAQGSPLERPCHCLEGTGAAVRPLPSAHCERQEDPCRDNGDRPRALCLPVGDRSAGCAPDTLRN

SEQ ID NO: 431488 - protein, 414 aa, unidentified
MALKIIYPICCGIDVHKTFVVACIASTNKGVTTYKRHRFSTFTKGLKELSQWLCENNCKDVCLESTGKYWIPVFNVLEDSCKITLAHPKYVKAIRGKKTDKKDAKWIADLFKHDLIAGSFMPPLAIRQLRDLMRYRFKLTNFMSSEKNRLQNCLTVSNIQLGHVVSDTFGKSSMNIIEKLLENPLDTSFDIEPLIHGSMKNKLPELELAIDGFITPEQAEKLKVIKQHFEDLQSRKEDLEKIILSLAKSYSEEIKLILTVPSFKNIFSAIAVVSEIGVDMDVFPTAKHLCSWAGLTPTNNESAGKKKSVRISRAGCYIKPLLVQCATAVVKSEKHPEIRNRYLKLKKRRGHKRAIIAIARMLLTAIYNILKKKEPYNPALYKKSDSVPVTREITVEQAIRFAKSQGFRVLVEPT

SEQ ID NO: 431489 - protein, 327 aa, unidentified
MNIIIGIDVSKVKIDCAWLRDFKTGKVKTKVLKNNADGFQSLINWVELKTQQPLSSICFVMEATGIYHEALAYALHAAGADVCVVNPAYIHDYAKSLGTRSKTDKKDSIVIARFGATHSLTLWQPEADEIRHLKALIARHEAIEKDLQRESNRLEKAEITQVSVEVISSINTVINELTKEKNRIRKLIDEHIDQHPTLKQDAALLKSIPGVGPVISQRMIALIRSRNFISARQCSAFIGLNPVIRESGTSVRGRSHLSKMGDAKIRAKLYMAAVVAVQYNPDIKQQYDRLLKNGKTKMVALGAAMRKLVQICFGVLKHQVPYQPQLE

SEQ ID NO: 431490 - protein, 313 aa, unidentified
MQSSFIGIDISKNTLDVHVLPEDTRYSYAYEPQKIKALIRKLKQLKPVLIVMEATGGYELAVASKFAEAKLPVAVVNPRQIRDYARAIGKLAKTDALDAYVIARFAQDVRPEARQQLTLKEQQLKELIMRRQQLIDMRTAEKNRLSRAFSKEVITGIQKIIKALDEQIQALDEQLDRHIKGNPAWEHKIELITSVPGIGSNTAHTLLFCLPELGKLNRRQIAALVGVAPMNRDSGMMRGKRSIAGGRAAVCKALHMPILAAATRWNKKLRLFYAQLLSKGKKHRVALTACMRKLVILLNTMLKNDRAYDPKFC

SEQ ID NO: 431491 - protein, 419 aa, unidentified
MEIVRNQNTRNINGQTLIVAVDIGKSVHYGYFRTPMGKEVKPFPFSNTHQGFQEFWQKLFRFQRQQGLKECVIGFESTGPYAEPLLHYLRTCPVKLVQINPMHTKRLKELTGNSPNKTDRKDPRVIADVISLGHALTLVVPEGAAAQLRRLTHARERALKRRTALLNQLHYLMAVVFPEFLEVMKKISTKTATYLIKHHPIPQHIVVLGSESLSKVLKKISRGQMTEQQAQRLFEVAQKSIGIHEGQQSMLLEIQYLVSAVERENGFIADLEKQMIGSLHQIPYSYSILSIKGVGKITTAGLIGEVGDFGKFKTIAEITKLAGLDLYEISSGNRKGQHRISKRGRSLMRKLLYFAVVNMIRSSGLLHEPWHQMVQRGMPTMKVMVALCRKLLRLIFALARDHAVYKENYTQTNTYKLAA

SEQ ID NO: 431492 - protein, 404 aa, unidentified
MIIVGLDWSRSKHDFVIMDLQGKVIERGAVAHNADALEELADSVERHVSSVEQVHVGLELNNGALLAWLVVRGYSVFAIQPKSAQRFRDIYRPSGSKDDRIDAFVLAEFVRVNRSRLRPWCPPSKTTLELGELLRWREELVQQRTAAYQRLRALLAEWSPQLAELCDNLDCIWQLDLLSQFHTETRLCQAHGNRIRSFVRNHRMRPKKKQQIEDIRRSVPMPVPAGRAQVVERQTSFLVEQIRMLTAEIKHIEEGLQQLIAQHPDVNIFESLPVQGIVTIASLLAIFGDNRKRTISVDELAALCGVAPVTIASGKTKRVRQRRACNHTFRQALVHFAFNTAFCDGCWAVQFYQRKRSEGATHYVALRCLAKRWLKILHRIWKDRITYDEQLHQANQRRNRSHAA

SEQ ID NO: 431493 - protein, 412 aa, unidentified
MEVVYPRCSGLDVHKRFVVACLSIIEHGQRHKELRQVSTMTSDVLALKAWLLASGCRQIAMESTGVFWKPLYHLLEDSFEIVLVNAQHMKAVPGRKTDVKDAEWIADLLQHGLLKASFIPSSEHQAVRDLTRTRMRLIQERNRLIKRIQKVLEEANIKLASVVSDVMGVTGQAILRALVAGKEDPECLARLAQGSLVKKQDQLQAALQGKLAPHHRMQLEELLQLIATLDHSIARFDREVAERLRRFDALIERVDAVTGLARRSIEVLFGELGWDMNHFPDAAHAASWVGICPGQHETGGKQLSGRTRQGNRWAKTVLIQAAHAAGHTQTYLGEQYRRISARRGSKKAAMAVGHSILVIFYHMVKSGEPYHEKGADYFSTVDKEKIQHRLVRQLERLGNTVILQPQAKTTLA

SEQ ID NO: 431494 - protein, 328 aa, unidentified
MIMLGIDVSKTKIDCCIFPQGLTGKRKNKIFTNTESGFGSLLKWLITLKIEPDQVTAIMEATSVYHENLGYYLYDAGVKVCVANPSRVRAFAKAMSMLNKTDKADSEALSRYGYTAKLIIWQPEPENVRLLKALLGRRDVYLGSLLQEKNRLEKAQSTHTSVVVIKLLEENIEYLNQQLENIDKLINNHIDQDPTLKQDLKLLQTIPSIGERSGLLLLGLFHSHKFEKASQAAAYVGLVPVHQLSGSSVNKQSHLSKAGDSKIRSVLYMSALTAIKYNPHIEALYQRLLSQGKNKMCALGAAMRKLIHLCYGVLKHQTAYQRDYLVVE

SEQ ID NO: 431495 - protein, 422 aa, unidentified
MSSGSRRCIGLDVHREFAQVAVWQNGTVTQAGTFATTPEGVREFAAGLGRADEVALEATGNTWAIATLLASRAGRVVVSNPAKTRAIAEAKVKTDKVDAAILAQLLAADFLPPVWMPDAATSALHRQVLRRAHIVRQCTRLKNQVHAILHRNLVPRCPAADLFGIKGRKWLAAQDLPPDEQAAASALLRQLDFHAQELVLIDRDLGQAALARPEVLRLMTIPGVDATVALSIVAAVGDFTRFRTPERLVAYFGLNPRVRQSGGQPASHGRITKAGRAHARGMLVEAAWSASKAPGPLRAFYQRVRARRGMQVAAVATARKLAVLCWHLTIKGEDYAFALPSLIAHKQRKLELRAGAAPARGHKGQAARYALAAVRAAERDLAAQSEAAYRTMVAAWQPARPQRKNATGAAASKGTRLIKPTG

SEQ ID NO: 431496 - protein, 454 aa, unidentified
MARRLRRTTRPVTMPILHPDAAGIDIGATEIYVCVPLDRDPQPIRRFGTFTEDLLALAAWLTQCRVTSVAMESTGVYWIPLYQILEPRGFEVCLVNARHVKNVPGRKSDVQDCQWLQYLHSVGLLRASFRPPETVCAVRSLLRHRDSLVQLAATHTQHMQKALTQMNLQIHHVLSDITGVTGLAILDAILAGERDPHGLAQHRDRRVKASPGTIVKALVGDYRSEHLFTLRQALASYRHTQRLIEECDAEVQARLGTFASQIDPAVHPLPAATPSRRKAQGPPTAPRFDLRTELYRILGTDLTQVPGLNTSTVHTLFAELGADLSPFPSGDHFASWLGLCPDNRISGGKVLSAKTRHVKHRVSQALRMAAQSLWRSRSVLGGFFRRMRAKLGAPAAITATAHKLARIIYHLLTTRQPYDESRLAAAEADHRRRTEARLRAQARALGFQLVPAIE

SEQ ID NO: 431497 - protein, 339 aa, unidentified
MELCCGMDLHSTNTVVGIIDEKRKHLIDRKLPNDPELIRNFLKPYKTDLKGIVVESTYNWYWLADLLQEEGYRVHLSHPVANEQYNGLKHSNDKHEAFWLAELLNLGILKEGYIYPRQARSLRDVLRKRAHLVRVRTALLVSLQHMISRNYAVKVKTGDIKRLREDVVSPVLKNEEALLLAGTSSKEVIDCLTRQIDKIERWALKRLCREGVLTQLITLPGVGDILGMTILLETGPISRFREVGNYASYCRKVSSRWTSNDKVKGRGNIKNGNRYLAWAFSEAAEHARQTNEACRRFYDRKLRQTNTKVAHNALAHKLARAAYYIMKDHVSYQEEKMFS

SEQ ID NO: 431498 - protein, 338 aa, unidentified
MNIVFLGIDLAKNVFQLCGLNQAGKPVYTKRTGRKELLQTLANIPACLIGIEASTGAFYYWQREFEKLGHKVRVISPQYVKPFVRGQKNDGNDAQAIVVALMQPTMQFVPPKSPEQQDIQALHRARQRIVNHRTATVFQIRGLLLDRGIPIGSAVSRARRAIPLILEDAENGLSSRMRRTIAELYDLFNDPGRRIHFFDKEIETVFRQSEACQRIAKVKGIGPETATAVVAIGKGTEFKNGRHFAAWPGLVPRQHSSGDRQVLMNMTKKGDKHLRTLFIHGARAVVRVAKNNNDGHMNQWVNRLKERRRFNKTTVAVANKNARIIWSMLRNDTGYQVV

SEQ ID NO: 431499 - protein, 403 aa, unidentified
MDNTNYQVFCGIDVGKTSHYAVALNRDGERLVGLEVYQDEAELRRLFTDLSRHGKVLVVVDQPRNIGALPVAVARDCGVEGAYLPGLRMRRIADLYPGNGKTDAKDAFIIADAARTLPDTLLPIGESSDLVEGLRLLSGFDADLAVDENRLINRLRSVLLSVHPALERAIGAQMHRPIGPGLLAKFGGPVGFAAASRRQLDSCAEGLAPRLWKKIVDSIVASLAEQTVSVPGATQADLVIKHLAGQLLDVRVARRDLAARFEHALTEHPAGPILTSLPGVGVRTGVTMLVEITDIGRFRDAGALAVYAGVAPRTHRSGTSIKGEHRQHSGNARLKRAMYLSAFAALKDPVSRAYYDRKRAEGKNHRSALICLARRRSSVLYAMLTNETHYRVAPQRAQDMVAA

SEQ ID NO: 431500 - protein, 359 aa, unidentified
MRYVGIDYHKRYSVLCATDERGQELKRRRISGNSATGLAQFFSELGEESKVVMEACWNWGWLYDLLAKIEGIDEVVLAHPDKTRLIAEAQIKTDRLDAQMLAKLLRGDLIAQSHAPSAATRARKHLLRQRLFWVRLRTMLRNRMHAILDRQHGLERPQLKNFFSRRGQTWLEEVQLPCAEDQPLLKQDLEVAELLEGKIKQLDRSIGQSQSEEEKLLESIPGIGPLFSSVIATEIDGVGRFNSATKLAAYAGVVPTTHASGGRVFNGRLLWQCNKWLRWALIEASWSAIQFSGYFGSIYRCARARGKNKNIAITMVAHRMIKIIWLLLAEKRPYTETLPDRSEDGMTVVVRRKVLGLAS

SEQ ID NO: 431501 - protein, 322 aa, unidentified
MTNPTLFVGIDVAKTKFDVALLNAEGKYRSKVFPSTPVGHQQFLEWLTRHDAQEAHLCMETTGVYGRDLARFLAQQQILISVVNPAQIHAFGKTELTRAKTDKADARLIARYCRMHRPAPWVPPAEEIVTLQALVQRLEDLLALQTMENSRLEAAEGSARKSVEAVLEFVHQQIEMVRLQIEIHIDKHPDLKNQQELLSSIPGIGDNTAATLLAFLSPLERFHSAKQVVAYAGLNPRIRQSGQWAGKTPIAKAGNALLRKSLYLPAVVAKRHNPIIASFCDRLLARGKRPMQVVVAAMRKLLHLAFGVLKSGKPFNPKLGVA

SEQ ID NO: 431502 - protein, 367 aa, unidentified
MKKHTPIAVGLTLNRKCERLTIGLDLGDRSSYYCVLDAAGDVLLEQKVSTTPKAMREVFGSMPKCRIALETGTHSPWVSRLLIELGHEAIVAHARNVRLIGESKRKDDRLDAFMLARLGRIDPQLLCPVKHRSAAAQADLIVIRARAALVRNRTTLVNAARGLTKSYGEKLGRANARSMKPKAAQDLSPELKNALGPLMREIQSVSERIRDYDELLESMAQNKYPEAERLKQIKGVGTLIALTYMLTLEDPHRFRKSRDAACYVGLQPGRRNSGQSEPQMRISKEGDPYLRALLVQAAHHILGPWGVDSDLRRWGMKLAEHGGKRGKKRATIAVARKLAVLLHRLWVSGDVYVPLRKIGQLAVPAVA

SEQ ID NO: 431503 - protein, 355 aa, unidentified
MYGLKHQKEKRSMDHFAGLDVSVKETSVCIVDEAGKVVREVKVASEPEALLSVLKNPAYRFKRIGLEAGPLSQWLFSALAEAELPVVCVETRHMQAVLKAQINKTDRNDARGIAQMMRVGLYRPVHVKTLRSQKLRMLLTHRKLLQSKAIAIENDLRGTLRNFGLKVGLVGTVKFEARIKELVENLPDLAVLVEPLLVVRRVLREQFVILHRRLLAIVRDDAVCRRLMTTPGVGPVVALTYRATVDVPARFRKSKAVGAVFGLTCSKYQSGEIDRSGRISRCGDEMMRVMLYEAAQSMLHSKKWSWLKAWAMQIARRRGKKKAIVALARRLAVIMHRIWVDGTEFRWTREQAVAA

SEQ ID NO: 431504 - protein, 355 aa, unidentified
MQSNKISFKGQNIYVGIDVHLKTWQVTTLTESGYKYSFAQHADAKELFDRLNKKFPGAHFKSAYEAGFCGFSAHYALMGLGFENIVVHAADIPTTGKEKALKTDAVDSEKIAWSLKRDELTGIYIKDKDYMDDTNLMRLRQRFIKDLSRQKNRTKHLLYTQGVTYPERFSKNGTHWSRNFMKWLREEVVLLSEEKRTLMLLCDQVEHIRKDILAVTREIRRLSTSDKYKENFSLLSSVPGFGLITSMSMLTEFDNNPMRFPNERKFVAMLGLIPTCHDSGEKKVSGEKINRGNKQVGPLIVEASWVAIHRDYQLGCYYTNCCQSMKPQKAIIKVARKLACKAYAVMKTKKPYVLS

SEQ ID NO: 431505 - protein, 367 aa, unidentified
MTIVAHAHPYVVGVDTHAKTHALSILATPNGEILHEGQFPNTAAGMARAIDWVARRTGGDLAVLWVIECAASFGAKLARASATAGYRVVEAARMSARSNRGVGKSDPLDARRIAAAVLPLELDRLRQLRNHDDLRVGLRVLTAARDHMTGERTATVNALIALVRFLDLGIDGRRPLTGAQIITISTWRTRSENVGLATARAEAVRLAKRIVALDGELKENTETTTELLHRSPARVLLDKPGIGPVTAAVALAAWSHHGRLRSEAAFASLAGVNPIPASSGNTVRHRLNRGGDRRLNQALHMAVVVRMRMDPDTKAYVERRLTQGHTKREIRRCLKRYLARQIYRSLTAATRTEETSTAPPGAVPIGT

SEQ ID NO: 431506 - protein, 449 aa, unidentified
MGKGVGKQAGLPVIHERAAGIDIGSRFHVVAVAPDLTDEPIQTFQAFTADLNRMADWLVSVGVRTVAMESTGVYWVPAFEVLESRGIDVILANAREARAVPGRKSDVNDAQWLQRLHACGLLRASFRPARDIAALRVYLRLRERLLDYTAAHIQHMQKALTFMNLQLHHVVSDVTGVTGMNIIRAIVGGQRDPNELAKMRDVRCKASIETIRAALVGNYQPEHVFALTQALALYDFYQTRISECDHQIENSLAILNADKTTPAAPMPKPRHRTKQPNEVCFDVRAVLYQLTGRDLTQIHGVGPYLALRLIAECGTDLGKWRTAKHFTSWLTLSPGCKISGGKVLSAHTKKTTNRVTAHLRLAAVTVGRTNTALGAFYRRLAARIGKSKAVTATARKIAVLFYNAMRFGTDYRDPGADHYESQYRERVVKNLHRRAAEFGYVLQQAEGVS

SEQ ID NO: 431507 - protein, 409 aa, unidentified
MLKIVYPNCCGIDVHKTFVVAVIAITNNQGITEYHRKRFSTFTNGLTQLRDWLEYHSCFDVCMESTGKYWIPVFNILEEQTNVCLAHPKYVKAIRGKKTDKKDAQWIADLFKHDLVASSFIPPLKIRQLRDLFRYRMKLTQLQVGEKNRYQNCLTWSNLQIASVVSDVFGKSAQAIIKSILDNPQDKPNIEQLVHKRMKNKVQDLEIAMEGALTPEQAEKIRVIKAHYDALAICKEDLEQMIRELGQDYQHQVKLIQTVPGFKEDLSALRIISEIGCDMTVFDSAAKLCSWAGLVPANNESAGKKFSTRISKGGKYLKPFLVQVANAVVKSDKHPELRNKYLKLKKRRGHRKAIIAICRRLLVSVYQVLRKQEDYNPVLQGLTEIRNPDKTMSVQDAVRFAQQHGFNVA

SEQ ID NO: 431508 - protein, 335 aa, unidentified
MYYVGLDVHHGTSTYCILDANGKVVKRRTVRGPWARVVEHLRQEPGPMAICFEASCGYGPLYDELASFARRVLMAHPGQLRLIFRSKRKNDRVDAKKLATLLYLDEVPAAHVPSVDVRQWRELIEFRRRLVDRQTACKNQIRALLRSSGVTAVKGLWTRKGLAWLEGLQWASLSQRIRRDLLLEDYRGRQRQIRTVTRALNRMGRRNPGVIVLQTIPGVGARTAETILAYLDHVERFARTGQVASYFGLVPSQDASGGVNHLGHITKQGPGTARKYLVEAAWQAVRRCPAARARYERIRQGRRDRRKIALVATAHWLLRCMTAMLRTGEAWRETA

SEQ ID NO: 431509 - protein, 339 aa, unidentified
MNKVSTVGLDIAKKVFQVHGVDAAGVVKVRRSLRRSQVVMWFAKLAPCLIGLEACATSHYWGRELRKLGHEVRLIPPAYAKAYVRRNKNDAADAAAICEAVSRPGMRFVAIKTEAQQAIGGVHKVRALLLKQRIMLINHLRGLMAEFGLVVATGPQHVGELLAILADPEEGGVAEPLRGALLGMTEVLRGLERRIEAIDRQVVAWGRSNTTYRHLITIPGYGPILASAVAALVIDPTTFCSGRDFSASLGLVPRQEGTGGKVKLGPISKRGNGYLRRLLVNGAMSVLGSKRARQDPWIAKLLASKPRKLAAVAVANKLARIGWAIMMRQEDFRTQPAAA

SEQ ID NO: 431510 - protein, 343 aa, unidentified
MKVSRIGVDLAKNVFQLHGVDRHDRVVFKRRLKRDQWLRVLLDNTEADCVIGMEACAGAHHWARELQSRGYRVRLIPPQFVTPYVKSNKNDANDAEAICEAMSRPNMRFVAVKRVEQQDIQATHRIRAELMTQRTAKANQIRGLVTEYGLVAPQHLSSLRSAIPCWLEDAENGLTIRFRALLHDLWQDLIGLDERVAALDAEIEVIAKTDPLAQRLQQLRGVGPLIATALVASVGTGQQFGKGRQMAAALGLTPKQHSSGNRERLSGISKRGDVYLRSILIHGARSVVSHAKHKEDRLSRWVTQLAERRHPNVAAVALANKTVRMAWAMMRTESDYDPEFIVV

SEQ ID NO: 431511 - protein, 453 aa, unidentified
MGKTTVPVFDEIRRNVAGIDLAWRAKNYVCGPRRDDDGFDIEAFGTTTPELHRMHMWLKDRKVESVAMESTSVYWIPLADLLEANGIEVVLVDSHDVRMVPGRKSDVEDCQWLQKLHSCGLLRGAFRPPEAVAAVRSILREKENATAMRTQAIQQMQKSLDQMNIRVHHAVSDIDGKTGTEIIKAIVEGERNPAKLAELRDARCKKSVAEIAEHLTGTWREEHLFNLGQAFKTMQFLDERIAEYELKASEMLAKLAATSGNPPPQPPPTDRKLTKKERNNPEGKAKLCQFMGFDMTCIHGIEYDTAMIIASELGDKIGNFPTEHHFVSYIGLAPSLNKSAGKKIRQKKRRKNTSRVGRALRMAASSLKNSKTELGAFYRSVARRIDGKTAVKSTARRIAQLIYRGIRFGKEYINRGAEAYESRLRDRTVRTIKSLIKSHNISGLELIAAFGAE

SEQ ID NO: 431512 - protein, 342 aa, unidentified
MQVTTIGLDIAKNVFQVHGIDADERVVVRKQLRRGQVLAFFKALPPCLIGMEACATAHYWAREVTKLGHRVRLMPARDVKAYVKRNKNDAADAEAICEAVQRPTVRSVQVKSAAQQSQLMLHRARDLLMRQRTQVINALRAHLAELGITAEQGTTGLKELLRIIANDDDERLPVDAYASLVVLAAELQAMQTLIGSLEKRIMAQHRASEASKRVATIPGIAVIGATAITATITDPKAFRSGRDFAAWIGLVPRQDSTGGKQKLGPISKQGDRYLRRILVVGAHAVLKQAKQKPEKYPWLTELLARKPFKVVAVALANKMARTAWALLAHGGTYRRPALVSAQ

SEQ ID NO: 431513 - protein, 354 aa, unidentified
MNKIKQLNFEGKVIYCGLDVHKTNWKINARMEGIEMAAFSQNPDPLLLKNYVHKNYPGAELKVVYEAGFCGFEIQRSLKSLGIECIVVNPADVPSSDKDRKRKDDKRDARKLSIELAKGNLKGIYIPDKQMQDARSLVRQRHRLVQDQTRCANRIKHLLLNNGITAGEKSERWSLRFIKKLQQLDCGSISLKSSLRFAIEQYVQTRRILKEITLAIRGLSKEEPFKKVQAVLQSIDGIGLINGMVIQTEIGEIHRFKRLDSLCDYGGFVPDIYSTNDKMVVRGISKRGNEFLRETIIESSWVLIRKDPAMLMKYNEYRNRMSANKAIVRIAKHLLSRIRFLWKNEQAYVRGIIG

SEQ ID NO: 431514 - protein, 326 aa, unidentified
MTAIVGIDIAKDKFDVCLLNEAGKAQEASFANSKQGINQLHHWLKKQGAKQAQVCLEATGIYGDLVAETLHSRKYQVSVVNPARIKAYADSQMRRNKTDALDAALIADYCRTQQPDPWTPPPPELKELRSLIRHLDDLKREKQRAANRLDVQTSSQAVIQHLEAQMALLEKQIQHTLRLIHDHIDHYPDLKQQRDLLDSIPGIGVLTASYLIAELGDISRFQDVGQVVAFVGLNPRQHQSGKKQTTHGISRMGRAALRAALYMPAIVAKRCNRRLGAWATQLSQRGLTGKQVIVALMRKLIHLAYGILKSGQAFDPHFNDLPLAPA

SEQ ID NO: 431515 - protein, 469 aa, unidentified
MIYSVGIDLHQGSHRARCLDDRAQICDGFTFQTTPEGLARLEERIFRDGANPIIVLEPAGLPWLMVAVYLRSQHPNCRLVKAKMQKVAALRRYLRGPVKSDRLDALTLAKMPFIDPEQLIEIYLPPAEIHALQRLTRQRKRMESDVSSHKVRISAILDGYLPGVRRAFSESWSSSFRAFLRERINPIAVVRDGEEALHAYLSKASSRSKVQAYQVFQACQSVAQVCKMSMKAGTLNEDFFTDLQDEVARELRLLEASEAESESLARRIAEIYKKLHPSDNLSTIPGVGPHTAPIFLSSVGDPVRFRNQSTFANWEGVVPGARQSSNVEAKGLRMTKAGPSIMRMALYQAGEIGRRNDPGLAAVYYREMVYHGKNHRQAMGAVMSHLGARVLRVLKEDRPYEIRDLEGKTVDKNEAKRLILSRYHVSEEIRRERRRRNTKVNRREEVEGVSIQEADDAPQAEQVKSVSRK

SEQ ID NO: 431516 - protein, 447 aa, unidentified
MEILYERCAGLDVHKKNVKACFASQGVGGKRQKETRTYLTMTQDVLEMRDWLKEQGCTHLAMEATGVYWKPIYNLLEGDFVILVVNAHHIKTVPGRKTDVKDAEWIADLLSHGLLTASFIPSAPQRELRDLTRYRAKLVEERAREINRLQKTLEDTNLKLGDVVSDVMGKAAQMILRAVVDGETDSVRLADFAAGRVRASRETLERALTGKATAHHRFLLGEHLTQIEHLDEAIGRISEEIARRLTPEPPIPPREEEHQPASPTATEPGSLPSAAGLPSLLNWQQAVEIIDQITGISQRIAEGLLAEIGVNMGQFPSAKHLASWVGVCPGNHESAGKRLSGKTRKGNPYARQLLIQAAHAASHSKNTYLATQYHRIAARRGAKKAAVAVGHSILVIIYHLLRDGSTYQDLGGNYFDQRDRHMVQKRLVRRLERMGYQVELQPMAQAG

SEQ ID NO: 431517 - protein, 344 aa, unidentified
MNKLSRVGIDLAKNVFQLHGVDRHEEAVWRRRLKRDNWLKVLLEKVEPDCVVGMEACTGAHHWARQLQAKGFAVKLIAPQFIKPYVKSNKNDANDAEAICEAMSRPGMRFVAVKSVAQQDIQAAHRIRSELIGHRTAKANQIRGLVAEYGLVAPRQLAHLRAAVPVWLEDAENGLTGRFRGLLNGLWNDLKALDHRAAELDHEINMIAQSDPVAKRLQQLRGVGPMVATALVAAVGNAEQFANGRQMAASLGLTPKQHSSGGKDRLLGISKRGDAYLRTMLIHGARAVIRTAKEKDDRLSQWVISLAARRHPNVAAAALANKTARIAWAMLRHGTDYQPDRITA

SEQ ID NO: 431518 - protein, 374 aa, unidentified
MDVLHPRCCGLDVHKSSISACILLREAGRVQKHQRRFGAMTQELQELAEWLRQFGVSQVAMESSGVYWKPVWNILEGQFTVVLANAQHIKNVPGRKTDQKDAEWIAQLLQYGLLRPSYVPCEIIRDLRDLTRMRASLSQEASRISSRIQKVLEDANVKLASVATNVLGKSGRAMLEDIISGEDDPEHLASLALGHLRVKIPQLRLALEGKIRSHHRFLLRRLVDQIQFVEHEIGLLDERLEEIAQQRPELSQAVARWDTIPGIDRVAAWALLAEIGDNMAQFPTAGHLASWAALCPGNHESAGKRLRGTTRQGSPWLCRMACQCAWAAARTKNTYLTSQFRRLAARRGKKRAIIAGGAYPHRHWLSLAEEPEQL

SEQ ID NO: 431519 - protein, 435 aa, unidentified
MEEVTDEPLYRDRVCGIDIGKAGLAATIRVPSDRDPARRMQETRGFGTTRREVLALADWLRCWQVPAVVMEATGDYWKGPFYRLEAEGFECVLADAKQVKNLPGRPKRDPADSRWLAACFERGAITPCFVATPEFRIIRLHTRYRRDLTEERTREKQRAEKLLESAAIKVSSVVTDLHGVTGRDIMDHLIAGERNPKVLAQLARAAARRKISQLEEALEGAEFFTPAHAALLAKVLARIDRLSADIDDLSQVIERLLAPYEEQLQQAESMPGWGRRAAQDAVAETGVDMSRFRTGGHLSSWAGRAPQDHQSGKRKGRAKAKKGNRYLGAITGETAVAAGRTQTREGARHRRLARKRGAAKACVATGNTQLKVYHKLLSNPGMRHQDLGPDYYDRQRDTRRQIAHHVGKLGSLGFEVTLCRIPDPEPDATGPAQPA

SEQ ID NO: 431520 - protein, 419 aa, unidentified
MMKHEKMKWTYVGLDSHKDSHTAVLLDCFYDKLGEITLKNLPSEFVKFLAEAEKLKMDGTQLLFGMEDVSAYGRTLAVFLKQNGKKVKHVNALLVARERRNQNIVQKTDSIDAECAAKVLLSKLNELPDADTQDKFYILRSLVVRRNFIVKNNLRLKNSLHTMLTQHYPNYRSFFREIGCKTSLTFFMRYPSPSTLQNVTLKELTGFLKEPSQGKVGAVKANAILTSLEDTETEHQEIRDMAVQSIIRQLEFTIEELERIEASMTAFLENFNCTLTSMNGIDVVTAAGLLSCIGDIKKFATPAKLARYSGIAPITYASGKKDLQFANQRGNRELHSLFFNLAVRVSSTVGSTNKVINPFFYDYYHRKLSEGKTKRQALKCVERRLVNIIWTMLTNNEEYVNPPMYDVPKKDERQEKKQK

SEQ ID NO: 431521 - protein, 357 aa, unidentified
MAEPDFVLLADLIGPPKRARRQSEAGVTMKPSRNAIKTLDRVLGLDVAKVSVVVFDPISGRTWTVANQLQSLLEALAPFADYELMVCEATGGHERAALQAALTLGLAAHRADASKVKSYIRSLGGAAKTDNIDARWLSRYGQERGDSLARWQASQASRDDLASLVRLRQDFVAQRTAAKNRRSAPVSDIAAAFLDRQVEFLDDEVRKLDKAIAEQIKGDPSLHAANDRLREHKGFGSVAISTLLALVPELGQLNRRQAACLTCLAPHPKDSGQTFGRRRTSRSGRDGVRPALFMAALSAARYNPTLKAFYQRLIAAGKPKRLALTAVARKLVVLANSLLKTAPPPAAVALQVGCSWI

SEQ ID NO: 431522 - protein, 413 aa, unidentified
MDASSFRIWVGVDRGDREHQVCAVVEGREQQRKVEHSGAGMKQLVAWLLELSGGRPAIVAVGIEVPHGVVVDCLLEHRFSVFSINPKQLDRFRDRFTVAGAKDDSRDARVLASSLETDPQAFLHLAPENPLIVQLREATHVLEDLKEERRALANRLRDQLNRYYPQILELSGAADEVWIWDLIERWPLPEQARRARAGPVKHILREHHIRRVTTDDVLKVLKAPALPVAPGVHEAATGHIELLLPRLRLVCKQQARCEGTIATLLRGLGEVSEDASGEKREHRDVDILRSMPGAGEFVTATMLAEASRPLTERNYHVLRARSGTAPVTRQSGKTRFVSMRYACNSRLRNALHYMSNTARLHDPRAEAVYRSHRAKGQTHARALRAVGDRQLQLLVTLLERDELFDFTRRQTSP

SEQ ID NO: 431523 - protein, 371 aa, unidentified
MSLKIVYKICCGIDVHKTFVVACIASTNDKGVTSYESHRFSTYTSGLKTLLQWLLKHNCKDVCMESTGKYWIPIYNILENDCSIVLAHPKYVKAIRGKKTDKKDAKWIADLFKHDLVAGSFMPPADIRQLRDLMRYRFKLTCFQSSEKNRLQNCLTVSNIQLGNVVSDTFGKSAQAIPDKLLENPADTSFDLEPLVYKSLKKKLPQLRDAIDGYITPEQVGKLKVIKAHYESLESRKAELEELILALAAPYQQELAILQTAPGIRSLFTAIGIISEIGTNMEAFPSAKHLCSWAGLTPTNNESAGKKKSVRVSKARCYIKPLLVQCANAVVTSKKHPGNSQPLSPSQKASRPQESNHCHCKNASDCIISYA

SEQ ID NO: 431524 - protein, 397 aa, unidentified
MDPTYAVFCGIDVGKGEHHAVGLDPAGTRLFDKALPNEEAKLRTVFDRLAEHGPVLVIVDQPNTIGALPVTVARACGHAVAYLPGLTMRRVADLYPGQAKTDARDAFIIADTARTMPHTLRRIDVGDEALAELGVLVGFDDDLAGEATRISNRIRGLLTGIHPALERVLGPRIAHPAVLEILSRCGGPVGIRKAGKRRLTTLATKHAPRMGARLAEEILTALDAQSVTVPGSNAAEIVLPKLADSLKEVLQQRKSIAEDVERMLDDHPLSQVLMSMPGVGVRTAARILLEVGDGSAFASAAHLAAYAGIAPVTHRSGSSIRGEHPARSGNRKLKRVLFLSAFAALHDPTSRAYYDRKRAEGKKHNAALICLARRRCDVLYAMLKNKTFYRTPAAAPA

SEQ ID NO: 431525 - protein, 345 aa, unidentified
MSEYDATQVVGIDLHRRRSVIVRQSASGERLGVARIDNDPITLAAEIVKAGAHPQVVLEATYGWYWAADVLAEAGAHVRLAHPLGIKGFSYRRVKNDVRDASDLADLLRMGRLPEAWIAPPATRELRELVRHRAKLVALRSGVKASVHAVLAKQGLHLPASDLFGVRGRALLAQAPLDGAYRARVNSLCRLIDALGFEIEVAAHLVSGRLAAHPGYRALQTIPGVGPTLAAVFVAEIGDVARFPTARHLTSWAGLTPRHRESDTTVRRGPITKQGSALVRWAAIEAAQKTPAWAGWLVRARAGITARHGRNTATVAVARKLLTLVYYGLRDGHIRALHQAARDAA

SEQ ID NO: 431526 - protein, 349 aa, unidentified
MDQIIRIGMDTSKHSFQLHGVNSAEEPVVRRKFSRGQMLAFFARQPSTVIGLEAGGAAHHWSRTLSAMGHEVKIIAPQFVKPYVKRGKNDAADAEALCEAMSRPSMRFVAPKTAEQQAALMLVSVRDRLVRSRTQLTNAIRGHAAEFGVIASRGLDKIDLLLALIVTDESIPALARSLFAQLGAEFAATEARLKQINAELLDWHRQDEVSRRLAQIPGVGPIGATMLALKAPDPGNFRSARHFAAWIGLTPRDHSTGGKTRLRGITRAGDEALRSLLVVGATAVVRQVRHNRGRPWPWLQCLLERKPPKLVAVALANKIARIAWRLMTAGQSYDGALAARLRPRAKAAC

SEQ ID NO: 431527 - protein, 355 aa, unidentified
MKSEVRKIDYTGQEIYCGLDVHKKRWQITVCTKHTIQKPVSIERPFVQNLKRHLEKKYPGGIYHVAYEAGFSGFGAHKAMEENGMKSMVVHAADIPTTDKDRKQKNDKRDSRKIAISLRSGELVGIYVPSDIALQDRSIVRERWSLARSERRVKNQIKSHLMFFGVDVPDDLENRYWSRRFIKWLQQIRKERDDRALGLKLERLMLIRQNMLNAVQALRKLSTEERHQKSYRILRSVPGIGLLTAMLLIVELIDIRRFPRFDELCSYTGFIPTTRSTGEKETMGELTNRKNQRIMPALVQSSWVSIKSDPELLMKYENYRKKMGGQKAIIKIARILLRRIQVIWSKEILYQKAEC

SEQ ID NO: 431528 - protein, 462 aa, unidentified
MQEKRESEPGRNRRRQLQGLPLMRADVAGIDIGSERHWVCAPTTDGSGREIADFGATTAELIRMAEWLQARGVRSVAMESTGVYWIPPHEVLEAHGLEVLLVDTRQLAQVPGRDKKTDPTDCEWIQRLHSCGLLRGSFRPAEAICMLRTLVRDKATLVAESGDWMRRMQKSLDQMNVRVHRAVSDIDGTTGMAMVRAIVEGERDARKLAQLRDPHCRKSEAEMAEQLNGHWREDHLFSLSQALKMYEAIQQRMADYDNEILRKLGEMEQEEARGQEAPALKNANKARKIKSRGQEPIRQALFRMSGVDGTQIDAIGVETMQVILSEYGPDLSRFPSEKEFVSHATLAPHVPKSGGRPLKKKKRHSPSARVANVLRMAAQSLRRSNTALGAYYRSMAQRKGADVATFAVARKLATLAYRLLRWGQPYVDEGAEAYEKRYQEQRIRGLKSRAKQLGYQLTPLTT

SEQ ID NO: 431529 - protein, 339 aa, unidentified
MYAATIGLDIAKNVFQVYGANAAGDPLFNRRVSRAAILDFFSKLPPCVVAMESCSTAHYWGRSISALGHQVRLIHPAYVKPFVNRDKTDANDAEAIHEALFRRSMRFVPLKSTSHQASTMLFKTRALLIRQRVRAVNALRAHLAELGIVARPGTSNVSSLISIVRDRQSKSLPPSAITALKIIARQIDTLTKDIESLEKTLKGQAKEDDEMRRLMTIPGLGPMTATAIKAFVPDIGVFKSARHFASWTGLTPKSFSSGESITIGGITKMGNADLRSLLVTGAMSVIRNTKTDDNKSWTASLKRRRPFKVAAIALANKNARTIWAILTKGGSYETAPTRA

SEQ ID NO: 431530 - protein, 348 aa, unidentified
MAKISRIGIDTSKSVFQLHGVDEAEQPVLRRKLRRREFLAFFERLEPTEIGIEACGASHHWARELGKLGHQVVLLPPQYVRPYVERNKNDAADAEAICEALSRPKVRKRRVAVKSAEQSALQMLLGTRDSLIRRRTQLSNAIRSYAAEFGLVIAKGLARIEPLLERVAADNSVPAIATQVFVTLGTEFRELAPRIAELDGKLKAWHRSNELSQRLAEVPTIGPIGACLLPIKIPDPRIFRSGRRCAAWIGLTAKDHSSGGKHKLGGITRAGNETLRAVLVCGATAYIAHVRRRRTQPSPWLAELLKRKPPKLAAVALANKTARIAWKLMISGQHYDRTRTAAPLAAAA

SEQ ID NO: 431531 - protein, 345 aa, unidentified
MSEIIRIGMDTSKHIFQLHGVDASEQVVLRKRLGRSTMLAFFAKLSPTVVVIEACGAAHYLARELGKLGHTAKLIAPQLVKPYVPRNKNDGRDAEGLCEAASRPRMRYVPVKTAEQQAALMLLGIRDQLVARRTQLSNTIRGHAAEFGLIEAKGLDKLASFLAAIEQDERVPVPARELFAMLARQCEQVQVELKAIEAKLLAWHRANALSRRLTQIPGIGPVTAAALVMKAPDPHAFRSGRLFAAWLGLTPKDHSTAGKKRLGKITRAGDERLRQLLVVGATSVVKQAKARGRGPRWLIELLKRKAPKLAAVALANKMARIAWKLMTTDERYDRARIDAQAATAA

SEQ ID NO: 431532 - protein, 403 aa, unidentified
MNSVGIDISKGRSTIAVMRPFGEVVISPFEVRHTDSELSELARQLKSLDGETRVVMEATGNYHAPVAKLLHDAGLYVSVVNAKLVHSYGNNDLRRVKTDRKDAVKLANYGLDRWLTLPRYVPEENTRLLLKNCYRQYRQYSKVQTVLKNNLISLLDTVFPNANRLFSSPIRGDGSEKWVDFVAEFWHCRCVSEKSERTFTNKYQRWCKKHGYNFREAKAHTIYAEASGHIGVMPKSETTKLLVEQAASQLRATSAALAALKHEMQSLASMLPEYPVVMDMFGVGPTLGPQLIAEIGDVRRFYSKKALVAYAGLDAPPNDSGDVTGRHKSMSKVGASSLRRTLFLVMSVYLQNAPLDEPVYQFMDKKRAEGKPYRVYMMASANKFLRIYYATVKAYLESLELTA

SEQ ID NO: 431533 - protein, 315 aa, unidentified
MENSFFVGIDVSKNQFDVHVRPVQFVRTLAQDEQGYKELIDVLKQYPPHTIIVEATGGFERHLVGVLLAHQLPVVVINPQRVRHFAKANGQLAKTDRIDAAILAHFAEVMQPQVRPLPDAFLEELRDLLARRRQLLDMIVAEKNRLVTTRPSIRRQLNDHIHWMEKRLAGLDDDLNGHIQSSPTWKAKDELLQSVPSIGPASSRSLLIQLPELGLLNRRQIAALVGVAPINQDSGRFRGHRVTQGGRASVRCALYMSTLVAIRHNPLIRSFYQRLVANGKPKMVALIASMRKLLTILNTIIKSEHPWDPSYEKNA

SEQ ID NO: 431534 - protein, 340 aa, unidentified
MNHYAGIDVSLEASSVCVIDGSGKIVGEGKVASEPAALIAWFGSLGLSLTRIGLEAGPLSQWLYAGLRDGGLAVELLETRHVRTAFKIMPVKTDRKDARGIAELMRLGWFRPVHCKSMEAQETRAMLTARKLVQKMLHEVEMSLRGVLRGFGLKVGKTTPVQFEGRIRELVAGHPNLEEIATSLLATRATLRREFNGFEKRLRALARGDTRARLLMSTPGVGTIVALTYASAIDDPSRFKSSKTVGAHFGLTPAKYQSGETERSGRISKIGDDTVRAALYESAHIILTKPVKGCTDLKSWAMRIARRAGMNKAKVALARKLAVIMHRMLADGTTFTTQPA

SEQ ID NO: 431535 - protein, 342 aa, unidentified
MKITTIGIDLAKSVFQVHGVDERGKAVLKKQVKRDRMVEFFANIPPCLIGMEACGSAHFWANKLQGLGHTVKLMAPQFVKPYVKTNKNDAADAEAICEAVARPNMRFVPIKNGEQQAVLSLHRARQGFVKARTAQANQIRGLLAEYGIVIPQGIAHIGKRLPEILEDGENGLPGTFQRLIERLWNHLKELDRQVQELEIQIQTWHRQSPASQKLAQIPGIGPITASALVASIGDARNFGNGRQLAAWLGLVPRQNSSGGKQTLLGISKRGDTYLRTLMIHGARAVIRVAQKKPAHEGSWLAGVMKRRNKNVAAVALANKNARIVWALLTHDRGYTANYARAV

SEQ ID NO: 431536 - protein, 341 aa, unidentified
MDKELYFGVDVSKKTLDLAYYDGETIDWKNAHIQVSNDDAGFKKIGSWVAKVGKDFDTFLFCMEYTGLYNQNFRLWLESKEYIYGMVEPRKMHRFEPDLDDDQRSLDRIKTDELDAFRIAIYCEQNHKKILRNPSKLPSPVYFKLKRLLAERKQNTKQSVLYKQQLHDICAYDTDLSVERKKLLLKNMKENQKAIDKEIDSYMNEDTSIRKNYNLLTSIPGIGRIIALETIVLTENFTAISNPRKYACYIGIAPFKKESGTSVRKKTGVSKKGFSEAKADLSIAVLSAIKNNPSIRDYWIRKRKEKCGGIVLNAVKFKLVLRMFAVIKRGTPYVETDAYKN

SEQ ID NO: 431537 - protein, 359 aa, unidentified
MKLYMAIDLHSTNNYVAAVSDDGTSIMNKRLRNDPDVILETLAPYKDEVAGLAVESTYNWYWLVDLLMSEGYRVHLANPTAIRKYSGLKYADDRHDARWLAELLRLGILPEGYIYPKEQRPLRDLLRKRQQLVRLRTSMMLSLQNLVTRNHGVKLGGSVLKRLGNPLEGYLEAHEDLKLAGTMSKQTIDYLTGQISTVESHILRQLKERDAYRNLTTIPGVGKILAMTIMMETGPIDRFATVGQYASYCRKVRSLWLSNEKAKGKGNEKSGNKYLAWAFSEAAEIARRYDPACQAFYERKRRQSNRMVAHNALAHKLARAAYHVLRDNVAFEATKLFCEKPGRNGKPESAVGGPRRLIG

SEQ ID NO: 431538 - protein, 391 aa, unidentified
MSMYFVGIDISKYKHDCCIISAVDQQIVSKFTITNDKDGFEQLLISLNSLSNPEDIKIGFESTAHYALNLELFLENANHSFMEVNPVLIKEYKKSTTLRRTKTDSVDCESIARWLMTVEYKPHSKGFYHAYSLKSLTRLRDRLIRQRSFYLVKITNVLDHTFPEFKPFFNERLSKTAIYLLENYGSAEKMAHMNSASYDKLRCISRGKFSIQQFLHLKELAANTVGVNNSIFDIELNSLLTLYNSLCKEIKNLEAEITRLIEEVHPHYMSIPGIGPISAAVIYAEYGDISNFSNPSQMLAFAGIEPGINVSGTESHGGRMVKHGSSQLRYVLLNACLPLIRFDLTFATYYAKKRAEGKKHRVAITHVAKKLIRVIYALERQDVDFNAQKIR

SEQ ID NO: 431539 - protein, 308 aa, unidentified
MNEVTIGIDVSKAVLDVATHPHGEIQQFSNNKTGLKAMGKWLKGQTVSLVVFEATGAYHKALETALDRAGVAFAKVNPLRAKRFAQAVGQLAKTDRTDALSLARFAAVMQPHTTNVKPQNLETLHEMVMARLALRKEAAATKTRLKTMRNSFLIKKFQRKLRQIEKDIVDVDAQCLKLVKVDQDLSRRFDILSSVPGLGPVSIMTMLAEMPELGSMDKRQTAALAGLAPITRQSGTWKGKSFIGGGRTVLRKALYMPALVATRYNKHLRAKYDDLIKRGKPAKIALTAIMRNIIIIANALIRDDRLWS

SEQ ID NO: 431540 - protein, 320 aa, unidentified
MSALSVVVGIDVAKASVDVAVLGAELHARQFDNEADGHSLLAAALMPLQPTLVVLEATGGYEAALVCALQAAGLSVAVVNPKQARDFARAMGRLAKTDRIDAQALAEFAAVLARRSDLPRLVQPLPDALQRELAALVTRRRQLLTMLGSERLRLPLATLTVRPSIEVMIQAIKAQLDEIEGQMTHHVDAHFTELDSLLRSAKGIGPIASATLIATLPELGRLNRRAISALVGVAPIANDSGTSRRRRRIQGGRFEVRRVLYMATLTASTRNPTIRAYYQRLIAAGKLPKVALVACMRKLLTTLNAMVRTGTHWMSPAQLA

SEQ ID NO: 431541 - protein, 365 aa, unidentified
MTEKKDGIYFIGCDMHKEYSNFAVLDGRGKVVSQVRLPHDGESLELFYRSLPPGSEVAVEASRGWYWMIDLIEECGHVPHLVHAGKAKAMMGHIHKTDKLDSVGLGKLLYLGSLPTVWIPPGEIRDVRELLRVRMGFSRVRTSVKNQIHAQLGKWGVRVSDVSDLFGISGREKVKEVLDRVPRESRHGIEMRLSFLSAVESHMEEIEKRLWEVVKEDHRMKLLQTIPGVGKVLSVVICYEMGDVERFPSAGKFSSYCGLVPRVRSSGGKTFYGRTPKASKRILKWAFVEAATVVGRWAKSWSHLKVARDYLKIKSQKGHGIAAVAVARRLACSAWWVLKKEEPYRNAVRPGGELRELRESYEARG

SEQ ID NO: 431542 - protein, 362 aa, unidentified
MEFFSGLDVGMDETAICVVDDKGKVELQTTVVSDPDAIKLALKPYLGRLRRVGHEAGSWSPWLHPELEKLGLPVICLETQHVRAALKAQRNKTDKTDALGLAHLMRTGWFRQAHIKSEACYRLRLLLTHRRNLKRKFVDLENAIRHSLKAFGMRFKGCGRGGFAQAVREAVAGDPLVTELIEAMLNARAALWKEYLKLHDMVVKFVAGHELCRRLMQIPGVGPVAALSFVTAIDDPSRFKRSRDVAAYFGLTSRRWQSGKSIDVQGRISKAGDPDVRRALYEAASALLTRFKRKDKIKTWGLAIAKRSSHRKATVAVARKLAVVMHAMWVDGTFYCGDPATRAADVSARAATKDKKLLGAYA

SEQ ID NO: 431543 - protein, 378 aa, unidentified
MSILYLGLDVHKDSITLAVFGPTGTEPLCLERLPYDLHKLRRFLERLTRGGEQIRACYEASGAGYVLQRELERWGYACDLIAPSLIPTRPGEQRKHDKRDAIQLGRLYRAGELVVIRVPSEAEERVRDLVRCRETFQREILKSRHYILKFLRRRGFVYRDGSHWTTRHLEWIRHLLTQDQLAVEDHVVLSEYLALLEYKLSRREELDRRIEALALEPAYRPAVERLQCFRGISTHAAMVLATEIGDWRRFQSPRQMMAYLGLVPSEHSSGERRRQGAITKAGNSHCRHVLIQAAWSYRRPPTLSLPLKRRQQGQSPQVIAHAWKAQQRLYKLFCRIGARKCAPIAATAAARELIGFLWAVMQEVPQEVESSVQHGAAA

SEQ ID NO: 431544 - protein, 407 aa, unidentified
MIYGGIDVAKYRHEVCLVNDTGDVVLQMYIDNNQSGMDKLLQTLERLSIEPNDIKFCLEATGHYWLPIYCHLSELGFQLHVINPIQSDALRNLYVRKTKTDRKDALLLADLLRLGRAPETKLPSETILKLQNLSRLRFELVRQVAGLKNRVLGTLDRIFPEYPGCFSDVFIRTSRELLKSYPEPEDLVKVDLSELSAFLKQHSRGRFGEERAKKIQSLAKSTFGITLALDAFSLQLRLLIEQIEFIEEQIKVLEEAINQVMEELRPSKDTPYRHVIETIPGIGPVLAAAIIGEKGDISRFPNARALVAYTGLDASVKASGLFEGTRNRMSKRGSPVLRNSLWLAAVSARRFNPELKAYYELKRSQGKHSSVATGAVARRLVHLIYSLWKNNRAYDPDYQWSPPGDNV

SEQ ID NO: 431545 - protein, 388 aa, unidentified
MQDVAHRPVAATTIGSDLCAIFISLELSRSTWLVTSLSPGHGEKMSKHSVKAGDIAALLARFSKLRAKACARTGKSLPIVVIQEAGLDGFWIHRVLLSEGIESHVVDAASVATSRRRRRAKTDRIDGETLLRALLAYKRGEPRVCSMVRAPTPEDEDRRRICRERKVLIMERVQHVNRIKGLLFSQGVSGYEPLHRDRRAQLDALQTGDGRRLPQHLKAQICRELDRLELVLEQIKAVEAERDALLNAEQTKVSAPPPMLLALHGVGPEFASVLWSEGLSRHFDNRRQVAAYAGLAPTPWQSGSINREQGISQSGNPRLRTTMIQLAWLWIRHQPVSALTLWFKDRNERTGGRRRKTTIVALARKLLVALWKFVSAGVVIEGAMMRPA

SEQ ID NO: 431546 - protein, 326 aa, unidentified
MPSNGERFNRVIAFEVSKADLVVYCAPQDVSSTIPNTKSAVRRYLKKQTRTKPGPEVSDLLVVCEATGGYERFVLEAAAELGLACHRAHGSRVRAYARYRGTHAKSDAIDARLLADYGLHGENLKLYQPPSPAQDRLRALLGRRTELRRAMEAEQCRLDHALDKDIAHSIKALIAVLHRLLAGIEAKIVLLMKEDADLAEKARLLQGVKGIGPITAATLLGYVPELGSLSRGAAAALLGVAPFDRDSGKIKGKRHIFAGRGEARSCLYMAAISAMRYNPKFKEFATRLKQRGKPFKLVAAATMRKLATVVNAMLRTGTPKTAQTLA

SEQ ID NO: 431547 - protein, 337 aa, unidentified
MKVTLIGIDLAKSIFQVCGVNQAGKRAFNRQVRRARLMEFLLQYPDAVIAMEACSGSNFWGRALQQRGFKVMLIPPQHVKPFVKGNKNDRNDAFAITEAARRPDLKCVEPRTLAQTDLIQVHRVLDRMVRQRTALINQVRGFLNEYGIVVAQGKEKLLAAMPNLLEDAENGLTPSSRALFQQLLEQWQQANEAISRVEKGLKSQARTDEAAQRLMKMKGVAERISTATIAHAANGHGYKSGRHFAANLGLVPKERSSGGQQKLGGITKRGNQYLRRLLIQGAWSVVRNVDKNDDRMSRWARQLVERRGKHIAAVAVANKMARIMWSMLYHQTEFRAN

SEQ ID NO: 431548 - protein, 343 aa, unidentified
MKLIRVGVDLAKNVFQVHGVDRNEKAAWRRKLARESWIKVLLETVEPSCEIGMEACGGAHHWARLLQAHGFKVRLVAPQFVKPYVKSNKNDANDAEAICEAMSRPHMRFVSVKTVEQQDIQAVHRIRAELTKQRTAKANQIRGLVAEYGLVAPKELMHLRRALPCWLEDAENGLSARFRRLLSGLWGDLRTLDERIAEVDREITMIAQNDPAAKRLQQLRGVGPIIATALVAAVGNGEQFANGRQMSAAFGLTPRQHSSGGKERLLGISKRGDAYLRVLLIHGARSVIHHSKDKDDRLSQWVTRLAARRHTNVAAVAMANKTTRMAWAMLRNGTDYQPAMVTS

SEQ ID NO: 431549 - protein, 355 aa, unidentified
MEKLIRIGMDTSKQVFQLHGVNAAEEPVLRRKLRRKEMVAFFQRLEPTVVGIEACGGAHHWARVLQQFGHQVKLLPPKYAKAYVKRGKNDAADAEALCEAMSRPTMRFVAAKTPEQQAAQMLVGTRDRLIRRRTQLANAIRGYAAEFGLIAARGVDKIEPLLARLHSEPTLPALARELFAWHAKEYAQLQAQLEVIDAKLMTWHRQNEASRRLVKIPGIGPIGATLLVIKVAQPEAFRSGRHFAAWIGLTPKDHSTAGKTRLGGITRAGDEALRSVLVVGATAVIQQVRRGKACPGQGTEGHPSPWLVELLKRKPPKLAAVALANKMARIAWKLMVSGQPFNPAHVVATAIDKAA

SEQ ID NO: 431550 - protein, 348 aa, unidentified
MTKLARVGIDTSKSVFQLHGVDAKEQAVLRKQLRRRQFVGFFAKLEPTLVGLEACGASHHWARELQKLGHQVMLIPPQYVKPYVGRNKNDKIDAAAVCEAMSRPKVQERLVPIKSVEQSAAQMLLGVRESLVRRRTQLTNTIRGHAAEFGLVAARGLDKIEPLLARIAADASLPALTKEMFAMLGREYAELGPRIAQIDKKMLAFHRSNELARRLMEVPAIGPIGACLLVTKIVDPHAFRSGRRCAAWIGLTPKDHSTAGKQRLGGITRAGDERLRAVLVSGATTCIQHANKRRGRPSPWLVELLKRKPPKVAAVALANKTARIAWKIMTSGERYDPNRGAARQGLAA

SEQ ID NO: 431551 - protein, 383 aa, unidentified
MTDQQVIIGMDPHKSSNTIAVLTRDETMLTRRRFVNSDDGFIEMLQAVTDYPNRVWAVEGANGVGRSVAQRLVAFGESVVDVPAKLATRVRVYSTGHGTKTDNADAVAIARAAIHSKHLRRVLADDATVAMKLLSDRRHELVGLRTQAMCRLHRLLRELIAGGAPRQLSAEKAFDLLNDLKPDDPANVMRLEIAFDHIEDVMRLDRKIDDYNRRIVADVKSSGTTLIRLYGVGPINAALILGEVGDVSRFPNRDHFASYTGTAPISASSGDHQRHRLNRAGNRRLNHALHIAAITQIRQDTPGRVLYRRKMAEGKTHKEALRCVKRRISDAVWRQLQTDRSDDRTQDTTWPRSPAKDTFLVAYRSPDTPRANGRPKRFKPAVV

SEQ ID NO: 431552 - protein, 347 aa, unidentified
MNYNQSHAFYCGVDLHARSMFTHVLDRKGQTVFERDLAADPGEFLDAIKPFRKNLVVGCECMFAWYWLADLCEDQKIPFVLGHALAMKHIHGGKAKNDRLDAAKLAGLLRGGLFPMAYVYPRAKRQTRDLLRRRSFFVRQRAQLIAHIVNTNSQFNLPPLAKKLSYAGNRSAAIAERFADPSTRLMIASDLALIDNYDTQIAELERHLIQSAKVDDPVTFGFLRSVPGIGPILGLILLYEIDQIGRFPEVGNFLSYSRLVRCEHSSAGKVKGSGSRKIGNAHLKWAFSEAACLMKRCCPGVRSWCQRQEKKRGKRVSLAILEAKIGRAVYHLWRRQRAFDLKRFLKG

SEQ ID NO: 431553 - protein, 348 aa, unidentified
MSQSHYIGLDVSARTVNLCVVEHDGHVVHERKLSSDPEEIAQHILSLPFRIVRVGLEAGMLSQHIYGRLAEASIPVVCVETRHMKAALAAQLNKTDRHDARGIAQMMRVGLFKPVHVKTPSSQRLRTILTARQLLRNKLQDVENEIRGLIRNFGYHLGKVTARDFEPRVRELIADTDLHAVADALLLARRGLREQFGKLDDMLVRLARQDEVARRFMTVPGVGPLVALTFRATVDVPSRFTRSRTVGAHFGLTPRKLQSGEVDRNGRISRWGDEMMRSLLYEAAQVLLTRVKRWSALKAWGAQVARRRGHKKAIIALARKIAVILHRMWIDGTEFDWGKRPEGVASSA

SEQ ID NO: 431554 - protein, 351 aa, unidentified
MFVIGVDPHKGSHTATALSSTEEVIAELRVDADTNQLVRLLEWAEPFSPRRWAVEGAGGTGALLARQLVAAGQEVVDVAPTLSARVRLLDRGRSAKTDSHDARATAIVALRHANLRRVVVEDHDAVLRLLADRHHDLVAQRTRVVCRLHALLVQLREGGATKGLSADRAAQVLRRIRPTGPADAERKRQCTEHLNELRRLDAQLVELRKRTVEAVAASATTVDEVHGVGPLMAAVIVGHTGGVGRFPTSGHFARFNGTAPIDASSGEVKRHRLNPRGNRQLNHALHVAAVTQVAHDTAGRAFYLRKIAEKKTRREALRALKRRISDAVYHQLVADAERGIGRTSRDDSKAA

SEQ ID NO: 431555 - protein, 429 aa, unidentified
MKKNNNTLTNSDRAGKPGKVRGPVQRDAKEVMAELVVKLSQKLEPQSAKTSEGEGRQQGIPGPNRDRLTVGVDLGDKWSNFCILGLDGEKLTEGELRTTPQDFAEFFQSMTAARVVMEVGTHSAWARDTVARSGHEVLVANPRQMEGPKRRKRKNDRIDAHKLARVGRMDPQSLFAIGHRSVEVRQDLVAVRARHAAVDVRKDLINTTRGLVKSMGARLPKCSTASFARKVAGAVPAEVREALLPLVRLVETLSSCIKEYDERIEKLATEKYAHTKLLRQVKGVGPLTSLAYVLTLEDPQRFVKSRDVGPYLGLVPKQEDSGDTQPQLRITKMGDMMVRQLLVGSAQHILGPFGPDTDLRRYGLRLSERGGKNAKKRAAVAVARKLAVLLHRLWVSGEVYEPLRHALPKATQEEAARQAPAEATEEEAA

SEQ ID NO: 431556 - protein, 348 aa, unidentified
MIIGVDPHKMSHTTNAVDPATNSTAASLRIDASLVGYRELMRWAKQFPERRWAVENARGLGRHLAQWLVARGEVVLDVPSTATARVRELSRSSRRKTDVIDAAAAASVAALHGDATVVTAEDYTTVFALLEERRANVAAQRVRIANQLHAVLRDLAPGGAALALTAKSVATLLRTIRPDSPAERTRKELAQDLVRELRAVDASLADIEARMTVALDEHGTRLREIDGIGAVTAVRLIGRTGIASRFASEHAFATYAGVAPIEIASGDHTRHRLSRAGDRRLNSAIHLIAVTQVRMRNSIGRAYFDKKIAEGKTRNEAMRCLKRRLANHIWRMMIADERRPPAAREIAA

SEQ ID NO: 431557 - protein, 343 aa, unidentified
MDYYAGIDVSLEESSVCIVDATGKIVREGKVATEPGALIAWFSTVKLKLVRVGVEAGPLSQWLYPELKKAGLAVELLETRHVRTAFKTMAVKTDRKDARGIAELMRVGWFRPVHCKSMNAQETRVILNTRNLVQSKLKDIEASARGMLRNFGLKVGSTTRIRFADRIKTLVEGHPTLEIMAEAVLAVHAVLLQQFKNLEKRVRVMARHDEQARLLMTTSGVGPIVSLTYAAAIDDPARFKNSKTVGSHFGMTPKRYQSGETDITGRISKIGDKSVRLALYQAAHIILTKPVKSSVLKDWALRLAKRIGMSKAKVALARKLAVIMHRMLVDGTVFNPAEGAAKA

SEQ ID NO: 431558 - protein, 315 aa, unidentified
MSSGVLVGIDVSKAHLEVGVLPSREVWREDNDPSDLSALVKLLRRLAPELVVMEATGGLETGAAAVLSGAGLPVVVVNPRQVREFARATGQLAKTDKIDALMLALFGERVRPKVRPLPDEVAQAFEALLARRRQLVTILAQEKTRLKQARSTEVAAGIKRHIRWLENEIKDVEGNLRDSVRKSPIWKGKDDLLRSAPGVGRIVSFTLLGNLPELGRLNRKEIAALGGVAPHAADSGTLRGQRVIWGGRQAVRQSLFMAALAAVRIDPVFQAFHARLIEAGKPPKVALVACMRKLLTILNAMVRDATPWNPELASV

SEQ ID NO: 431559 - protein, 344 aa, unidentified
MTLVGCDLHTRKQQVAALDTETGETHERQLVHEGSAVEEFYAALPCPVTVGIESTGYAIWFHALMHRLGHTVLVGDAPKIRAMVVRKTKTDQRDARHLLDLLRHDRFPTVWVPDPATRDLRARLTHRRRLVRIQTMLKNGLHAIALNQRLARGAKLLRHDGLAQLQALPLPPYTAQRRDHSLELLGTLHTKIQQLDAAIATAALAHPDAPRLLTHPGVGPLTALATVVVLGPVTRFADAKHVVSYVGLAPSLHASADKYRLGHITKQGSSLLRWVLGQAAPHAARFDADLKRTYFTLRQRRGRAKARVAVTRKLLVRLFIMLRDHIDYAEFRRRGRPPAPVSAG

SEQ ID NO: 431560 - protein, 424 aa, unidentified
MNLTQNDRLKQVTSDTLIVGVDVGSQTHFCRAFDWRGFELSKRVFKFSNTGMGFLTFLRWTEELMNKTEMRKVIVGCEPTGCYWLTFQKFLQEHEIQLVTVNPFTVNRSKELDDNSPEKSDLKDPKTIALLVKDGRYSTSYLPSGVYAEIREASVCRDQIMKQHVRLSNQIQGWLQKFFPEYFECYASWDSTSGLMLLKEAPLPQDILKIGAGGINQIWRDAKVRAAGIKRAQTLVEAAQNSVGLEAGEAARLEIWILVNDYILKAEQLKRLDEYLEEKIKEVPNVEKLLAIKGVGMSTVTGFIAEVGDIGRFTDPKQIQKLAGLEIVKKSSGKKKGQPRISKRGRRKLRRTMYESARALMNWNPAFQDVFLYYRNRTKNPLGGMQAKIAVACKAIRVFYVVLQTGCDFDEEKFRRDIIRPEAA

SEQ ID NO: 431561 - protein, 351 aa, unidentified
MPLMKYYIGLDAHSTTSTFAVVNPDGDCVLRETVNTSEQSLVHVINKVHGERHLTFEESTISQWLYLQLRDKVDELLVCNPTYVAEKSGAKTDFRDALHLAQELRTNHLKPVFHDDSHWMELRVSVSGYLDIVEEIIRFKNRLKSVFRAEAIATDENSFYKNQKRVQELKNPSAKFVAQKLFEQIEFLEKEKLKYQDLFEKNKKNFRPIRNLMTIPGISIIRANIICAIVCQPSRFENKHRFWGYCMLVRHIQESGGRIYGNKRFHGRRELRDAFVGAAESAIRTETTLRDHYDAQRAKGVGHKEAKLSTARRIAAIALCLLKNNDKYNDNYIDYLKERKELRKKFYEESP

SEQ ID NO: 431562 - protein, 348 aa, unidentified
MKYIGLDCHKHYDHATIIDTETGEVKARKLAHIKEEFREFIGDKAGTRVVIESCRDWSRTYELSEDLVEEVILAHPLKVKAIASAKVKTDAIDSRTLAQLLMADLIPEAHLRKAENRVKQRVIRHRTFMVIMRTRVKSRIHDLVDSQLLPPEILQAKPINLFSKKGMKWLTSLEWVKEEDKRLLESHLRVMEAIDQEISITNDMLKGIYDKDGDAQLLTTIPGIGITLGMLISTEIDGIDRFRSPSKLCSYAGLVPSTHSSGGKIYHGKITSEGNRWLRWALVEAAVPASYADAEIKERLDILRRKKGANVAKTAMARWLLKIVYHVLKERRPYITVYNKMAKAGAAF

SEQ ID NO: 431563 - protein, 415 aa, unidentified
MEVMHPRCAGIDVSKRDAKVCIRVQRSGGRRTSSTVTTWGAMTNQILALRDHLAAQQVTVVVMEATGDYWRPFYYVLEADFEVMLVNARSVKNVPGRKSDVSDAAWLADLGAHGLVRASFVPPEPIRQLRDLTRTRTHITRERTREVQRLEKLLESAGIKLSSVATDITGVSGRLMLQALIDSQGTADPAVVADLAKRRMRSKIPVLTEALNGRFTAHHAFLTRLFLDRIDAHTKDIAALSERIDGLMAPFLPARDLLESIPGFSQIIAEVFIAETGGDMTQFPTPEQLASWAGVSPGSNESAGRVKSTKTRPGNRYLKGALGVAALNQAKSKKTYFSARYRRLASTRGPMKAIVAVEHAMLTAAWNMLTNAEFYRDPGADYYTRQDPAKTRARAVRQLEALGYQVTIQPVQQAG

SEQ ID NO: 431564 - protein, 342 aa, unidentified
MAQTISVLGIDIAKLVFHVVGMDDSGHVVLRKRIARSALLTFIANLPPLRIGMEACGSAHYWARCFREYGHDVRLIAPQFVKAYVKSPKNDARDAEAICEAVTRPTMRFVPIKRVEQQDLQALHRIRERLITARTALVNEIRGLLNEYGIVLPHSIAKFRALIVDKLEADQAQLTVLSTEVFWHLYDEFLAVEKRLAYYDEKLAAIGQAHPECQRLQTIPGIGPVTATALIAAIGDVTQFKNGRQLAAWLGLVPREHSTGGKPRLLGISKRGDVYLRKLLVHGARATLRWIDTKHDERSQWLKALIARRGKHRAAVALANKNARIVWALLAHNQEYRPRTAV

SEQ ID NO: 431565 - protein, 347 aa, unidentified
MLADELDFVVGVDPHRDLHAIAVVEVRSGLVVFETRVTADSSGYVEALRVAKQHAPGRRAFAVEGTGSYGAGLTRFLADHGEQVFEVGRVRRARCSGGKTDALDAVRAARSVLEQKRPATPRSSGEREALRALLAAREGAVNAKRAALCQLRDLLVTTPEPLRSELRPLSRARLLSRLSATRPERRQDPELRGTLLALRAVARRVQQLSAEERELAREIEQLTSKLAPQLLSQPGIGPLLAAQIVLSWSHRGRLVSEAAFARLAGAAPIPASSGQTTRYRLDRSGDRQLNRALHQIVVTRRRTHRPTIDYIERRVREGKSRREATRCLKRYLARNLYRLLEHPPLTT

SEQ ID NO: 431566 - protein, 370 aa, unidentified
MSQSRTLFIGMDVHKDSIAVAYVAQDHGAEVTYLGARGTRQCDIDQLVRKMQSKAKHLLFVYEAGPCGYWLYRYLPRKGSDCWVVAPSLIPHKPGDRVNTDRRDARQLARRARSGDLTVVYVPKVEEEAIRALSRAREDAISDLKDAKFRLKAFLLRQDIRYVGRAHWGPAHLRWLSEVVCPTPAQQIVFQEYVRAVQEHTERLQRLAQELQEQVNAWRLNPVVEALQALRGVQFTVAVTMVAEIGDLTRFDTPRELMQFLGLIPSAYSSGEQRRQGSITKAGNTHARKAVVEGAWAYRYPAKVSRHLQLRLEKPPKMIQDLSWKAQVRLCTRYRRLVSRGQHATVVTVAMARELVGCMGAIATQVPLTA

SEQ ID NO: 431567 - protein, 449 aa, unidentified
MAAIQAAKKMERFTLLNPNSAGIDIGSMLMVVSYTDQEGMINLREFDSFTGSLYQLAELLQREGVEKVVMEATGPYWESLYNILEKHGMEMFLVNPSHYRNVSAQKTDINDAQWLHQLLAHGLIRNSHIAPELYRQLRQYLHERETYQNHKSDTLNRIQKTLTLMNIKFQHLISDIEGVSGMKLLRAISSGISDPATLLACIDVKKLKASPEDLLSSLHGDYKEHYINILSNTLKSYDFFKEQMLTYETYTEQTLQELLACKDAQKAAPVKKKTRVVRKNQYSINLKDYLLGIFGVDLTEVEGLDEIGLLTILAVTGTNMKKWPSAEHFVSWLNLSPRPKISGGKIIGYEKRISNNPATQAFRLAAHCLWQSKGPMGQQYRRLAATKGSKKAIKAIARKIAVIFYHMVLNQQAYDASRIQPDIEQQTAKKIARLQKEAAKLGMAIQKAA

SEQ ID NO: 431568 - protein, 460 aa, unidentified
MNPKKPKSRNDGKIPMVHPNAAAIDVGATMHMAAVRADRAPEPVRSFGTFTADLHRLVDWFTECGVETVVMESTSVYWIPIFELLDARGFTVFLVNARDAKHVPGRKTDVSDAQWLQRLHSFGLLRASFRPKGQIAELRAYVRQRERLLEYAASHIQHMQKALVEMNLQLHHVVADITGATGLRIIRAILAGERDPEALACLRHYSCHSSAETIAKALTGSYRAEHLFALEQALALYDAYHEKASACDARIEAVLKELSLHRGHGHGPAPRVSRRRNRTDQANALAFDVREALFALLGKDITTIDGLGPYLSLKLIAECGDDLSSWPSAKHFTSWLGLAPSNKISGGKMLSSRTRRSGGRAAALLRLAAVTVGRTDTALGAFYRRLSARIGKAKAVTATARKIAVLFYNAVRYGMDYVDPGASSYETRYRTRVVNNLHRRAKAFGFVLQSLEPKVGAAVS

SEQ ID NO: 431569 - protein, 337 aa, unidentified
MLFCGIDLHSNNCLVVVSDDNDKVVYSKRLPNDLATICAALSPYRQELFGVVVESTYNWYWLVDGLMAAGHSIHLANTTAIKQYDGLKHRGDESDARHLAHVLRLGLLPEGHIMPKADRAFRDLARRRMQLVGQRTSQIVSIETSMAQHMCAKISGNSVKELTADDIDAMPIGPTEALGMKANLAVMQALQVQIDGIEATLSKHCRRDKDYRLLCSVAGIGPILATVILLETGDIARFADVGNYASYCRCVGSAHMSNGKKKGEGNTKNGNRFLAWAYVEAANFAIRYCEAARKFYQRKKAKRNGIVAIKAVAHKLARACFHMLKTGEKFSVERCFT

SEQ ID NO: 431570 - protein, 422 aa, unidentified
MSCFCCASLLTMSICAGVIVAVVGIDVSKGKSTVTVLQPGGTVIRKPFDVSHTSQNLNELAAYLDSLDGDTRIVMECTGRYHEPMLKALYEAGLFVSVVNPHLIKNFGNNSLRRVKSDPADARRIARYTLDNWAELRQYSGMDNTRTQLKTLNSQFSFFMKQKVAAKANLIALLDNTYPGVNKRFDSPPREDGSEKWVDYAYSFWHVDCVRRIGLKTFTERYRAFCRKHHYIFQPDKPEKLFHASKELVAVFPKEKTYKLLIQQSIQQLNLASGHVERLRQEMNALASTLPEYSTVMGIYGVGKTYGPQLIAEIGDVSRFTHREALTAFAGVDPGVDESGQHKSKSNRASKVGSARLRKTLFQIMTTLLQNAPEDDPVYRFLDKKRAQGKPYYVYMTAGANKFLRIYYGKVKECLRNLEQAE

SEQ ID NO: 431571 - protein, 350 aa, unidentified
MLAELVEVVIGVDTHKHTHTAAVVTATTGAVLAQATVGADPAGYAELIGLAEEHSQVRAWALEGSGGYGAGLAAALTAHDELVVELDRPSRPARRAGAKSDPIDAVRAAREALARTTLAQPRTGAQRGALQVLLAARRAAVEAAGTGQRQLHALVVTAPEVVRSRFRGQSTRAMLATALRLRIGRAAADEVHVLTALTTLRAIARRVRTLEAEATEHEHAIRTIVASWRPDLLTLRGVGPIVAATVLAAWSHTGRCRNDAAFAMLAGTAPIPASSGQTVRHRLNRCGDRQLNRAIHTVVLSRARFDPQTRAYIERRRAQGKTDREIRRCLTRYVSRQLYRQLESGRPLPA

SEQ ID NO: 431572 - protein, 412 aa, unidentified
MKDLLEISCGLDVHKEKIVACILTGPLGKPTRSEIREFSTLIPDMIALRHWIVSKNCHHVAMESTGIYWMPIYEILEDAFYGDITLLVVNARHMKNVPGKKTDMRDSEWISTLLRAGLLNGSFIPEKRIREFRDLNRYRKSVIRDITSQKNRIEKFLQSSGFRLSSFISDIFGASGRNIILHLIEHGQIDKTALDSCLKTKTRNRIDEILMSVNGTLSEHQKAFLRILMTHYDSLKKHLAEIETSLEEDMAPFALQVEQLNSIYGISTTASCAIIAEIGIDMKPFKTAEHICSWAGLCPGNNESAGKRKSTSVTKGNPYIKSMLCEIAWVIAGKRNTYLSAWYWRIKQKKGAKKAIVALARKLLVIIYTMLKQGTLFDESCFETRRKHCEQKQLSRYIRELEKHGYHVEAQS

SEQ ID NO: 431573 - protein, 300 aa, unidentified
MLPNDLNSAQALAQWLILQKCDPSQAHIIMEATGVYHEHLADGLHQSDILVSVINPHRVREFAKGMGILTKTDKVDAYVLACYGCLKQPENWLPPSQEIRKLKALLQHRDSLLNDKQRIENRLSTLKSTTAPEEILTSLESIEQNLKDELARIERLIAEHIDKHPRLKNDLKLLKSIDGVGEQIGWNMLAIIRGNNFRSAEQVAAYLGVIPIERRSGTSVCGRARLSKIGPPGIRAKLYMGAIAAISWNSHVRALYERLRLKGKAKMVAIGAAMRKLVHLCYGVLHTQQPYDKNHGVVAG

SEQ ID NO: 431574 - protein, 471 aa, unidentified
MSTTPIGAKRRPKVRIVSKHKIPLPPQLKRVNLNAAGIDIGSEEHWAAVPPGRDSEGQDVRRFGAFTGDLGALSDWLKQCEIETVAMESTGVYWIPLYELLVERGFEVLLVDARQAKNVPGRKTDVLDCQWLQELHTYGLLRGAFRPVDQVCILRSYLRQRSMLVAYASHHIQHMQKALEQMNLKLAHVVSDISGLTGMGIIKAILNGERDPAKLAKLRDPRCKNSEITVARALEGHYREEHLFALKQAVELVEFYQHQLTACDCQIEACLQQFEEKSTETAVSTRRRKRRRGGIAFDAHSYLYRMTGVDLTQIDSIEANTALTVIGEIGLDMSRWPTEKHFGSWLGLAPGSKVSGGKRLSSRTKPSANRAAAALRLAAQSLNQSQSALGAYFRRLKARLGAPKALTAAAYKLARIVYRMLKYGAGYVDQGEAIYEERYRDRLLRNLKRRAAELGFQLTAINSDAGQPVLI

SEQ ID NO: 431575 - protein, 412 aa, unidentified
MDILHRCCAGLDIHKKTVVACVRRIDAAGHAHQEIRTFGTMTCDLLALSDWLAGQGVEHVALESTGVYWKPVFNILEGRFGVMLVNARHIKQVPGRKTDVRDCAWIAQLLQHGLLRASFVPPPPIRELRDLTRPRAQLVAEKATAANRVQKVLEDANIKLASVATDVLGVSGRDMPGALIAGEDDAAKLADKARKRLRNKIPALQTALRGRVTKHHRFQLRLLLDHVMHLEELIGRLGGRIEEVMAPFAEAVERLTTIPGVEHRAAETVIAEIGTDMNQFPTGEHLASWAGMCPGNNESAGKRKSSKTTKGSRWLRQMLTQAAWAASHTKDTYLSAQYRRLAARRGKKRALVAVGHTLLVITYHLLKNHTTYKELGGDFLEHLEPDQLTRQLVKRLEKLGHNVILQPKEDTA

SEQ ID NO: 431576 - protein, 337 aa, unidentified
MRLHYLGVDLAKNVFQLHGEDAEGNIVYRKRLGRARFLNDIGRLAGCQIGIEACTGAFYWQREFEALGHSVRIIAPQYLKPFARHQKNVQNDAAAICTALRQPNMRFVPPKSLGQQDIQALHRVRQRLVNRRTALVSQTRGLLLDRGLAFGLSITRARRVVLRLLTMERDRLGDLFTSLPEQLFEMLCELDRRVVWFDREINRVFRSNEACQRIAKIRGVGPKTATAIVAAIVDGAEFNNGRHLAAWLGLVPKQHSSGNRQMLQGISKRGDRHLRALLVHGARAVLRTAPKHHDAVSQWAIGLQERRGAAKAIVAIANKNARIIFAMLRQNTEFGTA

SEQ ID NO: 431577 - protein, 387 aa, unidentified
MTARTVSNLPAAMHVETARCLFAIELSKQSWVIGFITPFSAKISRRILSGGDWKGLLDLIEEVRARVSRETGRAVDVISCYEAGYDGFWLHRLVEAHGIRNYVIDPASLQTDRRARRVKTDRIDTERLLRSLMAYLRGEPKVWSVVRVPSVAEEDARRLHRERDRLVSERVQHVNRIKGLCALHGIYDYQPLRPQAMARLEQLRTAQGISLPPRLKSEIRRELQRLELVVEMIATLEAERDAIVEDETSTHINAKKIQNLHQLKAIGPEFAAVLVGEIFHRDFNNRRQLASYVGYAPSPFQSGNVAHDQGISKAGNRKGRTTGIELAWLWLRYQPDSDLSVWFRARVGTTKGRIRRIAIVALARKLLVALWRYLETGVVPRGAVLKG

SEQ ID NO: 431578 - protein, 323 aa, unidentified
MTESNFSESVAGIDIAKLHVDVALKSRGAAVIREANDEAGHRKVCDLLIGERITLIVMEATGGYESALVCALQASGLAVAVVNPKQARDFAKAMGHLAKTDRVDALMLCELASVLSRREDLSRHIAPVREDARRDLDALIVRRRQLMAMLHAENQRLDTARSAVRASIAAVIETLTGQLKETDKSMSDHVARHYEALADLLRTVPGIGPVASATLIALLPELGRLERRQICALVGVAPMACESGAMVKRRHIRAGRGEIRRILYMATLSAVRYNPTIKAFHDRLVAAGKLPKVAIVACMRKLITILNAMVKTGVPWRVQSSPA

SEQ ID NO: 431579 - protein, 341 aa, unidentified
MEGLYYIGLDIHKRTISYCVKKVDGTIVQQGKIAAERKTLLKWVEGLRGSWYGAMEATMFTGWIYDFLKPHAVDLKVAHPEMLKAITAAKKKNDRADAEKIADLLRVNLLPECYMLSEEIRELRRILRYRNMIVRTATKMKNKISGLLMETGTPYSKNKLHGKKYFGNLLERVEDVSDSVKDMLKLSRSSLEMFEAIQKRLVHTLRKDNLIRERVQRLMSIKGVGEVMALTWTLEIGDPSRFHSSRQAISYCGLCSAQRESAGKEQRGPISKKRNKHLQTMLIEAAKLAPHWNPQLAALHAKELTRGNRNRATLSVARKLVEYIMAVERQQKDFVPSEVAA

SEQ ID NO: 431580 - protein, 523 aa, unidentified
MSQITNTVLASSSPAFLSAHSSNEINLQKTISLLSSSEVGVEVTPTKEYGVGIDCHSKFLEINVLVKRGSGYFEYCREVDTSWTAIKEARNWVVHILQTCADPPVQLSEPLHYCIESTSTYHLPVLLAWEGKPCVVNPSLAGATKRKTDKLDARLLAVHDFTGIWRPFYVVSTEIQDLRVLINQRDYYSHAANRSGNRINSTILKFGFTIGRDGSVVRNETVRSFVENLISDHPKPCSTDLPPDRIPFSTRKVIAEEYQQYDKFMLLVTEYNKKIRDLAFSMNWPVRDGKTISGKELIPILMTAPGVGERTAITWLANIMDPTRFPNAKAVAAYCSLDPSLKISAQHVTSTKKRKGNKLLHSSLCMSASVIIGYHSEHFGRWGYRIYQQTGKWKKATNAVARRLATALYHMHLNAEPFSYEKYQMTKEIMVMNIPLDDLALINSGFRRYIPLLKSVGIVDTQALAHSFFACELRGCKGLGPKFFSLVKDFTENQDGYRKLYNSFLMTKSNVKGDICNGTAKKK

SEQ ID NO: 431581 - protein, 365 aa, unidentified
MWEAPVKVQRTSVGLDVHARSVVACGLDGDTGEVFERRLTPDHGEIVAWLSGLPGPVAATYEAGPTGFVLARSVNAAGIRCSVAAPSKLQRPVGDRIKTDTRDARHLARLLHLGEIVEVEIPSVEREAARDLFRAREDCRRDLMTARNRLSKLLLRQGIVYYGGTAWSRNHERWLQAQRFDHPALAMTYDTAFDTVLAITARRDRLDTAISEMAADSPFTAVVTRLGCLRGISTLTAFGLAVEIGDWQRLSGRTIGAYLGLVPCEYSSGATRAQGGLTRTGNTHARRLLIEAAWHHRKPYRPGEVMRRRWNAAAPAPRARGQAANRRLHERWLRFDERRKRPVVANAAIARELAGWCWSLAVMDD

SEQ ID NO: 431582 - protein, 455 aa, unidentified
MAAVMIGVDPHKASHTAVAISAAEEPLGELRVRACSAQAGRLLSWAAAWPQRTWAVEGAGGMGHLLAQQLVAAGERVLDVQPKLGARVRLLAAGDVNKNDPNDARSVAVAALRSAGIREVRADDHAAVLKMWSKRHRDLGSTRTQVVCRLHAVLCELLPGGVPKKIIAAHAARLLESITPAGSVDTARCELAAAFVDDLRRIDAQLHDTKNKLATAVRASGTSLTGLFGVGPVIAATIIGDVRDVRRFPGRDNFAAYNGTAPIEVSSGQRKVCRLSRRGNRRLNHAIHMAAITQVRQRHSEGRAYYDKKLAEGKTPKEALRSLKRQVSDAVFARLQADARRAGGPGGQTGNDSVSSAAGSHPTNRLFGQATPGSRDHTTTAAAKADPKTALVPAQPDRARGRAGHSSIAAIPPSAKPQVQVERPQRSEDERPGGAAKRRPYSAPRKAAKKSDRTT

SEQ ID NO: 431583 - protein, 309 aa, unidentified
MDNTIVGIDVAKDRLDVAVRPSGELFLVERNAGGLELLVERLKPLAPALVVLEATGGFETVVAAALGAAGLPVVVVNPAQVRAFAKAIGQRAKTDPIDAAVIAHFAQATRPEPRPLPDEATRQLADLVARRRQIVEMIGAERQREKRATARIKKSIARLIKALEKELASVNGDIDDAVRGSPAWRDKENLLASVPGIGPIIARTLIADLPELGALDRKKIAALAGLAPFTRQSGQWKGRSFIGGGRSKVRTALFMGAMTARRHNPILKAFFGRLLAAGKPRMVALIAVARKLLTILNAVLRDQKPWQTA

SEQ ID NO: 431584 - protein, 367 aa, unidentified
MKEEKKKTTARFVGIDLGKRTYEVAIVGNKGKVEKSNGRTTVAGRQGLYKKLRAGDRVALEAGNMAFIMAKEIEAAAGCRVYVLNPSRLALIYGSMKKTDKEDALKLAHILEDCKEDRLPVVPVPSDKEMRRRKILACYRRAQQSRNREINRLHGLFVAQGITSKVRKDLSTAEMRAESIKGLYGIERQEAEYLVECLKLHERQIGALEKAMREEAAGDEQVERLQGVPGVGPKVAFAFVSYVAVERFENASQVSNYFGLVPRVYISGDTARYGRITKRGNSYARALLVQAAWAMIRSKAGGKLKERYEYMTVEKSISKKKAIVAIARRIAELLYTLMRDGTKHEPRPFIREKEAVEAIAAQLAKSA

SEQ ID NO: 431585 - protein, 355 aa, unidentified
MESVKYLGFDVHQSTISVAVVNADGKLVMQSVIATHAATILDFIHGLRGTLYLTFEEGTHSAWLYDLLARRVARVVVCNPRQNALLKAGNKSDTSDARKLAELLRAGLLAPVYHGEGSTRTLQELVRSYAALTEDTTRVMGRVKALYRSQAIACAGKKPYGRRHRREWLSKLSEAGLHRRAERLYEELDALQGLRRAAKRELVLESRKHAAAKLLRTVPLLGAIRAALLIGRVQTPHRFRSKRQFWAYCGLALETRSSADYRFEDGQLVRAKKPVFIRGLNRNHNHDLKNLFKSAATTASVIHGPFREFYEGLLAKGMQPAMARLTLARKIAAITLSVWKKGESFDAEQLKPQAA

SEQ ID NO: 431586 - protein, 408 aa, unidentified
MNTLYVGIDVSSKSNVVYLMLPNGDKHSNFSVANSHEGSTQLVKRILSALTSHSLDTVLIGLEATSVYGDNLVYFLREDATLAPFNRKIHVLNPKQVKKFHDAYNDLPKNDYVDSFVIADCLRFGRINKEVYLGDYRYKALQNLTRARFFAVQNLIKEKQRFMNVLFKKYSTMTQEKVFSDTFSTTALAVYDEFDSAEALANMDLHELTDFIIEKGKNRFPDPDAVAKAIQKAARSSYRLPKTVNDSVNQVLSISITSMKALESQIKEFDKAIKAQMELLPNVLISIPGIGPVYSAGIMAEIGDINRFDNQASLAKYAGLAWKQHQSGGFEAEVTRLIPSGNRFLKYYLCEAAFSLVRCDKEYSDFYRLKYKEVNRCQHKRALALTARKFVRLVFRLLKDNRLYCPAK

SEQ ID NO: 431587 - protein, 385 aa, unidentified
MQTLNDLSQSRIVLKQDSTLIAVIEMSLSSWLVAGLVPGVERQPLKKLAVDESVLLKLLHRWGEEAEKTGRRIERIAVAFEAGRDGFWLARWLRARGIEAHVIHASSAAVSREHRRAKTDRLDTELLKRVFLGWLRGERDHCKMVTVPTIRDEDAKRPNRERESLVGEQTRIVNRMKAALSRLGIRGFNPKLKKAAARLEDLRTPEDEPIPPNTLAELRRDMERRRLISDQIRQIEDARLERLERMPNDGSHAMVRLLARVIGVGIETADMLVQEVLSRTMRDRRAVARYAGLTGAPDESGAKRREKGLARSGNARVRRGMIQLAWRFLMYQKDSTLAQWFRARTENARGTRKTMIVALARKLLIALWRLVTTGEVPAGVVLRAA

SEQ ID NO: 431588 - protein, 349 aa, unidentified
MLKAQKGEPAVTYCGLDMGKKSSHFCLVDEKRKVLEEDKVRNTEADLRKAFGKRRPMRICIEASTKSFWLADRLRELGHTVVVVDPGKTKAIGAGMIKNDKLDARVLATLCQADLMAAVDQPAESERLARMMVVTRDGLVRGRARLMVMVRSLLDSEGIELRHATAEGFPAVVKELLPELPPAMVAALEPLVKGIEDLSVQVARCDKALEAAARGNPTMQLLMTAPGVGVIVASCFVNAIRDPKRFETSRDVGAYIGLVPKLYQSGTIHHKGGITKHGNRQARWALSMAANSILSRTKKKSAIREWGIKLSKKRGRKKAVVAVARKLAGILWAMWKNNTSFEARLPQAA

SEQ ID NO: 431589 - protein, 347 aa, unidentified
MEQIIRIGMDTSKYIFQVHGVDASEQPVLRKRLGRKQMLGFFAELPPTVIGMEACGSSHYWARELKQLGHEVKLIAPQHVKPYVTRNKNDGRDAEGLCEAMSRPTMRFVAVKTPEQQAALMLAGLREQMIARRTQISNAIRGYAAEFGITVAQGLNQIEPLLARLAQDESVPGLARDLFALQGRDYAQLQMELKAIEARLMAWHRANADSRRLAKIPAIGPIGATTLVMKTTDPGAFASGRHFAAWIGLTPKDHSTAGKTRHGKITRAGDERLRSVLVAGATAVIQQAKQGRGHPSPWLIALLKRKPPKLAAAALANKTARIAWKLMVTGESYDGARMSKAPLIAAT

SEQ ID NO: 431590 - protein, 356 aa, unidentified
MDKYIGFDIDSKKTVACVVEKGKKERYATIGSDIGAMRSYLKGQKSDGSRIHLTFEVSGQAGFIYDSLIDCTDTVTVSNPSKMTWIYRTAKKNDRFDSRKQAILLSIGEIPKVHMPVAEIRQWRNAILHRRNLVNKTTEVKNRIRAVLRSQGFSRPEHKGSWWKRSNRLWMRGLCEQQVSSIGLWRMSLCNLMEQLDLLDDQVKRITAYLDNYLGRHTGGKLLMSIPGVGPRTAEAILAYTDDVRRFGRTKQYCSYFGLTPRLDESGTSRRLGHISKLGPSVVRWLLCESSWKVIRKSSALRAFYERVKAGQAGRKKIAIVAVCRKLLSIMRAMLETGELFNEELVCRECEVKKAC

SEQ ID NO: 431591 - protein, 349 aa, unidentified
MLKYSLGIDVSKKDFHACLSVIGTNQQVKVKASRKFSNQQTGFKELLLWLANHTKEADLPLVIVMEATGVYYESCAMFIFKAGLQVSVVLPNKAKKYLQAIGLKTKNDKIDAAGLARMGAEQCLELWQPMDEFFYTLRALTRHHQSLQELKTNVGNQLHADQHSIYSNKKVMKQLKKLVDTIEKEVVETAQEIEKQLYSNSEIAKKVQQIVMIKGIGTISIATVLAETNGFALFNSIAQLVSYAGYDVVENQSGKHKGKTRISKKGNSHIRRVLHMPAFNVVRYNTGSFKTFFERVLNRHGQKMKAYVAVQKKLLVLIYTLWRKNEGFKADVVAKQKTSREKETAPSFA

SEQ ID NO: 431592 - protein, 391 aa, unidentified
MTKRKTETVNDLSRCLDPLDMDLTLIAVIEMSQSSWLVAGIVPGVERQPLKKLAINERALLNLLRRWRAEAEKKGHRISRIAVAFEAGHDGFWLARWLAAQGIEAHVIHASSVAVTREHRRAKTDRLDTELLKRGFLGWLRGERGHCKMVAVPTLAEEDAKRPSRERETLVGEASRIITRVKAAFVRLGIRSFNPKLKTAAARLETLRTPAGEPIPPNTLAALKRDLERHRIVKQQIHEIEQTRLELLEQAPAEGAHAMVRLLARVIGIGVETADMLVQEVLSRNMRDRRAVARYAGLTGSPDESGAKRREKGLARSGNARVRRGMIQLAWRFLMFQKDSALAEWYRQRTANAPSTRKTLVVALARKLLIALWRLVRDGVVPEGVRLRPAA

SEQ ID NO: 431593 - protein, 335 aa, unidentified
MEFDFFIGIDVSKNELDFAVMKGRQLLSHHEVANQPGAIKGFLKELGKQAGFAVGKAVFCMEHTGIYNNHLLSCLYKKKANICLEAASQIRSSLGNIRGKNDKIDAVRIAGYAYTKRETLRLWAPKRAILQQLAHLSAIRSRLVEAKKMLQTPLKETAAFLDKSTAKNNNSVCRQALKAIGADLKKTDKAIDGLIGADPELKRLFGLVTSVSGIGKVTATQVLITTNEFKDIKNPKQYACYAGVVPFTKESGLFKGKARVSHMANKKVKTLLHLSAIVAIQHSPDLKQYYQRMVDQEKKNKMSVINAVRNKLVLRIFACVNQNRVYENNYQKAVA

SEQ ID NO: 431594 - protein, 430 aa, unidentified
MDEVTDEPLYRDRVCGIDIGKAGMAVTIRVPSDRDPSRRAQETREFGTTRREVLAAADWLRCWQVPAVVMEATGDYWKPVFYRLEAEGLECVLADAKQVRNLPGRPKRDPSDSRWLAVCFERGAVTSCFVATPEFRVIREHTRYRRDLTGERTREKQRAEKLLESAALKLSAVLTDMHGVTGRDIMDHLIAGERSPKVLAGLARGRARVKMRQLEQALEGAEFFTPELAVLLQAMLARIDRIDGDIAALTAVIDRLLEPYEEQLQQAGSMPGWGRLAAQDVIAETGVDMARFPTPGHLASWAGRTPVDRQSGARTGRAKTRKGNRYIGAVTGQTAVAAGKTQTREGARHRRLVRRRGKAKACVATGNTQMRVYHKLLSNPGMRYEDLGWDYYERERSTSRQVSHHIAKLASLGYEVTLCKHPGPGEDKAS

SEQ ID NO: 431595 - protein, 354 aa, unidentified
MADIILSIDLGKFRSVCCWYDPETKQCDFATVVTSAFEFRRVLTQRPVLKVVFEAGSPAGWVHDLCCELGLPCLVANTLGAAWAWKNVKRKTDRDDAIKLAKLAAINELPTVTVPSKPMRQWKSLVGLRKRLISERVRGQNRIRGLLVSQGWPSLAGARAWTRLGIAGIAQFAKPFSECGPKDLWRGELKTLLTRHESLTSQIDEVETVLDRLADASPTVQLLLSVPGIGIRTAEIIAVYLGDATRFNNSNEISAYAGLVPRQYQSGETDRRGHITKRGPKVLRSAMVECAWGCLRFNAWARATWERLIANGTGKKKAIVAVARKLLVRCWGMLKGGKSWRNPLSAVVVGPTPG

SEQ ID NO: 431596 - protein, 316 aa, unidentified
MLAPNPVAGVDVGKSFLDLDFDPAAKALRVRNDAPGIATLIEAMRRRGASRVALEAIGPYARPLTAALVANGFEVGLADPRQVRAFRTAEGRIAKTDRLDAGLIARFARTMPERLRPAPAPEAIALKALSTRRRQLTELVAMEKTRLAQAFDAGIAASHRAVIATLEAAGAEVERRLEAAIAADPALARKREILTSIPGIGGRIAGVVIADMPELGSLDRKAAASLAGMAPHPDQSGTLPGRHAISGGRPCLRTAFYMAGMVAARCDPRLKAAYRAMRDAGKPPKVAIVATGRRLVTIANALVRENKTFDQSRFVS

SEQ ID NO: 431597 - protein, 351 aa, unidentified
MSITHYIGFDVHKKSVNYCVKDAAGTIAEEGKLRATREALRQWAGKRTAPWHGAMEATLFSGWIYDTLKPFAAELQMGHPAMMKAIGASKKKNDRIDARKTADLVRCNLLPVCYVAPVEMRELRRMLRYRNVVVAQAVRMKNKMSGLLMEVGAEYNKQQLHGKKYFAELLGSLEEVPESVKELLRLSRVALEMFETTQQQILDKLQKDLRLVERLEVLKSIRGVGDVTALSWALEICDPHRFSSIADAVSYCGLTSALVSSADKQQRGPISKQRNAHLQTVLIEAAKLAPRWNAQLAAVHEQEIARGHRNRATLAVARKLVAYLLAVDKSRKPFQVRTPSAAEHQALATAP

SEQ ID NO: 431598 - protein, 346 aa, unidentified
MHYIGMDCHITTLDFAVVNEAGRLVKTSRVATSVNGFMEFVRSVPPPRTIYMEEGTLAAWALETCVRFREKLVITDAKKNHWIGSSGQKDDSIDALKLAQLARGGYIKEIHHPVGQRRRFRELMIAYHDAVRSTTRIKNKIKAKFRQNGIQCSGTTVYSETYREEWKGKLPQEATLLLILDGLWRQLEQSERTEKDLLAAARAQAKHYPEIKLFKDIPGIGFIHAATISAILETPYRFADKKKVWMYAGLGIMTRSSGGKTYSEKLSTDYNRFLKYTLKQAAEAAIQAKDNPFRRKYLDMTLLHGIAPHRAKLTIARDMLATMWAMWRKGEKYNPEIREKAACKQG

SEQ ID NO: 431599 - protein, 426 aa, unidentified
MQTVAQLDPLALVGVDWASEEHAICVLGTDGRQQAGFSVAHSKDGLAGLLRRLGRHGERARVPVAVERPDGRLVDALLEAGHPVVPVSPNAIKAWRESEVISGAKDDPGDAEVIAEYLRLRSHKLTVAVPYSEETRALRAVVRTRDDLVAQRVAAGNQLDACLDAFWPGAKAIFADTTSEIALAFLSRYPTPGSARALGERRMAAFLVKHGYSGRRPAAELLERLRSAPEGIADGPEAEARRDAVAGYVRVIRALNTSIKALDRSIAAHLGEHPDGEIFTSLPRSGHINPAQMLAEWGDSREAYDSPEAVAALAGQVPVTKRSGKHHAVSFRWACDKRFRAAMVTFADNSRHASPWAADIYRRARTRGADHPHAIRILARAWIRVIWRCWQDRTAYDEARHGAARQLGQPNTTAEPAPTPTATQAA

SEQ ID NO: 431600 - protein, 360 aa, unidentified
MNNHKYVGLDTDQATIIARVEDAKGNFIMEAAIETSASSIRQFFKGLDGTIHVAFEEGTQAAWFYDVIRPLVADVTVCDGRRNKLIQSGNKGDRIDAAKLTRLLRLGELHAVYHGERSTRGLKELVHGYESLVTDTTRAKNRLKAVFRSQAIRCRGDLVYSHQERKQWLGKLEAAALNARASILYEQYDCLTKLRDKAHKAMTTEARTHPAYKRIKKVSGLGEVRTAQLIAVVGSPHRFRTKRQFWPYCGLAVVTRTSSEYEIVDGQRRRKRNKQAQTRGLNQNYNRTLKAVFKGAAATAIERPPFKQYRQRLIDKGIRPELALLTVARKIAAITLTIWKKGEEFDPERVNQAVPGTGNK

SEQ ID NO: 431601 - protein, 465 aa, unidentified
MGRKPNRHCGADFHESYIRAAIVNNNSWENDEDIVAEANFVNDVEGHHEYVKWLRENGCRYIGMESTGNYWKASAYTLIENGMDVRVGNAEKMKNVISSKTDKLDARWIARLMRDGYIPKSNVLTKEYDDFRSTVRTRNGLVKDRTATKNRVSALVAKMGVRMKCSDKFGKFGRRVLKAIAKGDDLESIFKSKDGEKLGYTKDEFIALLETHITQPLRNQLDIWMNRIDELDSAIVKVENMVAKMIHEDATMLEQIEIIRSTPGFADIAAPIVLAEIGDISVFPQYKHFCSYTGLVPLVYQSGERIKDGEKILYINTGRLRPSSNKRLKWIFIQAANVLAKQDVTPLNKPLIDFYRRILNRHSGRHKRSKAICALAHKLAKIVWTLLTKGETYRGADGSEKSIKPFKKGKDEQVCSEHSILNRVQNILSIKRRMFERMLPVNLGQRDQRALPPEKPIKTLWDVSI

SEQ ID NO: 431602 - protein, 365 aa, unidentified
MKKGSTATATSKRNFDQKLTIGLDLGDRSSWYCVLDEAGEVIDEQKLGTTPKAMKEVFATMPRSRIALETGMHSPWVSRLLSELGHEVIVAHARNVRLIGESRRKDDRFDAMTLARLARIDPQLLSPVKHRSAQAQADLTVIRARASLVRARTALVNAARGLTKSYGERLRGCNPRNLDTEKAQSLSPELQAALGPLLQALESLSERIAEYNQQIEGIAQHSYPQTALLKQIKGVGTLIALTYILTLEDPHRFRKSRDAGCYVGLQPGRRNSGQSEPQMHISKEGDPYLRTLLVQGAHHILGPFGADSDLRRWGLKLAERGGKAGKKRAIIATARKLAVLLHRLWISGEVYEPLRNTKRTMSAAA

SEQ ID NO: 431603 - protein, 307 aa, unidentified
MTLPHHVIGIDIAKHHLDLYDAASGQTWRIANEAWAIAELVATLGPQHLVVFQASGAYDAALRQALAGAAIAHARVNPARARAFAQALGQSAKTDALDARLLAAMGACLPLRREPAPDTARERLTRLHRRRDALVEMRAAEQTRRADALDPETVESLNAHIAWLSAAIAELESAIRAHLDAHPSLREAVHLLASAPGVGPVTAGIAVALLPELGRLSPKKIAALVGLAPFNRDSGRAQGERRIEAGRRRVRRALYMAAVSAARSHLKPFYQRLRRAGKAPKLAFVATARKLLTILNAMMRTQTPFRA

SEQ ID NO: 431604 - protein, 345 aa, unidentified
MNYVGVDLHKEQSWFYVTDEAGNKLDSKSISNQPAVLKKYFSTIPGPFSLGVEATYNCYFFMDLAKMYTDKAYLANSYELKAFAKRHKKTDKIDAKLIADVLRKGYLPIVAMPDEATRKIRAILRYRMNLVADRTRNITSLKAFFDKLGENSTGDFTTHKRLGQLQYSHLAEEYKKVISGYIKRIDDLTSHIAETERFLKERASLDDDILNLIGVPGLDYFSAALIKSEIIDVNRFACFEKLCAYAGLAPRVSQSANKSIHGPLCSNRRKHLQWILLEVVWHFIRKQPDKLTKYAAISKRKNANTAKVAIARDMLKVIYHILKEKRPFYEKVQIRSVAAPALCGV

SEQ ID NO: 431605 - protein, 427 aa, unidentified
MSTLFVGIDVSSKTNAVYAMDFEENKYISSSFGNNQPGADKLVNMIAECMHKHKNLNTILIVLESTSVYSVHISNFLSTSEVLMPYKPYVFCVNPKATSNYRKSYIGMEKTDPTDAYLIADFGRVGRTKKLEPWRGGQFISLKRLTRHRMHLSECITREKTYMVSNLYLKFSELQLLEGDDKPFGSLYGATSSAVLTEFLSPQEIIDMPEEDLLTFLAGKSRNRISDLSKTSELLRKAARDSYRLDKCMYEPLSISLASSFNCIHAYQKEIKLIEQAIEKCINGMNPNALLILQSIPGIGPIWASGILSEIGDITVFHSSDALAKYAGLYWPKGDSGDFTSEDNKMSKAGNPYLRCYLGEAANSVRKHIPEYADFYARKYAEVTKHQHKRALALTSRKLVRLVFGLLVKNQLYTGEKLDTEYNIESN

SEQ ID NO: 431606 - protein, 420 aa, unidentified
MSFKIFRKNCCGLDVHKTWIYACIGITDANGRTDYKQARFSSFSKGLKELCDWLAKYNCSEVCMESTGKYWIPVFNILEKADNSIILAHPKYTKPQKGTKTDRKDAKWICDLFMCDMIKPSFIPPADIRHLRDLVRYRFKLTCMITGEKNRAQNCLTISNLKLDDVFSDVFGKSSRSITEHMLTHPGELFDVTPFVDGRCKTPVEEIQAAVDGAISPEQAIKLRQCLDHIDELDKHLEEIEREILRLSDKYQAALDLIRTVPGFDKNPITAIQILSEIGGDMSVFPTAKHLVSWAGCCPRNDQSNKKIKSTRISRAGTYFKPILVQVANALLRSKKHPEITNRYKRIKAHRGHKKAIIAICRMLLTAIWHILSDLKPYTAEGFLESRPVNESKVLTTSQALNLLKQRGYIIKDDVIPAMN

SEQ ID NO: 431607 - protein, 336 aa, unidentified
MNSSLPVFVGLDYHRRSIQVCVMDASGQVLTNRKCPSEVDAVVSVVQPLGQVQRLAIESSTGAAEFAQGLVDVAGWNVSLAHPGYVRRMKTNRDKSDRSDAWIIADLVRMGYVPRVWLAPPRIRDLRTLVHHRDQLVSRRRGLKTRVVAVLRDRRIREAPARRWTKRWIAWLETTETLGDEPRWVVNELLSELESVSGKIDAVERRLAAVTADDPVVAKLLTLPGIGPVTAWMLRAIVGRFDRFATGKQLARFIGLTPRNASSGERMADAGIIHAGHPSLKGVIIQAAHRLKRHHPRWASLFCRLVSQGKPKNVATSAIANRWIRSLHHEMVETAG

SEQ ID NO: 431608 - protein, 467 aa, unidentified
MALTLGIDVACRAAHQATLAADGKTVWRGRKFWTRLADLERLWNDLDLEDPGELTVVVEPTRNAWIVVAEWFRRRGAKVVMVPTTQSSDLRKYYSKHTKNDRIDSELLARLPLLHPEGLREYSGQGPADPLRRLTKQRSTMVKRRTAIFARLDALTELLGPAWYEAMNARYGVAALEFLARYADPHAVIRLGQARLSRFLIGRSRGAWREDRAAVLILAAKETLALWDTGDGDGMDFAELAADIAHEAEQALFLTGQLKEIDERLANLYADADPDGIVASAPGVGPTISAVIAGRIGDPHRFTSLAAVRAYSGLVPRVSQSGVSKVESRITKAGDPLLREMLFAAADHARKVDPQIAAKYQRLMAGDRHHSSAICHLATIMLTRIAACMRNGEHYVLRDVDGTVITEAKGRIIVQQRYQLEAHRRDNVRHKRMRERRKQAAGQESQESPSAPTSRPADTQPTSQHVA

SEQ ID NO: 431609 - protein, 401 aa, unidentified
MKRACGLDVHKDTIFCATFDGKKHGPVVEYSTLTSSIKEMGEVLQREGADTIAMESTGMYWIPVWNILEEMGFTLVLVNPYLIKQMPGRKSDMKDAQWIATLLHKGLLRSSLVPGKEIRELRTYSRRYVKLQQRQTSVLQDLERTLEMCSIRVTSFVSNISGKSVLKVIERIIQGETDPDTLVTCIHGRIVNAHTKQKVKQSLEGFITEHHRFMLELSFQEYEMLTKQSKMCLSKMESLCNEHYTKEMKLLMTIPGISSISAMIVLAETGADMKAFENSGKFSGWTGLRPRNDESAGKYKSTATTKGNRFLRAVLVQIAWAASRTKGSYFKEKFNRLAMRKSRKKALIAIARKLGVLIWNVLYYEQEYNPERLIVYDPGKVQAKISYHQKECDRLQYLLKK

SEQ ID NO: 431610 - protein, 317 aa, unidentified
MSQNALMVGIDVSKASLQVALGEAGEVFEVANREAELQVLAERLRGLVPSRVVLEASGGYQSLAVGVLAATGLPVVVVNARHVREFARAKGLLAKTDRLDARVLAAFGVAIAPDIRPLPDAQQLELAALLTRRRQLVGMLVAEQNRLQQACLARIKRSLKPVITVLQKQLDACDDELGGLIKASPAWRERDDLLRSVPGVGDVTARTLLAALPELGALNRKQIAALVGLAPVARDSGKYRGTRHIAAGRAQVRSVMYMAALTAARSNPVIRRFYQHLRAQGKPFKVALTACMRKLLTILNSMIRHHTRWNESRFAPA

SEQ ID NO: 431611 - protein, 474 aa, unidentified
MNNYFMGLDVSKGYVDITIVDENGNIAGTLNRLFDDYTGHKLLLDYLDNLKKQKNTVIYAALEHTGGYEVHWLKLLQENAGLKDTTFIINGYRIKHFQKAINYKNKTDAVSSHVIAQFIRTNFRELNIAKQSNYYHYKKHYYYLFELEKEQTQYINRLRSLLYESYPEFLTVMPNKFSPTILNLLIKYPSSKSFLAAKDSQIFKIKYLRKKMIADLQDICKKSILVKNKDDEAIEKQNIQNIASKVLGLEHEINEGFERLNHIVDQHQLELLCTIPGISKTSAIGLLLIIDDIKNFDNPKKLAAYFGVHPVQFDSGDVQKSKMSKQGNPFSRAILFNSCYQMFRSESPFHEHIKHQALLLQDNNMKAIGKCMHLMCRIVWALLTYNTPFDMEKFKKDRSGKQKSKNHQKIDFNVDNINSSDDIKAPISKKTKRIIDTLIEKREPQVSEETKTGSSRQFPTNTNIKNNENCQDFT

SEQ ID NO: 431612 - protein, 473 aa, unidentified
MGKGSGGNGMTRGDRRRNARRERLRAMLPRDGAVIGIDLAEDKQALAVIDHDVRVLARKTVRVKVFRLGAALDWAVGQARAKGFGQVTVACEPTGARWLQVQRLCAERGLPLVCIQPLISHIAREQQDFTRHKTDESDCVMIARLAVELHCYVPEELDETWAHLRHLGRRRAQLITAATASAQRIRDFLSVAWPAVPETCARPLESVTWLAALQVVTARCGADPGKLAAMREQEFTALVRGAVCGWGGQKAHGPISGRVFAALTDTEGVVVSSRRGLLRRVADELGDLQRTRAQLRAVEADMVAVLDELGLSRLADIPGLTAVGAAAILAETGDPHRYDNSSSLVKHAGMSPSDNASGAFSGQAHISRRGRPGLRLVVWRAVWPMLQFNPVMAAKYQAMTRAADTAAADAGPQQGRAAQATARARRAKARVACAASLLRWIYCMVVHDTSWDPAVASGAASRHDAPHTQAEAA

SEQ ID NO: 431613 - protein, 455 aa, unidentified
MRKSEKKRESIRFREGLQPLRRDAGGMDIGASEIWVDVGVENDPEPVRRFETFTADLNRMVQWLVACGVRTVVMESTGVYWIPACQILEDRGIEVLLANPRYAKNVSGRKTDALDCQWLRTLHCYGLLPASFRPAREIASLRAYLRHRQMLIEYASAHIQHMQKAMTQMNLQLHHVISDITGLTGMRIIRAITEGERDCKKLAALRYRTQADEATIEKALEGDYRPEHLFALRQSLDAFDHYQKQITECDQQIAQHVRSLESKSDCGLKAARQRVIRKQRNQIKFNVREEAFRISGADLTRINGISESAALGLISEIGINMSPWPTEKHFVSWLSLCPNNKITGGRVIKSRTRKTVSRARTILCLCAQSLLRSQSALGAFCRRLCSRIGKPKGIIATAHKLAVLVYRMLKGGIDYTDIGQQQYDNQFKERALKSLARKARELGLQLVPCPENEVP

SEQ ID NO: 431614 - protein, 386 aa, unidentified
MAHSTNILPRSVDYDQTLVLAIELSNKSWVLAAQVPGLSQTKAKRTIDPDKNDLLAAIDGYRTRAAAAGRSVKRVITSYEAGWCGFWLARWLMAHGIEVHVVQPSSVPVDRRMRRGKSDGIDAELLLRTLLAWLRGEPRVCSMVPIPDEADEDARRCVRERSELVSERVGLVNRIGAILATLGADDYNPLLQSRRRRLTELRTGLGDPIPPNALAKITRLLTRLELVLAQIAELELERDAVARTDAPDQTGKMIQQLISLRGIGVQSATVLVREAFVRRFANGKALGSYAGLTSTPYSSGGIDREQGIGKAGNRRLRTVMVELAWLWQRYQPGTAQVAWFRERVGSTGRRVRKVMVVALARKLLIALWRFVIDGVMPEGAVTKPSI

SEQ ID NO: 431615 - protein, 349 aa, unidentified
MANLTIGVDLGDRYSELYVVDAAGACVETGRIRTTVAGLEQWFGGRAPARVVLEAGTHSPWASRVLQRLGHEVLVANPRKLRALYENDSKDDRVDAEYLARVGRLDPALLKPITHRGEAAQADLAVLSSRDVLVRTRTLLINYTRGVVKAMGGRLPRCSAESFARRVGPHVPPALRPALAPVLAQLQQLTAAIRGVDREVERRCAEQYPATAQLRQVSGVGPVTALAYVLVLEDPRRFPRSRAVGAYLGLRPRRSQSGEQDPQLRITKAGHPFLRRLVVQAAHYILGPHGPDCDLRRHGERIAARGGKNAKKRAVIAVARKLAVLLHVLWISGEVYEPLRQRLVLAQAS

SEQ ID NO: 431616 - protein, 337 aa, unidentified
MRQIKFFIGTDVSKEWLDMCIILEGEVIHRQQIKNKETAIRKWLKQTQKQYGYSMQDSLFTMEFTGIYNHHLLELLHQAGANIWLIPGLEINASRGLQRSKNDKDDARLIAEYAIKNLKKVRLWKKPRTVLKQLAALLMMREKLMTSKHQYQTTLKEYKSFSTKDQYLIIKDYSSAMLKTICQDLKTIEHQIKDIIEGDEQLKELNEYITSVDGVGIITSANTLVETNEFLDISEAKKFSNHSGVVPHKDESGKKIKKPKVSHKANKKMKKLLHLAAMSVIRKKGELRDYYERKIAEGKNKMSVLNAIRNKLVLRIFACVNNKRKYEKNYVYSLVNP

SEQ ID NO: 431617 - protein, 405 aa, unidentified
MGQVFVGLDWAEDYHDVFVEDDSGGRLGGGRLPEGVEGVARFHELVAGHVEDPVDVVVATETDRGLFVGALVAAGYTVLAVNPLSTSRYRERHSTSGAKSDPGDAKVLADLARTDAHNHRPVAGDSELAEAVKVLARAHQAMIWSRQRQTNQLRSTLREFYPAALEAFDDLAGRDALGVLAIAPTPTTGRLLSRSKIAAALCRGGRRRRIEERSVVIQAALRSEQLEAPALVGDAMGATVAALVAVLTELQTQIGRLETELADRFEQHPDAKIIRSLPGLGMTLGARVLAEFGDDPNRYADAKSRKNYSGMSPITRASGKHRVVLARYARNRRLADTCYLWAFATLTASPGARSYYDQRRATGDTHNRALRALANRLVGILHGCLRHHTLYDEHTAWAHRHQLAA

SEQ ID NO: 431618 - protein, 419 aa, unidentified
METIRDKKVKIINRKTMIAALDIGKGTHYAYFRSPSGNDINPFPFCNSRKDFDKFWTKLYQFKMEHNLEDVVIGFESSGPYAEPLFHYLRRKPVKLVQINPMHSKRVKELTGNSPNKTDKKDPRVIADVISLGHALTLVVPEGSAAQLRRLTQARERTLKRRTAAVNQLQDLIFVIFPEFLSIMKGISTKTAFYLIGRYPTPEDIVALGLESLAIDIRRVSRGKLKRKRAEELFNAAQMSIGVSEGKRGILLEIGYLISQIGSDNRFISNLERQMEECLAEIPYSRSILSIKGISIVTVAGLVGEVGDFKKFNRISEMMKLAGLDLYEISSGKHKGQHRISKRGRSLIRNLLFFAAINAVKSKGILHMPYQQMLDRGMPKMKALVAISRKLLGLIFALARDNTVYVENYSNVHHFKLAA

SEQ ID NO: 431619 - protein, 379 aa, unidentified
MPATQYVTTREANHDDDQTAQHLLQHRPSRAERGRPGRGHARRGSCCRCGLLAGEVLGTESFPATAAGYRRLLAWARRLGTVGRAGVEGTGTFGAGLSRYLLAQRVEVFEVSRPDRTARRLLGKSDPLDAQAAARAVLSGRARARAKTGDGPVHSARMYKLAKDSAVKARTQAINQLKAVLVIADPALRERLSSLGNAELFRTCARLGLRDGGGDEDAVAQATHMTLSMLAERIEQLTGQIDELNRRLTLLVERHAPQLLVPVGIGPDSAVTLLITMGDNPERLNTEASFAALCGVSPVEYSSGRRSTRRLNHGGDRQANAALHRIVFTRLRHDPRTQAYYERRTQEGKTRREIIRCLKRYAAREVFNLVRPVSRTPAS

SEQ ID NO: 431620 - protein, 354 aa, unidentified
MRSKSIDFTGKNIYVGLDVHKKSWSVTILLDELEHRTFTSVPNPNVVHKYLNKHFPGGTYLSAYECGFSGYGHHRQLNELGIKNIVINPADVPSSNKEKTTKTDKVDSRKIAKGLRNGELKGIHVFDRVHEEFRSLVRQRTIFQKDLRRAKQRIKSCLMYHGIEIPEDFDLASWSNSFEDWLAGLEMSTTNGTQVLENLYQNYLFNKNQIRILAIDIKKYARRHYKVDYNLLRTIPGIGQLTAVAIISELGDITRFKNLNHLSSYVGIMPMSHNSGESEQSRGMTYRANNWVRTMLVEASWQAIRKDPAMMQYYISHAGKINGKKAIIKVARKLLNRVRFVLKNKEPYVLGIQD

SEQ ID NO: 431621 - protein, 410 aa, unidentified
MRLFVGDDWAEDHHDVEVMNEAGRVLAKKRLPEGVAGMAGLHELIGRQLGDDDAAEVVIGTETDHGPWVGALVAAGYSVFAVNPLQASRYRERHGVSGAKSDAGDAHMLTDMVRTDSHQLRAVAGDSAEAEGLKVLARTHKTLIWERTRQVQRLRHQLLEYFPAALEAFDDLDAPDTLELLGKAPEPARAARLTRAQVSAALKRAGRRNITERATAVLGALRSEHLGQPPAVTAAYAVTVRSLIAVITILNNEVKVLQGQVEADFGRHPDAEIYRSQPGMGAVLGARVLSEFGDDPHRYADGKARRNYAGTSPLTRASGKKKVVAARFIHNSRLVDALNAQAFSALKASPGARALYDELRARGIEHNDALRRLANRLVGILHGCLKTRTLYDETTAWGHRQNLPQPSVAA

SEQ ID NO: 431622 - protein, 362 aa, unidentified
MNEFSKYVGLDTHKETIAVAVADAIGGKSRFYGEIANTPEAIRKLVKQLCPDGEVISFCYEAGPCGYEIYRQISQLGHHCSVVAPSLIPTKPGERVKTDRRDSEKLSRLDRAGELTPVWVPDQEQEAMRDLTRAREDMKGLERITKQRLNAFLLRYGRMYESGKSRWTQAHIRWMEGLKFDVTVQQIVFQEYVDAVKQAEARVAGLEKEMEKALEHWVLAPVVEALMALRGIKLITAMTVMAELGDITRFDSPRQLMSFLGLVPSEASSGLTRRRGGITKTGNGHVRRVLIESGWSYRFPARKTAHLQRRAEKCSDAVQAIAWKAQKRLCGRYTHLLGRGKLKVQVNTYQDAGELANRICRD

SEQ ID NO: 431623 - protein, 410 aa, unidentified
MKSAVITAVGVDVSKSKSTVAVRRPGGEIVMHPFDVRHTNSDLKKLVSTLKKLGGDIRVVMEHTSMYWRPIALTLKKAGFFVSAVNAMLIHDFSDNSIRKLKTDRANALKIANYALTFWDTLPLLNDEEETRLLLKMQSRANERITATATVLRNGLIALADQTFAGVNLAFDPNTKNTDGHEKWVDFFLRYWHRDCVCQYFMEVFTESYRGWCKRKNYKFRTATAHKIYIMAQECVATLPKCESTKTLIGQACKSLNAVCEARHNTQLEMQRLAALLPEYEIVMQMEGAGPVTGPALMAEIGDVRRFKNKKALVAFSGIDTPPFQSGAFESKSRHVSKRGSPHLRRTIFLVSNIILTLSNPENAVFCFMGKMLRGKTLLCLYCCRKRKVLAHLLCSRERVPSLSSSSGCL

SEQ ID NO: 431624 - protein, 410 aa, unidentified
MRIIRKRCLGLDLHKKQITAHLRVHQDLAAEPERTDRRFGTMPGELLELRQWIIEQQVTDVVMESTSVYWMHVYEVLEDITIPALVNASHVKKVPGRKTDVNDAQWLTDLHAHGLLRLSFVPPKPIRELRSLARYRTKLVAMRTAGQNRTIKLIETAGIKLSSVVSDSFGKTGRAILDELVKGPLDQERIAGLAKAALRKKVPQLHAAVGAPLTDRQRELLEMHLRIYDALDAQIAQAELKMRTLAEPFKEQIQLLDEIPGINELAAITVLAETGTDMAVYRNEHHLTSLAGLAPGNSISADKRRRVPMPKGNRYLKRICVQIAWAASRTTASFHSSRFRRLTYRIGRNKAIVATARHLLIVIYRVLLRTEHYKELGANFYDCRNRERSARTFVQRLEKLGFTVKLEPAS

SEQ ID NO: 431625 - protein, 326 aa, unidentified
MEHELHYIGIDTAKEKLDVDVLRPDGRHRTKKFANTTKGHDEMVSWLKGHKIDHAHICIEATGTYMEPVAECLYDAGYIVSVINPALGKAFAQSEGLRNKTDTVDARMLAEFCRQKRPAAWEAPHPLERALRALVVRHQALTDMHTQELNRTETAREVQRPSIDAHLLWLEAELKRLEKQIKDLTDDDPDMKHRRKLLESIPGIGEKTSAVLLAYIGLKDRFAHARQFAAFAGLTPRRYESGSSVRGASRMSKAGHVSLRRALYMPAMVATSKTEWGRAFRDRLAANGKKGKVILGAMMRKLAQVAYGVLKSGVPFDASRHNPVAA

SEQ ID NO: 431626 - protein, 384 aa, unidentified
MCFIKNNKRFGKVKKIDHDIEGFKRLLEDIQKLEAETNEKVCAVFEATGVYTKPLERFLSKNSIKTYRINPLESARKRKEEIHNKKTDKLDPISISKVYYDKEEMMELKKKDETYNWLRKKNRLYEDQLNHLRKYKVTFQNQLSICFPGYLDLFKDGYSDIPMTILKKYPHPDLLKNKKAETVARYLEKNTCHTHKVSLEYALKIIEFAKKTYPGCEKDDVEVEIFKILLDKVIETQRECEKTLNEMITVASTLEEYRYISSIDGIGPNLAARIIAEIGDIEEFKSREALVAYAGLDPHIYQSGDQDGKHLKISKKGNKYLRCLLFLAVGCSIRGAKDNPVNRFYQKKKQQSNPLNSKAAKTACTAKLLKIIYGICKNKTTYER

SEQ ID NO: 431627 - protein, 417 aa, unidentified
MQCAPPVLPEEPPGGVTSGIDWARDDHAVSIVNARGREIHRTTVEHRDAGLRALVNVLAKHGVGEVAIERPDGPVVDALLEAGITVVVISPNQVKNLRSRYGSAGNKDDRFDAFVLADTLRTDRARLRPLVPDSTATLALRRACRARKDLVSHRVGLANQLREHLKRVFPAAVGLFAEIDSPISLAFLARFDCQDRADWLSPKRLAAWLTSVGYCGRVDPAVLHARLIAAPHGTTGEAGTTEAHTTRALLAVLTSLTEQIKALSTQISEQLDLHTDAHIFTSLPRAGRVRAARLLAEIGDCRARFPTPESLACLAGVAPSTRQSGKIRTVSFRWACDKQLRDAVTDFAGDSRRANPWAANLYQRARTRGHDHPHAVRILARAWLYIIWHCWQAGVAYDPAQHRALQTLTQDQHQAAA

SEQ ID NO: 431628 - protein, 338 aa, unidentified
MKLYGAIDLHSTNNVTVVINEHDQVVYQKRLPNDLSLIAQQLSSYRASLKGIVVESTYNWYWLVDGLMEKGHRVHLANTAAIQQYNGLKYTDDHSDARWLAHLLRLGVLPEGYIYPKQERAVRDLLRKRGQLVHQRTANLLSIQSLISRTTGNSISAKYIKALNIDRVDGVLPNPDLVLALKANLAVMNSADAQIEILEKAVQDRVKLRPQFKFLKTVPGIGPILALTIMLETGEIERFASVGNYASYCRCVGSLKISNGKRKGSGNTKNGNKYLAWAFVEAANFAIRFNSRIKGFYQKKKSKSHAIVAIKAVAHKLCRACYYIIKDQVAFDVTKAFA

SEQ ID NO: 431629 - protein, 329 aa, unidentified
MRYVGIDLHKERITVCVVDQDRNVRQTRKFPCADPARIEAFFAALGPFEAVVEATASYEWLLGRIEPLARRVVLAHPGKLRVIAESTRKSDKLDARVLAEFLALDMNPQAYRPTPRQREHRALVRHRQFLMKERTQVRVKVRRILSDSNADRRDLFARGGRDHIAAVPLSDSDRFIVDQMLIQLSSFEAQLAELRTRLRQFATAASAAEQRHRQVLQSVTGVGEVTTEVVLAELGDIRRFRSAKQVVAYAGLAPGRRESAGKVRELGITKQGSPLLRWVLVEAAWQAVRRSAYWRGIYRALKQRRGARRAIVAVARRLLEVLVALLRSG

SEQ ID NO: 431630 - protein, 452 aa, unidentified
MAKPKKRRHRKLDRSLPEMRPNAGGIDMGATEIFAAVPADRDSESVRSFPSFTQDLHELADWLQRCRVDTVAMESTGVYWIPLFQILEARGIEVHLVNAQHVHHVPGRKSDVLDCQWLQYLHSVGLLKASFRPEHAVCEIRSLMRHRQNLVEMACVHVQHMHKSLDQMNLQIHHVISDITGVTGLAIVDAIIAGITNPKELAKLRDHRIKASIETVTKSLVGDYRPEHIFTLKQSLTAYRYYQQLIADCDQEIQQRIQAFDTKDDGPTAAAALDSSNSTTATPSSFDLHSHLERIFGVDLTRIPGFECLRIQTIFSELGADLSKFPTDDGFCSWLNLCPKDGSSAGRRIRGPKVKTKNRVAQAFRLAAQSLHHSQSYLGDYYRSQRARHGAVKATKNTAHKLARIFYHLVTTRQPYDETVFAKLEARSHKRRLHKLQSLAKQMGYSLVEANA

SEQ ID NO: 431631 - protein, 346 aa, unidentified
MSIYAGLDVSDKTTHICVVEANGKVLRRGVVASDPDVLAKWLTRHCPDLVRVVLETGTLSTFLYHGLAERGVAVECICARHAKGVLSARMNKSDVHDAEGLAQLARTGWFKRVHMKASATHIDRAALRIRAQLITARTSMANQLRGLLKLFGLRMGTARTPGRRAERLTAFYAQRPDLKALFAPLIASMEAVEEQLRASNRLLTDRAKADEVCARLMSVPGVGPITALTYTSTIEDPHRFARSDDVGAYAGLVPRRSQSGERDTSGHISKAGDPMLRKALYEAANVALSQVKRPFALQAWGRKMAEAKGAKRARTAVARKLAALLHSLWLKETEFRWACARRSLPD

SEQ ID NO: 431632 - protein, 315 aa, unidentified
MCGHDVSKATLDIAASSDVAQFTVSNDSDGFNAIITGLRRHSVALVLMEATGGLEVAVACSLQAEGFEVAVVNPRQARDFARAMGYLAKTDRIDARVLTQMAEVINRHPERKRFIRALPDAERQALAAMVVRRRQLIAMLVAERNRLHPSHPQNKKSINTIIKALEDELVRLEKEMDSHIRNHFKEIAERLSSIKGVGTMTVSAMLAEIPELGTLSRREISALIGVAPVNRDSGTMRGRRTIFGGRAGVRSALYMAALVATRFNPVIKTFYVRLLAAGKAKKVALVACMRKLLTILNAMLRKNEEWDESYHHVAP

SEQ ID NO: 431633 - protein, 416 aa, unidentified
MDLVHPRCAGIDVSKRDAKVCVRVAGGGRGGATSTVTTWGAVTNQVLALRDHLIGEQVTLVVMEATGDYWKPFYYLLEDGPFEVMLVNARHVKNLPGRKTDVSDAAWLAQLGAHGLVRASFVPPEPIRQLRDLTRTRTAVVRERGREIQRLEKLLEDAGIKLSSVASDITGVSGRAMLAALIAGQRDPATLADLARRRLRSKIPELTEALTGRFTDHHAFLAQLHLDLIDQHTRAVDDLTTRIEVVIEPFQAVRDLLVTIPGVSTTVADVIIAETGADMTRFPTPAHLASWAGTCPGSNESAGRVKSTHTRPGNPYLKGALGIAAMSAARTKNTYLSAKYRRIASRRGPLKALVAVEHAILTATWHMITTGALYDDPGNDFYTRRHPDKAKQRAIDQLNKIGYTVTLTPLQSVGHG

SEQ ID NO: 431634 - protein, 408 aa, unidentified
MLLVGIDWAESEHAACLLSVQGQVLRRLRIGHDVAGIERLRDVIGGLEPDPARVLVAIETAQGLLVAALLAAGYTVYAINPKAVERYRARTRVSRAKTDPADAELLARILLTDRDRHRPLRPSSAVREEIRALARDDERAARDQRRLLNRLRADLLAVFPQALAAFDELAAPTCLAFLARWPAASAAASLSEAELEAFFRAQRHGWPKRAARRVCETLAAPALTAAPHLAQAKAGSIRLAAEQLLLIHRQRRAWERRLEELLEAAHPDGEIYLSLPGLDVRLAARVLAEVGDGALEFAVANELQCYGGTAPVTRRSGKQLTVACRLACNRHLRQAAMQWAFCSLRRSPWARELYDAQRARGKTHHKALRALANRWLELLWHLLHKRTLYDEATHQRNRPKTEVIACAA

SEQ ID NO: 431635 - protein, 357 aa, unidentified
MRFYTKQHPFYCGIDLHARTLYVCILDQAGETLLHRHRQATPEALLKAIAPYRDQIVMAAECMFTWSWLADLCAEHGLPFVLGHALYMKAIHGGKAKNDKSDAHKIAVLLRGGMLPQAYVYPAKMRATRDLLRRRMHLVRKRGELLAHVQNTNSQYNLPAIGKKIAYKANRDGVAERCADPAVQKSMAIDLALIGYYDALLCDLELAIVKAAKHHDANTWYLLRTVPGIGKILSLVLLYEIPDIERFPRVQDFASECRLVKCAKASAGKRSGTSGTKIGNAHLQWAFSEAAVLFLRDNPAAQKLLARLEKKHSKGKALTILAHKLARAVYYMLKRQTAFDMNTFLHGEGRGVGERGA

SEQ ID NO: 431636 - protein, 456 aa, unidentified
MKIPQSTIRLLTGRLVTILLNREVSTMKSNTQNAKIEAITEKTLVLGIDVGSETHYARAFDYSGIEYSKKPFKFSNTETGFVTLKEWILDLKERHEKDKVVPGMEPIGHYWFNLGKFLQDNEMKLVLVNPHHVKKSKELDDNNPTKNDRKDPKVIAGLVREGRYMIPYLPDGVYADLRTASNIRFQLQAELTRIQNRISRWFNIYFPEYKTVYGNPDAKSGMLILKAAPLPEDILTLGIDGVNQIWRDAKLRAVGKARAKTLIEAAEHSVGSKEGAVSARMEIRMLLEDYESRNIRLQEVMTLIEGLAKQIPMAEKLLEIKGVGIKTVSGFLAEVGDISRFNTPKELQKLAGLALVESSSGKHKGETTISRRGRKRLRYLLFEVAMSLVAKNPEFRELHNYYTTRRLNPLKKMQSLMAIAAKLIRVFYAMLTKGVDYDPKKMVSDIKRPAVYLQAA

SEQ ID NO: 431637 - protein, 336 aa, unidentified
MLIIGCDYHPRVEQIAMLDTTTGELTVRRLGHENGEAKRFYSSLPKGTLVGIEATGGTQWFERLMAECGHELWVGDPAEIRARMVRKQKTDERDALHLLDLLLTKRFPRVWVPSPEERDARQLLQHRQKLVRMRTAVKNQLHGLAMGQGLCRKHPLWSARGRQQLEALELGPWASRRRHELLTLLDQLDPQIAELDKAVEAEAARRPEVARLRAQKGVGPVVGLAFVLTLGPVERFPRSRQVVSYLGLNPREDSSSDRQRFGHITKQGNAMMRWLLVEAGQTAARHDPELRRVYKRLKARRGANVAKVAIARRLAVRLYWTLRQAPPGGTADSHVR

SEQ ID NO: 431638 - protein, 395 aa, unidentified
MKRPCVALDVSKGSSHYQGWINEDKKLGNPKKIEHNQEGFREILAKAKELEGITNEKPIVVFEATGVYHRTLQHFLEENGMDYIIVSPLASAKVRKSNIRSTKTDKKDCKNIAKVYYSKNLKIHGKGDEIYDRMLDLNRYYQYLTSQLKKIKVQFRLVLDIVFPNIDKLWGQLYGEVPMAILRKYSHPNQLRSKSPETLARYLMKETCHHYGEAIKEANRAIEYCKACCSGCSEASVNCQVLKDLVSQLSEKTQEQDNCLNQIIDLAKDLPNYELLLSIPGISDNLASRIIAELGDLDRFSRVRQITAYAGLDPNIYQSGQICGLHLKITKKGNKNLRCLLYLAIQNTLKSENKVSEFYHKKIAAGMNPKAAKIACMNKLLRIIYSMCKNGCFFQ

SEQ ID NO: 431639 - protein, 404 aa, unidentified
MNAVGIDVSKGKSTVAILRPFGEIVASPFEVAHTNSELSELAGKLKSLDGETKIVMESTGNYHLPIAHALHAAGLTVSVNHAQLIRDFGNNTIRKGKTDKMDSLKIANYGLTHWLDLPEYIPEDELRQMLKAFNRQYNKYTKIKITLKNNLISLLDQTFPGVNELFTSPPRKSDGHEKWIDFVSRFWHCKCISSHSQKVFKEQYRKWCKRSGYNFSESKAEELYLEALKHYNVMSKNDTTKLLITQAIMQIGTIAESLAVVSREMQRLASMLPEYPVIISFRGVGEILCPQLIAEIGDIHRFNRKESLVCYAGLDVPPNQSGKFESHNMGISKKGSPHLRKALFQVMDCLLKHSPSDDNVYQFLDRKRAEGKHYYCYMTAGSAKFLRVYYARVKEYLNSLNVNS

SEQ ID NO: 431640 - protein, 272 aa, unidentified
MAEVTTIGLDLAKRVFQVHGVDAAGVVMVRRALRRQQVLAFFAKLPRCLVGIEACATAHYWARELASLGHDVRLIPPPYAKAYVRRNKNDPADAAAICEAVSRPSMRFVAVKTEAQQAAAGIHKVRELLIKQRTMLINTLRGLMAEFGIIVAEGPRHVSELVAILADPADARIPAPLHHGLMAIVETLRGLEQRIERVEKQIVGWGRANATCRHLITIPGYGPILSSAMTAMVVNPAGFTSARHFAASLGLVPRQDGTGGKAKLGPFSKRGN

SEQ ID NO: 431641 - protein, 342 aa, unidentified
MIDTMIGVDLAKNVFQLHGASLTGEVKFRKKLSRAQFRKFMETQPASIVVFEACGGAHFWTREIQELGHAAKLIAPQYVKPFVKRQKNDAADAEAIVIAAQRPEMRFVEPKSNAQIARGVVFRSRDRLVRQRTEQINALRSVLYEQGQVFPTGVHQMKKIAAFLQQADNGLLALVREECEELLASIYDLTARIDAKTLKLKKLSQQSEISRRLQTIPGVGPLTAMAIEAFAPTMDIFRCGRDFAAWIGLVPKQHSSGGKERLGKVSKAGQVDIRRLLIIGAMTRIAWVGRKPVREGSWLDRMLKRKPKMLVAIALANKMARTIWAMLTKNEDYRDPATIVTA

SEQ ID NO: 431642 - protein, 417 aa, unidentified
MSDDIRWFAGVDWASEIHQVVLVDAHGTVTGEHTFPHGGEGLGAMCDWLLTATGTSAEAIAVAIEVPHGPVVETLMERGFPVHAINPKQLDRFRGRFTVAGAKDDRLDGRVLADSLRTDRHCFRPLHAADPVTVELREWSRMAEDLRQERNRLSNRVREQLWRYYPQLLKLTDDAGADWFLALWTLVPTPAKATRVHKSTIERLLKAHRIRRIGADEALTTLRQKPIQVAPGTTEAATAHIRTLAVRLKVVNRQIKDAHRQLDALCAKLAGPEEVEPGQSHEQRDVTILRSLPGVGRIVVATLLAEAWEPLRERDYHALRSLCGAAPVTRRSGKRCVVVMRQACHVRLRTAIYHWARVAIQHDELSRRRYRELRKRGHSHGRALRTVADRLLAVACAMLRTRTLFDPARASVLKEAA

SEQ ID NO: 431643 - protein, 371 aa, unidentified
MAHGTRWVGLDAARVAALAGLDLREEGDRTGRLPIVMGLDQHRAQITAEWIDLATGELSRGRVAPADRVAVRRFLSRFAGRELEVALEATTGWRFVVEELERVGAGVHLAEPAETSGLRGPKKRPKTDWADARHLRELLLIGRLPESWIAPEHILDLRARVRCRHTLSHQRTEWQQRIQSVLYHHGCPHKRDLMTAEGREWLAAQPLPVTAREQVTVALTMIDAFDLQLAPLTTRLREYARRQTGCKALIAAHYGIGALISVTILAELGDARRFANSRDAVRYCGLDITVKQSDQHRAPGRLSRQGPPALRWALYEAAQQARHPRSPDRDYYLQAAERIGGNRACLALARKLLKRCYHTLRDLGEDALAPA

SEQ ID NO: 431644 - protein, 343 aa, unidentified
MQISTIGVDLAKNVFQIHGVDKDGKVVISRQLRRKQVIEFFSKIPPCLVGMEACGTAHYWARELTRLGHTVRMMPPSYVKGYVKRSKSDAADAAAICEAVTRPSMRFVPIKTAEQQAALMLHRTRDLLIRQRTQLINALRAHLAELGLVAEKGREGVVELAAIISDERNSHALPPAMKQALQAILDQLTALQQQVGQLDRCIHAQHRASDVSRRVETVPGIGVIGATAITSTVTDPSVFKTGRDFAAWIGLVPRQYSTGGKEKLGGISKQGDRYLRRLLVIGATAVIQHARRHPEKHPWIMRLLAKKPAKLVAVAVANKMARIAWAIMAKGGTYRAPALAAAA

SEQ ID NO: 431645 - protein, 355 aa, unidentified
MIVIGIDPHKRSHTAVAVDRASGEIVAERTVAARVQGRGELVLWARSLDPERVWALEDCRHVSGPLERFLLARGERVVRVPPKLMAGARRAARTRGKSDAIDALAVARAFLREPELPAAFLAGREREIRLLTDHREDLVGERTRHQNRLRWHLHDLDCELEIPAGALDRYIWLDRLERWLAGREHEVQVRIAWQLVQRCRELTREVNELERELEALLRSEVAELLALVGCGTLTAAKLVGEVAGVGRFAGEGKLAKHTGTAPLQASSGERQRHRLNRSGNRQLNCALHRIAVTQARVHPPARAYLERKQAEGKSRREALRCLKRHLARTVYRTLRTMEERKMTSTPKPDLEPALT

SEQ ID NO: 431646 - protein, 412 aa, unidentified
MKDLLEISCGLDIHKEKIVACILTGPLGKPTHSEIREFTTLIPDMLALRDWIISENCHHVAMESTGIYWIPIYEILEDNFSGDITLLVVNARHMKNVPGKKTDMRDSEWISTLLRAGLLNASFIPEKRIREFRDLNRYRKSIIRDITSQKNRVEKFLQSSGFRLSSFISDIFGASGRNIILHLMEHGRIDKISLDSYLKTKTRKRIDEILMSVNGTLSEHQKSFLKILMCHYDSMKEHLIEIETHLQEDMLPFALQIEQLNTIYGISTTASCAIIAEIGTDMKPFKTAEHICSWAGLCPGNNESAGKRKSTSITKGNPYIKSMLCEIAWVIAGKRNTYLSAWYWRIKQKKGARKAIVALARKLLVIIYTMLKQGTNFDENCFEVRRKNCEQKQLSRYIRELEKHGYTVEAQV

SEQ ID NO: 431647 - protein, 341 aa, unidentified
MKKNLFFIGLDISEANFVASIYKTPGQPIVTKEAIPNNPEGFKMLLLWLNDYHIDKKNCRICMEATGVYSQAIAYYLLFQGFPVSVEPPLKVKRAFDPVGHKTDPVDSKQIAEYAYRFQDELTSWKPRDEILEKIRQLLSVREQFTKQKTALKNAIQAYSKQRVQVALIRKAQKETLDQLKKQIARIDKELEKLIKQDPGIFQKANNLKSIPGWGMLLAAHLLVITENFTKIQNSKRLAAFIGIVPYQHQSGSSVSKRAKIRYFGPGPSRKLLRLAAQSVATHNVTFRRYYLRKLDQGKAKPLVLNNIANKLLKIACTIIRNNTRYIKDYRSIHPMYLKSA

SEQ ID NO: 431648 - protein, 413 aa, unidentified
MAVYVGVDWAGEHHDVFVTNERSEQLAAFRIAHSIEGLDLLTQRLREFGATAAVVQIAIERPDGLLVAALLEQGYVIYPINPKAVDRYRDRHHTSGAKDDARDAKALAHILRTDGEHFRPFSPESELAAELRLTIRAYRELVAEGVRFTNQLHSCLGDYYPAALGLFSELDAAISLAFLAAFPTPEAARITGRDGVVGWLKEQGYAHPQRAEQVAERATMKALQAGAGVVRARSRQMVGLVAALQAVVAAKQAHVKALEELLGQHPDGGLFLGLPGAGVVTAAALLGEIGEDREALPSARALQSVGGTSPVTIQSGKSRRVVRRHACNRHLNEALIQFARCSLMRAGCGDEGVAWVKDAYLARRQAGDTAQQAYRVLANRWSTILWAMWTRREAYDHARYAKARAARALPKAG

SEQ ID NO: 431649 - protein, 372 aa, unidentified
MNHNTIYVGMDVHKENFSLCAYTLEAEKASYHQRTEADYKEVLKYLEFLRSIYGNDANFICGYEAGCLGYTLYHQLSANNVNCVILAPTTMLEQRSKKRIKTDKRDAEIIAKCLAQHNYSSVHIPTAKDEETKEFLRMRDDHKLALKKIKQQILAFCLRHSYRYDGKSHWTAAHLKWLRSLTPEALYKEILDEYLLTYQNLSDKLDRMDKRIEELASLEEYREAVKKLCCFIGVRTHTALSVLVEVGDFKRFASAKNFASYLGLVPGENSSGENQTRLGITKAGNRHIRLLLTEASQCYARGKIGFKSKELKSRQSGNTPEIIAYADKANERLRRRYYKMVLGSCKKHNVAKTAIARELACFMWGMITDCIA

SEQ ID NO: 431650 - protein, 401 aa, unidentified
MAAQRDMAWVGIDVGKTHHWASMVDAEGKKLLSIKVANDEADILALIADAGSQATQLVWAVDIIGAPSALLLALLARADQSVRYASGRVVAAMSAAYAGEGKTDAKDSYVIAETARLRRDLSVVDTGTDLVRKLAVLTGHRADLIADRVRMINRLRDLMTSVFPSLERAFDYSSHKGALILLTGYATPDRIRRIGQTRLTSWLRNRNVRGSADVAARATTAAKAQTVVLPGQDLTASIITELATAILALDDRLKALDAQIEVTFTEHPQAAIIQSMPGFGPFLGASLLVGANDLRAFPSAGHLAAAAGLVPVPNDSGRRTGNLHRPLRYSRSLRHVFYLSAQTSMMRAGLNRDYYLKKRSQGATHSQAVIALARRRIDVLWALLRENRIWTAEPPPLAQAA

SEQ ID NO: 431651 - protein, 394 aa, unidentified
MFLVGIDVGKLSHMFCIMDSSNGEILVSPVSFKNNKQGFDFLMGNIKLYPKDKLLIGMEDTGHYHFNLLKFLLDSGYTVALINPITTDLTRKMQLNPTKDDNLDTMTICDVLASSPRKKGYRISKINNFEFYEQKRLTREHHDLKEQLNVYANKLQKCIDIVFPEYNSLFKSKYGTVYMKVLKAFGSADSIAHADIRNIRKCFETNRNGRTISLTPEKLKEAAKHSIGFPSKAEVIEIRHLIDLIELIKEQIKDVDIKIEEFSTQLNSPILTIPGISHFSGTSILAELGDLRNYSKASQIIKFAGVSPYKHQSSQYEAQHTAITKKGSRYLRKTLYQVILPVIRYNPVFNEYYHLKLSQGKGHRCAQGHCVRKLLRIIYHLVITNQPFDSTLLK

SEQ ID NO: 431652 - protein, 460 aa, unidentified
MLMTLGIDLACRAAHVASLAGPDGRLVWRGRKFFSRTADLERLWADIDAEAAELMVVMEPTRNAWIPVAAWFRRRGVKVVLVPTTQSADLRDYYSKHTKTDRLDSVLLARLPLLHPEGLREHTGDGPADPLRRVVKQRSSIAKRRTAVFNRLDAQLELLGPGWYDALGTDYGKATLAFLARYADPNAVIRLGQARLARFLRRHSRGHWREGKAAELIGAAQESLRLWDGEGMDFAELAADIAVEAEQAIALTAQIADLDERVANLYAEADPASIVRSAPGVGPVLAGIIAGRLGDPHRFTSLAAVRSYSGLVPKVSQSGTAEHTGGLTKAGDPLLREAAWMAAEQARKFDPQLAAKYARLMAADRHHDSAMCHLATILLTRIATCWRTGAPYQIRDVDGTPLTPAEGKRIVDEKHQVPKKPSKKRYYRATNHKTDPGSQESPSAPTPRPANNRPKTSRVA

SEQ ID NO: 431653 - protein, 368 aa, unidentified
MHEGITAFVGLDVHKDSIAIAVAGNDREAPHFVGTVRPDFKQVCKALRHYGSPSSLQVVYEAGPCGYTLARQLQTGGFSCQVIAASRITRSPTERIKTDRRDAITLARLARSGDLVAVRIPDERDEALRDLSRTREDAVRACLKARQQLKAFLLRHGRPLRGSKPWSATGELYLSKISFVHPAQNIAFADYRQAVLDTHARVERVTEALRAQCEQWRMRPLVSALACLRGVDFLTAVILVAEIGDFTRFSHPKELMGYLGLVPSEYSTGERHHRGDITKTGNANARRVLVEAAWNYRFPARLSHTITRRQEGQSKPVRDIAWKAQLRLGYRYRKLQSRKLHQNKIIVAIARELTGFLWDIARHVPIAA

SEQ ID NO: 431654 - protein, 354 aa, unidentified
MSQKLNAAIAVIGIDIGKNSFHVVGQDDRGAIVLRQKWSRGQVAAHFANLPPCLVGMEACVGAHFLSRKLKGLGHDARLMPAKYVRPYSKGQKNDFRDAEAIVEAVQRPTMKFVATKTTDQLDLQALHRVRERLVGQRTGIINQIRAFLLERGIAVRQGQRFLRAELPRILATPPDVLSPRMVRVIEDLAGDWRRLDERIKTLSGEIEAIARQDAGCERLMSVPGIGPIISSAMVAAIGTGEAFSKGRDFAAWLGLVPKQMSTGDRTILGKISKRGNRYLRVLFVQAAWVVLIKPKIWERHGLKPWIEAAKKRLHPNVLAIALANKLARIAWSVLARGRSFETSVIANATVQAA

SEQ ID NO: 431655 - protein, 384 aa, unidentified
MSNKRSTTRALVAVDEVGNVFGADPHKRTVTASVLDERGGVLGTETFRVSGDGHRAMEAWALRFGPITRWGIEGAGGLGRHTAMYLIGQGHDVRDVCPTRTAEQSRRRRDGKTDALDSVRVARETQADPALPTAFKRAAGDAGPDETHELMSLWHKARRSILKSRQHLLNEAEHLLGELPEAIRAALPDTAEVRPRLRALANRDTCDWDPATALRLRLLDTHREAVAQLDAQDREAAKALEKLARQAGSTLNELCGIAERIEAELLVEVGDPRRFTGTGGFARFNGSAPLPASSAEGDRAPVRHRLNRGGNRRVNASLHRIAVTQLRCEPRARKVYDDARRRGHTKKEAMRILKRHLSDVVYRRMMSDLRAQPAHPSTPHPRIG

SEQ ID NO: 431656 - protein, 334 aa, unidentified
MENIALIGIDLGKNSFHIHCQDHRGKAVYRKKFTRPKLIEFLATCPATTIAMEACGGSHFMARKLEELGHFPKLISPQFVRPFVKSNKNDFVDAEAICEAASRPSMRFVQPRTESQQAMRALHRVRESLVQDKVKTTNQMHAFLLEFGISVPRGAAVISRLSTLLEDNSLPLYLSQLLLKLQQHYHYLVEQIKDLESQLKRKLDEDEVGQRLLSIPCVGTLTASTISTEIGDGKQYASSRDFAAATGLVPRQYSTGGRTTLLGISKRGNKKIRTLLVQCARVFIQKLEHQSGKLADWVRDLLCRKSNFVVTCALANKLARIAWALTARQQTYVA

SEQ ID NO: 431657 - protein, 427 aa, unidentified
MRRFVGLDVHRDFCEVAIVENGVVRSAGRVATTPEALTLFGESLGREDEVVLEATANALGIAQLLRPHVERVVLTDPSAVHELGAAKTDKIDARALARLLASGFAREVWAADDATAALRRRLSRRRQLVKQRTREKNQVHAVLMRNLKERPPVSDAFGVKGRAWLAEQELPEDEREMIDACLRHLDFLERELAAMDRVIAERVLASEQMRLLLQLPGVSATTAATLMAAIGDVSRFPTARHLVGYLGLNPRVRQSGAEPARHGRISKHGPGAVRAVLVEAAWVAARSTGPLRVFWQRTAARRGEKIATIAVARKLVVLAWQLLTKNQEYAFKRPAALAEKIRTLELTAGADTRRGRRHGDRVRVSPERRKLDKQLAEQAEVAYRRLVADWQASKPKAGAGATPGRASSRPSKRQAARQTSKPQRSAL

SEQ ID NO: 431658 - protein, 321 aa, unidentified
MQKDLLYCAIDVSKDKLDLDATALALPAQLGNDHAGLRQLIKAAKKYPGPVQFVFEATGPYHLGLALALWEAQIPLSVLNPARVRHFAKAQGKAKTDPLDTQVIGDFARSFRPQPTPAPDPVRRELTELLQRRDGLVSSRAAEQNRLSQCRHKIIKSQIGRLMAQLAEQIDQIDGLMKKLVNSSDELKAKVKALCQVKGVGHLTAVTLLITLPELGTLGRNRIVRLVGLAPLNDDSGTQKNKRYIQGGRKRPRCALYMPALSASRHNPVLKEVYERLLKAGKLKKVALTALMRKLLICLNALLRKLADQHPSPQGLCLAKP

SEQ ID NO: 431659 - protein, 489 aa, unidentified
MRDRRLVGIDLGITSVHTVRVLTGDGAVVCRRKAVPTLESLVEVERAALTGAPPGVCLEVVVEPTGPSWLPIAVFFCGRGHTVYRVSSAKAHDLRRVLSRQAKSNGIDADTLARLPLVDPAGLHPLQLPDAPRAALDRRVRACDRLTQAAAGHKRRIKDLVCQLMPMTPLAGALGHADLAVLERYADPHALVAAGRARLHRVIAKASRGQQGAARANQWLAGARAALELYADHPAIAFQDLAAEVATELRLLAATQAELDRHATQRESCYRWVDPPALARSLPGLAEIGGPALAATMGPASRFATAATFRAFTGLAPKASETGQTDRKGQPISKAGNRLLRTTLVRAADTARRVDPQLARIYYLQMTERGKDHLGAVCVVAAHLAERAWVVMDRGMPYVICDTDGTPVTAEQAKAIIAERYTVPEPVRRRRRSRKGKAPQQVLQGHVQGAQGATRRPSPHHPVLAGDPPSSSKPSHPLDTQAPTGNQVR

SEQ ID NO: 431660 - protein, 391 aa, unidentified
MIYVGIDVAKDKHDCSISSSEGEVLANVFTIPNNMEGFRCLLQRISSCSTPQDKIKVGLEATGHYSYNILGFLLDNCLATYVLNPLHTNLYRKSLSLRKTKTDRVDARTIAAMLMSDVGLKPYTDTAYHNEELKSLTRYRFDKVRERAKLKQSVARLVCILFPELEKMVPTLHMVSVYALLEEFPGSHQIAQAHLTRLKTLLLDASKGHYGRDIAVSIREAARNSIGSVMPAKSLELRHTIRLIRELNAEIEEIEAAIQIMMDELHSPITTIPGIGFRMGAMILAEVGDFSRFDSPDKVLAYAGLSPSTYQSGQLTNCYAHMEKRGSRYLRFAIFNAAKYVCHWDPVFAAYLAKKRAEGKHYNVAISHAAKKLVRLIYALEKSREPYRLVA

SEQ ID NO: 431661 - protein, 440 aa, unidentified
MEKVTVFETVHEHAAGIDIGAEKIFVSPDGVEVVSFDTFTSGYYQCVEYLQQNNIAEVAMEATGVYWIALYAMLESCGFRVCLVNPKETKQIKGRKTDVKDCQWIQKLFSAGILRQSFIPEVNYMEVRQLVRERLDIIEMGSTYVNKMQKCLELMNIKLKEVISQIHGASGIKIIKAIIKGHRDNQYLLSLCDKRIRENKADLVLKVLEGNYNDTNVFMLEQILHMWEHHQQQVSVIDKRIEMLLQKMTKEKKAVVLNGSPKLVRHHAPQIKGLHTMLIQLYGINMSSISGINDYTLLRLVGETGTDMGRFPNEKHFVSWCGLSPKHHQSGRVSKRVKGTKCNKAGQIFKEVAQGLLNSKYIAIGSFMRKLKSKKDSAIAIKAGARKLAIAYYNALTKGIDYVEQGTKKYEEQIKQREKSFLAKLAKKHNMELVEKQPAA

SEQ ID NO: 431662 - protein, 390 aa, unidentified
MEARTVNDLLPAASHDDAVGCLVAIELSKKSWIVAVNTPVSDKISRHTLKPGDGKELLDLCERIRTRVARETKRRVEIVSCYEAGYDGFWLHRLLEAHGIRNYVIDPASLQVDRRARRAKTDHVDVERLLRSLMAYLRGEPKVWSVVCVPSVAEEDDRRLNRERGRLINERIQHVNRIKGLLAIHGIYDYQPLRRDRMLRLERLRTAADGQTLPPRLKAEILRELQRLEIILGMIKTIEAERDAIASPKTETEHTSAKKIQDLAKIKSIGPEFATTLVGEVLYRSFDNRKQLASYVGLTPAHFQSGAMCRDQGISKAGNGKARTVMIELAWLWLRHQPDSPLSVWFRERVGKLKGRIRRITIVAVARKLLIALWRYLETGLVPKGAILKA

SEQ ID NO: 431663 - protein, 428 aa, unidentified
MNFTQNERINQITSSTLIVGVDIAKFKHVARAQDYRGVELGRTITFENNREGFELFVSWFHKIATEQGFKDVVVGMEPTGHYWLNLACFLLEQQVLCVVVNPLHVKKSKELDDNSPTKNDIKDAKVIAQLVKDGRYAVPNLPQGIYAELREAMKIRDHLSTDLRVVQGRVHNWLDRYFPEFLTVFKDWECKSARQMLGLCLLPYELVSQSEESLLRHLREVAKRGLGIERMRSLKAAASRSVGIREGAALAKLELKLLLTQYELLESKFEELEVKLDELLEQIPHVKQLLAIKGIGRDSIAGFLAEVGDIERYQHPKQIIKLAGLNLKENTSGKHKGQTKITKRGRKRLRVLLFRVMMPLVAKNCAFKALHQYYTKRPTNPLKKMQSLIALCSKLIRILFGVIKKGHWFSEEKMLQDIPRFTEVSLAA

SEQ ID NO: 431664 - protein, 450 aa, unidentified
MAQRSGLTRGDRRRNTKIEELRAVVRADRAILAIDLGEDKQVAALLDHDGRVLGRRVVRDKAHALGGLVRWAAEQAGRHGFAGVVLGCEPTGHRWRSVMQLADAAGLGFVCVQSLRVHLAREADDYTRDKTDHKDAVLIGKLIARLDCYLPERAEEDWARLRHLGQRRFRLVGEMVACRNQIEDLLSCCWPAALECAVKPLDSTTWLACLAVTVDRCNGNPAKLRRLGRDRFSAAVRRELPRFGAQRVCHKVADRFFAALTDGRGVTAQRRGALERVGMLIDDWRSAIARLGEVEARMVAVLDGLGLTTLVTSVPGVSAVGAAVILAETGDLSRFATARSVVKHAGLNPAENTSANFRGQTRVSHRGRPALRAAAWRAAWGALPHNPVLGARFTHLTTRERDRLAPGQARVACAATLLRWLYAIVTRRESWNPDRAAGIRAGQAGEPAAA

SEQ ID NO: 431665 - protein, 390 aa, unidentified
MERPVKRNDLSRSLIAFDQASTLVAVAELSLGNWLVAGLVPNLVRQPLKKLRSDPEALLGLLLRWRDQATKAGGRIKRIVLAFEAGRDGFWLARWLRARGIEVYVIHPASIPVSREHRRAKTDRLDAGLLMRAVLGWLRGEAKHCSMAAIPSIAEEDARRPTRERETLVREQTRAVNRIKSTLIRFGIRTFKVKLRQASKHLEGLRGPEGEPLPANTMAELRRDLARLQLIRGQIREIERARLERLKRAPGQGTHPMMRMLARIMGIGIETADVLVHEVLSRKLRDQRAVARYGALTGSPDESGSKRRERGLARAGNARVRRGMIQLAWRWLMFQKNSTLAKWYRARTTGATQGLRKAMIVALARKLLIALWRYVTIGEVPAGAVLRPVT

SEQ ID NO: 431666 - protein, 336 aa, unidentified
MKITTRGLDLAKSVFQAHGIDENSKTVLVKRLHRKRMIPFFSKPPPCLIRAEACATAHHCARTLIAMGHEARLMPPSFVKGYVKRGKGDALDAEAICEAVQRPTMRFVPVKTVEQQGILVAHRTRSLLVRQRTMAANALRAHLAEFGLAANPGIANLVKLADRAFAGNDLPSYARRAFEILIRRLAELTEVISMLDRELRGWHAENEASRRLAAIPGVGVGVITATAIAATVTDPGQFRSGRQFAAWLGLTPQQRSTGGKTRLGGIPKQGGRYLRRLLVVGATAVMRHAKRTPSPMTDRVNSLLEKKPFRLVSVALANKLARIAWAILTRGDTCRP

SEQ ID NO: 431667 - protein, 367 aa, unidentified
MNNSTTVVGLDVHKDSIVAAILPARAAKVSEVINIGNSSLEIKRLVERITRRGAAEFVYEAGPCGYEIWRQITGMGTACSVIAPGLTPRKPGDRVKTDRRDAENLARYHRAGELTEVNVPTRLEESVRDLLRAREDLLQDRLRARHRTRNFLQRQARQYGKKLWGVNHELWLKAQKFEYPALSQTFETYLRKLDEANAGLAEIDRLILGWAEGEEYSGAVKCLRCFKGIDTLGAITILAEAQDLTRFGGAREFMSYTGLVGSEYSSGERVIRGSITKAGNAHIRRVLVESAWAYRYRNVTSPELLARRKGCPVEAVKIAKKAQDRLTSKFWRMMIKGKKQPVIVVAIARELAGFIWSMSRHFPAKAA

SEQ ID NO: 431668 - protein, 343 aa, unidentified
MSKISIVGLDLAKNVFQVHGVDASGGVVLRRQLRRGAVEKFFAQLPPCTVGVEACGSAHHWARVIGRYGHQVRLMPPAYVKPYVKRNKNDGRDAEAICEAVSRPTMRFVPVKSVEQQATMAVHTTRALLVRQRTMVANSLRAALGELGIVAAQGIEGLRELMAKLEAPHEEVPEIMRGALLLLAKHWQALDADERVLERQIAKAARSDREARRLMEVPGVGPIIASTVLAKVPDAKVFRSGRDFAAWIGLTGRDHGTGGKHRPGRISKQGDRMLRALLISGASAYLRHQRTRGVSDPWLRDLLARRPYKVVMVALAAKTARILWAMLVKGEPYRDRASASAAA

SEQ ID NO: 431669 - protein, 568 aa, unidentified
MHTCTINSDRNVLPSESGDKGTKLQDVNTRDLNSSKSSNSSSNAFVHNSSIGVDVHEALMVCVYQKADPLTGQVYEEKFESGTTKKDLNELIDWIKSLNPEIILMESTGVYWFSFYDLLEDNGLSDITVVVNPRDVKAIKGKKTDQIDAARLAVVARVASFNKSFIPNRKVRTTKLLSRQLTQLVHDRQRTTNRMHKVLVTAGAHLKQVFSKLTGVSAQKVLGAILSGMDGTELYNFIEENCKKIKKSTDEIFEAVQIVNNDPNIMSAIRRLGNIGKFLDQQIADTEEQLEVLLAPHRDLMYRLETIPGVSHVIARTVVSELGSDWSSFESPRRLAAWIGLAPGNMMSAGKNRLSRTTKGNKYLRTQLVQAGNAISRMKTGGFFEKFQALKERCGHNKAVVATGHRIIRIMFAMVRDNTEFADSGVGSLAKQRVARALKATRSLSEVGFNTEFKLSNSNTGDTILLTKSTAKPINPPKQAVKAEPANGLHATQITSDGESFCIDPNLSLFKVFVDGAKKISSKCILSHVESQIASAAPLLKKSDAKDSQSTVLLSEFDELSTDSHPDL

SEQ ID NO: 431670 - protein, 355 aa, unidentified
MNDAKYIGLDVHQATTTAAVRDATGNLVMEAVLETKTETILQFFRGLRGSLHVIFEEGTWSAWLHDLLKPHVARVVVSDPRKNALLKDGNKNDRIDARKLSELLYLNRFTPVYHGEHGLRTLKELARSYLTITKDLTRVMGRIKAIYRGWGIPCAGQQVYAPGHRAEWLAKLSEAGVHRRAEIYYQQFDGLAPIRQQARRELLVEGRKHAAVKLLRQIPSIGPIRAALLVALLQTPNRFRTKRQLWAYVGLALRTYTSGEYRFEHGQLKRSKKVLAIRGLNRNHNHDLKNIFKGAATWAAGNTGPFQNFYEACVARGMKPHLARLTLARKIAAITLLVWKKGVCFDAKHLTQQAA

SEQ ID NO: 431671 - protein, 339 aa, unidentified
MNAVGIDVSKGKSMVAIMRPFGEIVSAPFEIKHTASDINSLVKLINSVEGESRIVMEHTGRYYEVLAHQLSEANLFVSAINPKLIKDFDNDSLRKIKSDKADAVKIARYALDKWQNLKQYSVMDELRNQLKTMNRQFGFYMKHKTAMKNNLIGILDQTYPGVNTYFDSPARSDGSQKWVDFASTYWHVDCVRKMSQNAFIDHYQNWCKRKKYNFSQSKAEEIYGKAKDLVPVLPKDDITKLIIKQAVNQLNSAAATVESLRTLMNETASQLPEYPVVMAMKGVGASLGPQLMAEIGDVSRFTHKGAITAFAGVDPGVNESGSYEQKSVPTSKRGSSDRS

SEQ ID NO: 431672 - protein, 367 aa, unidentified
MKNTIVHHEGAASLKVALNKIKLSGSIIKIGLDVHARIYVAVAQYDQLLPKPARRLTPSEFVPWVEQLLRAGHTVHVVYEACGFGFGLYRELKALGVHCYVIAPRKLDEQFTRVKTDPRDATTLCQRLSRYLEGNTRELAVIRVPSEAEEQARHVSRQREQLVRHRQKLEAQGRSLLINHTLPAPAHWWKNQTWSRLSKLLPAWICLRLEVHRPALLTLEQQISALSAELEAAAPADVPAGVGKLTTVVMTREICSWERFRNRRAISSYTGLCPGEYSSGTKRVPGSVTKHGNPRLRAALVECAWRMVRFQPQYPPVKKRLSVLAKGARATGGQRKKAIVAVARHLAVDLWRLHTGRNTAAQLGLTI

SEQ ID NO: 431673 - protein, 427 aa, unidentified
MTSSQDLKFNAIEKMDAIVGVDIAKNVHWAGIILPNGKEIKKSFSFNNNKKGFENLVETVKNVLTMLNLKKVIIGMEPTGHYWKCFARYLQTIEWIKVVTVNPFHVKSSKEFDDNCQTKNDKKDCITIARLIKDARYFEPYLPTGIWAELRNLSNTRAEIIRKQSAVKSRIIATIDEYFPEYTKAFKDIFSRTSEEILKKCPFPEDIKSLGRKELLEYIKSTVKRGYSKKQVEKIYELAEESIGTAEGTLGAKFQLRMYIEEAEMLKKQIKMTEEELEKGLKETGFYESLISIQGIGIVSAATLLGEIGDINRFNSYEQIKRYAGLNLVENSSGTHKGKTTISKRGRSLLRSILYRIAFTMVCKNKEIKELYKYLTTRVENQLKKKQAIVAVIGKILQIIYAVATNNEKYQATRVFNQSRLKQLKVA

SEQ ID NO: 431674 - protein, 340 aa, unidentified
MGLYTAFDLHANNNYCAIINEQGQRVRKKRLPNDAALILQFLDPCKADIEGIVVESTYNWYWLADALMTEGYRVHLANTAAIQKYKGLKHSDDKDDAFWLAEMLRLNILPTGHIYPKEERPIRDLLRKRGHLVRLRTSLIVSLQNIINRNCGTNIKANDVKRLKENRVAPFMEGNEDLALAGMVSKEAIDFLTLKIRAIESSLESRVKLKGPYRYLLTLPGIGKILGLTIALETGSVDRFEKVGNYVSYCRKVSTRWTSNDKKKGKGNRKNGNKYLAWAFSEAAELSKRYDSQARAFYNRKLQKTNSMVAHNALAHKLARAAYHVMKDQMPYMPEKLFSS

SEQ ID NO: 431675 - protein, 344 aa, unidentified
MQITTIGLDLAKNVFQVHAINSASEVVVKKTLRRVQMRRFFEQLDPCLIGIEACGTSHYWAREISKLGHEVRLMPPAYVKPYVKRGKSDAGDAEAICEAVRRPTMRYVAIKAPEQQAALALHRTRDLFVKQRTQLVNMIRSLLAEFGIEIRRGIEQALMLAKRIAAGEVADIPPLAAKVIAGLAGQVLDLQARLGEIERELLAWHRSNDISKRLATIPGIGTVCATALAASVTNPHQFRSGRQFAAWLGLTPLQHSSGGKERLGRISKMGDKYLRRLLVVGMTSLIRRAKYKPEAVDPWLADLLSRKPARLVTVALANKAARVVWAIMVRGGVYRIPAGVATSA

SEQ ID NO: 431676 - protein, 297 aa, unidentified
MSDYSYFCGIDLAKNHFSLHAVDQNGKVILHKSVTRSKVLTTIANMPLMRIGVEACGGAHYWARTLNKLGHDARIMAVKYVIPYRTKGKNDLNDAVAICEAVQRPSTRFVPVKSPEQQAILSVHRMREHWVRERTALMNRMRALLSEFGLIIPVGRSSLMKHVPLMLEDAENELPHLARTVIADAYHHLGELNQRIADTEQVFESFAKVSANVQRVMKVRGIGPQTATAILASIGNGSQFDKSRDFSAWLGLVPKQYSTGGKPRLGRITKHGDKYLRTLLVHGARTVIATLATSKIS

SEQ ID NO: 431677 - protein, 413 aa, unidentified
MLNIYYYNCCGIDVHKKMLVATIAKTDEHKVTTYQTKQFSTITKDIEHLKQWLKDNDCKDVCMESTGKYWIPIFNILESTCHVIITHPKYVRAIPGKKTDKKDSIWIADIFKHGLVNPSFMPPLDIRQLRDLMRYRFKLLNCRTSEKNRFQNSLTMSNIMISNVVTDTFGKTAQSILKKMLSKNDNLTLEELSPLLRKNLKSTPQEILESIQGNLTKEQNSKMEICLDHYDYINKCVEKLEEAILPLVAKYQNEINLLLTIPGIEDISAIYILSEIGSNMDVFVDDKHLCSWAGLTPQNNESAGKKKSVRISRAGVYIKPLLVQCANCAIKDKECEYFKLRYEAIKKRRGHKRAIIAIARMLLTCAYHMLSKNEPFNIDLYKQLTESNFKSKHTKLNINNAIKFLEQQGYKVS

SEQ ID NO: 431678 - protein, 269 aa, unidentified
MEGEVIAVGIDVSKKKLDVAVLFPDGRFRSKVVSNSVGGFEELRLWLGKQGVERAHVCMEATGIYWEGVAEYFFDRGFVVSVVNPFQVKAFGGSRLARAKTDRVDARLIAEFCATQRPEPWSAPAVEVRELRALVLRREALVRMRSQEENRLCVAQGCVRGNIEAHIEHLDRSIREVEKEIKRHIDRYPHLRKQRDLLRSIPSFGDVSVWTVLAFFGGEDMRFRKPRQAVAFVGLDPREHTSGTTVRRKARGYRRWVIVWFGGFCIFLL

SEQ ID NO: 431679 - protein, 408 aa, unidentified
MEVLHSRCAGLDVHKDTVVASVRCVSPPIHHEAQSFPTTTRGLFALAEWLGSHGCTHVAMEATGVYWKPVWHMLEERFELVLANAQHVRNLPGRKTDVGDAAWIADLLAHGLIRSSFVPPAPIQELRDLTRTRKQLVREISQHSLRIQKVLEDANLKLGSVLSDVLGQSGRAMLEAIIAGEEDPVRLAELALGTARKKQAALVEALRGRITPHHRALLKLHLDLVDALELALEEVDRHVGKALQPIRDLARLLTTMPGVGNLVAQVILAEIGTDMSRFPTSGHLISWAGLCPRNDESAGKRRSTRVRKSGTWLKTTLVTAAWAGVRVKDSYLHALFLRIKSRRGAKKAILAVAASMLTATYFMLRDGVEYHDLGPDHFDRRDRSKVIHRLLRRLRDLGCAVQITEEAA

SEQ ID NO: 431680 - protein, 345 aa, unidentified
MKITTVGIDLAKNVFQVHGIDERGKAVLGKQLRRAQVAVFFGNLPPCVIGMEACASAHHWARTLQRFGHTVRLIAPQFVKPYVKTNKKDVADAEAICEAVGRPNMRFVAIKSIEQQAILSVHRVRQGFVKARTAQANQIRGLLGEFGLVIPQGIYNVAKRVPEILEDASNELPVPFRHLIDRLTEHLKELDRQVKEFEQEIIAWHRSSELSRKLEKIPGIGPLAASALVASIADAHSFDNGRQVSAWLGLVPRQSSSGGKPTLLGMSKRGDANLRTLLIHGARSAILAAKNKVDNTNGWLTNLLQRRHPNIAAVALANKNVRTVWAMLAHGREFKADFVPTRMAA

SEQ ID NO: 431681 - protein, 450 aa, unidentified
MSLDCCCEHVGLYPGRGTSERPLARSSGRAEGRMVRELIGMEVVFDRVAGLDVGTASVTVCVRTPGARRGRQAETRTFKTTTRSLEVMRDWLLEQGVTIAAMESTSTYWKPPFYCLEEVMEVWLLNAAHMKAVPGRKTDVRDAEWIAQLLEHGLLTPSFVPPPAIRRLRMLTRYRVQLYGDRTRETVRLELMLEDASIKLSTVASSLTTVSARAMLAAMIDGETNARVLAEMAKGRMRSKIPDLAQALEGHFDAHHAQLARSILDRLDRVEQALAELDEAIAAACEPWAHQIELLQTIPGVGLRVAQVIVAETGADMSRFPTAAHLASWAGLAPAMYESAGKRSPAGRRRGNKWLTAMLVESAGSVGRMKGKNYLAVQHTRITRRRGMSRAQIAVAHSILVAAYYMLKRDEPYRDLGPEWLTKRNEEAHTRRLVAQLEKLGHTVVIDPAA

SEQ ID NO: 431682 - protein, 441 aa, unidentified
MSNIVNSNAAGIDISTKEHYVAVPEERSKESVRCFQSFTRDLHELANWLKECGVETIAMESTGVYWYHLYTVLLDYGFEVYLVNAYHVKNVPGRKSDVSDARWLQQLHSFGLLRGCFQPDNLTRSLRNYVRQRKKLITQMSREVQRMQKALEQMNIKLNNVIRDIQGKTGMAIISSILDGERDPQVLAQYRDPRIKASKEKLIKSLEGNWREEQIFNLKQAYEHHFFLQGQLSECDKECERLVNDMSDEDIPKKEIKSGTRQKNNPDFNVSQHLYNALGVDVTQIYGIKSTTALTVFSETGPGIKEKFPTEKQFLSWLNVVPDNKITGGKVISSRVKRKKNKAGLAFRDTANALWKAKNPLGDYLRRKKARSGGRQAIVATARKIASIYYKMVTESVEFDPQVLKFKTQEYLEKRLRYLEKSLQKTKMLLADNEIVSEVVI

SEQ ID NO: 431683 - protein, 419 aa, unidentified
MPTNDPLNVVHPRAAGLDVHKLQITASVCLARPGARAEILTETFGALPSGLSALVAWLRRHGVTHAAMEGTGVYWQAPFEALEEAGIRPLLMNAQMVKQLKGRKTDVADSVWLATIAQFGLGSPSMIPPAPFRRLRQISRLRRALVRDGARLRNRIHKVLDAAGVRIQGVISDLFGVNGLRILDGLVAGSPPEAILRSLSPHVRPRLEELHDALSARLDEESLFLLADLLEAWHQVQRRLARYDTAIDRGLSGFREALELLMTIPGIDRESASAILIELGPDIRVFRSRRHCAAWAGLCPGNNESAGKRRISQTRRGNPTLREVLVECAHGGARTHDCQFQGYHQALTIRRGQKRAIVATAHKMLRVIYAVLRDQRPYRDPQTDYEAIMVRRNAPRWIAILQKHGIDPVTGLPAMTAAT

SEQ ID NO: 431684 - protein, 376 aa, unidentified
MSVKLRFLGLDVHAETISVAVAEPDGEVRSLGTIANREDSIRKFIPKLGPVEQLRACYEAGPTGFVLYWQLAQLGVECAVVAPSLVPKKPGDRVKTDRRDALKLARSHRSGDLTAVWVPDEDSEALRDLVRQREAAKQDQLRARHRLTKFLLRTGRRPPLGLKAWTELYMRWLAQVRYTQPAQEATRLDCMNEVEHMSARVKRLEEAILEVVKLAPRPMQEVIRGLQALRGVAHISAVTIAAELGNISTRFESARKLMGYSGVFPSEDSSGKRIRRGGITKSGNAHLRRIVVESAWCYRHLPRVGAKLRKRQQGIPAEITEIAWKAQNRLHKRYMKLTMAGKDQRKIMTAVGRELLGFIWAIGVKAEQAFQQPFAA

SEQ ID NO: 431685 - protein, 341 aa, unidentified
MNYFAGLDVSLEEVSICVVDGAGAVVREARVASEPEAIAQWFSALGLPMARVGLEAGPLSPWLHSELVARGLPAVCIETRRMRSATELMAVKTDRVDARAIAQAMRVGWFTAVHVKSGWSQELRLLLRNRKTVQEQRVALDNEIRGSLKAFGIKLGRVSEAKFGEAVAREIEAVRPELLKMVEPLLKLRLELRRTYAVLHRQVLVAARQSSICRQLMTTPGVAAVVSLTYVTGVNPARFRRSSAVAPHFGLTPRKYASGQIDRNGPISKAGDEMVRQALYQAAHTLLTRVQRWSALKAWGIQVAKRRGLRRATVAVARKLAIILHRMWTRGEAFRWAAKEA

SEQ ID NO: 431686 - protein, 354 aa, unidentified
MKRTTKYVALDVHQATTSASVREESGRVIARSVLPTDGGAITEFVRGMRGAVHVALEEGTQAQWLHDLLAPLVDRVVVCDRRAAPRQGNKADQVDADQLSEQLRRGGLRAVYHGSADRATLKELTRTYRNLVEDATRVMLRLKALFRARGIPAAGKRVYHPRARAQWLAQLQDPGARLRAETLYAELDVLRHLRPRAKAAMVTEARRDPAWPVLRAIPFFGSVRVALLLATMQTPWRFRTKRNLWAYAGLAVVTRSSADYAVVAGETVRRRRPPMTRGLNRNHNRVLKDVFKGAATAATARPGPLQDFYHSVIARGTREELARLTLTRKLAALTLRLWKKGERYDPTKLTTPAR

SEQ ID NO: 431687 - protein, 356 aa, unidentified
MSTATRVGVDLAKNLIQVHAVDSEGKVVTNRALKREKFLLWCADLPAGCLIAMEACSGAHHWCRKLRERGFDTRMIPAQFVAPYRIQGRSGKNDANDAAAICEAASRPHMNFVPPKTLTQQGMLCVHRLREGYKEERIACINRIRGLLAEFGVVLPQSAQVLKRHLSDVIEDANNDIAGMARLALQRAQEHWREIEAQIQWCDARILAHQKEDEQVQRAAELKGIGVITASAVVATVGDFRQFKNGAQFGAWLGLTPKQNSSGGKASLGGITKRGDNYLRTLLIQGAKAAVLTGKHNDDPISLWARRLHERSGWQKAVVALANKNARILWAVMTRDKRYDAHHISTPPTLITPATT

SEQ ID NO: 431688 - protein, 415 aa, unidentified
MALKIVYKTCCGIDVHKTFVVTCIASTNGKGATTYESHRFSTYTSGLKNLLQWLLQHNCKDACMESTGKYWIPIYNILENDCTIVLAHPKYVKAIRGKKTDKKDAKWIADLFKHDLVAESFMPPADIRQLRDLMRYRFKLTCFKSSEKNRLQNCLTVSNIQLGNVVSDTFSKSAQAILDKLLENPADTSFDLDPLVYKSLKKKLPELRDAIDGFITPEQAGKLKVIKGHFEDLESRKTELEELILALAAPYQQELVILQTAPGISSIFTAIGIISEIGTNMEAFPSAKHLCSWAGLTPTNNESAGKKKSVRVSKSKCYIKPLLVQCANAIITSKKHPEIRNRYLRIKKRHGHRKVIIAIARMLLTALYHMLKNGENYNAELYRKSDLPSIDRKITVEQALIIARNQGYRIKSATA

SEQ ID NO: 431689 - protein, 391 aa, unidentified
MDEEGKEMGYPIFPNTLPGAKALESHLLQLIKEKGFSTLKIATEATSFLDLHLVDFLACSPNLAPFNPSIYQINPKLVRNFKRAYSDKGKTDKIDAFVIADRLRFGRLPEPYESHQPYLPLRRLTRYRFHLIKAISREKAYFITHLYLKFSAFSLEKPFASLFGATSLALITEFSPDELVNLPIEDLTQFIIKNGKNRFKDPDKVVEALQRTARESYRLRPALSCSVNLILATILQTLRALEEALKEVDKAIEKEFQAFPNTLQSIRGIGPVYSAGIFSEIGDIARFPAEDALAKMAGLTWKPYQSGNFEAEETHMSKTGNEYLRYYLIEAANALRVHNAEYKAYYETKFQEVTLHQHKRALALTARKLVRLVFALLKKGQLYRANYQQEA

SEQ ID NO: 431690 - protein, 340 aa, unidentified
MKHSVIGMDIAKQVFQLHSVDSETGEVERIKLRRDEVLPHFALRAPALVAIEACGSAHWWARKLVELGHEVRLLPPRSVRPFVLRNKTDAADARAIWTAVQQPDTRFVAVKSETQQAILALHRLRAQLLKFRIMQTNALRGLLYEFGEVLPTGYAALAKALPAALAGLDARLPAMLVDSLREQWARVLRADQEIAAIERRLRIILRDTPSCQAVAEIPGVGLLTATAAVASIGEAKTFKSGREFAAWLGLVPRQRGTGGRVRQLGISKRGDVYLRTLLMHGARAVILRYRHVPWLDALLRRRPYNVVVAAVANKLARTIWAVLAKGKPYDPAAFSAVAAT

SEQ ID NO: 431691 - protein, 317 aa, unidentified
MNSKNNQNEINVGVDTGKTQLDIYIRPLDIYFTVTNDEKGIKEALKEIKKHKPKRIVIEATGRLEQAFIIACAKHELPFVIANPAKIKKFAGAIGQLAKTDKLDAKLIAYYSEALKPNLSTLKPATLRLMSDLMSRRCQLMEMRTMEKNRFQIMPKEITSSINPLLTVINNQLIKIDKKLHKLIESCDDYKIKNDIIQSVPGVGNVVAFSLLSNMPELGYITNKEAAALVGVAPINRESGSYEGKRMIRGGRHQIRTAMFMSMMSAMQCNPVFKATYQRLVAAGKPKKIAIIACVRKMVVILNSMVRDGVYWDPKMS

SEQ ID NO: 431692 - protein, 337 aa, unidentified
MENIFACCAGLDVHKESVEACVRRIEPSGRVHQETRHWGTMTRDLQAMADWLAAEGVTNVAMESTGVFWKPIFNILESRFTVLLANARHLKQVPGRKSDVRDCQWIAQLLQCGLLKGSLIPPRAQRELRDLTRHRTQLVEEKTRTINRIQKVLEDANIKLASVASDVMGVSGRAMIQQVIEGETDPHKLADLAQRQLRGKIPELEKALEGKLTDHHRFLLKMLWKELAQQEELIAELDSKIEEHTRPFAAEIERLDAIPGVDNRVAEVLLAEVGADMKPFPSDQHLSSWAGMCPGNEESAGKRTRKRITPGNRWLKQTLAQAAWAASHKVRKQTMGK

SEQ ID NO: 431693 - protein, 375 aa, unidentified
MSEITRGGIVRVGADLAKQVIQVHAVDAAGRRVVGRPVKPDQFLAWCTQLPAGCLVAMEACSSAHHWARKLRAMGLDARLIAANFVSPYRMEGKSGKNDMTDAAAICEAASRPTMRFVPVKTCEQQGILSLHRMREGLKEERTACTNQIRGVLAEFGLVFAKSPKVLRAVFSDVIEDASNELSTTARLVLQRAFEHWRELDEHIRWCDQQVGQHVRGSSEAKRAAEIIGIGNLGASALVASVGDFKQFKSGDQFGAWLGIVPRQNSTGGKASLGRITKRGDNYLRTLLIQGAKVAVMTAGKRDDPISRWLVQLAARVGWQKACVAMANKNARILWAVMTRDQGFDPKHVSVKPIAKQPAQPSAAPTLLAQTSCMA

SEQ ID NO: 431694 - protein, 456 aa, unidentified
MKSNKRGKTRRPLSTVHAGAAGLDVGSTFHVVAVPPDRAEDSVRTFRSFTGELHQLADWLKEVGVTTIAMESTGVYWIPVFEILETRGFEVLLVNARDVKNVPGRKTDVNDAQWLQQLHEHGLLRGSFRPQDRVVRLRAILRHRARLIEQAAMHIQHMQKALMQMNVQLHHVVTDITGVTGMKIIRAIIGGDRDPAALARHRDVRCKESTETISCALTGNYRPEHVLALRHALELYDFLQAKVAECDAEIQVVLQALNEDCKPPEAPMPSVRHAAGKNEPKFDVRGSLYKLLGADLSQIHGLGPYTVLQLVGECGDDMRKWPTSKHFTSWLTLAPGNKISGGRVLSSRTRRSSNRAAALLRIAAVNVGRTQTALGAFYRRLAARVGKAKAVTATARKLAVLFYNALRFGMAYTDPGANHYEERYRKRVLHNLQRRARELGYALVEGKPAEPVGGVS

SEQ ID NO: 431695 - protein, 395 aa, unidentified
MKKLSYSCGIDISKDSFTVAMKNETFIIKDKSFTMNKQGFDNFDNLIKDFKGDSLIGMESTGIYHNNLFDFLNNKGYNSVIVNPYMVHQFFKFTSNKPTKTDQKDARTICEFVELKKDELTQAKQQEKDERDQVKYLVREKEEITYRIAQTKTEIRRILSLIFPEIEKETGLFSQGLRTLLLEFSSAYSIRSLSKKDFIKKAIRLTSKAQGRDTILTPVKIYELAISSIAEKQYPFYEEMLKMKIKRLESFLEEKECITKLIDNEASKSFSKEIEILTSIPGIGRESAIYLMAELVDIKRFAEWKKLIGFCGLDPVIKQSGKFRAQCKISKRGNTHARRIIWIMGGSVKRSCPYFRDYYLKKRAEGKSYKEGVIATSTKLLRVIYALLSKERNFQ

SEQ ID NO: 431696 - protein, 355 aa, unidentified
MDSKKYIGMDVHKESISIAVMNGAGKIVMECVIETKASMILQLFDGLRGDLQVTFEEGTSAAWLYDLLKPHVSKVVVCDPRKNASMKEGNRSDKIDARRLAELLRLNHLNPVYHGEHGLRSLKELVRSYLTITKDLGRVMSRVKAIYRSWAIPCTGKQVYAPRHRAEWLGKIGEPGVRRRAEFYYQQLDALRTVRQEVRRELLAEGKKHQSWQRLCQIPSIGPIRAAVLLGILQTPHRFRTKRQLWTYSGFGIETHSSADHRSVDGQLQRAKKLISIRGLNRNCNHDLKNLFKGAAIVASSKPGPFQEFYAALLTKGIRPEMARLTLARKIATIVLMVWKRGVCFDAQHLKPQTA

SEQ ID NO: 431697 - protein, 338 aa, unidentified
MNLTTIGIDLAKSVFQLHGVDDQGQVKLRKTLSRGQMLRFFANLDPCLLGMEVCGSAHHWARQLRGFGHTVKLISPQFVTPYRKGNKTDGNDAMAICEAVTRSDMRFVPIKTTEQQALLMVHRIRERVKSERTALINQIRGLLAEFGLVIPQGAGALRRHLPGILEDAGNDLPSLARELFANLYQQLDFIDAQLQGYDSQIDAWAKNDAVCQRLLALEGIGPLTATALVATVGDATVFKNGRQFAAWLGLTPREHSSGGKYKRFGISKRGDSYLRKLLVHGARSMLRLTPKRTDKKSRWVEQLRARHHDNVAACALAAKHARIVWALMAKETTYQLVH

SEQ ID NO: 431698 - protein, 531 aa, unidentified
MEVCIMASSNKHSKLRACDEGRYTSDGLKNVTLDDGTRVITSPSNDIKRPVCGAVDVHKSVLMAAACVTDGESLSAVFYVRQFTASNSDIRLMAEWFASYGVQDVCMESTGKYWIPVYDILEHNGIKPILTHPKYVKQAKGKKTDFRDAIHIANLFRMDLVVASFIPPADIRDLRELCRYRLKLTYIRTSEKNRFQNSMTISKVRLDSVFTDPFGKSASDIMSYLIHTDPDEVSDEKILSFVRHGVKASPEEILDSIHGYEFIGAQRDKLEVIQTHMDDLNKCIGMIDEKLSYYRLKYSKVIRHLVTMIGISEGSALYILGEIGADMSVWRDSDSLASWAGLSPANNSSAGKKKTTKIGKGGHYLKPLMVQCALAAIKSTKKHPYFYYKYLTLKKRRGHKKAIIAIARKMLVAIYHMIRDDKDFAPIDYEQVVTRKQSQKELNLTNIIEFLGEHGVDPETIRTVETQCSQAGQAGEGTKTSKPKKSPQKKQPKSKTAATPTEQKPAKRRGRPPKSPQTKSQSSTQPAAVTA

SEQ ID NO: 431699 - protein, 346 aa, unidentified
MMIIGCDFHPSWQQISWLDTESGDCGERKLVHASGDAKMFYQQLAAPVLIGMEATGNSQWFVELVEDLGHVIWIGDAAQIRASYVRKQKTDKRDAAHILKLVMENRFPRLWTPDREQRDMRQLVLHRHKLVEIRSRVKNELQHLSMNKGMQKKRTLWSQAGQKLLRELPLKPWAACRREDLLGLLAMLNQQIGKLDDAVQTAAEENAQAKLLMTQPGVGPNTALAYVLTIGDVSRFRRGKQVASYLGLIPREHSSGGRQKLGVITKQGNRMLRSLLVEAAQIAVRFDPEMKKQYLHRCHRKPKGVAKVAAARKLAVRLYWMLRTNVAYPEIVRIESSPRVPLVGAS

SEQ ID NO: 431700 - protein, 348 aa, unidentified
MVHFVGLDVSVKATSVCVVDDAGKVILEQKVPTDPADIIAILTSLGVSFGRIGIEAGPLSQWLVNALTAANLPVICVETRHMKALLTAQQISKTDRNDARGIAQMMRVGLFKPVHVKTLVAQEQRMLLTSRKLLQRKLLDVEADLRGTLRNFGLKVGVVGSSRYEARVRELVEGFPRLAAIVEPLLSVRRVMRQQFAVLHKMLLDMVRDDLVCRRLMTAPGVGAVVALTYRATVDQPQRFVHSRAVGAHVGLTPKRYQSGETDYDGGVSKCGDALLRTMLYEAAHSLLTHGRQWSWLKAWGIRVAQRRGMRRAIVAVARRLAVILHRMWVDGSEFRWRKDSAAVPAVA

SEQ ID NO: 431701 - protein, 423 aa, unidentified
MREEKKKFKVLVGLDWADEKHDVKTLDAETLQSSSYVIENTHAGISEWIERLNSERCGNDVAVCMEHSDGFITGMLLDCAFITLYSLNPLMSTKYRQAFFPSMSKDDPLDAELLLELVNLHRDRLKPVVIDTEETRALEILCESRRNIVDDRTKCIQKLRAALKRYYPQACSFCGDDLSNDMACDFLLKWPSVELAKHTKTSTFRNFFYAHNCRSSKLIEERIANIKGSNSSLKYKLLNDSYALFVESYAKQIKVLNASIRKIEKSINDIYKKHEDEAIFTSLPGAGKVLAPRLLVVFGTDRSRYESASVVQAYSGIAPVMEISGKSKWVHNRWLCPKFMKQSFHEFAEKSIMYSLWAKAFFIDCQKRGMKHNAAVRALAFKWIRIIFKCWKTRTPYDESIYIQSLIKHGSPLAKHLIIADAI

SEQ ID NO: 431702 - protein, 422 aa, unidentified
MTGDGTHQETSAGTIGEPLVVGRESPMSTVGIDIGGRTHVVARCRDGESRADHEILRVAQSRAGFQGLDAWLDRQPDPVTLVVMESSGHYWMPLASHLAHRAVPVAVVNPLAARYFAKSRLGRTKSDPADARSLAEMAMRDAPAVRDPLAGVELRQAARFAMTLVQEQARILQRLHRLVELGFPELGEVFEDPTCLTAREVLRLAPTAAAARRRRTATLADANGSPGHRRLGPAKAQRLHDLTIDSIAVPELDAEVAFEVGLLLDRFDLLERQIGAADAHVASLLDGELARRLQTIPGVGPATCAALIAEIGDIGRFETFDQLLAYAGVHPAERSSGRKGANPETSWHMSKAGNAHLRAAAYRIAMVGTIHNPVIAETYRRKRAAGKSKMNALGHCMRKALSIVWGVWRNGADFDPSWGSRP

SEQ ID NO: 431703 - protein, 368 aa, unidentified
MNQHSTTVVGLDVHKATIVAAVLLPDMDRAMRTFTVENEPKAVERMVQSLASKGPVEFVYEAGPCGYQTHRQIAQSGHKCVLIAPGLIPKRPTDHVKTDRRDAENLARLYRAGQLTEIRIPTREEEAARDLVRAREDGLADRLRARHRLSKFLLRQGRVYRETKSWAIAHRVWLKTQKFEWASLQQTFEGYMQTLDDAEARLRTFDQQLQDMAQQETYRTSVGYLRCLKGIDTLSALTLIVEAQDFRRFEKATSFMSFTGLVSSEYSSGEKVRRGAITKAGNTHIRRILVEAAWCNRNGNVASRELLERRKGCPPEIVRIAQKAQQRLHRKYWRMLSRSKPHTVAVAAVARELSGFVWSIGQHFPAAA

SEQ ID NO: 431704 - protein, 320 aa, unidentified
MNKEQKYVGVDISKEYLDMAIVEPDNKWRFGNNAYGIGKAVERLKGLSPVFVVFEATGGLELSFWEALTEAGIEAAPINPRQIRDFAKAKGKLAKTDEIDAAVIAYFGQAMQPRSQPFPTTQEIKEMMSRRSQIVEMLTAEKNRLNWARSSRIKEDIQLHIEWLEREKDEVDKNLKQVINIDPAMREKSKLLQSTPGVGPIVSASLLTQVPELGTLNRHQIAALVGVAPLNRDSGQWRGKRSVWGGRSRVRSALYMATLVATQHNPVIRVFYQRLLDENKPTKVALTACMRKLLVILNAMLKNKTSWTTSIAQVSSIACP

SEQ ID NO: 431705 - protein, 408 aa, unidentified
MQVLYPRCAGLDVHKDSVVARIRCVSAPLHDEVKSFATTTAALMELSDWLSEHDVTHVAMEATGVYWKPVWHLLEGHFELVLANAQHIRNVPGRKTDVNDAAWIADLLAHGLIRSSFVPPAPIQELRDLTRTRKQLVREISQHSSRIQKILEDANLKLGSVLSNVLGKSGRAILQALIAGQTDAEKLADLAQGNARKKRAELVQALHGRIRDHHRGLLKVHLQLVEALEEALADIDATVGKTLAPIQTSARLLSTLPGVSDLTAQVMVAEIGVDMSRFPTSAHLISWAGLCPRSDESAGKRRSVRVRKGAPWLKVALVTAAWAAVRTKNSYLQAQFHRLRSRRGAKKAILAVAASMLTAAYHMLKNGVEYQDLGAEYFTRRDRSKVIQRLVRRLNDLGCQLQPTPQSA

SEQ ID NO: 431706 - protein, 415 aa, unidentified
MTDQLNIVCGADIHQRFLIATILCRDGRMWTNRFLMNINGLLTFKDWLMSYGCQKVAVESTGRFWIPIHMVLEGTVDVIVANAYKIKHTTKKKTDLKDSEWLAELCLNDMIEPSRIFPKEDRELRNLTRAREAYVRDLSKEKSRVHHILESCSIKLASVISDIFGKSGMYILNGLLSGTSIEVVLKGIPDKRVRDKKAEELREALMGKLEVSDIFLIRQSLQIITQLKIRIEELDVEIRSRIASRPMDLKIAMSIPGIGIVSAYTILAEIGNYMDFKKPEQLAMWAGIVPSVYQSADKLITGGITKQGSKHLRWILVQVAHAITHKKGGKLKKFFLKIRAKKGYLVAIVALARKVLCILHHLLVNQELYEEEGGAVQKDTLILKNDQKVPPIEDMIRYIVQAGYEVKKIKSEVGG

SEQ ID NO: 431707 - protein, 456 aa, unidentified
MVKRKKQSKMESKGSVTVGVMNPDAAGIDIGATELYVAVPAERDNQVVRSFGAFTEDLHQLADWLQRCRIKTVAMESTGVYWIPAFQILEARGFEVCLVNARHVKNVPGRKSDVADCQWLQYLHSVGLLRSSFRPVQEVCAVRSLMRHRDGLVKMASCHVQHMQKALTQMNVQIHNVLSDISGVTGLAIIDAILAGERDPAKLAELRDRRVKADKATIAKSLVGDYRPEHVFTLKQALAAYRSYQQLIGECDAEIERHLMAFESKAEASVPDQGKKNPPSRRPRANDPEYDLRSHMHRILGVDLTLVPGIGSMTASTIFSEIGADVSKFPTEKHFLSWLRLCPENRISGGKLLSSHGCGSANRAAQALRIAAQALHHNHSLLGTYFRRIQARLGGPVAISATAAKLARIIYHLLKTRQAYDETIFAENEKQHKERLERRLRNQAQVLGFKLIPAAA

SEQ ID NO: 431708 - protein, 411 aa, unidentified
MASQLQRAVPLETLLVAIDPAKVSHRVWLATGERGLIGEPVTLPAFREGVDELERLIASTGSASELVIGVEATGSLHRSLTTELERHFPGRVRLLAPSETKAARAQLGSRRFKTDDRDCAALVWLLRQGLGRPPEPPALEGLLGVVRHRRQLVAELKVLRQRLHGQLNALCPGLSAPQGHGRVLDLLRPSGQAVLACAAAFAGRPASVRSLLARAPGRLSHSSAVYWAQRWRRCLPPPSDAELRAERLALDLTRLQALLHALAAADAQSAVLLTQTDGQVLTSLPGVATVRAAAFAAHSLPIERYPSPEHLYSATGLAPATYESGTISRRGGISRQGLAEHRDALMAIAWGLSQAAPAFRERAHEYRARGFAPMQVRVALARHSCRLCHALLRNQNPYDEARYRQARRCGR

SEQ ID NO: 431709 - protein, 339 aa, unidentified
MYYIGLDVHKRTISYCVKDAAGHVHQEGKIGSTRRELDAWIKTLPQPRTMAMEATIFTGWIYDQLLPHAETVKVAHPLMLRAIAAAKKKNDKIDAGKIADCLRCDFLPECHMVSTEIRDRRRTLRYRNLVLKQMVQMKNRVSGLLMETGVSYNKQRLHKLGYFTELISSNDEVSESIRPLLKLSRETIMRSQKLDYALVSSLERDPLLAERLKRLRTIPGVGPITALEIGDVSRLQSIKQAISYCGLCSAERSSADKLVRMPISKQRNKPIQQTLVEAAKLAPRYSHELALVYERERQRGNKNRATLAVARKMVAYMLAVERRKQDFVPAEQLGGTAAA

SEQ ID NO: 431710 - protein, 387 aa, unidentified
MAQVNDLSRSLTAFDLISTLVVVVEMSKASWLVSGAVPGVERQPLKKLEPDATALLRLIERWRNEAVRAGRPISRIALAYEAGRDGFWLARWLIARGIEAHVIHSASVAVSRERKRAKTDRLDAAMLMRVFLGWLRGERGHCGMVAIPTMEEEDARRPSRERECLVNERSRITNRMKSALARLGVRGFKPHLRKAPERLAGLRTAEGTGLPANIIEEFRRDMARLALVREQINSIEKTRAERLKRAPDTGPHAMVRLLARVIGIGIETADMLVREILSRKLRDRRAVARYAGLTGSPDESGLKRREKGLPKAGNARVRRGLIQLAWRFLTFQKDSALARWYRARTEGPSGARKTTMIVALARKLLIALWRLVTTGEVPDGVELRPAG

SEQ ID NO: 431711 - protein, 306 aa, unidentified
MKQSVVYIGIDVPKTHLDVAWAGTFRRWPNERSGHAALVRWIKQSATPVQLICEASGGYEQALLESLEKSEVKVTLVQAVRVRQYARAAGILAKTDRIDAKVLAAFGSAMQPQPTSPLSAEQKRLRQYEAQRRHLSRTLIAEENRLAQLSCTELRTLSRSLISKIKTQIKTLDRGISDLIAQDETLCVKAQKLSGVGVRTAALLLAQMPELGQLNRRQAAALAGLAPFNRDSGSLRGKRAIFGGRPALRSGLYMAALSAARFNPILSNFYQRLRAKGKPHQLALTAVMRKLLLALNHTLKPPACTT

SEQ ID NO: 431712 - protein, 389 aa, unidentified
MGEAIRATVAYLGIDVGKRSHSACGLGEDGEVAFRSDLENRPADIDRLLERAGAGALVVVDQKRNIGALVLARAFAHGNPCAHLPGYAERQARGMFPGVAKTDAIDAEVIARTARGMPGALRPLAEEPEGAASLRILSSQREFAAAARTRAKNRLRATLLEADPALERAVDPSRGWHVAPPAEFGSAAGCSAAGWRRFSAAARRAGAPAAGARAPWESMLASAGSGRALPAGEDVAVRRLAREIAALDADVAELEGLVADSLAGDEVYECLLTVPGIGPKTAAALVTSVDVSMFRGHDELASYCGVAPADSRSGTSVRSTSPQRGGNKQLKNLLIFSCNSLIGTQNRFGRYYDECRARGMRHNKALKAVARKRLKVIYAVMRDAVPYAA

SEQ ID NO: 431713 - protein, 347 aa, unidentified
MKILALDLGKYKTIGCDYERESGQHRFRGSLTTPAALQQLVKEVKPDRVVIEVCNIAGWVCDLLREMGVAVQVANTSDDAWRWRKVKKKNDRCDALKAAQLSAVNQLREVHIPTIEVRQWRALIAYRQQLVRRRGKVKNHIRDLLLTEGQLLPRGAKCWTELGVARLEALAKPLAEVGLHELWRGQLHLELRQLRAVQAEIKLVEEKLDAVAANDPRIALLRTIPGVGPRLSEAIVALLDQPARFRNANQVSAYIGMVPKELDSGETVRRGPITKHGSRLVRSLLVEVAWAGLRHNAWVRQTYQRISGGKKSRKKIAIVAVGRRLLVRCWAMLRDGTSWQPPVASLV

SEQ ID NO: 431714 - protein, 387 aa, unidentified
MQKPHDNSKVCPAAFVQDSTVIAVIEMGLSSWLVAGMIPRVSREPLKKINPNAEMLLQLLYRWRDEAIAAGKEINRIAVAYETGRDSFWLARWLRARGIDAHVIHATSVAISREHRRAKTDRIDTAMLRRGFLGWLRGEPGHCSMAIVPTVAEEDAKRPHRERDSLVHERTSTVNRMKSILIQFGVRNFKPVLRKASEKLDAVRTPEGIALPPNAVAALRRHMERLRIINEQIKAIERARMQRLERDPADKMNAMVFLLVRIIGMGVETAEQLVHEILFRDLRDRKAVARYSGLTGSPDESGSKRREKGLSRSGNRRVRNILIQLSWRMLMFQPESALVLWYKKRTESARGSRKPMIVALARKLIIALWRYVNTGVVPEGFALRPAA

SEQ ID NO: 431715 - protein, 324 aa, unidentified
MQEVILGLDIAKNKFDGALLIEEKYYHKIFENKEKGYKELEEWIKKYEVENLHVCMEATGSYWEALAEYLYKQGHKVSVANPSAISAFAASKMIRNKTDKEDAKIIADYCLSHKPIEWKPSPKEIKDLQALLRRLESLKNLQQEEKNRLESAPEQEQVRKSLQKSIEFFEKEIKLIEKLIESHVDENPKLKEDKDLLTSIPGIGIITAINILAELVNLNNYTDARQVAAYAGLTPRHFRSGSSINIKPKLSKIGNSRLRRVLYFPAVSAKQHNPILKSFAGRLSSKGKHSMVILGALMRKLLHIAFGVLRSRQPFDPSFLSFSQ

SEQ ID NO: 431716 - protein, 392 aa, unidentified
MYIVGIDIGKNHHEASIVSPEGKQIGRSLRFATTHKGADSLMSFIFKNIGNSPCVFGMEATGHYWYPIYSFLKAKGYTIYVTNPIQSDSLRKMYIRQTKNDSIDSFLIAEVIRFGQFGTTSMADENILAMRQLCRYRDSVISSRTEIKLRIGTIMEQIFPEYEKQFSSLWMSTSMGILEKYLTPENIENAPIDELFEIIKDKSHNRLTKAKAISIKEAAADTFGIKIAQDAFSFQLKQLIDRMNFLDKQIEALDIEIMKYYEQFDCYLHTIPGIGMIAAAAILAEIGDINRFKSSSALVAFAGIDPTVRQSGEFSSTHNHMSKRGSPYLRHAIFLAATTCSFHNSPLNAYYKKKREQGKHHLTATGAVARKLTTVIYAVLRDSKPYEPKKFC

SEQ ID NO: 431717 - protein, 313 aa, unidentified
MENQTYIGIDISKRHFDLYVLPESKEYQFENNNQGIRQCLHRLCEARPKLIVMEATGGYEVALATELHLAGLAVAVVNPRQIRDFARAVGQIAKTDKIDARVIARFASTVEPPAKDVLDAKARQLKALVARRDQLVGMHVAESNRMEHAEDKDIVRSIEAVLKTIERQIIQVDSQIAEHIVQDPQLKRKADIIDSAPGIACTTASMLVTRLPELGLLNRRRIAALVGVAPMNRDSGTFKGKRMTGGGRRRIRTALYMPTLAAIRHNPVIREFYNRLLAKGKKKMTAVIAAMRKLLTILNTMVAKNQCWNPNIA

SEQ ID NO: 431718 - protein, 366 aa, unidentified
MKKSSTVRVNGNMIFKGHKLTIGVDLGDHWSCYCVLDEAGRIILEQKVATTPEAVKQAFAKIPRSLIALETGTHSPWVSRLLTELGYKVIVAHAQKVQLITKSSRKDDRHDARTLARLARIDPELLGPVRHRSAQAQIHLTVIRARAELVRARTALVNAARGLVKSYGQRLPKCGTQQVSRELGAGLHAELREVLEPLLKEIESLNERIQEYDVRMEKIARESYPQVELLKQVKGVGTQIALTYVLTLEDPHRFPKSREVGCFLGLRPGRRDSGESQPQMHISKEGDRYLRTMLVQGAHYILGPFGADSDLRRWGLKLAARGGKSAKKRAVVAVARKLAVLLHRLWVSGEVYEPLRNSDKALRAVA

SEQ ID NO: 431719 - protein, 408 aa, unidentified
MQVVHSCCAGLDVHKKSVYACVIRCDEDGKKQQQIRTFSTMTQDLLALGDWLKESGVTDVAMEATGVYWRPVWAVLEGQFELMLVNPHHIKAIPGRKTDVRDCEWIADLLQHGLIRGSFVPPTEIQDLRDLTRYRAELTQEQNRVGNRIQKLLEQANVKLASVASDALGVSGRQMIEAIIAGEDDPERLANMARLKLRKKIPELRLALNAKVRDHHRFMLREFLDEWKALGERIQRVEQEIDRRIVPFEHAATLWQTIPGVDRVTACNLVAEIGVNMDQFPTAHHLASWAGLCPGNNESAGKRLSGKTRNGNKWLRRTVCQAAWAVTRKKDCYLASQFRRIAARRGMKRAVMAVGHSMLVIAYTMLKTNRTYAELGGSYLEQINKDQLQRYYVKRLQRLGLTVTVSPA

SEQ ID NO: 431720 - protein, 316 aa, unidentified
MSELVYVGIDVAKNSFEVAVTDEVQTLSLSNDEAGHAELCQLLTPLAPRLVLLEATGGYEQDLALALAAAGLRVSVINPRQARDFARCTGKLAKTDRIDAQALRSFAAMLDAQGHEPRELADEQRRELTALVVRRRQLVAMLVAERQRLNVAHPKAKPSILQIMDAIAAQLHDVDGQLKEHIQAHHADLARLLTSVKCVGPTTANTLLAQLPELGQLNRKQITALVGLAPMNRDSGTLRGQRHIFGGRADVRRVLYVAALVGTRFNPVLKAFYAKLLAAGKPKKVALVACMHKLLVILNAIARTKSPWSPDLAKMA

SEQ ID NO: 431721 - protein, 348 aa, unidentified
MDDITTIGLDIAKNVFQLHGVDAQGQVVLRKALRRANMIAFFTKLPPCLIGMEACSTAHHWARTLMELGHEVRLISPAYVKPFVKRHKNDAADAAAICEAVVRPSMRFVSVKSEEQQATLMLHSARELLISQRTALMNALRGHFAELGMVVAQGARNVGDLLLILERMGQGSNEKALPETMRLALQPLATALIGIEAEIAKLDKEILAIHRKDAVSLRLASIPGIGPVTASFLSASIPDPGLFEGGREFAAFLGLVPRQYSSGGKPRLGRISKMGNRHLRKLLVVGAHAALYSIKNGKTKSPLADWARALLAKKSFKLVAVALANKMARIAWAIMTRAGHYQPNLATQ

SEQ ID NO: 431722 - protein, 341 aa, unidentified
MKNLFIGVDFSKEKVDVAIIFADGLTETAPRVFNEFKTTVSGYKQLVKWVEKNSYGIDPSLWLFCGENTGDYSKGLCNFLYGKGYDMWLENAKSIKDASGLRRLKSDRADASMIAEYAMRNHDKAVMYKPLSESLAQLRELFLYRQMVVRHRCSFQVRRGEKKLAMEKSPIKTMISQSGRHIVSELNKEVEKIDKRIAELIKSDEELTEVFTIVTSVPGIGTQNAICLMAYTDNFRRFNYDSRKIACYYGIAPFGKDSGTSVHSDPHVHYMANRQIKAMLTQAALAAVNFNPVMARYYMRLVERGKKKQVALNNVKNKLVHLVTAMVRNRQTFTPEYKISV

SEQ ID NO: 431723 - protein, 383 aa, unidentified
MTTETTLRKEYNAFQLHLYMAFELGQSEWKLGFTIGFGQKPRLRTIKARDLVALEDEIRAAKKRFRLPEDVPVLSCYEAGREGFWLHRFHQSTSIKNLIVDSSSIEVNRKAKRAKTDRLDARKLLTMLMRYHHGEEKAWSVVNVPSTETEDHRHLHRELNTLKAERTKHINRIKGFLTGQGVCISIADDFLPRLDTIRLWDGSPLPPGLQSRLEREFERMLLVNEQIKNLEAERRELIRNSTRPDVELVRQLMRLKGIGVGSAWLWVMEFFAWRHFRNRREVGALSGLTPTPYQSGDDSREQGISKEGNAYVRSIAIQIAWGWLRYQPDSKLTRWYQERFGHGSKRLRKIGIVALARKLLIDCWYYLETGLVPEGVELNQARS

SEQ ID NO: 431724 - protein, 348 aa, unidentified
MIAIGADVHKQQCTLAVQRPDGKLSMLPSMDNTRENWLDLLTQLPPEAQIALEVSTSGHFVMSVLEEAGWRDRAHWVHTAGIDSLRKQKTDRLDAQRLARKLSVMEQDPLPEAWFPPRPIRELRLRARQRCWVAVLRTRVKNRVRSLLQMSGLCAGTNPFTASGRTWLEKQKLSEATRESVEQLLRFHDFLTTEREKSETSLRGMEKDFPEIVRLQTLPGLGHILSAVIWSEIGELKRFHSPSALVNYTGLVPSLYESGERSVRGGITRQGPVWLRWALITAVNAATHGHNAFARRYRRLRRHKLPNVAKTAVARSIARCAYGVLKHGVDYQEQRWGRKAGIEMEQEA

SEQ ID NO: 431725 - protein, 351 aa, unidentified
MPILAEVVDAVVGVDTHRDTHHAAITDAVGACLSTLQITNTTAGFAELLSWILQHAPGPRVVVSIEGTRSYGIGLARAITNAGLQVIECEQPTHRARRGGGKSDSIDAHLAARYALTLDADQLPTPRADGDREALRILLGTRHELTVTTTAQTNRLRALLLSGEDADRSLSRVTLSDTVLTTLARRRLAPNADRSHTVRHREVRRLAIALREAARALKSNRQEISDVVDALVPGLIDIRGVGPVTAAQVIISYSHVGRVRSEAAFAAMAGTSPLEASSGRTTRHRLNRGGDRALNRAIHTIALTRMRSCPRTRDYVNRWTAEGKTSREVRRMLKRYITRQLYRTLTATTAT

SEQ ID NO: 431726 - protein, 347 aa, unidentified
MRKVAYLSMDVHARNSVMGDMDGNGNFRGNRFFITCENNIINALKTIKAKKKYLVMEAGPLSYWAAQVANDHVTEVIITDPRENALIYNSSKKRDKVDTQKLCRLLRLGEFKAVYRPENDQRAIFKAAVQHYLDLRDQLIALKQKIKAMYRQWGVIDVFTDSAYSAAGRDKFLKQVNHRPIYLQLQRLYALSDVTAAIKQEAQKSLQSLGRNYPEIKEFEEIPGMGSIGAHTFDAYIQTPHRFAKRSRLWKYCRLGVSDRSSDGKPLGYKRLDKSGIGELKALSYRAFISAMKGDNEVKRFYLNSLQRTHDRKHARLNTQRKILSVMLSIWKKGIPYRAELFLDPSI

SEQ ID NO: 431727 - protein, 365 aa, unidentified
MLHRLNSAETLIQRTTTEAPRLSMYYIGLDVHKETISYCVKDAAGRVQQEGKVGSTRGELDDWMKGLPQPWTVAMEATIFSGWIYDHLQSHAVEIKVAHPLMLRAIAAAKKKNDTIDAGKIADCLRCDFLPECHMMPPEIRDRRRTLRYRHLLVKQMVQMKNRVSGLLMETGVEHNKSRLHEVGYFGKLLATSAEIDASIRPLLKLSRETIERCQKTEYALVSSLQRDPLLADRIRRLRTVPGVGPITALTWALEMGDVSRFRTLRQAISYRGLCGDERSSADKVMRMPLSKQRNKHIQRVLVEAAKLAPRLSPEVALVHEKEKQKGNSNRATLAVARKMVAYLLAVDRQQREFIPTEQRRSRAA

SEQ ID NO: 431728 - protein, 427 aa, unidentified
MNGIEFNSIDRFRQFKKEIRGSKEHLIVGLDIAKRKHHGFFGDANGRTLLKGLIVENSAEGFRHLLTQARFYMDREGLRQLVFGLEPTSVYHKPLAEHLIEQGHLVVYATNEAIKKNRSLIDGRWDKNDTKDSANVADLVAQGKCHYYDLPELQLRDLRSLLLFRKRLKKQLHSCRVRIRNNLVAQYFPELDRFWNNAAAENLAIVGWFLDPGSIRQLSCEQFIAKVTTHNGGLRQQRRLRHIWEAAGQSIGCRPGPAMALEAELVVEMLQSVQAQLSRVEHAIQKIAEGFEEYDYLKSIPGFGPYVSAVALAAIGNPHRFENRAQLIRLAGFDLSANRSGEKSKAAVPVISKKGKADLRYALYQAALVASSLTSHFRAYYIRLLDGRQREQGIRTKMLVKIAAKMLVIAWTLMKRKESFNPAHIQA

SEQ ID NO: 431729 - protein, 386 aa, unidentified
MQAPTISTPITERISTIFVATELSQKTWLVTVHSPDKDKISRHKVQGGDHASLLALIDRVRDRAARTLGVTPAVASCYEAGYDGFWLHRLLMAAGITNYVFDPSSIAVDQRARRVKTDRIDGETMLRTLMAYLRGEPRVARIVRVPTPEQEDARRGTRERHRLIKEQTAHTNRIKALLRLHGFAVGNPRRRDWLSWLAAQRDWQGHAVSPRILAEIEREHARLMLVRKQLEALAQAPAVADLTPAAAEMTRRGELLLRLKSLGPAFATTLTQEVFYKDFRNRREVASYFGLAPSPWQSGGTNRDQGISKAGNPRARCSAVELSWLWLRHQPDSDLSQWFRQRTLNASGRTKRIAIVALARKLMVALWRYLTTGLVPAGAVLKPAET

SEQ ID NO: 431730 - protein, 401 aa, unidentified
MDPHLCVGIDVGYRAHRVGIAHPDGSILEEFDISHSDADFQEFFRRVEARRCELSLPVAVAMEGYNGYARPLDRLVREKGYRLFNVNNLKLARFKEVFPGAAKTDSIDTRKILELFRLKDQLPLAKDAIQEVVGAPAVNEKLKRLSRRRRHLVTEKMRVLNRMQADLQAVCPELLASTNDANNLWFLRLLIFRDDLRQLARLRRSTIFQIPGVGQKYARLIRDWQAKAQFSAEVEYVGPMIIQDARRILELRAQIHALDEAMADLAEQSEIARRLSTIPGFGKTSIAELAGEIGTLERFASEASLALYLGMCPLTRQSGQMCTARTPRQVNTRCKAAMMTTIARHIGCVPQSRAYYDRKRAESKTHNQAIRSLGRHLVRVIWAMLRDGRDYEIREDIHPTP

SEQ ID NO: 431731 - protein, 414 aa, unidentified
MGGVPVFSLLLFQGGVALSALYIGIDVSKDFSTAQAIDWKGNKCFYLELAMTADGFDKLLKAITAHGKDISQVTVAMESTGCYHINLFSFLTHKGIRCIIINPLLTANFARLSLRKTKTDKKDALTIAQFLLVHKNSLLKTDLSPDRQDLKDLAREHESLTNLIAGMKNDIRRMLQITFPELESVCNIFSETILDLLKQFPSARLIKIAKPNTIAKALLHEDNRKKISVSAEDIIKAAKASVASHGAAKEIILPEKISTLQYLIEKKVRMKKALVKACEDMMVEDIEIITSIGGISNITASRLLAEIGDYRAFSTYKHLIAFAGLDPSVHQSGKFEGISRISKRGNRHLRYIIYLMTTCVVRGDNIFRTYYQKRRAEGQPFKKAIMATAHKLIRVLFTMLSKRTTYKSKEVNAI

SEQ ID NO: 431732 - protein, 312 aa, unidentified
MNIVVSQIGIDVGKDELVVCIDQGKPFACPNTAKGCLEIIEKFPAGAEVHLEASGGYERLVRRLLSEHGFKVVVHNPLKSRRIAQAQGVRAKTDPVDAKLLSRSGHLLPQETVKRTERQQLADHSRAIDALKDMVMSLKQSQVMPELDSAAKQLYAEAILALQQQIDAAEKAFEARVKASDCAETYQLIQTVPSLGKLTARRCVCELPEDVMERSTGQIASYAGLAPIDNSSGKRTGRSRLGHGNARLKAAFYMPALCAIRHEAWAKDLYQRLRSNKKSHQTATVAVMRRLLIRAVAVLKRRTGWVLEAKTG

SEQ ID NO: 431733 - protein, 412 aa, unidentified
MEVLYPHCAGLDVHKNTVVACVRHTVDGTIKREVRTFKTITKELLALSEWLAAEGCTHIAMEATGVYWKPVWHILSDGDFALVLANAAHVKNVPGRKTDVNDATWLADLLAHGLIRSSFVPDQQTQEMRDLLRTRKQLARERSRHVQRLQKTLEDANIKLDSVISDVMGLSGRKMIEALIAGESDSEQLAQLAHRRIKATPEELCEALRGRVTRHHRFLLNVHLQQIDAIDAAINTIDQEIDAHVEPFRDTVLLLTTIPGVDELGACVILAEIGRDMSRFPTAGHLISWAGLCPRNDESAGKRRSTRMRKAAAWLKTTLVQCAWAATRKKASYLQAQFHRLRARRGAKKAIGAVAASILTAAYEMLKTGTLYEDLGCNHFDKSGKGKQIHRLVSRLRNLGYAVQITPLPAAP

SEQ ID NO: 431734 - protein, 338 aa, unidentified
MTDIKYCVGVDIASSTFMVSVGEMPWKVLLKPQGFENTEDGYQTLLAWFAQHHLSASETVVCMEATGVYSEGLAYFLYAKGYRVAVQSPLEVKRTFKPYGPKSDAVDSLQIAEYACRHTDKLSFWKPRSKILEQVKALLAVREQFVAQNTAHKNALKAIQRKVVRTPFAEEAYLQLIEQIKKQIQAIDTEVRRLIESDPTFKEMLLLLLSVPGVGLLLAAHFILLAQFSLEYKVLASFLGISPNEHSSGSSVFKHATSRHFGPPAVRKLLYLAACSVCTHRSQFGLYLARKTKEGKPARLVLNNVENKLLRIMCAVLQSNTAFIDNYHSVQPLVLKKA

SEQ ID NO: 431735 - protein, 346 aa, unidentified
MTMLEARRVTGGVDTHLDVHVAAALDALGGLLGTESFEVNPAGYQSLLSWLESFGAVGKVGVEGTGSYGAGLARFLRQHGVSLIEVDRPNRALRRRSGKSDSLDAVEAARAALSGRAKSVPKSKDGAVEAIRVLLVAKRSARQARVKAVTQVRHLVITAPEELRRRMKGLSVSALVEEGAKLRPSRSTDPVVAATKAAISSLAHRIQALESELDELAEMINALLVATAPDLLAMFGVGPDTAAALLVCAGDNPERLRSEASFAHLCGAAPIPASSGKSIGRYRLDSGGDRQANSALWRIVMVRIAHDPETTAYFERRVKEGRTKRDVIRILKRYVAREVYHHLPRG

SEQ ID NO: 431736 - protein, 409 aa, unidentified
MKQQCDRVAGLDVHRDSVVACLRLGRGDEPELQRRKFATTTRGLTELGAWMADFEVTRVVMESTGVYWKCVYYQLENVFSEVWLVNAGHVKNVPGRKTDVADAEWLADVAAHGMVRPSFVPPPPVRELRELTRYRKTQITVRAQEIQRLEKVLQDAGIKISSVAARVLGKSTRAMIEALIAGERDPAVLAEKALGRMRPKIPALTDALVGRFAAHHGAVAKAILAHIDFLDAAIATLDEEVANRLGPFRAAVTLLETIPGVGRAVAEAIVAETGADMARFPTPAHLCAWAGIAPANHESAGKRRPAGTRQGSNWLRRVLIEAAKAASLTKGTYLSAQFRHIAARRGANKATVAVAHSIMYAAWHMLTNGEIYNDLGPDYFARRNTQVETRRLVQRLQALGHTVTLTPAA

SEQ ID NO: 431737 - protein, 327 aa, unidentified
MKISVGVDVSKDTLDVAFVGKNIAQRSFSNSEWGIGSLLKIISEQVETEIVVTMEATGVYHLNLAVHLLEAGLTVSVVNPLIIKRYGEMKMLRAKTDPVDARMIADYGYNQEPILFVPKPRKCQQIVGFLNVIEDYLGIKTQNTNRLESLQFQPERQIEIIDSIKRINGQIDREIKVIEKMIHEVLIENNKDAYNHVMSIPGIGKRTASAMIGYFNHFENFETAKQVSSYIGINPSPYSSGSSVRGRGSISKKGNGYLRKLLYMAALSASRSNEQCKNLYKRLLAQGKCKKVILIAIANKLLRQIFAIIKFRRDYSSNYEPVFSKVD

SEQ ID NO: 431738 - protein, 369 aa, unidentified
MSQSVKYVGLDVHKDTIAVAVAQDGKHCEVREHGEIANTPAALTKLVGRLGGPGVDLHICYEAGPCGYGIHRQVTAAGHSCAVVAPSLIPRRPGDRIKTDRRDALKLARLHRAGELTSVWVPDSAHEAMRDLVRARLAAVRSLRHARQQLSGFLLRHGHHYHRPAWTQMHRRWLSGLRFAEEAHHIVLEDCIATVDAAKERRDRLTAQIEKRLADWALAPVVEAMQALRGIALVAAATIVAELGDITRFSRAEQFMSYLGLVPSEDSSGKRRRQGGITKAGNGAARRMLVEAAWSYRFPARISREQLLRQEHLTAPIRAIAWKAQERLCLQYRKLSRAGKPITTVTTAIARQLAGFVWALAHEVSMPTA

SEQ ID NO: 431739 - protein, 338 aa, unidentified
MKVHIGVDLHQRFCYLTAVDARGKLLRQGQVANQPAALQQWLGGLERPRQVVVEASGFWPAFQRAVRSQAERMVMVHPQRVKAIASAKLKNDRVDAATLAHLSRCDLLPEAWMADEATQQLRLRVRLRIQLGRQRARAKNQLQAVLHQEGFIKPVTDLFGRRGRAWLQSIGLSAAARMVVETWLREVDRLDAEIALQARELEKLAQGDVRARWLETVPGIGAYSAMVMLAEIGDVARFRNKQALASYAGLVPVVRESAGRKKRGGITHQGSNTLRWILLQVAQVACRHSPAVRAWYTELRRRKPAQVARIAVARRLLCVAWALLRHGVCFDEQLFARS

SEQ ID NO: 431740 - protein, 344 aa, unidentified
MNEVITIGIDLAKNVFQVHGVDASGKTVIRRQLRRRQVVPFFRKQSPCLVGMEACATSHHWAREIMALGHEVKLMPPHYVKPYVKRGKNDAADAAAICEAVTRPTMRFVSVKGREQQSVLMLHRTRELLVRQRTMLINAIRAHMAEFGIVAPVGIPRVKELFAVIADADDDRLPSLARTCLESLARQFLSLDHEIHAAEKRIHAWHRSSEVSRRLETIPGIGPIIASALAASITDPEVFKNGRELAAWIGLVPRQNSTGGKQRLGKISKQGDQYLRWLLVAGAMSVVRHAKRRGTTNQAWLADMIARKPTKVAAVALANKNVRIVWALLRHGGTYQKPATVPAA

SEQ ID NO: 431741 - protein, 454 aa, unidentified
MAKRREKRECRAVVLEPDAAGIDIGAEEIYVAVPPDRDEESVRRFSSFTCDLHALADWLEQCGVRTVAMESTGVYWIPLFQILEARGLEVYLVNAHYLKSVPGRKSDVSDCQWIQYLHSVGLLRASFRPSIDICAVRSLWRHRGSLLQMASEHILHMQKSLSQMNLQIHHVLSDITGASGQAILDAILGGERDPVQLAQLCNCRVKSPREKVAKALEGDYRPEHVFTLKQSLDGYRYYQKLIAELDREIQRLMQTLPSAIETGQQIPQRTKHSAFQRQGNDPGFDLRGQLYRIAGVDLTDIPGVSAITAQVILTEIGPDLRRFRNASAFASWLGLCPENRVSGGKVLSCKTRKVKSRAALALRLGANSLCRAKGYFGEFFRRMRAKLGTAQAITATRHKIARVLYPVLLTKEPYAETILHKSDEHARRRAEMRLRKQAAPLGFQIIPVPADSAI

SEQ ID NO: 431742 - protein, 414 aa, unidentified
MEVMHPRCAGIDISKKDAKVCIRVQGRGSRSTASTVTTWGAMTGQILDLKEHLLKERVSLVVMEATSDYWRPFYYLLEDEGLNVILVNARDARNVPGRKTDVSDAAWLADLGAHGLVRASFVPPPPIRELRDLTRARTVITRERTREIQRLEKLLEDACIKLSSVASDITGVSGRLMLQALIEGQEDPAVLADLAQRRMRSKIPELTDALTGRFGSHHRYMAELYLHRIDAHTADIEDLGARIEEAMAPFRFARELLISIPGFSTTVAEIFIAETGADMTVFPTAGHLASWAGTSPGSNESAGRVKSTKTRPGNRYLKGALGIAALSAARSKNTYFSAKYSRLAARRGPMKALVAVEHAMLTAAWHMLTTGELYKDPGADYFRLQAPAKTKARAIGQLESLGYQVTLAPLQPTG

SEQ ID NO: 431743 - protein, 412 aa, unidentified
MKYYTSTTEYNCGIDLHARQMYVCVMDRQGKKLVHTNVLNNDFEYFLKLIEPNKHDLTVCCECMFGWYWLSDACHKAGLPFVLAHALYVKAIHGGKNKNDRIDSEKLTHLLRSNLIPPAYVYPADKRPLRALLRQRVFFVWRRSELLARIYSHQLAHNRTPARQTRRVRDTWEEALLAAEDHPLRQITLKNDLAMIKHFDHQIFQLEEELQRQTKKVAGRDYELLQTVPGIGESLGQTILYEIGDIQRFPTVKDFLSYCRPVKGTVASAGKIKGLRGAKLGNPYLRWAFGEAAVIAKRDHYLVGPLSQRLEQQMGGNKFKSNTVVAIKLARAVYFMLKNKTVFDPERLVTSMQKCFSPGRRQPAGLTGCAKKARPLPAADHASCASSTPVCVGPASNPAASIGTCGQALPPI

SEQ ID NO: 431744 - protein, 371 aa, unidentified
MDEFTKTLYVGLDVHKESIAVAYAPEERGTDVVSLGAIGTRQCDIDKLIRKLQSKSATLVFVYEAGPCGYWLYRYLTRQGFSCRVVAPSLIPRRPGDRVKTDRRDAVTLARLMRSGDLSAIYVPTIEDEAIRDLSRGREDAMRDLKAAKYRLKAFLLRQDIRYEGRANWNAAHLRWLSELVCPTSAQQIVFQEYVRAVTEQHERVQRLDTELREHVTRWRLSPVVEAIQALRGVELTGAVILIAELGDLTRFDTPRQLMSYLGLTPSEYSSGDRRRQGGITKAGNSHARRALVEGAWAYRYPAKVSRHLQLRLERLPVEVQAIGWKAQVRLCKRYRQLIARGKHANQVVVAIAREMAAFAWAIARTVHVAS

SEQ ID NO: 431745 - protein, 315 aa, unidentified
MQTAIGVDVGKDEVVIAYANGGAQPFALRNQRPALKAWLKAVPKASNIGVEATGSYHELIANLAFKAGMRVFVLNPKDTRHYAKGVGRRAKTDRVDAALIARLIEREHDKLKAYVPPTKEQAALSCLLKRRQTLIIVKGSVRQSLTGVTGLESELTALLNRMDRLVAFMDARIATLIAENPQRAEGDKRLKTIVGVGPVVSAGLTCALERIPFKSADAFVAFTGLDPRPDDSGKRQGRRRLSKRGPALLRRLLFTAAMAANKTKTWQPIFAHYRAKGWTPTALLVIIARKIARTAWSIYHHHTIFSPERLTKCLT

SEQ ID NO: 431746 - protein, 408 aa, unidentified
MNAVGIDVSKGKSMVAALRPMGEVALLPQEFLHTEVGLEQMAYAIIALGEDTRVIMEATGRYHEPVAAALHEYGIYVCVLNPLFIKQSGGGSIRKVKTDKADAMKIAKYGLDNWVDLREYTPMDTVRQQLKLCSRQYNLYMKTVVSLQNNLISLTDKTFPGVNELFSSPERADGHQKWVDFVMTFYHCDCICRVSENAFAERYQKWCKRKGYHYSAEKALDIYAGSCGHFTTLPKNDNTKLLITTAAQQLLAGKMTLAALRTEMTRLAKQLPEYDIVRAMYGVGETTAVQLMAEIGDVRRFPRRSSIVGFAGVDPAVDQSGKHSAKSVPTTKRGSPHLRKTLYQIVCTYLKKSPVDEPVYQFLDKKRSEGKPYFVYMTAAQNKFLRIYYARVKECLEAFDAQQDTSQR

SEQ ID NO: 431747 - protein, 341 aa, unidentified
MNKFNTISIDLAKSVFQVAVFNRHGKRKLNQAMSKKKMLTVISQHPGATICIEACAASHYWGRTFQSRGHTVKIIPPQKVKPYRCGNKNDANDAIAIYEASLRSDIHAVPVKTPEQQDIAMLLSLRQSYIKQRTAVSLRIRGYAAECGITFPQGANKLRELLPLVIEDAENELTLTTRFVLRELHAQLLSLDEPIERVESQLIDFAKQIPACQLLITLRGVRWVIASAIFSRLGDASAYRNGRGASASLGLVPAHTGSGGKNKNHGISKSGDKTLRSLVVHGARAVVANIRDKEDRLSCWIRNLLERKSFNQVVVALANKTIRMACAMLKSNRSYNETLLA

SEQ ID NO: 431748 - protein, 336 aa, unidentified
MFQLGIDVSKKTLDLCLLREGVKGSVKTRKLQNDINAVNAVIAWLSKQHCKPEDVHIIMEATGVYHESLAYGLHKAGGRISLANPHRAREFARGMGMLTKNDRVDAYMLACYGALKAPEPWLPPPEEVRHLSALLRRRDALVADSTREKNRLEKYLATDTPSVIAESVEAMIGQLNAEIKRLDRLIRSHLNHHPELKKDFDLLTSIKSVGYQLGLNMLVILRSHDFATAEQAAAFLGVVPVEKYSGTSVRGCPKLSKIGPPEIRAKLYLASLCGLRFNPLMKAMYERLCLRGKGKMCAIGALMRKLVHWCYGVLKTQKPFDVGYLSSYARSACKAA

SEQ ID NO: 431749 - protein, 340 aa, unidentified
MQAIRFGVDLAKSVFQVHGVDAQDRVVVQRQLRREQVLRFFAKQPPALIGLEACGSAHHWARELGKLGHEVKLMPPAYVKAYLKRNKNDARDAEACCEAVSRPTMRFVPVKTVERQCARAIHRGRDLLVRQRTQLANAIRGLLYELGETGAKGAAGIGALLTRIEAADETLPAAMLACLTPLASQWRALDAAIEAYDEQILAEVRQDAAALRLMKIPGVGPITAHAVIAAIGDGRQFASARDFAAWVGLTRKNHDTGGVARLTGHISRAGDQGLRRLLALGASAWLRQVRVKPDKGSAWVQGVLARRPIKVAVVAQAAKTARIIWALLTSGQDYRAPAAA

SEQ ID NO: 431750 - protein, 375 aa, unidentified
MNNNNTLYVGLDVHKESITVAYAINSEPVELMGKIGTSPTDIQNLCKRLRSKSSQVSIVYEAGPCGYGLYRRLVKSGFDCMVCAPSLIPKKPGERVKTDRRDAIRLVRSLRAGDLSAVYVPGIEDEAFRDLARAWASARDDLRHARQRLKSFLLVHGVHYVGRADWGPAHRRWLSKYSFESPWRQLAFDEHRRTIEDRQAQCERLESALKEAVTEWRLYPVVEALQAMRGIQFITAVGLISELGDLTRFEHPRQLMSWFGITPSEYSSGGSRHQGSITKAGNSYARKLLVEAAWSYRHPARISPAIQKKQENLPRPVIDRAWDAQLRLCKRYRKLQAKGKNVNITIVAVARELAGFIWDMGRIAMSVAQQPQCHK

SEQ ID NO: 431751 - protein, 450 aa, unidentified
MRRPQVIDDEDHERVHERVAAIDVAKDSGMVCTRTPHPSRPGARRSTVWTVKARKNAIGALGRQLVRDGIEVVTLESTSDYWRIWFFVLEMCGLAVQLVNAAQAKNLPGRPKTDKLDAQWLARLTEMGLLRASFVPPKPIRDLRDYTRARTRLVQERTRCFQRLEKLLEGALVKVSSVASKLTTLSAQDMIKAMIAGQRDPKTLAGLARGKMKAKHDDLVEALDGMFDDHHGELAGLLLEQIAFLDDRIAALSARAAELAAAMPAAWGINADGTTGPDAGAGPDAPALNAVARLAQIPGIREDQARTIIAEVGLDMSRFPTAAHLVSWAGLCPSARQSGPRTRAGKKGQGNAYLRGALGQAAIGAAGTDTFLGERFNRIARRRGKAKAQVAVARSILVIIWHLLSDPAARFTDLGYGYYQARTDKDKKIKNHIRQIEALLGHPITITKAA

SEQ ID NO: 431752 - protein, 362 aa, unidentified
MNSTPLIAFDQHAATTIAAVLLPGQRTPALHSLTSDTPTILRFVKRMVARHGALQCCYEAGPCGFELQRALSQHGLGCDVIAPALIPRRPGDRVKTDRRDAGHLAVLYRAGALTAIHIPTEQEEAARDLLRCREDIRADLLRARHRLSKFLLRHGRRFTATKKAWSKRHETWLRMQTWPLPALDQTHRAYLRAVEETVARLRAVEEDLRALLTLEPLQARVQRLRCFRGIDDLTALTIAAELGDARRFATAPRTMAFVGLIPSEHSSGTKQARGAITKTGNAHLRRVLVESAWHYRHHPFVGDTLRARQRGAPAAIIAQAWTAQQRLHRRYMRFAARGKPKQHIVTAIARELTGFVWAALTH

SEQ ID NO: 431753 - protein, 343 aa, unidentified
MNVYIGLDVSLASTAICVLGPQGRIVEELQAVSEPEALVHAVGSLPYTVDAIGLEAGPLSQWLSKGIEEAGFEVVLMETRLVKAALKAMPIKTDRRDAQGIARLLQMGWYRPVHRKSVSSQEIRALLTARKSVQQAIINLELSMRGVLRNFGLKLGHVTRIRYEARVRELVEQNDILSASALSLLRAREKLRAELASLDTKIARLAKHDDVCRLMMTMPGVGPIVALTVRSAIDDPNRFARSKDVGPWAGLTPRRTQSGEMDIVGQITKTGDRGLRTALYQAAMILIHRGAPNWLQSWALKVAHRRGAKRAVVALARRIGVVLHRMWKDGAPFRYTQSSSATA

SEQ ID NO: 431754 - protein, 429 aa, unidentified
MNNFINNFVVGVDISSKSSVITILMPGGESYGKKLNITNDLKGFTELLITLKKVEKQFSKRPEIFMESTGLYHTPLYNYFSKNSYKCYIINPIHTKNFAKQSIRKVKNDKVDSLRIAQLAQSPMFSTESVFDENTFLLKKLCREYDSLVSNAAQYKKKVNSLLNLVFPKFNEIFSDAFSPVPLALLSKYPTYVDFLSATKSDVITLITSTVNHSTEWADKRYNLLFKFAKEAELLKLPVDCLGIEIVCFINLIYSFKTAINKLKEEILKFSVIIPGFKENVELLCSHPEVGKISATILLAEIGNIKNFSNAKKLVAFLGVDTSVSQSGAFTSTHNKLTKRGSNLARKVLYNLSLASIKSFRNGVPANPVLLAYYKKLTTSKAKKIAICAIMHKLINHFFAILRDKKTFELRLPETHKKLYLERHLEIVI

SEQ ID NO: 431755 - protein, 433 aa, unidentified
MLKLNYMSTLFVGIDVSSKTNAVYAMDFEENKYISSSFGNNQPGADQLVNMIAECMQKHKNLDTILIVLESTSVYSVHISNFLSASEVLMPYRPYVFCVNPKAASNYRKSYIGMEKTDPTDAYLIADFGRVGRTKKLEPWRGGQFISLKRLTRHRMHLSECITREKTYMVSNLYLKFSELQLLEGDDKPFGSLYGATSSAVLTEFLSPQEIIDMPEEELLTFLAGKSRNRISDLSKTSELLRKAARDSYRLDKCMYEPLSISLASSFNCIHAYQKEIKLIEQAIEKCINGMNPNALLILQSIPGIGPIWASGILSEIGDITVFHSSDALAKYAGLYWPKGDSGDFTSEDNKMSKAGNPYLRCYLGEAANSVRKHIPEYADFYARKYAEVTKHQHKRALALTSRKLVRLVFGLLVKNQLYTGEKLDTEYNIESN

SEQ ID NO: 431756 - protein, 339 aa, unidentified
MAIVGGLDLHRKQVTFDVVDTATGAYERGRIAPADRESFRRWLADFQSRPMDLAVEGCTGWRFVVEECQAAGARAHLAEPADVAGLKGRRQHAKTDRLDARHLRELLEAGKLPECWIPPRHVLEIRAKVRLYKDLLEERGGRQQRIHATLFHLGAPAQPDLLGPDPDRLARLEALSPATRQATAVALRMIDALDRELTALRAELVAFGRRQPGCKELQHEYGIGALTAVVIWSELGDARRFANSRNAVRHTGLDISVYSSDGKCSRGHLTRQGPPMLRWALYEAGRCAARQTSSDHAYYEQVAARVGKQRAALSVARKLARRCHHRLRALGDDALAPVA

SEQ ID NO: 431757 - protein, 346 aa, unidentified
MALYVGLDVSLRTISICIVEAKGKVVWEGRVLCEGPALIAALAPYRKKIKSVGIEAGPLSEWLFGILTECHFNAVCIEARHAHRFLSSRPNKTDRNDARGIADMMRLGHFKAVHVKSRASQLLRTMLAARKTFVDHMLEIEQAIRGFLKVYGLKLGQVHRYNFSAKVKALVANTPELAAAIAPLLEARDMMRKKKKEIDRELEKRARQDTVCQRLMTIPGVGPIISLVYKATIDDPARFRSSRAVPAHLGLTPRVYQSGEMDRSGHISKCGDGLLRHCLYEAANAHLRVTRKWSALRAWGVKLAKRVGSKKACVAVARKLAIIMHRMWREDIDFQFGTAPQRPAKA

SEQ ID NO: 431758 - protein, 411 aa, unidentified
MDRIYDNCCGIDVHKKLIVACFRKGNKQEIREFGATTRELLEMADWLKDGGCEMAAMESTASYWKPLYNILESSGLNAMVVNARHMKAVPGRKTDVRDAEWIADLLQHGLLQPSYIPDKEQRELRELVRYRKSLVGERTRELNRLQKMLEGANIKLSGTVSDINGKSARNILEYLLTGASVDGPKYDEMYEQKIIAHNLKATKEQIIDDLNGVMSPLQRRMMKELLAHLDELNIHIKNLNDEIDNFMKPEEKQASHAIQDVTGIGNTSAQAIISVIGTDMGRFPTDRHISSWAGLCPGDNESARKRKSGKTRKGNSLLRTTLITCAHSAVKNKKSYFHAQFMRISSHRGKKRAYVAVAHSMLIAIYHILKDGVVFKDLGADYYNQFNKERKINAYLKKLKALGWEATVVAA

SEQ ID NO: 431759 - protein, 350 aa, unidentified
MRYAQINSKYVCGIDLHARNMYACVMNEKGEILFHRNMRTDFDQFKKKMTPFLSDMTVGVESTYMYYWLADACREKNIPFFLGHAFYMKTIHGGKTKTDRLDCRKIADLMRTNYYPLAYDYPKEMRATRDLLRRRHRLSRLGAECYRHIQFLFHQQGLSVNPNDIKNVKTRHDHVLSLLDPDIRSNAQTDLDMIEFLTPKIKLLEQQIRAKAKCHDRASLNILLSVPGIGDIFSLIILYEICDINRFQSHQKFCSYARLVKCERSSAGKHTKGGNQKIGNPYLKWAIADIIIHAANKSKSIGEFYQKLQSRFGKRKAKSVISHKFGIAIYYMLKNKQVFDEKRFLQTNMK

SEQ ID NO: 431760 - protein, 345 aa, unidentified
MLADELDYVIGVDSHRDQHALAIVDVRGVLAGESELRADGGGYRRALRLVERRAPGRRLWAIEGTGSYAAGLARFLVARGERVLEVERPRRTGSRGRLKTDPLDALRAARLVLAGEALAEPRRGGRRESLRALLTAREGTMQAQRAALCQLRSLLVLVDEPLRSQLRRLGRPALLRRCAQLRPRASDDRYGQLLALRACARRALALSREAAELKDAIQAEVAQLAPSLLTERGVGPISAAQLLVSWSHRGRIKSEAAFARLAGAAPIPAQSGNTTRHRLDRGGDRQLNRALHTILLSRRRHDPKTIAYLQRRQHNGKTTREAVRCLKRYLARTLYRHLEAMPTPT

SEQ ID NO: 431761 - protein, 385 aa, unidentified
MPKLNDLSRSLTHLDPDGTLIAVIEMSQSSWLVAGIVPGLERQPLKKLAIDESALLKLLNRWREEAEKAGRKIERIAVAFEAGRDGFWLARWLRARGIEAHVIHASSVAVSREHRRAKTDRLDTELLKRAFLGWLRGERDHCKMVAIPTMEDEDTKRPNRERESLVGEQTRIVNRMKAALSRLGIRGFNPKLKKAAERLEDLRTPEDKPIPPNTLAELRRDMERRRLISDQIRQIEDARLERLERMPNEGPHAMVRLLARVIGVGIETADMLVQEVLSRTMRDRRAVARYAGLTGAPDESGAKRREKGLARSGNARVRRGMIQLAWRFLIFQKDSALAQWFRARTENARGTRKTMIVALARKLLIALWRLVTTGEVPPGVVLRAA

SEQ ID NO: 431762 - protein, 407 aa, unidentified
MVVHVAAVVSSAGVVVAVDVGKSSFAVSVTDGSRRRLFGPVDAPMTAPGVRDVVARISGVLPDDPVVVKVGVEAAGHYHWPLLTATAWPQHWEVLELNPAHVTEQRRVQGRRRVKTDAVDLEAITELVLTGRGVPIGARGIATGELAAWCGHRARRVATRTATKNQLLGQLDRSFPGLTLALPDVLGTKVGRLVAAEFADPARLAALGTSRFVRFAAARDVQVTRSRAQRLVAAARDALPLPGAPVARRVLDEDLALLADLDTQISGADAELARLLPATAFATLPTVPGWGVTRAAKYGAAVGDPVRWPGPRQLYRAAGLSPAQYESAGRRRDGGISREGSVELRRALIDLGIGLWHCDPPSRAYAAGLRARGKHGRIIACALAHRANRIAFALVRDHTGYNPGRWA

SEQ ID NO: 431763 - protein, 347 aa, unidentified
MSLSLCFILKSEVMKFSFFIGVDISKKTLDFAVRDQLKLLFHLKVENSAAGLKEVKAECKAQGVDLKQSLVCCEHTGLYSQCLLSLLAGEECSLWLESSLRIKRSIGLQRGKNDKIDAIRISDYAFRYADKALLWQPEREVVLEIKQLVSLRKRLLNAKNALKVPLGELAGFENKKMLKELEKLNKKPVEALEKQIAEIEKKIRSLVKQDEVLKNLFALVTSVDGVGEVIFWEVITSTNEFKIFKCPRKFACYAGVSPFEHSSGTSIRGKTRVSQFANKKMKKLFHMGAMAAICKDGELANYYFRKVEEGKSKMAVLNAIRNKIIHRIFACVRDNRKYEKNYTTVLV

SEQ ID NO: 431764 - protein, 421 aa, unidentified
MEEVDELDQIIERVAGVDLGKAGLVACVRVPSDRPGRRQQEVRSYDTFSRSLLELADWLRAERVTLVAMEATSSYWKPVFYLLEAEGFDCWLLNPKHVKHLPGRPKTDTLDAVWLAKVVERGMCRPSLVHPAPIRQLRDLTRYRRTLIQDRTREKQRLEKLLEDAQIKLSSVISDILGVSGREMLEAMIGGQRNPRVLAQLARTRMRTKIGVLEEALTGHFTDHHAFLTRTMIDRIDRISADVEKVNAAIEEAMAPFRAAAQRLDEITGIGIISAQELIAEIGVDMTRFPSPGHLVSWAKFAPIAHQSAATTGYGSTGKGNPWLAGTLGEVVAGLSRTRTFLGERYRRLVRRRGKKRAITAVGNSVLKIIWHLLSDPGARYQDLGQGYYADRYTTQRRRRTLIRDLERLTGQHVTLRPHAA

SEQ ID NO: 431765 - protein, 416 aa, unidentified
MKLFVGIDVSSEKLDVCFLTDDNQLSILSEISVANDIEGASFIRETILEFNDSYHFDQIVIGMESTSMYSFHPSMFFHEDEKLKKLNTLVTIENPFRVKQFSRMFDENKTDRNDALRIADFLRIQRFTTSPIKEEKYMALQRLTRTRYQLIKQLIRTKQHFLENLTYKCNTLAREMRDESTSLFSANLISLMTEDFTLDELAELPLEAFCDLLQEKGKGRFKQPEKIAKAIQRAITMSYRLGALAQESINVVLSVLVREIRALEKNIKELDKAIEQVIVVIPEYQCLTSIPGVGKVYAAGLIAEIGQIERFEDQTKLAKYAGLSWKVNQSGNYQSQNTPLTKQGNRYFRYYLVEAANSVKNYLPEYKAFYQSKYKEVPKHQHKRALVLTARKFTRLVDTLLRKHQLYTPPRSVIEK

SEQ ID NO: 431766 - protein, 414 aa, unidentified
MALKIVHQICCGIDVHKTFVVACIASTNNKGVTSYKRHRFSTFTKGLRELSQWLCENNCSEVCMESTGKYWIPIFNILENSCTITLAHPKYVKAIRGKKTDNKDAQWIADLFKHDLVAGSFMPPLAIRQLRDLMRYRAKLTNFMSSEKNRLQNCLTVSNIQLGNVLSDTFGKSSMKIIDKILENPLDTTFDLESLVHGSLLKKLPELELAVDGFITLEQAGKLKIIKQHYEDLTERKSDLERIILSLSAPYAEELNLILTVPSFKSIFSAITVVSEIGANMDVFPTAKHLCSWAGVTPTNNESAGKKKSVRISKAGCYIKPLLVQCATAVVKSEKHPEIRNRYLKLKKRRGHKRAIIAISRILLTAIYMILQKKEPYNAELYKKYDVLPVDREITVEQAILIAKNQGYRIKTSA

SEQ ID NO: 431767 - protein, 351 aa, unidentified
MIIIGVDYHPSDQYIAFVDSETGEGDERRLNHCDGEAEKFYRELAAGGASVRVGMETTGYSRWFERLLAELGIELWIGDAAKIKTKRVRKQKTDRNDAQLLLKLLLDNNFPKIWIPSPENRDLRQLLWHRHRLVQMRTRIMNQLQALAMNEGQRRKKKLWSDAGRAQLEKLALAPWASRRRKDLLELLDGMNPTIGELTQAAEQEAKMRPEVLRLMTHPGVGPLTALAFVLVIGTVERFQCGKQIGSYVGLIPCEDSSAGHQRLGHITKQGSSLLRFLLGEAAQAAARCDTDWRRRYMHLALRRQRNIAKVAMARRLGVRLYWMWRKGWEYSDWIKFGSHAGQLETGNGVQ

SEQ ID NO: 431768 - protein, 383 aa, unidentified
MHASNICTPIVGHIGTIFVAVELSQKTWLVVIHSPDRDRISRHKLAGGDHAGLLALLESVRSRAARALGSVAGVVSCYEAGYDGFWLHRRLTAAGITNFVFDPASIAVEQRSRRAKTDRLDGELLLRTLMAHCRGEPRVVRIVRVPSREQEDARRDSRERQRLVKEQTGHTNRIKALLRLLGMAAGNPRRRDWLTWLARQRDWEGQPVPPRLVAELKREHARLLVVCEQLQALSKAPAPRDVPMAAARMAEHKANLRRLKSLGPAFAGTLTDEVFYKDFDNGRQVASYVGLAPSPWRSGGTNREQGISKAGNPRARHQAIELAWLWLRHQPDSALSREFLRRTAGASSRIRRIAIVALARKLMVALWRYLTTGLLPEGAVVKA

SEQ ID NO: 431769 - protein, 453 aa, unidentified
MPRRTWTGPLLSAERIFVELILGIDLACRAAHQASLAGPDGTFVWTGRKFFTRPAELEKLWKQIGLGEHDTLRVVMEPTRNAWAPVASWFRRRGARISMVPTTQSADLRAYYSKHTKNDHLDSKLLARLPLLHPEGLREHTGDGPAEPLRRVVKIRSSIVKRRTAVFQRLDALLELLGPAWYDALGSNYGKAALALLARYADPHSLIRVGHARLTRFLIRHSRGAWREQHATMLLAAAQESLQLWGSGAEAAIDFAELAADIAVEAQQAQMLTEQIEDLDERCANLYAEADPTGIIASAPGVGPVTCAVIAGRIGDPHRFHSLAAIRSYSGLVPKLSQSGQAQHQHGLTKAGDPLLREALFAAADQARKTDPQLAAKYKQLMATERHHDSAICHIATTLLTRIATCWRTGEHYNLRDTDGRTITPEQGRQIVRTHHAVDKQTRIKAANTRQAQ

SEQ ID NO: 431770 - protein, 425 aa, unidentified
MRFFGIDVHLEFCEVAVAEGGKVSQVGRIASTPEAIREFARGLGGEDQVVLDASGSVMAIARILRESNVGRVIVSNAAQTRAISHARVKSDRFDAAMLARLLSAGMLSEVWMPDEATLALRRRVARRSALVRARTRIKNEVHAVVMRCLLGRPPVSDLFGRKGRVWLAEQTLPEEEAETVAGCLRQIDFLDGEIALLDQKIAEQALAWPGLCRLLTIPGVDIGTAAAVIAAVGDISRFQTPGQLVAYLGLDPKVRQSGSEPARYGHISKRGNAQARSMLVEAAWIAIRSPGPLKAFGERVRARRGAQVAAVAVARKLVVLCWHLLSKDEDYAFARPSLTRQKTRRLELTAGASRRPRRHDGATVSPTAAQRAAERELQTQAELAYRRLVDDWRSTASPKGGAGATPGRASQKPVKGKAARQATSP

SEQ ID NO: 431771 - protein, 343 aa, unidentified
MKITRVGVDLAKHVFQVHGVDRSERAAWCKRLRRDRWIRELEFAVAPGAETGMEACGAAHHWARLLQSKGYRVRLIAPQFVKPYVKSNKTDANDAQAVCEAMSRPSMRYVAVKTIEQQDIQAVHRVRASLISERGAKANQLRGLAYEYGLVAPREIAALRRAVPVWLEDGSNGLTVRLRALLSGLYEDLQALDERVRELDKEIRAIGRENEAVGRVQQLRGIGPLIASALVAMIGDARQFKNGRHVAVALGLTPRQHSSGSKERILGISKRGDSYVRTLLIHGARSALRTAAGKNDRMSRWALALAQRSHVNVAVTALANKMARVAWAMLKHGTSYEPNGLAA

SEQ ID NO: 431772 - protein, 424 aa, unidentified
MEVVFPYCAGLDVHKKRVTACRLVSDSTGQTPEGVAELETFGTMTHELLALADWLVEAGVTHVAMESTGEYWKPVYNLLEGIVTIFLVNASHVKNVPGRKTDPADARWLAKLMRYGLLQASFIPPIAQRDLRDLTRYRTKLVQERAREVNRVQGVLERANIKLASVASDVLGVSGRAMLEALIAGQADPATMAALAKRRMRSKIPALEQALTGTVRDHHRRLLAMQLRHIDFLDEQIAALNSAIAHCVTTLSQEAAVSPASLAPTTIDVPLPTDPPPPLTFTRAVELLDTIPGVNQRGAEMIVAEIGIDMARFGTAPRLAAWSGVAPGNNESAGKQRSGKTRKGNQVLRAGLTQLAHGAVRTKVRMCQRYIGAWRHGEGKDGRSSPSPTPSWSVSFLCSPAMSHTANWERTILTSGGGITPWTG

SEQ ID NO: 431773 - protein, 338 aa, unidentified
MTIKALGIDLAKNVFQLHGVDGIGTPVLRRRVLRAQLLELVAQIEPCIIGIEASTSAYFWAERFERFGHTVRIISPQYVKPFRLSQKNDPNDAQAICTALQQPNMRFVPRRSAEQQDIQALHRARQRLVNHRTALASQIRGFLRDRGLVFPRNIGQLRRTVPQILEDAENGLTISARATIAELFDFLREVDRRVTVFDRRIDEVFRASSLAQRIAKIEGVGPKISTAVVAAVGDGRDFKNGRHMAAWLGLVPRQHSSGDRTQLFGISKRGDQHLRTLIVHGARAVVRTAARKTDPKSCWVNQLRERRGFNRAVVAVANKNARVIWAVLRREEPYRRAA

SEQ ID NO: 431774 - protein, 337 aa, unidentified
MIHVGVDLHQRFCYMTALDATGRCLKSGAVPNDPEPLRKWLRSLPPPREVAVEACSFWPAFQSAIEGEVSAIRLVHPQRVKAIAAAKLKNDRVDSATLAHLLRCNLLPEAWRADGETRERRQRVRLRISLGQHRAALKNQVHAILHQQGQRATVTDVFGKKGQQWLQQVRVSPAAREALDIYGELIGEVTRHMKGQDKRLTALARADQRAQWLATIPGIGPYSAMILLAEIGEVRRFGTAKALFSYAGLVPWVRESAGHSHRGPISRCGSPRLRWVMVEAAHTALRCSPAARRYFERLRRRKHPHVARVALARKLLGAVFAMLRDGVCFDESIFAAV

SEQ ID NO: 431775 - protein, 348 aa, unidentified
MIVIGIDSHKRTHTAVAVDETGRRLAERTVAATNAGHLELVHWAGPFVARYWAIEDVRHLSRRLSADLVRAGEAVVHVPPKLMAGARRSSRQPGKSDPIDALAVARAALREDLPAARLDGPERDIRLLVDHRDDLVAERTRIENRLRWHLHDLEPGSEPAARSLDRARILGALERQLSGVDGTVARIARELVTRIRELTTAIDQLEREIARLVSALAPALLDLVGCGPLTAAKLVGEVAGVGRFRSAAAFARHNGTAPVPVWSGNNERHRLSRTGNRQLNLALHRITITQMRIDPRARTYIERRRALGNTKAEAIRALRRHLSDEVFGRMQHDEAARATSSTALAAVA

SEQ ID NO: 431776 - protein, 365 aa, unidentified
MTKFSKYVGLDTHKDTIAVAIAEAGQSKPRYYGEIANTPEAVAKLVKKLSPQGEVLSFCYEAGPCGYGIYRQLTHLGHDCVVVAPSLIPVKPGDRVKTDRRDSESLARLHRAGELTAVWVPGPEQEAVRDLTRAREDTKALERQAKQRLSAFLLRHGRLYAAGKTKWTKAHGEWLMTLTFEAPSQQIVFQEYVDIVAHLAGRVAALEEEMVRVLDTFSLAPVVRALMALRGVSLITALTVVAEIGDLTRFTSPRQLMAYLGLVPSESSSGATTRRGGITKTGNGHVRRVLTEAAWCYRFPARKTAHLQRRAGDTSDPVQAIAWKAQKRLCGRYQHLLRAGKIKVQVCTAIARELTGFLWAIACTV

SEQ ID NO: 431777 - protein, 318 aa, unidentified
MSHGYDKFIGIDVSKNGFDVCCHGSGPLGSFDYTADGVSRLLPLLPPAGTCLIVIEATGGYERQLVGDLMTAGHQVSVVNPRQVRDFAKAMNILAKTDRLDAAVLARFAERMQPIPREKPGRLDELRELVARRRQLIEHRTAEKNRCLQGASPFVRKSLLKSIEAINKDVKAIDKVLLSLVHSDDEWKNKFDKITEVTGLGPQTATTLVAEMPELGQVNRQQAAALVGVAPYNQDSGQFRGRRMVKGGRQSVRNVLYMAALSAMKHNPVIRDFAARLHSKGKPPKVVITACIRKLVVILNAILKTNQSWQPRLATATP

SEQ ID NO: 431778 - protein, 594 aa, unidentified
MLTDHAHTPQSPAYAISIGVGIDTSRYGHYAVFLGDDLQPAAAELKFAESAAGYQLLRQRLEKIIQCHPAVRFLVRLDAAGQYADNLLSFLQRLQTTRADQHPLGQATFTISTGDPQRNKNYRAALYGPKKSDPIEARAAARYALSEHPAAAPVLSTQLRTLRQVAGRLQAVVRQRTRLINQLHQLMALAFPELALHIKDLAAGWVLELLHRYPTAPLLAAADEDQLAAIPYLPSKHRTLLLQQARSSIASLTDDTSAELIRDQVRQLRDVQARQKRLEKLLIDAYHRLPQANLIDTIKGIGDATAAVLTAFILDIDRFQTPGQLVAYFGALPIEASSGVDRDGQARGPRRYIMSKRGNDLVRGYLWMAALSAVRHNSAVRPLYLRVVAKHPENKSIAIGHAMRKLLHLVFAVWKTGKAFDPDYYPWATPRHIASDATASMDASDITMSMREQAAGLTPDMPARTEVTATRIVSLPETTPLDENTFVDFAHLKSQLPMTRVLDQLGLSTRLRGQGPQRKGPCPIHRGDARGRTFSVNLDEGLFCCFDACCAQKGDVIDLWACVNGMSLRQAAIDLVQTFNLQPAPHKDTEKRHG

SEQ ID NO: 431779 - protein, 364 aa, unidentified
MQCVITNTELSSHEGTRCQFNGGPGAIKLGIDVHQDFYVVVEQVDGSNPKPPQRFAKAAFLHWATKLKNGKGEVYAVYEACGFGFSLQRQLSSLGVQCHVVCPQKLDEQNRRVKTDGLDAKALVLKLDRFVQGNRSALALVRVPTEEEEQKRAIHRQREQLVKARMQLEAQGRSLMVNHGLEPVKSWWKGRTFAALQVPEWMKELLGNSQSLLLALQEKIGALTLQLQAAALAQQPRGLGKMTSVIIDREIGDWKRFNNRRQIASYTGLCPGEYSSGNTRLQSCVTKHGNPRLRAALVELAWRLVRFQPNYKPIKKCKRLLGKGALATGAARKKAIVAVARQLAVDLWRIKTGRLRAEELGLIN

SEQ ID NO: 431780 - protein, 341 aa, unidentified
MSQAQQLSNSDPATVFCGIDVSARTLAVAVQQVGQWAQREFANNANGHKELIVWLHKRQAMVRVSLEATGIYSLDLALALHAATRIELAVLNPKKIHEFAKSMRRSKTDRADARVLAEFSQRMAFVPWQPPNRQGLQLRTLSRHIQGLTVQHTRERNRLHAVQNVAHTPRCVLSDLKRSLASLEKRQQQLRREASALIQADPSLRQQFHWLLAIPGIAQISAIQLLAELTPLAQNMTGRQWVAHSGLDPVHHDSGSSVHKPSHISRSGNRHLRRALYMPALVAVQRDPHIKAFYLLLQSRHKTKMQALIAVARKLLHAIHGIFRSHSPYDGHKLFPALLPA

SEQ ID NO: 431781 - protein, 340 aa, unidentified
MNKVTTIAVDIAKWVFSVYWVNAETGEIGARMLTRAKFEEFMRTREPSRVVLEAGGSAHYWGRWLARQGHEVRLIAPQHVRPFVRTNKTDGADARAIWEAAQRPEVKWVAVKSEASQAVLVLHRVRRQLVDMRRMQSNQLKALLYEFGVLAPARITAAQLEQWVAAGRVPELVQPSLREQIERIGRLKREELELTRRIERHNASDALATQLLAVPGIGTLTASALSAELAEGASSYANARQYAACKGIAPRLSGTGGKVRPGAISKRGDPYVRTLLIHGARSVITHRRRAKRLSPWLTGLLERRPLNVAVVALANKMARTAWALAAHRRSYQENYATQAA

SEQ ID NO: 431782 - protein, 373 aa, unidentified
MPKYSTAFGMDVHLRSTTVCALDADTGEAVTRRFPGNPWGEIAGWMDGFPGPSLAAYESGYLGFAPQRELAGLGVECVVAAVSKIPRSAADSASKNDRNDAARMAKAILAHDISPVWVPSPEVEGIRDLAGAYDGATARLATAKQRLLAFLARRGFVYGGTTPAGNPRKYWTYDFLRWLDKVRPEDDGGVRTLAALRNEVEAAAEARADLLSEYRAAVDASPIAAEVAALQSIKGCAFALAAAFSAEVGDFTRFRSGRQVTAYFGLAPSQRSSGDSVRLGGISGAGNALVRKLAVEGSWCYAAARHQPKLMPRDTGVPLEVRMHGRKGSERLLRRREEMLARGVPAAKANAATAAELVRWLWALGMMCREGAE

SEQ ID NO: 431783 - protein, 324 aa, unidentified
MDVAVQVVGIDVSKATLAVCYPVQARLQHTEVSNSAAGFQQLIRSCGADCLYVMEATGTYYLALAYHLVEQGAKVAVVNPLVVRRFIQMHLGKGKSDRKDAQWLLRYGQQQALPRWQPDASILVECRQLEQVSEQLIRQKTMLLNSLEALQQHPVVSAVARQHLHQALDQLEAQLQVLEAEMQGLLEQHYAREMPLLCSIPGIGRKTAAALLLFAKGFAQVDNYRQLIAKAGLCPREYTSGTSVRGKARITRMGGGLIRRKLFMCSFSAKKANAACKALYDRLVAQGKNGKLALIAVCNKLLKQACAIVKSGIPYQADFAKISA

SEQ ID NO: 431784 - protein, 410 aa, unidentified
MLKIIYPICCGIDVHKKFVVACIASTDDRGITTYKSSRFSTFTSGLRKLSGWLCSNSCTDVCMESTGKYWIPVYNILEDTCQITLAHPKYLKAIRGKKTDKKDARWIADLFKHDLVAGSFMPPLRIRQLRDLMRYRFKLTNFASSEKNRIQNCLTVSNIQLASVVSDTFGRSSMKIIDYLLENPYDKDFDFVPLLHGSMTGKADSIRLAIDGMITVEQRQKMNIILCHYSEVQKCKVNLESLILSLSEPYARELSLVSTVPGIKNPFSVIAIISEIGADMSVFPTAKHLCSWAGLTPQNNESAGKKYSVRISRAGVYIKPLLVQCANAVVRSEKHPEIRGRYLSIRKRRGHKRAIIAIARMLLTAIYHILLKDEPYNPELYKKADVLPKTRSITVDQAILLAKRYGYSVA

SEQ ID NO: 431785 - protein, 445 aa, unidentified
MEIINPNAAGIDVGSRSHFVAISQDKGDVKEFGVYSEDLNSLSEWLIENNIKTVAMESTGSYWQNLYTELEQVGIEVVLVNGKFTKNIQGKKTDVLDCVWIQKLHTLGLLRGSFLPDHQTEQLRTLCRHRNNLIHNSAKCIKRMSQNLRLMNLRLDVVVNDLVGMTGLKIIEAVCNGESDADKLASLRHANCRKSEEEIAKGLQSNGRKDYLFALKQEYAQYQYMQNLILDCDEQIKIMLNEWINQDQTKKALYIDAKVHKKINKNTPKNIDLNLISYQFFDGLDLYAIEGFSHGLALTIMSEIGEQGIQQFPTAQHFASWLRLSPNNKISGGKILNSRTPKGSNRLKIALRQTANVVGRLKDTHLSNFFNRIAYRKGRASAISATARKLAVIIWKMLHDHQQYSPPSIYEYLDQKRKRKVRELQKQIANLDAKLNELKPVLDPI

SEQ ID NO: 431786 - protein, 347 aa, unidentified
MRSYNRQHQYDCGIDLHVKTMYVCIRDGTGQVLVHRNVPSTPAAFLEVVAPYRTGLVVAVECMFTWYWLADLCAAEGIAFVLGHALAMKAIHGGKAKNDKIDSHKMAVLLRGGRLPQAYVYPAAMRSTRDLLRRRLHVVRKRGQLLAHIQNTRAQYNLPAFEKRLAYAGNREGVVGHFADPSVRKRIEVDVALIDQDDALITDLALTIVREAKRHDGDAFHRLRSVPGIGKILALTILSEIHDVTRVGRVQEFASYARLVTCRKESAGTTLGTAGAKRGNVHLKWAFSEAAVTFLRHNRKGQQLRARLEKRHGKGKALSILAHKIGRAVYSMLARGTVFSMEKFLAA

SEQ ID NO: 431787 - protein, 307 aa, unidentified
MFVGIDVAKDRLDVHVRPVGESFVVARDDEGIEALAKRLNTMAPALVVLEATGGFETVVAAGLAAAGLPVAVVNPRQIRDFARATARLAKTDAVDAAVIAHFAEAVNPPVRLLADPQQRLLGELMARRRQLIEMIVAEGNRRRLLTARRTLKTVDRVLATLKAQLEEIDHDIDIAVRGTPAWREAEDLLISVPGIGQKIARTLLAEMPELGRLDRRQIAALTGVAPFNRDSGTLRGRRTITGGRSVVRSALYMSILVSIRRKLPMAQTYHRLRASGKPAKVAIVACMRKLVTILNAILRDKKPWATA

SEQ ID NO: 431788 - protein, 349 aa, unidentified
MKFYTKPHQFYCGIDLHARLLAVCIVDQGGAIVLQKQLPAEKQLLLDVLAPYRPDVVVAVECLFAWYWVADLCREEKIPFVLGHALYMKAIHGGKAKNDDIDAEKIARLLKGGNIPVAYVYPKGLRETRDLLRRRMYFVQQRAALITHVQIVNAQYNLPEFSKKLIYAKNRAELKIAERFDNPQLRKSVEVDLALIDALDERIAEVELHLERTAKIEDPQTFHLLKTIGGVGKILGLTLLYEIHDIGRFPDVGEFLSYARLVRCRHESAGKKLGSGGHKIGNAHLKWAFSEAVCLLVRHHTPVKIWQARREKKHGKKKTLGILAARLGRTVYHMLRKREAFDVKRFLGQ

SEQ ID NO: 431789 - protein, 318 aa, unidentified
MGTVMNQTSSVYIGIDVSGSTLDVAIHDTTEHFSVDNESAAIEQLVQRLITLGPTLIVMEATGKLELAVLKALCQAGLPAVAVNPRQVRDFAKATGKRAKTDRIDAFVIAHFGAVIKPVVRPLNDMQTEQLQALLLRRAQLIDMLVAEKARLDRAHAAAKESLNDHIKWLKQQLTVADKDIDSFMRSSPAWRQKEDLLRSVPGIGPGAAATLIAFMPQLGSLNRREIAALTGVAPFNCDSGKHQGKRRVQGGRAIVRRALYMACIPALRFNPVIRAFYDRLRKAGKPFKVAMTACIRKLIVTLNAMVHNSTPWSPSSD

SEQ ID NO: 431790 - protein, 343 aa, unidentified
MKIIRVGVDLAKHVFQVHGVDRNEKPVWRRKLNREEWLKVLLEKIEPGCEIGMEACGGAHHWARKLHALGYRVKLIAPQFVKPYVKSNKNDANDAEAICEAMSRPNMRFVSVKSVEQQDIQAAHRIRAGLMEQRTAKANQIRGLVSEYGLVATKEILHLRAAIPLWLEDAENGLTSRFRSLLHGLWQDLLLLCERIAELDLESARIAADDPVAKRLQQLRGVGPMIATALLATVGDATQFANGRQMAASLGLTPRQNSSGGKDRLLGISKRGDAYVRCLLVHGARSMIRMAKEKDDRLSQWVMRIATTRHPNVAAVAMANKTARIAWAMITRGSDYQPDLVAA

SEQ ID NO: 431791 - protein, 389 aa, unidentified
MKIFVGIDIAKLNHFAAAISSDGEILLEPFKFTNDADGFQLLVSKLESFDKNSIIIGLESTAHYGDNLVRYLVAEFYQVCVLNPIKTCQMRKNNVRKTKTDKVDTFVIVKTLMMQDDLRFITFFDLDMMDLKALGRFRQKTIKQRTRLKIQLTTYVDQVFPEIQYFFKSGLHQHAVYALLKEAPSPKEIASMHMTHLANLLKVNSHGHFTKELAKELRVLAQKSVGANDSAISIQITQTIQQIELLDSQLEKIEAEMTDIMKFNDSVIMTIPGIGYINGGMILGEIGDIHRFSNPNKLLAFAGLDPSVYQSGNFQAKTTRMSKRGSRVLRYALVNAAWNVVRNNATFKAYYDAKRAEGRSHYNALGHCAGKLVRVIWKMLTDEVEFNLE

SEQ ID NO: 431792 - protein, 415 aa, unidentified
MKSASSTGSSKLPDQPANGVTGGVDWASQDHAVSIVNDRGHQIARKTVDHTGAGLRALVRFLVNHGVGEVAIERGDGPVVDALLDADLIVVAISPNRLKNLRSRYGSAGNKDDRFDAYVLADTLRTDRTQLRPLTHDSEATKTLRATVRARRELVKHRVALCNQLRAHLQAAFPGAVGLFRDLDSQISLKFLARFDSQERADWLSVKRLAAWLSSVGYSGRKDPADLFAHLQAAPRGPVGPDGAARAHVTRAMLTVLGELVEQIATLEAQIAEQLALHPDAQIFQSLPRAGTVRAARLLAEIGDVRGRFPDAASLACLAGVAPSTKQSGKHKAVTYRWAVNRELRDAICDFAGDSRRANPWAAKIYNDAIARGKDHPHATRILARAWLGVIWRCWQDETSYAPDQHNALQAVLAA

SEQ ID NO: 431793 - protein, 379 aa, unidentified
MRTVSGLDVHKDSIFMCILDEQGKKTEEKFGVTTREIKRLGRVMQSRYVSDVCMESTSIYWMPIWRLLESDFRLHLVNPLFLKQLPGRKSDVKDAEWIATALIKDLVKDSFVPDGNIQRLRQYGRRINEINRDLVRCEQRIDTVLQRCNIRLSNHVSRTKNKSYRKVVDALIAGESSCDALIKLIHGRTVNRCGKSAVHDCLEGCIGQSDRDMLGQYTQMFDMYETQKQQCIEAMIQMCVELYREAFLFLLSIPGIKEISAAIIISEIGENMELFATAATLVSWAGLRPRNDESAGKIKSRKITHGNKYLRKALMECAWGAARTKGSVFYSRFFHLKGMKKHHNAIIVAIARQMLTIIWTLLTKKEHFDKEYHLKKKSV

SEQ ID NO: 431794 - protein, 357 aa, unidentified
MDGSKDRPQTTAGLDLGDKYSYLCLIDTESGEVMEEGRLRTTPEAFRRRFASEGPMRIAIEAGTHSPWASRVLEECGHEVLVANARKLRLIYSNKRKADEIDAENLARLARVDPKLLYPLKHRGEDSQAHMAIIRSRQALVDCRTQLVNHVRGAVKSFGHRLPKCPARSLHKRAKEHIPDALRPALEPILEQIGSLTERIRQYDLKLEAISEESYPETDLLRGVEGIGPLTALTFVLTLEDPYRFEKSRSVGAYLGLVPARDQSGDRDPQRRISKEGDEMLRKLLVSGAHYILGPFGSDSDLRRHGEKIAARGGKNAKKRATVAVARKLAVLLHSLWVSGEVYEPLRNAHRLGGQAA

SEQ ID NO: 431795 - protein, 339 aa, unidentified
MKVSTLGIDLAKNVFQLHGVGCNGQTVLKKKLTRDKFLPFLMQLEPCLIGMEACASSHHFARVLRQYGHEVKLMPPQYVKPYVKTNKTDAADAEAICEAVARPNMRFVQIKTAEQQAILVLHTERNILIRERTACANSMRAILAEFGIIMPRTLSQLYKKIPEILEEYDNELSPFVRCSVARQLEHLQGVEDQITLIEQELSRWAKTQPACQRVMKVPGVGLMTATYLVASVGNGQQFHSAKQFAAWLGLVPREFSSGGKQRLGRISKRGDRYFRYLLVHGARAVAAVIERHKDNMPWLYRLLNKKAYNVAVVAQANKTARILWSMLVHHTEYRTLSVV

SEQ ID NO: 431796 - protein, 415 aa, unidentified
MFFAGVDIAKKQHEVCVLNADGEQVLSMPVTNSVAGTERLLQAIHNRISPDPGLVTFCMEATGHYWLALYSFLTQRGYTVHVVNPIQSDAARDLYIRKSKTDRKDAYILADLMRMNKTQPTSMASEPVLRLQTLSRTRFAFVDQVSSLKQRVLGILDRIFPEYPQCFSDVFIKTSRELLKTFSTPEELAEVDLSELAEFLAEHSRGRLGAERARQVQSYAQSTFGISIAVDAFALELKLLLDQIEFIENQISAIEQAIDEAMAELAAVNQPQALPKGVYHVIETIPGIGRVLAAAIIGETGEIDRFASARKYVAFAGLDATVRESGQFAGTRNRMSKRGSPHLRRAIWLAAINARRFNPELRAYYEAKRAEGKHVGVATGAVARRLAHLIHALWRDQRVFDPDYRWAPSRADANT

SEQ ID NO: 431797 - protein, 403 aa, unidentified
MEGPLISLDVSKGKSNYRFFENGTDRKGKKGVIRHDIQGFDSIRDEAEKMEKRLRIKPSVIFESTGVYSDVVEKYFTDKGFDVYVISPLLSASMRKEGVRPAKNDSLDTLSIAKVFYSRDDLRKCSENDKKAERLREMSYELDMMNRRIRPMKCQFLRLLDKVWPCLDEVSDYSSRFMLDFIIAFGHPENIKTVKGVLSVIRKSEMGTAGRKDKIAQDLFDYCHTHLSAVSKDSSYVELLKRMAIELKAMAKKKSELIDRMAEEARNKDEFARLLTIPAVAKTTALKIMARVGDISRFRNAEALVAYCGLDPRVYQSGKMTGEHRTITKKGDCILRSTLFLAVKLMVMLYPDTKVARFVAAKAKNGLSYKQAVVAGSAKLARIIYSMLTHHENYVEFNADIVA

SEQ ID NO: 431798 - protein, 433 aa, unidentified
MSFKIVRFNCCGMDVHKNIIVATVGITDRNTLVTEYHQKSFSSLNSDLYKLCDWLDSFGCKDVCMESTGKYWIPIYNILEERGFSICLAHPKYTKAIKNQKTDKRDSMWICDLFKHGLVRSSFIPPKEIRELREISRYYHKLIGMNSSESNRYQNCLTVSNLGIGSIFTDTNGKSAKKVVEAVLSADDPNAITDEELSKLVHKNCRNTDKLLDAIRGCRIESDTRFKMEEISKHKEELDLHINSCYLELVKRASVFFSQFLHITEIKGISFLSAILIISEIGVDMTVWTDSRQLCAWAGLVPGKNESANKKKSTRITKAGLYLKPLLVQCALSSIKDKHSYFGIKYSRIKRRRGHKKAIIAIARMMLTCIYNMILTGESFNPTDYEELMNPKPKSPKITVDQAVEFLKTSGADLDQIIATLKNPGAAKILQAT

SEQ ID NO: 431799 - protein, 417 aa, unidentified
MFDDPEGGSQVIFVGDDWAEDHHDVHLMDESGARLASRRLPEGLTGIGEFHQLLARHVEEPDQVVIGIETDRGLWVEALVAAGYQVYAINPLAAARYRERHCVSGAKSDAGDAKLLADLVRTDRHNHRPVAGDRPAAEAVKVLARAHQNLIWTRNRHTNALRSALREYYPGALEAFTDLHDRDALAVLGRAPTPLQAANLSLSKIRSALKAAGRQRNLDTRALAIQTALRTEQLAAPASVTAAFGATTRATVGIIAELNRQIADLEAELATHFETHPDADIYLSLPGLGVILGARVLGEFGDDPNRYTTAKSRKNYAGTSPLTVASGRKRAVLARHVRNRRLYDAIDQWAFCASNTSPGARAFYDQRRAAGDLHHQALRALGNRLVGILHGCLRHHIHYSEHQAWAHRQINPDTQAA

SEQ ID NO: 431800 - protein, 354 aa, unidentified
MTSMPDPINHVTAGVDTHRDTHVAAAFDRLGRLLETRSFPACAAGYEALMEWLEGFGPIHRVGVEGTGAWGAGLARYLTARRVDVVEVIRPNRQSRRRNGKSDTADAIAAGRAVLSGEADGSPRGGTGPVESLRLLKVARRSAMKHRTTVANQTHSVIATAPDQLRSTLKGLSLAGIVKQATRYRPTDLTDPYQAAKLTLRSLATRYQHLNEEIDQLDVHIAELTKTAAPNGLLELVGVGPQTASDLVIAAGSNPQRLKSEASFAALCGTSPVDASSGRQEHHRLNRGGDRQANAALYRIVIVRLRYHQPTKDYMQRRRKEGLTKPEIIRCLKRYAARETAALLTKQQPQAKAA

SEQ ID NO: 431801 - protein, 343 aa, unidentified
MQISTIGVDLAKNVFQVHGVDGQGKIVLVRQLRRQQIMEFFRRLPSCLVGMEACATAHHWARELMKLGHTVRLIPPSYVKAYVRRSKNDAADAAAICEAVTRPSMRFVPIKTAEQQATLTVHRTRDLLISQRTQLINALRAHLAELGFVTNQGRDGVTKLIAIVIAENNLQALPAMMREALRVVVAQLASLQQQIRELERSIHAQHRASDVSQRLESIPGIGVIGATAIAATITDPNVFTSGRDLAAWIGLVPRQSSTGGKERLGGISKQGDRYLRRLLVVGATAVVRHARRHPDKHPWITKLLAKKPAKLVAIAVANKTARIAWAIMNKGGIYRTPALAAAA

SEQ ID NO: 431802 - protein, 319 aa, unidentified
MTNSVGPGDACVGIDVSKVALDIAVWESDTCWHFPNDGLGIRALIGHLKRLSPRVVVIEASGGYEALAVAELAAAGLPVAVTNPKRVRDFARSTGQLAKTDKLDARVLAHFGYAVRPEVRPLRSDEETWLKALVTRRRQVIRMLTAEKNRKAISHSGVQDQIQQHIEGLDGELQSIEETIEQCIRQSPIWSHKQALLRTVPGMGPVTSATFVAELPELGVLNRQEIASLVGVAPVNHDSGKLRGKRRVCAGRGPVRRTLFMATLVAVRYNPVIRAHYESLLQRGKEKKVALTACMRKLLVILNAMIRDDQPWRLGAIPT

SEQ ID NO: 431803 - protein, 368 aa, unidentified
MVTIARIGIDTSKGSFQLHGVDAEEQVVLRKTLRRKQFLEYLAKLEVGEIGLEACGASHHWARALRQLGHRVVLVPPQYVKGYVARGKNDKNDAEAICEAMSRRRVRERLVPVKTLEQSAGQMMMKVRSSLIERRTQLTNSIRGHAAEFGLVAAKGMDKIGPLLERIAVDESLPARAREMFAMLAEDYAELAARIVRIDKRLLAFQRDNEVARRLMEVPTIGPIGACLWVTKVVDPHAFRSGRSCAAWLGLTPKDRSTAGKQRLGGITRAGDESLRATLVLGATAYLRHVRSGRIAATPWLAGMLARKPPKLVAVALANKTARIAWKLMTSGERYDPAHQPTREGLDASQWGGLRAEPLTAGGVEAVA

SEQ ID NO: 431804 - protein, 424 aa, unidentified
MAPKEDSKIVQVVHPICCGLDVHKETVTACLIVQTPTGEHIEQREFCTVTRHLRALKEWLLDNECPVVAIESTGVYWRPVFNVLEGSIQVILVNARHTKHLPGRKTDISDSKWLAGLLRHGLVRGSFIPAEEMRQWRDWCRQRKMLVDTVSDYKRRVHKLLEMANIKISSVLSDVFGVTGCNLIHLLQSGQPITLFDVEECLRGSLAGKKDRKQKTWELYDAIRGFFGDHHREVLKPLLRIIGVIENEIALIEARLQQLLAPYQDLIKRMVAVPGISYVSAWAIIAEVSPTLEAFRTIEAFSSWCGVAPGNNESAGKRKSGRSPVKGKMIKTVLVEVAWAAIKCKRSYYRDKYFRLKARLGSAKKAIVAIAHRITKALFHIIKYGAEFKDLGKDYLSLQHAQKRYAYLCREAKVIGYKLVPAAV

SEQ ID NO: 431805 - protein, 414 aa, unidentified
MKLFVGIDVSSQELEACFMNPDGDKLETLTVKNNLDGASHLRDRIVAVADKHSSSEIHIGLEATSVYSWHPAMFMHEDPALKARKAKVFTINPKLVSKFREAYPDMDKTDRLDAWVIADRLRFGRLTTTIVMQEQYVALQRLTRMRFHLIHNLAREKQYFLQNLFYKCNAFTTEVDSSVFGHALMEMLSEKYSLDDIATMDVAELADYLRDKGRNRFPDPENVARCIQKAARASYRLSKVVEDSIDLVLGTSIQVIRSIQAQLKDLDKAIERILEGLPESKCLRSIPGIDRVYAAGILAEIGDIDRFSDQAAVAKYAGLSWRKHQSGPFEAEDTKRIKSGNRFLRYYLVEAANSVKNRDEEFGEYYRKKYKEVPKHQHKRALVLTARKLVRLVDVLLRNGQLYTPRKKVTTAKD

SEQ ID NO: 431806 - protein, 410 aa, unidentified
MDAIVECCAGLDVHQATVVACLNIGAANKRSVKEVRTFATTRRELGKLRDWLRAAGCTLVAMESTGIYWRPIYGELEGHFELIVGNAQHMKNVPGRKTDVKDCEWISDLARHGLIANSFVPPRPLRDLRDLTRYRRKLVEAQGAERNRLIKLLESANIKLSGTISDVFGVSGRAMLHALIEGEETPAEMARHARGRMRRKAAALELALDGTLDEHHRFVLSLQFARIKAAEADLERLDQRLREKLAPYSEQIGWLVQIPGVDWVSAASIIAEIGTDMTAFKSAAHLASWAGLCPGSHKSAGKQRSGKVRKGNVHLKTTLVTAAVNAAKKRDSYLADKSRRLRARRGEMRAHVAIAHKILVAIYHMLATGTEYRDLGHTYLDTVDQRRTANQLTRRLRNMGYDVHITPKAV

SEQ ID NO: 431807 - protein, 343 aa, unidentified
MQIRSVGIDLGKTTFHLVALGDNGKVLLKKKFTQKQLITFTANLQTSLIGMEACSGAHFLGRALREQGHDVKLIPAQFVKPFVKSNKNDFIDAEAIAEAVDRHNMRFVPIKTDDQLDLQALHRVRDRLMARRTSVINQIRAFLLERGMVFAKSPIRLREAIPEVLENANENLTPRMRHLVAMLWCEWKDMEQQILEMNDEVERIASSDAACVRLRQIPGIGPLVATAIVASIGNGAAFRKGRQFAAWIGLVPKQHSTGGKAKLYGISKRGNLYLRKILIHGARAVVLRSKRDRIAMGPWMTALGRRAPRNVLIVAMANKLARIAWAVLSTGQDYRTVPNAISG

SEQ ID NO: 431808 - protein, 412 aa, unidentified
MWPAKPEMPAEPAYGSSGEWAQTQRLLELGSNAWKLELMHVAVGQPTQEVKETPMNSVGLDVHKTRCVACVKTQEGRILEEFAFQNTPHGHEELITHLKAYPETQVAIESTGNLWIPIYDRLEDEHIHTVLTNPKKTRMIAEAKIKTDKLDARILADLLRANLLSASYVPPPEIRMQRSIIRERARLTQLRTIIKNRIHTLLDKHAYKSPFTDLFGKHGLEWLAKLELPAGDRILLEVNLEQLNSLNHSITRLTESIAASAIENPEVKLLMGFTGIDYYSAMLLINEIGPIARFPSPKKLVSYAGLAPSTRQSGNHTTHGPITKEGNSHIRWILVEAAQHASRHDPRLSQFYMRIMKRRGHNRALVAVARKMLVTIYRVLNHHREYRGLRPELFENKIRRLERITNSSLQTA

SEQ ID NO: 431809 - protein, 343 aa, unidentified
MLHAGIDMHKEFLVVTVLDGDGVEVVSPMRIPTSGLCIEEFFGEFEPEEIAAVLEAGPNWYWLCDQLDELGIENRLCHPLKTKAIASARIKTDKIDSRTLADLSRANLVAEPYKPDIKTRYLRELMRGRSFMVNLRTGLKNRVHSILVKVNVKNPYSDLFGIGGMGFLESLALPGVYRDSLDSYLEVIGSLNGEIAEAEKKATRALEGSPEARLLSTIPGVGLITSLMITAEIGDVSRFGSHRQLCSFAGLVPSTWQSGGTTRHGRITRQGSAWLRFALVEACRHAVGRPGPLADFYGRLAKRKGKSTAKVAAARKLGTYVYYMLRDGKDYGELVCFLNGERG

SEQ ID NO: 431810 - protein, 482 aa, unidentified
MKPKSPEKAKPATRRPMQGNWHQMNRKQRREMTRRIQSEDLSLAVIHPDAAGIDIGNESHYVAVPPTRDSQPVRRFGCTTAELKEMAVWLKQCAIRTIAMQSTEVYWIAVFDILEAAGFEVYLVNARETKNLPGRKSDVQESQWLMKLHTYGLLRNSFRPSQEVRTLRTYWRQRNDLVQAAGRHIQRIQKALTQMNIQLANVLSDVSGMTGQAIIKAILSGQRDPHELAAFRDPRVKASAEEIARSLEGNWQEDLLFVLRQEQHGYEFCQKQMAECDQQLQQYFSHSEDRSQGASMPQEKRKERLRKKKGNKPQFDLRAELFRITGTDLTRIDGIDVMTAMTILSEAGWDMSKWKDEDHFVSWLRLCPDNRISGDKIIGKGRLPSKNRVTIALKMAACTLRTSNSYLGAQFRRLRTKLGPPVAIKAMAAKLARLVYHMLRDGMQFVDRGAQFYEAQHRNLQIKSLKRKAAALGFQIIAAAAA

SEQ ID NO: 431811 - protein, 448 aa, unidentified
MEILYPRCAGLDVHKKNVKACFASPAKGGKRQKETRTYLTMTADILEMRDWLKEQGCTHIAMEATGVYWKPIYNLLEGDFEILVVNAHHIKTVPGRKTDVKDAEWIADLLSHGLLTASFIPSAPQRELRDLTRYRAKLVEERAREVNRLQKTLEDTNLKLGDVVSDVMGKASQMILHAVVEGETDAVHLADLAAGRVRASRQTLERALTGKATAHHRFLLGEHLRQIEHLDEAIKRISEEITRRLTPPEPPTPQREEEDQSLSSATTEADLPSSLAEPPALLNWQQAVEIIDQITGISQRIAEGLLAEIGVHMGQFPSAKHLASWVGVCPGNHESAGKRLSGKTRKGNPYARQLLIQAAHAASHSKNTYLATQYRRIAARRGAKKAAVAVGHSILVIIYHLLRDGGAYQDLGGNYFDERDRQVVQKQLVRRLERMGYQVELQQMAQAG

SEQ ID NO: 431812 - protein, 472 aa, unidentified
MEPGYRRCCGIDIHKKSISVCVLPPAGNRSLPVKEEQFRTFTRDLKRLRAWLLNCRVTEIVMESTGQYWRPVWNILEEAFPAMVLVNPIYVKALAGRKTDRMDAKWLATRLERDDLKGSFIPPRDIRELRDLTRLRVHWLEDLNRIKNRIGQLCESGNIKVSSVASDLFGVSGRQMLTSLVEGKRDAGWMADYARGALRSKKGQLELSLQGTFSTHQRLLLARMLNQMNALEAQLTELTAEIEQRVACQEDLIRRIATIPGLDRISAWTVLAEIGTDMSVFGDASHLASWAALCPGNRETGGKRISGKTRKGNRYVRRILCQSAWAASHKKDSHLAALYRRVRSRRGEQKAIMAVAHQLLLIIFHIVRDGGVYLELGANHYDEQNKPKVTRKLVERLKKLGYHVTLAPVETPVAATPVSAVVLDSEPPRPRKRGRPCKCVERGIPCAHGRVQPTATQIEKFGNSEPAQGLTS

SEQ ID NO: 431813 - protein, 365 aa, unidentified
MKKINRNATTVLTHSNQTLTAGLDLGDRWSHYWIENEDGEMLESGKTKTTREALGVHFPASQPMRIALETGTHSNWVRTHLESLDHEVIVANARELRAITGSDHKSDPHDARKLAMYARIDPRILCPIQHRSLEAQHDLAVLRARAALVRVRTTLINAARGLAKSSGYRLPSSASERFAARSRENLPTVLQASVGPLLQQIEQLSIQIQKMGADITRLAEQKYPETARLKQVPTVGPITALTYLLTIEDPTRFRKSRDVGSFLGMCPRRSQSGKRDPQLGINKAGNVYLRSLLVQSAHRVMWKKSPDTALKRWGLRLCERGGKNGKKRAVVAVARKLSVLLHMLWVSGKTYDPLYGCRSSACLAA

SEQ ID NO: 431814 - protein, 414 aa, unidentified
MDVLHPRCAGLDVHKDSVVAAVRLVEAGTVRTEVRRFDTTTPGLLALGAWLAECGCTHAVMEATGVYWKPVWHVLSDGDLTLVLANAAHVRNVPGRKTDVADAAWLADLLAHGLIRPSFVPEPATQAMRALLRTRKQLVREQSGHVQRLQKTLEDANLKLASVLTDIMGLSGRAILEALIAGETDPDKLLALVHRRVKAEPAQLRAALSGRVSQSHRFLLRLHLGQYDALAKALEEIDAEVERGLDPFRDAIHLLRTIPGIGDLAAQAIVAEIGIDMGRFPTAAHLISWAGLCPRSDESAGKRRSTRLRKGAPWLKTTLVQCAWAASRKKDGYLRAQFQRLRQRRGPKKAVCAVAASMLTAIWHMLHDGTVYQDLGANHFHKRSPEQQARHLAQQIAKLGFTCSIMPQPDMVSA

SEQ ID NO: 431815 - protein, 345 aa, unidentified
MKNLFIGIDFSKEKIDATIITASGLEELSARAYDSFTTTVSGYNKFVRWVKKNSNDIEESAWLFCGENTGDYSKPLCNYLYGKGYDIWLENAKCIKDASGLRRLKSDKADSAMIAEYAMRNHDRAELYVTLNESLLQLRELFLFRQMLVRQKHGFQVRRGEKNLTMEKSSTKTTISQIGRHMVNECNKQIEKVEKKIKDIIDADEELKRTYELITTIPGIGTQNAVCLLTFTNNFTRFGYNARKIACYYGIAPFGRDSGTSVHSDPHVHYMANRMLKAMLTQAALASIRCCAPISHYYHRLLSLGKKKQVALNNVKNKLIHIITAMARNNQPFDSGYININQLVA

SEQ ID NO: 431816 - protein, 357 aa, unidentified
MLSSNVKYIGLDVHKEAIAIAVVNGAGKLVMESIVETKSSTVLDFLHGLRGELHVTLEEGTWAAWLYDVLKPHVREIVVCNPRRNALLKEGSKSDKVDARKLAELLRSGMLRAVYHGENGLQMLRELARSYLTISKDLKRVKNRLKALYHSWGICCAGQQVYAARHREQWLSKIAQVGVHRRAELFYQQLDGLLVLRNTVRGELLAESRKHQAVRILRQVPSIGPLRAALLLALMQTPHRFRSKRQLWTYSGLAVVTHDSAQHRYVDGQLQRSKKPQQIRGLNQNHNHAMKEIFKSAALNASRCAGPLQDFYARLLAKRMKPDMARLTLARKIAAITLALWKKGGSFDAEHLKSQAA

SEQ ID NO: 431817 - protein, 334 aa, unidentified
MKSDTVYIGVDVSKAKLDVYVPPKKEGLRAVTKELENNVKGFRELRNLARVVNATVCVEPTGGYELELIAFMHRFKVPVAYADALRVRQFAKAEGNLSKNDTIDAALISRFADKIGVRIINENDIDTVELKRKTKFRQTLIDSRTALICKLETEIDKEIRSMIGEQIKHLNKLIKKIEASCMETVEKNQPMKNLVSRFTEIGGVGNLTAVSILAELPEIGRINDAKLNRLAGLAPEEKQSGSKEWQRRIWGGRKDVRNALYMATVAGIMWNSILRDYYRKKRAEGHPHKWAIVPTMRKLLSLLNRIARDPDFRPTPEPESTKRLAGVGRKRKLA

SEQ ID NO: 431818 - protein, 400 aa, unidentified
MLSIGIDVSKGKSTVCGMKPGGEIVYAPFEVQHTREGMSELVSLLRSSGEEVRAVLESTGSYHCPVVAALLENGIFVSVVNSLRMKRFCSQSIRKVKTDRIDAMQIALYGLAYWQELQPTKLPEDTYRELQLLARQYYQMTSILIKAKVDFNALCDQVLPGMQELMSDHAGRHKLSDFVLRYRHTTHILEMGETRFRKDYCKWAEKKGYRNCERMAALIFATAQNGIPVLPNAPSTQIVITEAIRVLHTVEASRDAILTQMQALAKTLPEYSLVREMPCIGDTLAPRLIAEIGDVRRFHSKRALIAYAGIDAPPYQSGKFCANNRHISKRGNRYLRKTGYEVMQSYVMHKPANDPIFTFIEKKRGEGKSGKLAMVAGLNKFLRVYYGKVTELYRSLPAIE

SEQ ID NO: 431819 - protein, 426 aa, unidentified
MGKGKYRAVFIKDVDASGLKKALSDQRCVVGIDVAKADFFASVMDASRQVRVTVKWTHPADSREFVEFVSMLSEDATVELAMEPTGVYGDALRERLLRRGHALYRVSPKRAHDAAEVYDGVPSLHDAKSAAIIARLHQDGASEPWPVLSDHERGLTAALRVLELHDKQMQRNIGQLEACVSRHWPELTTIMSLTRATLVELLATYGGPAAVARDPDGARELMGRVGRHMLASETIEAVVASAHSSFGMGQTDEETRMVRAIAAECRRHQLASNKARRRVERLSVSDGASLNIGKVVGKTTAAVLTASVGTATKYETASAYEKSFGLNLKEKSSGRRKGALHITKRGPGVARRYLYLAVLRLLQTDEVIQAWYAKKAKRDGGCKQKAIIAIMRKLVRALWHVARGNAFDSTKLYDVSRLELEEVATM

SEQ ID NO: 431820 - protein, 321 aa, unidentified
MTQIANGVAGIDVAKDKVDGCIRKLGVRQTFPSSSLGHRQLVALLRKHKVTKAVMEASGGYEREWAKALREAGIEVRIVDPKRVRSFALSAGRLAKNDTIDAEMIAWFAETFDEAPSQIYDAAREELAGLVKARKNLMDLKTRLQNQTEHVVPGLAQKAHSQVLKTLAAQIAKLEAAIFARVKATPEFAERAEIIESVPGLAVMTSALLIAGAPELGKVSDRIAAALIGVAPYDDDSGKRRGERHIKGGRRWVRNGLFLPCLGAATQHNPVLKTYYEHLIAKGKEPKVALIACMRKLIIILNTMIARGEKWNPTQPRVAMN

SEQ ID NO: 431821 - protein, 364 aa, unidentified
MAISGLSPTELTKEAPIIMLHVGLDLSRKRLDFDLLCEDGSRLERGAVPPDADGLRGLARRVGVFGEPVSAAIESMNGARFVHDRLEELGWQVEIADAQKVKGLAPLACKTDRIDAWVLAELSCRDLVPAIWLPDPAVRAERERARWRLHLVRHRTSLKNRVHATLLAFGVPCPVSDLFGSRGRGLLERLELPDPWAQTVNASLALIEDLDEQVRSCERELRALGADHEYVPLLMSAPGIAWVLGYTIAAEIGDINRFGSPSKLCGYTGLCPRVHQSGERDHRGSLAKNGPKYLRWAMIEAATHAVCSPVYRERYQKTAKRLGAQRGRKVARVDIARKLTEAIWYMLTRNQPFAPAGATTPLAA

SEQ ID NO: 431822 - protein, 391 aa, unidentified
MVCVGIDVAKDKHDCCILDSDGTIRADCITIPNNMDGFKQLLQTIRDCTKKSDKIKVGLEATGHYSYNILGFLLDKDLAVYVMNPLHTNLYRKSLSLRKTKTDRVDARTIATMLLSDVDLKSYTDTAYHNEELKSLTRYRFDKVRERAKLKQSVSRLVTILFPELEKIVPSLHIASVYALLSEYPGAKQISEIHLTKLTNLLATASKGRYGKDKAIQIRDAARTSIGSVMPAKFLELKHTIKLIRELTSEIDEIEVSIQKIMDELNPPILSIPGVGIQSAAMILAEIGDFSNFESPDKILAYAGCSPSTYQSGKLTNCYAHMEKRGSRYLRYALYNATKYVCHWNPVFAEYLAKKRAEGKHYNVALSHATKKLVRLIYALQKSGKAYLVAA

SEQ ID NO: 431823 - protein, 315 aa, unidentified
MNFVGIDVSKSQLDIAVRPGNKRWSVVNAEADIIKVVETLNALSPQVIVIEATGGMEMPLAAALSQARLPVVVVNPRQVRDFAKAVGRLAKTDRIDAEILAHFGEAVKPDVRLLKDKDTQTLAALVTRRRQVIEMLTAEKNRLGISPKVVHKDIKKHIDWLQARLEDMDRHLDSAIRKSPVWREKNDLLRSVPGVGHVLSVSLITGLPELGTLSRRQIAALVGVAPLNRDSGLFRGKRTVWGGRAHLRAVLYMAALSASRVNPALSLFYRRLVEAGKKPKVALTACMRKLLGILNAIIKNRIPWQADYSTCPNIP

SEQ ID NO: 431824 - protein, 429 aa, unidentified
MLSFDFSLDTLDVALRAPDGRWLIPHQPFSNNRAGFQQLKGEVLAHLHGLEGVQLITVGESTALQWWHAFYQISTDPDFAPFDPTLILLNPAHVKHFRKALPEEDKCDPKDPRLIDTYYRTRRPPHAYTFDERYLPLRCLTRAYHRLIQTLAAEKAFCLTLVYLLASDYQRLKPFSDPFGVTSLHLLSEYPDIATIADLPLADLSNELHRLARGHLQDPDETARQLQQIAQDSYPLPDSLRPTLHFVLQQTLDHIRFLEEQKTLYTTRIEEELALLPEAELALTESGLGPILVAGCLSKIQDTQRFTTGQKYDAKGKCYRPRTYRDGQAAVAKMAGLWWPRHSSGRFEGQDRRLARERNPHLRYWFVQAAYSLKRHQPEYRAYYQRKYREATRHHHKRALILTARKAVRLIFALLHKGQMAQLEEAPKP

SEQ ID NO: 431825 - protein, 350 aa, unidentified
MLIIGCDYHPSFQQIALVDTESGELQERRLKHRDEAEHFYRALAAAGKKVRVGMEASGHAGWFERLLAELNIELWMGDAAKIAAKRVRKQKTDRRDAQHILTLMVKDDFPKIWVPNWENRDVRQLLWHRHRMVQTRTRIMNQLQAAALNEGLRYKKKLWRESGRQQLESLPLAPWASRRRHDLLEVLDRINPTIAELTQAIEQQAEKCPEAQCLMTHPGVGALTAMAFVLIVGEAERFGCGKQIASYLGLVPEEDSSGERRRLGHISKQGNSLLRFLLVEAAQVTVRSDMRWRNWFFHLAQRRGRKIAKVAMARRLAVRLYWMWRRRWNYAQLESFGSHVGQPVNRHGVQ

SEQ ID NO: 431826 - protein, 509 aa, unidentified
MTVTIGFDWDEAGGYYAAVGDGSHVIEHGKMTADVPGLVALLDLMHQHADADGTLPYLVMEASRRPIVDALVDHQVTVLACNPNELNVRSKGRNKLKSDRKDAIRLVQTFRIEPQAFRQVPKPSVEARAITLLAREAKDSVFAVHRAAGRARSCLAEFFPNALDAWGPIELATKPEAAAILIAFPTPTVAQAATAEEIRVVVKATGKQSHIQLAVDKALKAFASPRVQYATALEESYGLVLRGLLGELQAAMSHRKALEDRLDVLVPAHPLGKVLLEAPGIGISVASRILGEMGDDPNRFDTKRGLAAFSGMAPVLSQTGKSSGHHTRRQVKGNRLHAALWDMAGSAVQHSPGAIAYYWRKREEGDQHPTAIRKVGRRLSHGLWHVAKNGDAWDDAVMWPDAPATKADAQAYADDVRERLGKERKKAKPVALAPTTAKDTPAPMQERSTTPADDTVAPDGTTPFEDGAVDVVGEPFPDPPSSAPPRSATTSTRRACSPPDRPRTTRAHE

SEQ ID NO: 431827 - protein, 325 aa, unidentified
MYYIGLDVHKKTISYCVKDASGQVQREGTIGATRNELDWWLKTLPEPRMMAMEATIFTGWIYDHLLPHAEQVKVAHPLMLRAIAAAKKKNDRIDAGKIADCLRCDFLPECHMASTEIRDRRRTLRYRHLLVRQMVQMKNRISGLLMETGVSHNKQRLHKVGYFRELLSSNEEVHENIRPLLRLSRETIVRCQKTEYALVSSLQRDPLLAERIKRLRRDVSRFRSVKQAISYCGLCGEEKSSADKVLRTPLSKQRNKHIQHVLVEAAKLAPRQNHELALIHERETQKGNRNRATLAVARKMVAYLLAVDRREREFVPAEVRSTVAA

SEQ ID NO: 431828 - protein, 369 aa, unidentified
MQRKEISFKGQKVFIGIDVHKDSWRVAIAPEVGVVKGHSQKPSARELLDFLKKYYPDGEYHAVYESGFSGFSTYYALQDVGIDCIVIHAADVPTTQYEETMKTDKVDAAKLVRSLKSGLLTGIYIHKRDDIDARSVVRLRKTIQKQLGSYKSRIKHLLHSNGVTFPERFSTPGSHWSKVFIRWLKEEVALLSATRISLDLLIVQVEAIRKTLLMATRNVRELSRSERYRHGCELLTSIPGVGINVAMTLLTEIGDINRFHNEKEFASYLGLVPTSHSSGGKVAHGEKTFRGNKYLGPQIVEASWVSIYRDRGLGCAYLNYKKRMKPQEAIVRVARKLSNIVFSVLKTGQKYKPYEWDEKQKHTDLQATS

SEQ ID NO: 431829 - protein, 416 aa, unidentified
MQEILGISCGLDVHKDIIEGCILEVNGTGEPEATYETFTTMRGDIMRLREWLAEQECPNVAMESTGVYWKPIYEILEDVEGINLCLVNAQHMHNVPGRKKDKDDAEWIASLYMCGLLNKSFVPEKGVRSLQEYTRYYVKLTQENTRLVNRIEKLLQTHGFKLSSVLSSIVGVSGRRILGILCERGMVSVADVESSLARGVKKSAEEIAYAVNGKLTQSSQRLLGIMLDGLDSCNEQLAVVRHEMRRTAEPYANAVTILSTIPGIDDLSATYLIGEIGVDMSRFNKGAASLCKWAGLTPRDDESAGKIKSSKILKGNPYVKSILCQCAWAATKTRNTRLSNWYWRNVKRLGQKKAIIAVARKLLVYVFHMLSSGELYDTRLDIADTENLKAMKLASAKQQISMLEKTLQNESVVATI

SEQ ID NO: 431830 - protein, 410 aa, unidentified
MEVLHPRCCGLDVHKETVVACVRLVIDGKTVKEVRTFSTTTASLIALSEWLAEAKCTHVAMEATGVYWKPVWHILSDESFELVLANAAHIKNVPGRKTDVKDADWISDLLAHGLIRPSFVPDPQTQEMRTFLRTRKQFVREKSSHILRIQKTLEDANIKLDSVITDIMGLSGRKMIEALIAGEKDPAKLAQLADRRVRASQQTLREALCGRVTNSHRFLLRLHLGHIDALDAAIAELDREVEAAIVPFRTAVEQVTTAPGINSLAARTILSEIGTDMSRFPTSGHLISWACICPRNDESAGKRRSTRIRKGSPWLKTTLVQCAWAAARTKDSYFNAQFHRIRARRGPKKAIVAVAASILTAIYHMLKDGTMYQDLGPNHFSARDKQRQKNRLIKRLADLGYVVELVPQAS

SEQ ID NO: 431831 - protein, 308 aa, unidentified
MNDRNEDNHLRISNTDEGFKLLVKWFDRKSLALTDIIVCMEHTGIYSYLIRVFFEKKCVMYSMQSPLEIKQSLGITRGKNDKIDAFRIAKSCYLHRDFIKPSKMPSEVLLKLQRLSSEKKRYIKQLVGHKQCISEKDEYESTSAVDRTFKMMKETESIIHEIEKEMEELICADLSIKKNYDLLLSIVGIGMVNAITTIVNTENFTSFQNARQYACYVSVAPFEHSSGSSIHGQTRVSKNGDKQAKADLSQAAKFAATWDKEIKQYFERKKEQGKPYGKIMNAIKFKLIERMFAIINRGTPFVRLQTYA

SEQ ID NO: 431832 - protein, 412 aa, unidentified
MRRVIGIDVHRTFGEVVIWEDGVLRHVGRVDMTRTALEGLGKKLRSTDEVVIEATGNSMAVSRVLTPFVARVIIANPLQVKAIAQAHVKTDKIDAGTLASLQAAGYLPQIWTPDAATERKRRLAARRYQVVRHRTRIKNEVHSILHAHLIPKCPHADLFGARGRVWLARQPLPDDERAAVDRHVRELDRLAEDLTVLDREIAQAAIDDPAVRRLITITGVNLTVAAGIVAAIGDISRFKSPQKLVSYFGLNPRVWQSGLGAAHHGRISKVGRSHARAMLVEAAWAAAKAPGPLHAFFVRIRARRGHQIAAVAVARKLTVLCWHLLSKDEDYLWARPALVANKTRAMELQAGHPQQKGSRRGPAYTYNVKALRDQEMLVAAQAERSYERFVAQWKPRRPKEPARGRLKSAGHK

SEQ ID NO: 431833 - protein, 273 aa, unidentified
MNYLCISAEQFVLPVLGLDVAKASVQAELRTKERKVRFDFANNAKGFAQLARVLDQQGAPKIWIWAGLEASGAYSQALALWLHAQGHRVSLLNPRRVKQYAQSAGRRNKTDLLDAAIIADFVCAMKPAPWQPPTLEVAQLQALVRRREELSVMLQAEKNRLEGLLAEMARPGQVERARQAAAHAGLVPRREQSGSSVRRNRGLGREGNRYLRKALYMPALVAIKYNAPLSHFASRLRSAGKPKMSIVCAVMRKLIHIAFGVLKHQPPLNPSLA

SEQ ID NO: 431834 - protein, 343 aa, unidentified
MTKRRRYIGVDLHTNSITVCTLQKGEPERMQTLPLQGGGMEQFTAGLLPSDEVAVEATGNSAWFRQQVLPHVSRVAIIAPWQFEVIRRSVKKTDKHDARAIAFFLSKDMLPEARLKSVAHTQLSSLIATRDQLVKLRISLLNKAHGMFNRHGIKVKKEALTSRVGFARNVASHDWSALEQVELEVISAQLDSIKTGCKQLEKEITRFAKTLPGYDNLISIKGIGPLSAAVFICTIGDIKDFAKTGKLAAYFGITPRVSQSNDSHRVGRITKRGNKIARTTLVQCTLVAKRYSPYLHKFYEHIKSTRGVGKAIIATARKLLNTIYYTLKNKWVFEDFPKFEIKT

SEQ ID NO: 431835 - protein, 407 aa, unidentified
MEENRKRYIGLDVHKHYLVALGVDADLNVVLPMRRVELSNLESWMKKNLTKQDEVVLEMTTNTWQLYDELVEYAGLVMVVHPPHVALLTRSQVMNDKIAASILARLLAKGLLVGIWVPPQEVRELRGLVAQRRKMTHLATQAKNRLHAVIQRHHLKPPAGNPFAKTNNGWWLALPLGKLEKMNLQSDLETLQFAEQQEARIQKEMTGIAAEDEEIGRLLHISGLGVISAVTVYAAIGDIRRFAEPNKLVGYAGLGTRVHDSGMTMRTGKITKAGRRDLRVALVEAAHVVANSHPHWKAELARLEPRLGYNKAIVAIARKLLITVWYVLQGKADKYAEPKAVAQKMLKFAYTVGKANRAKGQTAAQFARIRMDALGLGGELTSIPWGSKKPIPLPPSKLKGRSDVPNK

SEQ ID NO: 431836 - protein, 416 aa, unidentified
MLRIVHPICCGLDVHKSFVFACIATTDENGVTTYRSQKFSTFTCELMELAQWLAVNNCKDVCMESTGKYWYPVWNILEPTCNLVIAHPKYVKAIRGKKTDKKDAKWIADLFKHDLISGSFIPPADIRQLRDLTRYYRKLVGFNTGEKNRAQNCLTISNIKLDDVFSNVFGKSATAITERLLENPGEVFDVAPYVDGRCKTPIAKIQEAIDGSICMEQAEKLKIIRSHMGNLELCKAELESVILGIAQKYLPQLELILTVPGIRNPFTAASIIAEIGVDMSVFPTVGQLCSWAGLVPQNNESAGKKKTTRITHAGTYIKPLLVQCAVAVSKSEKHPEIRNRYLALRKRRGHKKAIIAITRMMLTAIYCMLKKNEPYNAELYRKADNPPEHRQISTQEAIFILQRQGYLITESQAVAQ

SEQ ID NO: 431837 - protein, 408 aa, unidentified
MKTLHQRCAGLDVHKQEVVACLRLGRRGRVEREVRRFPTTTRGLLELADWLEAARCTIVAMEATGVYWKPVWHILEGRFELVLANAAHIKGVPGRKSDVNDATWIADLLAYGLIRASFVPPQPIHDLRDLTRTRKQLSREIVRHEQRLQAVLEEANVKLTSVITDILGASGRRILKVMIAGETDPSRLAELGSRRLGCSRETLVEALDGRVRDHHRFLLEQHLKTIEQLEETMAAFDARLEAALAPFRDTVECLTQVPGLSTTAAEVVIAEIGLDMSRFPTAEHLLSWAGLVPALDESAGKRRSTRVTKGAPWLKPVLVQCAWAAANKKNSYFEAQFLRLKGRRGPKKAAVAVAASILTTVYHMLRDGTCYQDLGPNYFARRNPARTARKLADRIRNLGYIVEIRSAA

SEQ ID NO: 431838 - protein, 363 aa, unidentified
MINPPSVIGGVDTHKYTHHAAVIDDQGRLLGDQGFPATAAGYGELLTWIRSHGRVQAIGVESTGSYGATLTRLLTGAGERVIEVNRPNRQARRADGKSDRLDAEQIARSVLGLTATATPKAKSGPVEVIRTLRVTRSSAVKARTQAFNTLHGIVIGAPSCLRDELVKLSKRTLVNRCSGLRPETESLTELVDHPDRFLVASIKLTLRNLARRWKDLDAEVKALSCQIKALVELAAPELVELFGVSFELAGQFLVTSGDNPQRIRSEAAFAKLCGVAPQPASSGRTTGRHRLSRGGDRNANSALYIVTIVRMRHHEATREYLARRTAEGLSKREIIRCLKRYIAREVYAALPRSSVETTPSLAA

SEQ ID NO: 431839 - protein, 385 aa, unidentified
MTKQLQYTTFIARDYDIFGGLDVDKKSMAVTFRDHGIMRKSLRLPYSASQLLNYTEKHFPGQRVAFVYEAGPTGFGLHDELTAASHACLVVSPSMVPTVQRKRVKTNRLDSLKLAEGLRGGQLHGIHVPAPGYRELRHLVQLRDTQVGQLRASKCRIKSLLLYEGIPFPAANGKWSGPALRQLEALPCNATVRFKLDQLIDALQFHFLAAAKVQKQIRYFCQNDPELRGCISFLVSLPGVGTITATHALARLGDWRQIKDVRQIAGFLGLVSSEHSTGDKENRGEITRIGDSRLRNKLIQCAWTAIRKDPELRAFYRRIYERQPKKVAARKAIVAVARKLTTRMYAVLKEQRPFVIRADSSIAPLTAEETGGPRERLDAAQNEQP

SEQ ID NO: 431840 - protein, 387 aa, unidentified
MPQPNDLSRSLVTLEQDSILIAVIEMGQSSWLVAGIVPGIERQPLKKLAADQDGLLQLLHRWRKEAAQAGHPIKRIAVAYEAGRDGFWLARWLRAREIEAYVIHPSSVPVSREHRRAKTDRLDTELLKRAFLGWLRGEPKHCSMAAIPTVEDEDARRPSRERESLVGECTRIVNRVKANLARLGIRGFRPRLAHAPKRLETLRTPEGTAVPANTLAELQRDMAHLRFVKQQIKEIETARAKRLEQASEGGRDAMVRLLARVVGIGIETADMLVQEVFSRKLRDRKAVARYAGLTGAPDESGQKRRERGLAKAGNARVRHAMIELAWGHLLHQKDSALAEWYQKRTVDARGGTRKTMIVALARKLLIALWRLVTTGEEPAGLLLRPAA

SEQ ID NO: 431841 - protein, 341 aa, unidentified
MAKFIRTAIDLGKNYFQVHALESEGGRSISRKVKRSKLHEVFSQIEPCRVGMEACGSAHYWARQLAAMGHEVVLIPPAYIKPYVKRGKNDVVDAAAICEAMSRPDMRFVPIKSDDQQAVLMLHKTRELLVKQRTMTVNALRGHLAEFGIVAAKGIGRVDELLALAKADAALPPIAMAAVACMAQHLEGLDLSIATMEEEIARTHRQNPTSRVLDEIPGVGTLIASVIAASVPDPGVFKSGRDFAAWLGLTPRQNSSGGKEKLGAITKQGNRYIRKMLVTGATSVLRVAGKRKGAFADWINALRARKPERLVAVALANKLARICWAIMTTGEGFRTDTYVKA

SEQ ID NO: 431842 - protein, 324 aa, unidentified
MLCVLDESDRIVFSKRLSNDHAKIEQALRSYPGEIQGVAIESTYNWYWLVDGLQDAGFTVHLVNTCAVKQYDGLKHTGDFDDARHLAHLLRLGILPTGHIYPRHERALRDLLRKRGQLVRQRTSQVLSMQNLIARNLGAHAKGNEIKRWQAADIDAMPLLPEQALALKANLAVMDCLDEQIRQLERVILQQARDSEVFQALNTVPGIGKALALTIALESGDMTRFASAGHFASYARTVDSRRESNGKNKGSGNAKCGNKHLAWAFIEAAHFAVRYDETIRRWFQKKCAKTLQVVAIKAVAHKLARACFHVMKTGTPFDAARAFG

SEQ ID NO: 431843 - protein, 317 aa, unidentified
MKTAEVVYVGIDVSKETLDIDAGELGVTRVANTPLDVRKALAAIARRAQAGKAPQVCFESTGPYTGALIAECQVMGLPYSILNPYKVKHFAKSITQVKTDAMDARIIRLYSEVRRPAPTPVPHKALAELDTLVLAREAVMRSVIALRSTLETLNGTHAEKPMRRIIAFNEKKIAEYDGLLAEAVKKDAEVSGLVGALSAVKGVGTLTAAKVVSGMPEIGRLGRRKAAALAGLAPHTRESGQFKGKSRIGGGRKQVRDALFMPATVAIRYNPEMKRIHAHLMAKGKPYKVALTAVMRRLICHLDSVAKDYYARRKEIA

SEQ ID NO: 431844 - protein, 331 aa, unidentified
MKFKESLGIDVSKKTLDVTLHRKGAHHIFSNTRKGYQALLLWVEKQTVLTTGQVLICFEHTGLYSLPLAVFLSEQKVVFCMESALHIKRSLGLVRGKNDKVDAKRIAEYAYLRRQQLKPFKLPSKNVLKLQKLLSLRERMVKQRASYLASIKEYKTMLKQKDNKILFSVQRKIIHYMDKQINTIEQEIEQLIDGDNKMKEVYRLIVSVKGVGLILASNMLVVTNCFMAFKDSRKFACYAGIAPFEKQSGISLNSKPRVSHFANKKIKSLLNMAAFSAVQADPELKAYYQRRVENGKSKMSTLNIVRNKIVHRIFAVVKRGTPYVPLYQHAA

SEQ ID NO: 431845 - protein, 391 aa, unidentified
MRVIGLDVHRSFAQVAELENDELRQRGRVDLARDKVLAFARTLRPDDEVVLEATGNTMTIVRLLKPHVGRVVIANPLQVRIIAEAKAKTDRIDAAALARLHAAEYLPEVWQPDERTELLRNLVSRRATIVQGMTRTKNRIHAVLHANLIPPFAGKLFRAPGRKWLAEQPLAEHERAVVQRWLAALDAMETELTAAEAAIASACLGDDRVRRLMTIGGINMVVAAGVLSAIGDVSRFASAEKLVSYLGLDPRVRQSGDRAAQHGRISKQGRSHARGMLVETAWAAAVTPVPLRAARKIAVLAWHLLTKGEDYAFARPALVAMKERQMQLKAGVKSRRGGNTPGKARDYSIKKLREKERAVVEQAEKAYKRFITAWSEKPKPGLARTHQAMRR

SEQ ID NO: 431846 - protein, 345 aa, unidentified
MDVAAIGIDLGKSTFHLVALDQAGQIVLRRKLTRRKLVDLTATLPSTLIGMEACGGAHFLARLLREQGHDARIIPAQFVKPFVKSQKNDFLDAEAIAEAVQRPTMRFVPVKTEEQLDMQTLHRVRDRLVGCRTALINQVRAVLLERGLTFPKGRASMAHVVAELVAADTDEVTAATRELLALLWQEWQELQTRVEDLTARIEQAAAQDEVCRKLTAVPGIGPLTATALVSAVADGSMFRRARDLSAWLGLVPQQRSTGGKTKLLGISKRGNSYLRRLLVVGAQSARLHLNRERHPRLGGWLTRLEQRAHRNTVVVALANKLARTAWVILRQGRDYDPAFGLPVEA

SEQ ID NO: 431847 - protein, 358 aa, unidentified
MHRNSAQGAGQIIGQMGGLQVIGLDIAKSVFQLHSVDMATGEIVNLQLKRAKVLEHFANRAPCVIGIEACGGAHHWARELTAQGHTVRLIHAKAVRPFVSGNKTDATDARAIWLAVQQPGTKFVGMKTLAQQATLTLHRQREMLMKMKVMQINALRGLLYEFGATFARGRNALFSEIEATLESLANSMPQYVADSLREQVQRIKQLGADIKAVEVRLTAVLRADTDMRRVAQIPGVGLLTATAAIATMGQAKAFKSAREFCAWLGLVPKQRGTGGRVNLLGISKRGDTYLRTLLIHGARSVLTHAKEPGPWLEQLKGRRPANVVIVAQAAKMARTIWAVTARQQDYQRGYQSIRRQAA

SEQ ID NO: 431848 - protein, 462 aa, unidentified
MTKRRKKAKSRSFQITKLPAQLQHINLNAAGIDIGSERHLVAVPEGRDEVSVREFGTFTVDLEALAAWLKTCGVTSVAMESTGVYWIPLFELLERRGFEVKLVDARHVKNVSGRKSDVLDCQWLQQLHTYGLLAGAFRPPDEVCVLRSYLRQREMLRQVASQHIQHMQKALQQMNLLLHNVVSDITGVTGMKIIKAILAGERDPRVLASNRDDRCKQSRATIAKSLVGNYRAEHLFALRQALDLYAVYQAKIADCDEAIIKQLEKKPDLSDEQPPSGDRYVQARDRVRGGIDVRELLFKKSGVDLFAIPGLAADHLLTLASEVGFDMSPWKTEKHFSSWLGVCPGTKRSGGKTLDSKTKRNPNRAAQAFRMAAASLSRSRTALGAFYRRLKARRSGAQAVTATAHKLARIYYAMLTKGANYIELGQQAYEQRYKERRIAQLKIQAKSLGFQLVACTADKSSF

SEQ ID NO: 431849 - protein, 349 aa, unidentified
MKKSSKMLKRMRETIGIDLGDKVSRYCMVDQEGEVMEEGTFRNQASSLEKHFGDRPRRIALEAGAQSAWISRELKRLGHEVIVANPRELKWITSSDTKNDPVDARKLALLARADVRLLAPVEHRSAEQQGELAVIRGRDAILRARTLLINSARSIAKGFGVRLPKSITHTFGERAVDALPDFLRAALTRLLEQIDALSRAIAGYDQQIAELAAKHPELERLESIPGVGRLTAMTFVLTLGRAERFAHSRDVAGFLGLRPKQRQSGARDPQLGISKSGDPYLRKLLVQCAHHILGHYGKDSALRQWGLAKSEGGKKATLRAIIAVARKLSVLLHRLWVSGEYYKPFPKMA

SEQ ID NO: 431850 - protein, 326 aa, unidentified
MPQPARPSSPCFVGIDVAKARLDLAVRRADDPPTGARAAWSVPHDEAGIAQLVARLTPLAPTLVVREATGGLELPVAAALTVANVPVAIVNPRQVKAFAKVVGQHAKTDALDAALLARFAETIQPPVRPLPDAAAQELSAVLARRRQVQGMLIAEGNRLGSALPVVRPRLERHIAFLGEELAEVEQELAQQIRASPVWRERDALLRSVPGVGVVLATTLLAELPELGLLSHKAIGALVGVAPLNHDSGRQRGRRIIWGGRSRLRGVLYMAALVAVRCNPVIRAFAERLRAAGKPTKVVLTACMHKLLTILNAMLRHGEPWRTAPVG

SEQ ID NO: 431851 - protein, 355 aa, unidentified
MKDQAIHYLGLDVHQATVVATSRNESGAIVLKATVPTEAKAIVGLVRGQGPRVHVAFEEGTQAQWLHDLLQPVAERVIVCNVRGKKELVNKNDDIDSGLLSERLRLGSLRGVYHGAASVLALKEMVRSYGNLVEDATRVMQRIKALFRARAIPTPGTGVYGTRQRAEWMSKLKGSGIRLRAESLFTQLDALLPLRHKAKEAMIAEARRHPAWKILRTIPFLGPVRVAQIIAIVGTPFRFRGKRRFWPYVGLGVVTHSSADKEIVAGTIRRRRRPPLTRGLNRNHNRVLKDVFKGAATAAAHKDGPLKDLYEQTLAHGVDPDMALLTLARKISAVALRLWKKGELWDPAKLTIQAT

SEQ ID NO: 431852 - protein, 348 aa, unidentified
MRFYNKQHNYYCGIDLHADAMYLCALDATGETVLHKNIPTKPKSFLRLIKPYREELVVGCECMFTWYWLADLCAEEKIDFVLGHALYMRAIHGGKAKNDKIDSYKIAVLLRGGSFPLSYVYPKEMRATRDLLRRRNHLARKRAELYSHIQNTATQYNLPPLGRIAKPSERGDLLQKFDDPVVRMMVEVDLRTIEHYEKLLEALERKLEKIANAHDPVSLALLKSIPGVGRILGLVMLYEIENIARFPRQQDFASYCRLVKPLKESNGKSYGHSGKKIGNAHLRWAFGEAVVLMLKGNKPVQELKQRLASKHGKGKALAIMSHRLGRAVYYMLKNQVPFDQERFLRKGV

SEQ ID NO: 431853 - protein, 366 aa, unidentified
MTSANIIPADAVLVAIDIAKVRNEVLIEDPSHKRRRRLQVLNNRAEHDRLIEVLQTYGRSVVCGFEATGNYHRPIAWRLAEAGFEVRLVSSLALARTREALHNSWDKNDPKDAQVMLHMLKIQATQFYHDPLRAGINHAQELSKTHEAIARAKTEIQHRILTHYLPLYFPEIERFRGNSRSDWFFAFLDAFPTPASIVVLSKEEFVKAAWGVVGRKVSKTQILMDIYETASTSIGLPLPLEAPAVRMFRMVVAEARSLIRQRNEIEAQADELLRHSQDYQLLRQIPGVGPIIALTIIAEAGDLRRFHHHRQFLKFCGLDLSTQQSGQYRGQTRLSKFGNARLRRALWIAGQVAIRQRENGFRVRIR

SEQ ID NO: 431854 - protein, 424 aa, unidentified
MKYTQNEKILQIKNETLVVGIDIGKESHYARAFDNRGIELAKLLRFSNTAQGYEALDEWMHKIIEQKEKTESIVGFEPTGHYWFTLGDHLQKRGHRLGIVNPFHVKCTRELDDNSPTKNDRKDPKTIAMLVKDGRYRDVYIPADLYSELREAVSERERLQEQLIALSNQIHRWLDIRFPEFITVFKDWGGKTAQATLKHFPTPARVVAAGTEGLLAIWQEHLKKISLKRAERLVQAAAQSIGRTAGNEAAEAALANLLTQYELITGQRREIEQLMQELLWRVPNAEKMLEIKGVGMVTATVIVSEIGDIRRFRDPRQILKMAGLSLKENSSGKHKGKTTISKRGRRRLREGLFRVMIPMLATNAEFRALHHKNLTRATNPLSKMQSIIALCGKLVRVIYAMLTKGCSYDAEKMTTDMNRSMKAA

SEQ ID NO: 431855 - protein, 414 aa, unidentified
MFYVGIDIAKRSHVACVMREDNSLEIKPFEFSSTKSGFDKLRAQLTSLACDVSEVLIGMEATGLLFDNLYRFLRSLEYRVVLLNPYQSAKFREMDTMKRVKNDNIDAQMIAALIKSGRFSEGYVNDDQLQSLRTLYRHRASLDDQLKSIKRQTQTVLNVVFPELEQVLSDPFNITGLLLLEKYPTAKHYEYASEKRILKTFRGIKGNNFNEAKAKKLLTLAKESIYSGAAKEGYAATIRSNITLVRLLKEQMQSVEEAMLALFETKELSKEVQEEMSKLIDNLRTIPGVSDKTILALLAECGNLDRFHNAKALVGYLGLYPTLEQSGDTHKNGRLAKRGARLAKKAIYLAAIAAIRHNKELRQIYMNYRSKGRAKKECIIITARKLLAIIYAIYMHNVPYDPQRVFVAQPNNKT

SEQ ID NO: 431856 - protein, 331 aa, unidentified
MEQAVVIGVDVSKHELVMAVHPTGDTWTSETTAIDIEALIARLQTYHPRLIVMEATGGYELPLAAACAAVKLPIAIVNPRQVRAFAHAIGRTAKTDAIDASVLALFGARVEPPPRAVADADTQALAGLVTRRRQLLEMLGAERRRLEQAPPTGPITRDLRHHIRWLERRVADVDEEIGTAIQQSAVWRVSDDLLRTVPGIGPTTARTLLAELPELGRLDRRAIAALVGVAPFNCDSGQFRGRRRIWGGRASVRASLYMAALVASRHNVVLAAFYRRLRDAGKPPKVALVAVMRKLLTILNAMMKHHCGWNPKAASTPASTSRPARGVAVLA

SEQ ID NO: 431857 - protein, 412 aa, unidentified
MEVLHERAAGLDISKKDAKVCVRVPSKRAGYYSNTITTYGAFTSDILRLRRDLEQAEVTVVVMEATGDYWKPFFFVLAETLNVELVNAKQAKNIPGRKTDVSDARWLAELAAHGLLRASFVPPEPIRQLRDLTRTRTNLIREQTREYARMEKNLEDANIKLSLVASSLTTKSAHAILTAMVNGERDPHVLAGLAHVSMIKKAPELVEALTGRFSDHHAFMVKLHLDRINEITESIEKINDRIDSVIEPFLPAREALSMIPGLSKTSSENILAEIGIDMNVFPSSAHLASWAGVCPGQNESAGRIKSTKTRPGNKYLKGHLGAAALSISRSENTYLGVKYRRIQARAGKLKAVVAIEHTLLVIIWNMLATGEIYIDLGIDYRQTRDPDKIRDRAIRRLQALGYDVEVTPTAAA

SEQ ID NO: 431858 - protein, 401 aa, unidentified
MDPHLCIGIDVGCKAHRVGIATPDGSILEEFDISHTDAGFQDFFRRVESRRQQLSLPVAVAMEGYNGYARPLDRLVQEKGYRLYNVNNLKLARFKEVFPGAAKTDPIDTRKILELFRLKDQLPMAKAAIQEVVSAPLVNEKLKRLSRRRRRLVIEKMRVLNRIQADLQAVCPELLAATNDADNLWFLRLLTFREDLRQLARLHGSTIRQIPGVGEKFSQIIQDWQRKAQFSHEVEYVGAMIIQDARRILELRSQIHTLDEDLEELADQSEIARRLSTIPGFGKTSIAELAGEIGTMQRFSAETSLALYLGICPLTHQSGQMCRARIPRQVNTRCKAALMTAVAHHKRCVPQSGAYYDRKRADGKTHNQAIRALGRHLVRVIWAMLRDQRDYEIREDVHPTP

SEQ ID NO: 431859 - protein, 345 aa, unidentified
MHIASIGIDLGKTTFHLVALGERNKVLVRKKFSRAQLLAYTANLPAALIGLEACAGAHFVGSALREQGHQVRLIPAQFVKPYRKSNKNDFLDAEAIAEAVTKQNMRFAQLKTQEQLDWQAMHRVRDRLVRRRTALINEIRGFLLERGITFAAQPIHLRKNLPVVIEDAEQNLSPRLRWLLDRMWQEWKQTETEIEAITDEIERISNEDARCRQLRQIPGFGPLVSTATVAAIGNGSAFRRGRDFAAWVGVVPRQYSTGGKQKLYGISKRGNIYLRRMLIHGARAVLFRVKYDTGGFGQWVHRLAQRAPSNKVVVAIANKLARIAWAVLSSGKDYRHQPLLQPAAA

SEQ ID NO: 431860 - protein, 385 aa, unidentified
MDPHKRSATIEVMTANEDVVGKGRFGTDAVGLAEMRRYVNGIQPDPDLRVWAVEGCNGIGHHIAVRLLAAGEQVVDVPPKLSARARVFATGQGRKTDATEAHSVALVGTRMTGLRQVVDDEQLAMLRVLVDRRRSLGEEHSRKVSQLHAMLLELIPGGAKRDLSAAQAKKLLATVRPRDIAGKTRRRVAAELVGDLERIYARKKAANKELRDLVAATGTSLLDLPGIGPSGAARLLVEVGDVTRFPDRGHFASWNGTAPIDASSGDVVRHRLSRAGNRQINRTLHIMAVVQLRNPGLGRDYFDGKKAAGKSSNEAMRCLKRRLSDIVFRTMLDDAVVRKVTGSGGHRGNDSDSSAAGSQPHTSSSDKPHRSPSRTQPRTPLPAAS

SEQ ID NO: 431861 - protein, 376 aa, unidentified
MERGSLMLNTTTFVGLDVHARSIKAVALDAMTGEVRSATFGYDAAEVAGWVSSVDPSAKCVYESGVTGFDLQKRLSSMGIDCVVGAVSKMIKPSADRRRKNDRNDAEFLARMLSVGNVVEVCVPDDECEAARDLARALDDAREDLKRCKQRLSKFLLRHGLVFSETNAKGQRKKNWTAAHWAWIRSISFPDKADDEVLAYYIDAVRQAMENKKRLEKLVEAEASKPRWKKRVDSLRCLKGVDAMTAADIVFEAGEFSRFKSARSFAAWIGLTPSEHSSGESARQGGITKAGNKHLRRVLVEAAWHYISASPHPKDLAKGQAPDPAARRHAAKGIRRLVKRREEMLGRGVHKNKANVATARELACWCWAVGRMVENG

SEQ ID NO: 431862 - protein, 346 aa, unidentified
MTYSTTVGVDLAKNVIQISVVSSRGKELSNRSLTRKKFAEFLGKQKQSLVAFESCATAHYWARAAQRHGHEARIIPAKFVTPFRQGHKTDSNDALAVAEAARRPNIKEAPMKTVEQQGLQAIHRSRELLNQECTALSNHLRGLLLEFGIVIPKGFASLLRTVPEILEDGENELPDLYRPTLHRMYARLRELRGDIEVMTKEVERLAKAHPICSKLMALEGVGPISALMLYATMGSGTAFSGSREFAAYLGLAPKQYSSGGKTNIVGLSKKIGNSRLRSVLILGARAYTYKLKEPKSSKDKWLKAIIERNGESRAAVALANKNVRTAWAMVTQGTEYQHRPLLEMAA

SEQ ID NO: 431863 - protein, 423 aa, unidentified
MTKRFSTPTGAVLVAIDMSKHRQEVLIERPEGGRRRRMTVMATKPDYDRLASDLAAIGRPILVGFEATGNYHRTLAYRLLAAGFELRLISSVALARTREALHNGWDKNDPKDAQVILHMLRIGATQAYVDPLAAGINDLQELSKTHETISKAKTQTWHRILTHYLPLYFPEIGRFAGNSRSDWFLALIERFPTPGSITALGREAFALEAWPLVGRKVSKARLINDIYQTACTSIALPVPEDSAAITMFRMIIAQARGLIRERNRIEEIAQATLADHHDYQLLRRIPGIGPINALTILAEAGDLRRFGHHRQFLKFCGLDLATCQSGTFRGRTKLSKYGNARLRRTFWMAAQVAARQPNNSFRDKLGRYIAGHADDADRRRKAMTALTAKMARVAHAVVKTGTEYRPFLERPGARWKDPSLQGP

SEQ ID NO: 431864 - protein, 317 aa, unidentified
MSKDTIPRVYVGIDISKDRLDVCLMPGDRRLTFSNDTEGLSQLVDRLSKEVSPLIVMEATGGYDVPIAGALLSKGLPAAIVNPRRVRDFARAMGKLAKTDSIDSHVLARFAQELKPPIRALPNEKERFIRELVSRRQQLVDVRTAEKNRLHKAFSPQVKKSIQLIIDTVNKQILEIEKELDDEIKGNPVWNEKDQLIQSVPGVGPNTARILLAALPELGMLSGKQIASLVGVAPFNRDSGKMRGRRMVSGGRISVRNILYMAALVASRHNKIIGEFYSRLRKSGKTGKVALVACIRKLIVILNAMLKKKQPFCELYA

SEQ ID NO: 431865 - protein, 309 aa, unidentified
MNPDQKIYCGVDVSKNYLDAFTDGKTVRFANTVKGICALMKRAGDVHYVFESTGGYERPAAWSLLAAGRIVSVVNPGRVREYAKSIGQIAKTDRIDAQVITRFAELVHPRKAELPSADQRKLAVLVERRQQLIDMLVAEGNRLDTAGEPYLHKMIQKHRQWLEKQIQQIEQAIEETINGNAEMKQKAVRIQSIKGLGRVSAATLLAVLPEIGNLSRKEVAALAGVAPYNRDSGTFRGRRHICGGRKRLRACLYMAAVCASRSNPHLKVFYNRLVEENHCPKKVALTAVMRKLLIAANSAVKKSEYLVAA

SEQ ID NO: 431866 - protein, 323 aa, unidentified
MIKKDFNIVIGADIAKKKFDVACLLEGKFKHKVFTNDAAGFASFVAWYLSLCGDISPLICMEGTGAYSLPLADYLVNHGFSVSLVNPAKIHAFAKSELSRAKTDKADAKLIARYALKMQPPLWIPPPANIRELQALVRRVEHLLEMIQMEQNRLETADASTHLSITNVLNTLQTELKSTRKAINDHIDNNPDLKQRSDLLETIPGIGEACIAHLLLALSEHHGFTHAKQVAAFAGLAPVLRESGQWRGNTHISKTGDSALRKVLYMPALCAKRYNPVIQVFWDRLQSNGKNGKAITCAAMRKLIHIAFGVIKSGKPFDPNYAS

SEQ ID NO: 431867 - protein, 363 aa, unidentified
MDTNIITNQKKSRVSFFGQTIYLGIDVHKKNWSVTVYLGGTFFQTFHQESKSLVLANYLHSHFPGAVYKACYEAGFCGFSVQRELSSLGIDCIVINPADVPQTNKGSLSKTDASDSKRLAIALSKGMLNPIHIPDRVTEADRQLIRYRKKIQVQLQGRRKSLKSIFHIAGVIIPVEHDKPYWTGNFVKWLRSLALAETSLNKTIQLIVDDVEVFRKRLLETNKLIRELSVSDRYSEVFTVLSSAAGIGIITAMTMLTEIGNIERFDTFARFNSFIGLCPSEFSSGEDTRKGGMTPRNHSAIRPLIIEAAWIAIRTDPVLALKFNELIVTRTKKRAIVVIARKLLSRIYCIWTKKQEYEKGILK

SEQ ID NO: 431868 - protein, 342 aa, unidentified
MCLAIGIDVHSKKLTSFAVPQNDEDIEETEFCMEFNKEFRSTPADRATLSRAADWLKDREHLILIENSTKTHEVFWILTDLGCTVVVANASDLFRITMSVKKTDYHDCRELAHYARRYLDGEKEFSTCLMVTAEQLNRRQLCRTYAHASSDLSDLRRRIRSYILARGIAVSVPGREIVSEATLRELDKVADSSMRLLIDEARHQRDRMRRIKNEILKEFKDDETFQLIYSIPGFGIVTASYLSAMIIDIDRFTSPGAYAAYHGVVPKQRESADHSVRCGITRRGDDIAREMLVTGTFIHISQDKDRVSDVSRFYDRLRNRGFPHKKALLACSNKMAHKIYSH

SEQ ID NO: 431869 - protein, 344 aa, unidentified
MKITTVGLDLAKNVIQVHGVDERGKTVLKRQLKRDQVASFFANMPACLVGMEACGSAHHWARKLQSLGHEVKLMAPQFVKPYVKTNKNDVADAEAICEAVARPNMRFVPIKTAEQQSVLSLHRARQAFVKARTAQGNQIRGLLNEYGIVIPQGIGPVTRRLAEIVEDGGNELPGRFRRLLQRLADNLKEMDRQVGELEREIKTWHRESEASRKLEKIPGIGALTASALTASIGDASCFTSGRQMAAWLGLVPRQRSTGGKATLLGISKRGDTYLRMLLIHGARAVIRVCERKPDPDRWLKGLMGRRNKNVAAVALANKNARIAWALLRYDKEYASDYAPAFAAE

SEQ ID NO: 431870 - protein, 412 aa, unidentified
MEVVYECCCGLDVHAKRVVACLITRGRKEIRTFATMTDELLQLGDWLSSVGCTHVAIESTGVYWKPVFNILEGLLTVILVNARHIKAVPGRKTDVRDCEGLADLLRHGLLKASFIPPPEIRELRELVRYRHTVVTEHTAVANRITKLIESANIKLGQVASEVLGRSGQLMLRALAAGETNAETLAEFAQGKLKNKKAELRRALTGSLTPVQRWVLTELLTRVEELEAARGRVETRINEAVAMCTDSFVPEAVELLKSIPGIGQRTAQTIVAEIGVDMSRFPSAKHLASWAGVCPGNHESAGKRKSGQPTKGNKSVRTILTEAAWTATRAKETFLHAKYHRLAKRMSKQKALGAIVHRLLVICYHLLKRRVPYAELGTAPLDEQQVAWQRRRLVEQLVGLGVKVTIEEGAAVT

SEQ ID NO: 431871 - protein, 342 aa, unidentified
MSIVGGFDMHRKQITFDYLDTTTGELRRGKITPADRRTLREWLGRFADYPESVRFVVEGCTGWRYVVEECRRAGIDIHVAEPADTASARGPKRHAKTDKLDAKHLRELLVQGRIPESWIPPEQVLEVRAKVRLYKDLRDERTDWIQRIRATLYHQGVPALPGGVLAASNRATLEAGKGLSPAGAQAVAVALRQTDRLDAEINALLAEIRSFAAIQPGCKALQRHYGIGKLTAVIIWAELGDTRRFSASRHAVRHTGLDISVYSSDGKRTRGHLARQGPPLLRWALFEAAKSAAKRTSPDHAYYLQVAERAGANRATLSVARKLARRGHHTLRELGDQAFAPV

SEQ ID NO: 431872 - protein, 400 aa, unidentified
MISVGIDVSKGKSTVCILKPYGEIVSKPFNITHTQKDLSELSSMLFRLNDEVKIVMEATGIYHLPVLTYLQEKGFFVSVINPYLMKSYRNESLRKAKTDKIDSRIIANYGIDHWFKMKEFQTSGEIYEELKLLGQQYRHYMKLHLLSLAELTHLLDLTMPGIKNLLASWNETNRKDKRSDFVERFWHYDVITSMSEQEFTEEYILWAKEKKYVPSQEKAKVIYALAQESIPTLPSETSSFKMLVTEAVRVLKEVDATLGLILSRMQEIAKTLPEYPVVREMGGVGNTLAPKLIAEIGDVRRFRNGKALVAFAGIDPPPYESGQFVGCNRKISKRGSASLRKVGYETMRSLKMRSRPEDPVYRYVVKKESEGKSKKSAKIAGLNKFLRIYYARVTELYKNI

SEQ ID NO: 431873 - protein, 347 aa, unidentified
MRFYTQQHQYYCGIDLHARTMYVCILDQAGHIVTERNMASAPEPFLSFIAPYREDVIVGVECIFTWYWLADLCAREKLAFILGHALYMKAIHGGKAKNDRIDAQKIAMLMRGGMFPEAYVYPAAMRATRDLMRRRNHLMRKRAELIAHIQNTNSQYNLPEFGKRVSKKHERVEIAAHFPNPQVQQAVALDCTLIDYYDELLPKLERHIQACAKEHDPKALLLLKTIPGIGMILALIILYEIHDITRFPRVQDFMSYCRLVKCSRESAGKLYGHSGSKIGNAHLKWAFSEAACTFLRGNHEAQKLHQRLVKKHGKGKALSIIAAKIGRAVYFMLSRERVFDRDKFFAG

SEQ ID NO: 431874 - protein, 422 aa, unidentified
MVHVHGARVQRLSARTRGVPLERLVAVPVDVGKSTATAMACDFAGQVVVPPVGFALNLSGVAGLVARVEARLAAATRLVRVGVEAAGHYHRPLTTSGVWPDGWQVVELNPGHVAMQRRVNGQRGVKSDHVDLTAIADLLLAGRGSEVAVPADPVVELTGWVAHRRRRGAARTAVKNQLTGQVDRAFPGLGACLSSVLGTKVGRLIIAEFADPTRLARLGVTRFRAFAARRGVRVSTPVAQRLVEAARQALPTADAAVARQVLAADRALLAALDAQIAAADDRIKGLVPATRFHVLMTVPGWGPLRAAGYAAGVGALDRWPSHRQVYRTAGLTPAMYESAGRRRDGGISREGSVHLRRALIDMGVGLWHRDPAARAYADSLRARGKRGAVIACALAYRANKIAFAMVRDQAVYDPTRWAADLT

SEQ ID NO: 431875 - protein, 429 aa, unidentified
MNYTQNEKLLQVGEKNLIIGIDIGSQKHYARAFDWRGIEYSKKAYAFSNDVEGFAGFLKWVSDIQEKTGKETVIPGMEPTGHYWFNLALFLRDNGIQPVLVNPLHVKRSKELDDHLPSKNDMKDPKTIAKLVIEGRYVNPYLPEGVYAEIRNASNMRFQIEAELTRNKNRIQRWLAIYFPEYTEVYGSFDAISSMMILRQAALPCDIINLGADRINQIWRDAKLRAVGKKRAQTLVDAAQRSIGYTEGLDTARFEMTLLLEDYDRLQSRLKQITELIEKLVRKVPYTEKLLQIKGIGMKTVSGFIAEVGDISRFTDAKQIQKLAGQAIVENSSGKHNGKSRISKRGRKRLRYLLFEAVLSLAATNPEFREIHRYYTSRKINPLKKMQSLTALSNKLIRVFYTILKHGVDYDPKKLLSDIRRPEEMPQAA

SEQ ID NO: 431876 - protein, 344 aa, unidentified
MDHFAGLDVSVKETSVCILDDAGRIVKEVKVASEPLALLKVLGNPTYCFKRIGLEAGPLSQWLFSALAEAELPVICVETRHMQAVLKAQINKTDRNDARGIAQMMRVGMYRPVHVKTLRSQKLRMLLTHRKLLQSKAIAIENDLRATLRNFGLKVGMVGTMRFEARILELVETIPDLAVLVEPLLVVRRALREQIVILHRRLLAIVRDDEVCRRLMTTPGVGPVVALTYRATVDVPARFRKSKSVGAVFGLTCSRYQSGEIDWSGRISRCGDEMMRVMLYEAAQSMLHSKKWSWLKAWAMQIARRRGMNKAIVALARRLAVIMHRIWVDGTEFRWTREPATAAA

SEQ ID NO: 431877 - protein, 431 aa, unidentified
MQLKQRARKLALVRGEPTVVVGIDIAKRKHWAWVVDGRTEVPVGSPFHFQNSREGFDRLLGKIARAKEKAGATRVVVGMEPTGHYWKPLAWYLQQAGFTVVIVNPAHVKASKELDDNSPTKNDRKDAWLNAQLVLQGRFSVPYLPDGVYAELRILTQARQQHRRKLNAALNQLQALLDEYFPEYTEVFADPLGQASLYVLQYRPFPQDVLAVPVTQLAAELRAASNRRVGLRRAQDLQEAARRSIGVPYGLDAARLQLRQILQEVIFWKERLAETEAAMAEALEKTGLARYLLSVPGVGVVTAAAFLGEVGDLRRYADWRQLRKLAGYNLTENTSGQRDRSRTPISKRGRPGLRHVLYQMAMTAAAKNREFRALYEHFRTRQQNPLKGKQALVALACKLLRVLFTLVRKQCSYDPARALGAWRAEQLGLAA

SEQ ID NO: 431878 - protein, 390 aa, unidentified
MFYLGIDIGKNNHVASLIDDKGKPVFKAFSFTNSTVGANSLLDKISNFKELEIGMEATGHYWLALYSFLIEHNFVIHVINPIQTDGWRNATQIRKHKTDAIDSMIIADFIRYGDLKETQLASEEILELRDLTRFRNYQVSSISDLKRKTICVLDQVFPEYESIFSDVFGKTSKEILMTFESVSDFADISTDKLEKILENITLKGFAKKKLNVISEAAKTSFGITFGLQSLVFQLRQLIAQINFIEEQVKQLEQRISTLLEALNSPITTIPGIGEINGATILSEIGDIHRFDNPKKLVAFAGLDASVKQSGDSNSDKTKMSKRGSTYLRTAIFSAAQVASNCDPVFKDFYQKKRAEGKHHLTCVGAVARKLCYTIHDILTKNCPYEIQLNS

SEQ ID NO: 431879 - protein, 393 aa, unidentified
MIYAGVDIAKTDHVIGAVDERGAEMCRPMPFKNTEAGLERAVAWLEGLAGPPSDVVVGMEATGRCWMACYSFLVARGYSVAVINPMQVKAVRKLKGLDKVKNDRIDARLIAEALRIGQYDETRLATDEAASLRSLSRYLQSLRGMAAELKTQCVCLMDAHFPEYAGMFSDMFGAGSRAVLSRSPLPFELARRRADSLARDIAEASRRGGKSAGYAAKIKAAARSSIGVRLGQEAASFQVKSLIRQIEFADSECAKVEARVRALLDEVEPLALTIPGASYATGAQIVSEIGDVSRFRNAPALVSYAGLNSSVSQSGQFDSGGGPITKRSPYLRRALWLAANRARQYDPGLRAFYDKKRAEGKPHRVAVTAVARKLCRIVFAVMRDQVPYGPGRE

SEQ ID NO: 431880 - protein, 367 aa, unidentified
MKDVTTYVGIDAHKKDLFIAMLIGPGKTPVTWTVPNEPQAVRRLVRKLERDASGPVQVCYEAGPCGYALQRQMTTARVSCQVIAPALIPRKPGERIKTNARDARKLAELHRAGLLTEVRPPTPEEEAVRDLCRARDDAREDLQRSRHRLGKLLLRRGLHFSGRNWTRAHRQWIHSLTWAQPAERVVVDDYQLAIDHLEARLIELDARLSEIAQTDPYREPVGWLRCFRGIDTLTAILILAELHDFRRFPSARALMAYLGLVPGEDSTGDKHRRGRITRTGNTLVRRLLVETAWHYQHRPSIGIALVKRRKGQPGRVIAIADKAQQRLCRRFRRLTEQHKPAPKVAVAIARELTGFLWAALQPAVPAN

SEQ ID NO: 431881 - protein, 332 aa, unidentified
MDLHSNNSVLAILDEQDRVVHERRLPNEIERVLTALAPYRDDVQAIAVESTFNWYWLVDGLMDAGYTVKLVNTAAVKVYEGLKYTADEHDARHLAHLLRLGILPTGYIYPKEERAVRDLLRKRAQLVRCRTAQILSVENLVSRNSGNGISTKEVRQLDEEAIGQVCGGDKMRMLAIQSNLAVLRCLDEQIQELERVVLKQAKLKPEFKKLLTVDGIWNILAMTIMYEAGNMERFAKVGQFASYARCVGSSRWSNGKKKGEGNRKNGNKYLGWAFVEAAHFAMRKERIRRFYERKKAKTNGIVAVKAVAHKLARACYHVLKDQVSFDLARAFA

SEQ ID NO: 431882 - protein, 312 aa, unidentified
MTQNTRFVGIDVGKFEICVYRADLGQPFSLPNTKAGHAELVQRLGNPAEQTIALEPTGGCEWAVWEALENAGFDVRQVSAAHVRNFARSLGNLAKTDPLDARMIARFMAFRPDSGRHLPLEILRRLNVLTTKRRQLVAFKKTLTCQVRQRGSQAVKELDEAHLALLADQISALEARIEAVLQSDDRLKRHAKILRSIPGVGPVLTAALIGQMPELGSLSEKRAAALVGLAPINHDSGKYAGKRRIKGGRTVLRHLLYQAALVASNHNPALKPFAQRLKEKGKPHKLVLIAVARKIIIIANALIAKNVVWGTI

SEQ ID NO: 431883 - protein, 402 aa, unidentified
MNAVGIDVSKSKSVVAIMRPFGEIVSTPFEIKHTASDIHSLIELINSVEGESRIVMEHTGRYYEVLAHQLSEANLFVSAINPKLIKDFDNDSLRKVKSDKADAVKIARYALDKWQNLKQYNVMDELRNQLKTMNRQFGFYMKHKTAMKNNLIGILDQTYPGVNTYFDSPARSDGSQKWVDFASTYWHVDCVRKVSLNAFIDHYQNWCKRKKYNFSQSKAEEIYGKAKELVPVLPKDAITKLIIKQAVDQLNSASTTVESLRTLMNETASKLPEYPVVMAMKGVGTSLGPQLMAEIGNVSRFTHKSAITAFAGVDPGVNESGTYEQKSVPTSKRGSADLRKTLFQVMDVLIKTHPQDDPVYQFLDKKRAQGKPYYVYMTAGANKFLRIYYGRVKEYLSSLPES

SEQ ID NO: 431884 - protein, 339 aa, unidentified
MELYAGLDLHSRNTYIGIMDDALNRVFKKRVPNDLEQILHTLKPFKKRLNGFVVESTYNWYWLVDGLMAAGYSTAHLANPAAIKQYEGLKYSDDQHDAFFLAKLLILGILPEGYIYPKEHRPVRDLARKRMFLVRHKTANILSLQSLIQRCCAVKISTSDIRKMNVEALESWLKEEYLIFSAQTSLDTINFLKQKIKSIEKAIIKRVKLKKGFRQLLTIPGIGNILAMTIMLEVGDIRRFPKVGNFASYCRFVPAKRLSDGKSKGSGNRKNGNRYLSWALTEAAQIGRRHNEQFRGYYNRKVAQANTSLATKALGNKLARICYYIMRDQVSFRGELMAH

SEQ ID NO: 431885 - protein, 432 aa, unidentified
MRSTKMAKQNEEMIAAYIGLDWADSEHEVTMLVVETGEVESRKLKQESEALAEWVQSLQQRFAGRKVAIAVEQRKGALIYALMCYDFLILYPVNPKTLARFREAFNTSGAKSDPGDSQLLLDLIRLHRDKLRPWVPEDADTRLLQMLVEERRALVDDVTRLTNRLKSTLKQYFPQALEWAGELDSRQALDFLTRWPTLQSIRKAGDAAVEKFYRQHGVRNQDKVEQRVKAIKQSRALTTDRAVVEASKMKALAIVRQLYVLGKSIAEMEARIQELFEQHRDHPVFSSFPCAKKVLAPRLLAAFGGDRTRYESALELQSFSGIAPVTRSSGKSKTIHKRMACPKFLRQTFHEYAGQSIKKAGWARVYYQGHRDKGVKHHAAIRALAYKWIRIMFRCWQEQEPYDEAKYIASLKRRSSPLVPGLPPAPTAPVEV

SEQ ID NO: 431886 - protein, 313 aa, unidentified
MYYIGIDVSKKALSLFDGQNDLEFENQAGLKALKRYLKKRYQTFDNLGIIFEATGIYSDHLKAFCADHQIKAFILNPKQSHNFARSLGKRSKTDKIDARTIYAYCKLIAKEKMQVPVIDQGAKMLFSYLTSYQFAQKQRVALSNHLESIQDKELLKLLKQELKRAQRLEDKLLTDMKTYIKNHPKLQKDFQRLLTISGIGDKTAFGLLALFNTYQGTNRAQMTALVGLDPTKRESGTSVKGKAKISKNGNKHIRKMLYMPTLCAIKNNQKIALFYQRLIANHKPKKVAVIAAMRKLLLVAHAIYRNKTEYVAI

SEQ ID NO: 431887 - protein, 329 aa, unidentified
MVELGIDVSKAKLDCTLLLDVGTLRCRSKSVPNTSEGVKALLQWVERHSGCTPEQVRAALEPTGVYHEAAALALYEAGVRVVVVNPAQLRDFAKGHAVRTKTDAKDSLVLALCAAQVKLTAWQPAAAEIRELRALMSRLEAVEAELRAELNRQEKAQIAADPQLVQGSIANAIAFWEAERDRLQRAIDEHIDRHPGLKSEQARLLSIPAVGEKTANRMLCLLHEGRFRCASQLAAYLGLVPVEHQSGTSIRGRPRLSKAGNARMRAALYMAAVTAIRHNPDVRALYQRLLSRGKAKMSALCAAMRKLVHICFGVFKNAQPYRPQIEQTA

SEQ ID NO: 431888 - protein, 342 aa, unidentified
MKFYCGIDLSARDCHVCVINEQLKVVIQQKLRNELPKICQLLAPYKANLKIVVESTFNWYWLIDGLQAAGFEVVLAHTLGLYLITGAKVKTDRRDAYSLAKLLLVGAVPAAYIYPVETRPVRDLLRRRLHLVQVRAGEYGSLRRLLLRQGILSRKQQEIKTATEAELEQWFEHPLVRLHASQELQRIELYSQQIAELEKTILELAKTERAYELLLQLPGVGQTIALTILYEVGELTRFANVKVFSSYCRVVPGIAQSGNVTGRGRASKQGNHYLKAAFSQAAVHAVRCYPKVRRYYERQLKRHQGRGRQMICYNIIAHKLAQAAFHVLKEQTEYREELLFGR

SEQ ID NO: 431889 - protein, 460 aa, unidentified
MNRKKSKSKVDRTMPVVHPNAAAIDVGATMHMAAVRADRAPEPVRSFGTFTADLHRLVDWFAECGVETVVMESTSVYWIPIFELLDARGFTVFLVNARDAKHVPGRKTDVSDAQWLQRLHSFGLLRASFRPKGQIAELRAYVRQRERLLEYAASHIQHMQKALTEMNLQLHHVVADITGTTGLRIIRAILAGERDPETLARLRHYSCRSSVETIAKALTGSYRAEHLFALEQALALYDAYHEKASACDVRIEAVLKELIIQRGRDHGSAPPASRRRNRTDQANALAFDARTALFGLLGKDITTIDGIGPYLSLKLIAECGDDLSSWPSAKHFTSWLGLAPSNKVSGGKMLSSRTRRSGGRTAALLRLAAVTVGRTDTALGAFYRRLSSRIGKAKAVTATARKIAVLFYNAVRHGMDYVDPGASSYETRYRTRVINNLHRRAKSFGFVLQPLEPKAGVAVS

SEQ ID NO: 431890 - protein, 329 aa, unidentified
MSALVCGLDVHKDSTYATILTSEGKIVNQTRMNNERVLSYLSHFKVARVAMESSNQVAPLYRQLTREGYLVMVSHPKKTRYIAEAKIKSDRVDSKAIAELARLDALPLAYMPDKETAMLREKVRRRAFLVRERVKLRVKIKSILTYEGLKWPSDHGLFTGKGEAWLHGLNLESVESYLRVLKPLDDEIKFVSKQLKGMAEDNEDVKLLMTIPGIGYYSALLIKSEIGDVNRFPFGDRLCSYAGLVPSTHASGSTVRHGGITKEGSKWLRWVMVEAAQAHVRMYDTAMTQAYHRIAERRGKQVAVVAIARKLLMCCYSVLKNKRPYYDQI

SEQ ID NO: 431891 - protein, 344 aa, unidentified
MEKVSIIGLDLAKRSFQAHGALAEGGVAFRKKLSREKVLAFFAEQPRCVVAMEACGSAHHWGRAIRDLGHEVRLIPPAYVKPFVKRQKNDAADAEAIAEAAVRPTMRFVAVKTEEQQGRAMLFRTRDLMVRQRTQLINALRGHLSEHGVVAAQGPANVKVLAEAVEDQGQGSSLPLLVVELARVFLDQIEGLSKRISELEKVTVHEAACGETTRRLQTMPGVGPITALAIETFAPPMDVFKRGRDFAAWLGLAPRQHSTGGKQVLGKVSKMGQRDIRRLLIIGAMAVVRSASRKGAPEGSWLQRLLARKPKMLVAIALANKMARSIWAMLAKAEDYRVPVAAAA

SEQ ID NO: 431892 - protein, 354 aa, unidentified
MIIIGVDFHPEFQQIASVDTDTGEFQEKRLTHCEEAEKFYRAVAASGQKVRVGMEASGHGRWFERLLAELQIEMWIGDAAEIRAKRVRKQKTDRQDAQLILRLLLEDRFPQIWVPSWKNRDLRQLLWHRHRMVQARTRIMNQLQAVALNEGLRCKKRLWRERGRQQLESFRLAPWASRRRRDLLELLDRLNPTIAELSLTIEQEVEKCPEAQRLMTHPGVGPLTALTFVLIIGEANRFQCGKQVASYLGLVPLEDSSGNRRRLGHITKQGSSMLRFLLVEAAQVTARSLPQWRSKYLHLMMRRGRKTAKVAMARRLAVRLYWMMRQGWDYQQWSKFGSHAGQPGNRDGVPSNTE

SEQ ID NO: 431893 - protein, 312 aa, unidentified
MAHLSHGGIDVSSDRLDVMLLPEGQCFWVPNNAAGWAELVSRLRGLSIAAIGIEASGGYERGVTRALLAEGISVRQINPFKLRQFAKASGVLAKNDRLDARMIALFVATMPTRPAQRNQAAERVAEVVTARRQLSDEKVAAENASRLFEDVSLRRLYRRRLTRLSLDIALLDKRLAEMVSADTTLANRYRLLTSMPGVGPVLAFTLIGLLPELGQMSRKQVAAIVGVAPYDFDSGKMKGMRCIWGGRAPVRRVLYMAALTACRYNPALKTFHERLAAAGKKSKVAIVAVMRKIITTLNAMIRDNAAWNVRSA

SEQ ID NO: 431894 - protein, 379 aa, unidentified
MHAITLHLGLDVHKDSITIAIAQAGLKGEIRVFGTITNDLHALEKALTRIRKAHHGAPLEVAYEAGPCGFGIARRLQQLAVPCLVAAPSLIPKQPGAPFKTDQRDARSIARLLRAGELTGVYVPEPTDEAIRDLCRARTDAVDDQRRCRLRLKSFLLRHSYRYHGQANWSQPHMRYLRELVLPHPAMKAILEEYLQGIDAAHDRVQRIEASMLTLLETWRLKPAAYALMTFRGFQLVAAMITVSELGDIHRFVHPRQLMTYLGLVSVEHSSGPRQHLGAISRCGNGHARWLLVECAEHYLAPPKVSKELSRRQEGQPPEVRALSWKAQNRLHLRFTRLLARRLQRNKAKVAVARELCGFIWALLRTQDCYRQATGGAAS

SEQ ID NO: 431895 - protein, 352 aa, unidentified
MRRYIKKIHEGMEIFVGIDMHKTSWHVTIMSEPGEIWHGNIPGEWEALRGGLDHYRGCRIHAVYEAGCFGYWLYDRIVEYGATCIVTPPSLVPMEYGNKVKTDRRDSKKLAYLLQKDLLKDVYVPTEEERSYRQVFRQRRQLIEDRVKIQHRIKSTLLFFGIEIPEQTGPFSRGYMDRLRKIRFSNRIQDRSFRILLDEYDYFSDQLERQTELIREIAALDKYRDRMALLTSIPGIGMLTAIEILVELQDVARFRNPEQLAAYLGLTPSQYSTGEKIHMGHITKVGKPHLRATLIEASWRLIRRDAKARAFYEQLRARAGSKRAIVAVARRLIIQIRKMLLSNSPYSENAAA

SEQ ID NO: 431896 - protein, 398 aa, unidentified
MTESSDYESVQVFIGVDVGKDTHHAVAVNRSGKRLFDKALPNDENKLRSLISDLKQHGQILLVVDQPATIGALPVAVARSEGVFVGYLPGLAMRRIADLHAGEAKTDARDAAIIAEAARTLPHALRTLKVADEQIAELSMLCGFDDDLAAQTTQVSNRIRGLLTQIHPALERVLGPRLEHPAVLDLLQRYPSPDKLASLGEKKLATQLCKLAPRLGKRLAADITRALTEQTVVVPGTNAAVVVLPRLAHQLITLRKQRDEVALEVEQRVLAHPLYPVLTSMPGVGVRTAARLLTEVACRAFASAAHLAAYAGLAPVTRRSGSSIRGEHPSRRGNKTLKRALFLSAFAALRDPISRAYYTRKMSQGKRHNQALIALARRRCDVLFAMMRDGTFYTPVAS

SEQ ID NO: 431897 - protein, 343 aa, unidentified
MGDVITIGLDIAKSVFQIHGVDADGTVVIRKRVSRAKVLEFFAAVPRCLVGIEACPSAHYWSRKLEVLGHTVKLMPPSYVKAYLKRGKNDANDAAAICEAVTRPSMRFVSTKSEQQQSGLMLHHSRRLLVRQRTMLSNAIRGHMAELGIISAKGRNGTAELLEIIANAKDNCIPAAARFSLEVLARQYIAIATEIGVLEKRIHAWHRSCEESRRLEEIPGVGPIVGTALIAEVGDWKAFASARSLAAWIGLVPKQHSTGGKERLGGISKQGNRYLRWLLVAGAMAVIRYARRHGTKRLWLTRIMERRPIKVAAVALANKIARMAWAIIVRGERFREPRLLLAA

SEQ ID NO: 431898 - protein, 371 aa, unidentified
MKKNITFVGLDVHKDSIDVALADAGREGDVRFYGTIGGDLESLHKVVRKLQSTGATLRFVYEAGPCGYDIYRSLTNHGLDCIVVAPSKIPRKSGDRIKNDRRDALNLARLHRAGELTAVYVPTVEDEAMRDLTRAREDAVKALRVARQVLLAFLLRHGYRYSGRSYWSNAHKSWIADIKMQHRSQQIALQEYVHATQEQYERVQRLTRQIQEMVTQWQLAPLVTALQALRGVSLIIAATTAAELGDLTRFDSAKQLMAYLGLVPSEHSTGDTIKRGCITKTGNGHVRRMLTEAAHSYSHPARESRILLKRLDGLPKEVRELTWKAQLRLCGRFRKLMAKGKNRNSVVTAIARELSAFMWAIACAVMPVPMP

SEQ ID NO: 431899 - protein, 409 aa, unidentified
MDLLHARCAGLDVHQRNVVGCARVQDGARASYETKTFETTTRGLLELSEWLSSLQCTHVAMEATGVYWKPVWHVLEGSFELILANAQHIKNVPGRKTDVSDAQWIADLAAHGLIRASFVPTVETQQMRDLMRTRKQFIREQVRHTQRIQKTLEDANIKLTTILSDVMGQSGRKIIQALIAGETDPEKLAELTDYRVRASRSAKVEALRGRVTKHHRLLLQLHLAQVDALDASIAEIDKEVERTLEPFRAKVKLLATMPGISALVATTIVSEIGPDMTRFPTAGHLVSWAGLCPQMNESAGKRKSTRIRKGAPWLKTVLVQAALCAVRKKDSYFKAQYHRIRSRRGSKKAIVAVAASMLTSAHAMLSKNVAFADLGADWFDQANRTKTVKRLIHRLAAMGVEVEVKENAA

SEQ ID NO: 431900 - protein, 309 aa, unidentified
MLTAEADKCKTKVVVNTAAGVQALLAWCAKHGAQPAQLHAILEPTGLYHEQAATALPQVRVSLVNPAQARDFAKALALRSKNDALDSYVLARYGQTLSPALWHPAPLHARQLRALLTRREALSKDLLRELNRKEKSQFSPSAPVVDGSIDKAIAFLREQIKQIERAIDQHIDNHPDLKQDCELLNSIPAIGPQAGNAILAVMHNRHIDSAQSLAAYLGVVPVQRQSGSSLNSCARLSKAGPSQVRATLYMAALVGTRHNPHIRALYQRLLKAGKSKKAALGAAMRKLVHLCFGVLKNRIPYQPNYAMNG

SEQ ID NO: 431901 - protein, 350 aa, unidentified
MKKLSKAHKQMTGETIGIDLGDKMSRYCIVNPQGEVVEEGNFRNQASSIETQFRGEARRVALEAGAQSAWISRELKRLGHEVIVANARELKWITHSDTKNDPVDARKLALLARADVGLLAPVEHRTAEQQGELAVIRARDAILRARTLLINSARGIAKGFGLRLPKSITTTFGKRAVADLPAMLRTALAGLLEQIDALSQHIRGYDQQVGELAAAHPEVQRLTSIPGVGQLTAVTFALTLGRHERFAHSRDVAGFLGLRPKQRQSGARDPQLGISKSGDPYLRKLLVQCAHHILGHYGKDSALRRWGLAKSEGGKKATLRAIVAVARKLSVLLHHLWVTGEFYKPFPKMV

SEQ ID NO: 431902 - protein, 327 aa, unidentified
MLSITLGIDISKDKLDVALYQAEHYHLASFSNDKDGYRRLRKWLKKHKGQEATVCIEATGRYGDGVSLYLHECGYKVSVVNPARIKAYGASQLKRNKTDSEDAKTIAHFCATQKPDAWTPPSAELQELQALSRYLDTLKEDRTRELNRRQSGLTVTVVLETIEEHVAFLDEQIYAIEQKMYTLIKRDPDLQQKHELLESISGIGKLTAAKFLAEVPDVSRFDSAAQLAAYAGLTPRQHKSGSSVHRPAHLSKTGNSRFRTIFFMPALSAMQNNPITKALVKRLEDRGKTRMTIVGAVMRKLVHLAYGVLKNKRPFDPNYLVNVQVTA

SEQ ID NO: 431903 - protein, 378 aa, unidentified
MQTTAAHREYSEEKVLFLALELSNSKWKLGSTVGVGSKARERTIAAGDLGGLHEEVSRAKRRFGLESSARVVSCYEAGRDGFWLDRHLRHAGIENIVVDPSSIEVNRRSRRAKTDRLDVGKLLRQLMRWWSGEPKVWGVARVPSVEAEDQRQLHRELEALKRERTRYTNRMTSLLVTQGIRLKVSRSFLARLSAVRLWDNSPVPAGLRSRLEREYVRWTLVQEQIAELEKQRRSALRTARDRGAQTARRLYRLRGIGENYAWLASMEAFAWRRFDNRRQVGGMAGLTPTPYSSGQIQRDQGIGKDGNRRLRAATVEIAWGWLRFQPDSELSKWFQERYGPGSRRSRRVGIVALARKLLIALWRYLETGVVPAGAVLKT

SEQ ID NO: 431904 - protein, 320 aa, unidentified
MQTPAVVLNIGVDVAKDEIVVACSESSFPVRQIANQHAAVLAFLKNLPAGSRIGIESTGSYHELFAEAAHQLGFRVFLLNPKDTRHYAKAVGLRGKTDRVDAKLLARMIAHEHTKLHAWIPPTAQQREMDRLIKRRATLVALRQAVEMSLHELDGFAADLKALRTRFNQLIARLDLRVKALLEADPERKQNFARLCTISGVGPVIGTALVNTLERVPLKSADAFVAFTGLDPRPDDSGQHRGKRRLSKRGPAELRRLLYMAAMSAISTKTWRPLYEHYRAKGLSSTATLVILARRIARSAWSIYTHKTEFDPGRLVKPLT

SEQ ID NO: 431905 - protein, 369 aa, unidentified
MTNVAQYVGLDVHKDSISIAVAREGRDPAEHLARIPNDPTRLLKKLDRLGRRTNLHVCYEAGPTGYGLMRQLEKAGVSCVVVAPSLIPKKSGDRVKTDKRDAAKLAHYLRSGDLTSVRVPDESTEALRDLVRARDDAKRVERAARHRLSKFLLRHDRKYSRPTAWTGIHHEWIRKQTFEHEAQNRVLREYLHSVDDATSQVGRLTKDIEELVHEHDELGPLVKSLQALKGFKLVASAGVAVEIGDLHRFHNPRQLMAYLGLVPSEHSTGEGKRRGGITKTGNQHVRRLLVEAAWSYRYSPKKSYDLKKRWEGLPPEITRIAWKAQHRLHNRYRRLLGRGKSKQVVITALARELAGFVWAIGKQQQEVAA

SEQ ID NO: 431906 - protein, 343 aa, unidentified
MRFYTNQHKFYCGIDLHAKTMYLCILNQEGKIVLHRDIKTSPDIFLKTIAPYREDIVVAVECIFTWYWIADLCSEEGIPFVLGHALYMKAIHGGKAKNDKVDAHKIAVLLRGGMIPMAYVYPSDMRATRDLLRRRTHLVRKRAELLAHIQNTNHQYNLPDTGKLAYKSKRKGVAERFQNISVQKNIELDLSLIDHYDQLLLPLEQELSIIAKVHDADSYFRLRSIPGIGRILGLTILYEIHDIERFPRVQDFVSYCRLVKCAKESAGKIIGTSGKKIGNAHLKWAFSEAAVLFLRRNPQAVKYPESFRGKAKSLTILAHKLARAVYYILKRKEVFQPEVFFAK

SEQ ID NO: 431907 - protein, 347 aa, unidentified
MLIIGCDFHPGFQQVAIFDNRTGEIGEKRLQHREEAERFYRSLAGQEVRVGMEACGHYPWFERLLEELGIELWLGDAARVRAAEVRKQKTDRRDAEHLLELLRTDHFPRIWVPSLEVRDVRQLLVHRHKQVQARTRTKNQLQAMALSCGIQKKRKLWTKAGREELEQLPLLPYAAERRKRLLEALDGLEAEIVELDRRVVEEARQRPEAVRLMTHPGVGPVTALAMVLTLGPAERFGSGKQVGSYFGLIPSEASSGGKQRLGRISKQGSSFLRFLLVEAGQTAARLDPQLKRFYRRLAVRKNRSVAKVAVARKLATRLYLMLREDWTYAQLCQAVMQVSPSHSVAGQ

SEQ ID NO: 431908 - protein, 391 aa, unidentified
MIYVGIDVAKDKHDCFITNSDGEVLFKAFSISNNLDGFTELYQKIESVMDDVTKIKVGLEATGHYSYNLLGYLIDKGLPAYVINPLHTNLYRKSLSLRQTKTDKVDARTIASMLMSDVNLKSYSDTSYHNEELKSLTRYRFDKVKERAKLKTSISRLVCILFPELEKLVPQLHMASVYAMLSEFPGAKQVASAHLTRLTNLLSESSKGHYGKETAITFRDAARASIGSYMPAKSLELKHTIKLIQELDSEIDEIENEIKIIMDKINSPILSIPGISYRMGAMIIAEIGDFSRFDSPDKILAYAGFSPSTYQSGQLNGAYAHMEKRGSRYLRYALYNATKYVCHWDPTFTAYLAKKRAEGKHYNVAISHAAKKLVRVIYHLEKTKQQYITAA

SEQ ID NO: 431909 - protein, 421 aa, unidentified
MKSASTMEIATLPDEPPNGVTGGLDWARDDHAACVVDTRGREVVRHSVEHSTAGLAELVGVFRQAGCHEVAIERPDGPVVDALLAAGTTVVVINPNRVKNLRSRYGSAGNKDDRFDAFVLADTLRTDRARLRPLTPDGPDTVALRRNCRARKDLVTHRVAVANQLRAHLRGVLPGAVGLFAEIDSPISLTFLTRFTTQDRADWLTPTRLAAWLAKHSYSGRTDPAVLHARLSAAPRGPVGAQADANAAITTALVAVLQTLLTQIKMLSTEIETQLDAHADAHIFTSLPRAGTVRAARLLAEIGDSRARFPTRESLFCLAGAAPSTRQSGKSRVVGFRWACDKQLRDAVTDFANDSRRANPWADDLYQRARARGHDHPHAVRVLARAWLNIIWHCWQTGEAYDPNRHIALQRLLAQAQPEAA

SEQ ID NO: 431910 - protein, 343 aa, unidentified
MQTITTIGLDIAKSVFHVHGVDAEGNVIIRRQLKRRYVLAFFQKLPPCLVGIEACASAHHWSRELQALGHTVRLMPPAYVKPYVKRHKNDAIDAEAICEAVTRPNMRFVATKTREQQSCLTLHRTRHLLIRQQTSVINAIRAHLAEFGIVAPVGRNGVEQLLGVVADASDKRLPELARASVAALGDQLRALKAQILQFDRLIMAWHRSSEASRRLDDIPGVGPALATALVATVADPQAFRSGRNFSAWIGLVPKQHSSGGKDRLGSISKRGDRYLRGLFVAGALAVIRYAKIHGTKHRPWLTALLARRPTKIAAIALANKIARMAWAMMARGERYKEPVALAA

SEQ ID NO: 431911 - protein, 351 aa, unidentified
MMIIGCDFHPRFQQISFLLEETGECGQRRLMHTAEAEQYYRSLSGTRARVGIEATGSYGWFRRLLSELGHELLVGDATQIRASNPRRQKTDKRDAEHILGLLVEGRFPAIWQPPAENEQLRQLLLHRSRLVRLRTRVTNQLEGMAKNEGLLIPGGWSGKRRKGIEALSLPGWYGERRKDLLGLLDRIEERVAPLDKAVSQAAAENAEACLLMTHPGVGPVVSLAYVLTIGNWQRFQRGKQVGSYFGLIPAEESSGDKRRLGHISKQGNTLVRWLLVEAASTAQRYDASWHRQYVRLSMTKHHGVAKVAIAHKLAVRLYWMLRSGENYQHVRERGSTARQSECPGGRETTAD

SEQ ID NO: 431912 - protein, 412 aa, unidentified
MELQYRRCAGIDVHKKQITVCLRLAEPAGVRREIREFGTTTRELLSLLDWLTGQRITHAVMESTGAFWKPVYNILEGSVEMLLANAQHLKTVPGRKTDIKDSEWLADLHAHGLLKASFVPNLEQRGIRELTRTRSSLVGERARLANRVQKILEDANIKLASVVTDVLGVSCRGMLARILEGDYDPKQTAGLARGRMRSKLEQLEFALEGRVRDHHRIVLRELLAQVDALGQSIERLDREIVRAMEQAKDPYESAAQLIDTAPGVAEVGARAVLAEIGTDMGRFPTAGHLASWAGECPGNKQSGGKRLSGRTTHGNGWLRKVLNQIAHAAVKVKGCYVQALYRRLSGRIGKKRAIVAVAHSLLVAFWHMLKNGVQYQELGANYFDHRDKERTAKRLRARLENLGYSVDLREAA

SEQ ID NO: 431913 - protein, 407 aa, unidentified
MPRTSRAVIGGVDTHKDVHVAAALDDLGVLLAATSFPTTSAGYENLRRWMAGFGPLQRVGVEGTGSYGAGLTRHLRAAGIDVVEINRPNRQLRRRRGKSDTVDAEAAARSVLAGQAAGIPKSSTGPVEGLRALRVARRSAVKARTQAGNQIRDVIISAPQDLREQLGRLSLGAQVARAATWRPGPASDLLQATKRSLRHLARRHRALSTEITELDRDIAGLCAQTNPALLATDGVGPEVASTLLVAAGDNPDRMHSEAAFAALCGASPVEASSGKTIRHRLNRGGNREANNALWRIAMVRLAHHHPPTATYVRRRREQGKTDREILRCLKRYIAREIFNVLTNPNKVPRATELRQHRLAAGISLTAAANQLGTTAIRLSRLERGILHAAELATTYQNWLNAQPPHAA

SEQ ID NO: 431914 - protein, 401 aa, unidentified
MEGPIVSIDVSNGNSHYMCFIKNNKRFGKVKKIDHDIEGFKRLLEDIQKLEAETNEKVCAVFEATGVYTKPLERFLSKNSIKTYIINPLESARKRKEEIHNKKTDKLDPISISKVYYDKEKMMELKKKDETYNWLRKKNRLYEDQLNHLRKYKVTFQNQLSICFPGYLDLFKDGYSDIPMTILKKYPHPDLLKNKKAETVARYLEKNTCHTHKVSLEYALKIIEFAKKTYPGCEKDDVEVEIFKILLDKVIETQRECEKTLNEMITVASTLEEYRYISSIDGIGPNLAARIIAEIGDIEEFKSREALVAYAGLDPHIYQSGDQDGKHLKISKKGNKYLRCLLFLAVGCSIRGAKDNPVNRFYQKKKQQSNPLNSKAAKTACTAKLLKIIYGICKNKTTYER

SEQ ID NO: 431915 - protein, 313 aa, unidentified
MNEKHVGVDVSKDRLDVVSTDGRWLQFANDDGGHDELCALLVEEKPTLVVMEATGGMERALATRLSATAIPVRIVNARLVRHFAKASGLLAKTDRIDAQVLMRFAQAMRLEARELVNDELHLLQALVARRRQLIEMITMEKNRLRSAHQAIKPSITRTIRMLTKQLKDADEDMDKALKSCGVWREKVELLQSVPGIARVTSVNLVATLPELGHLNRRQIASLAGVAPFNRDSGRYRGKRSIFGGRAATRSALYMAALVGARFNPVLRTFYQRLRARGKPAKVALVACMRKLLTILNVMVRTGQPWNATLAHRN

SEQ ID NO: 431916 - protein, 347 aa, unidentified
MNYIGVDCHISSLDFAVVNERGVTTKRAKVNTGAKAFIDFVKAVPKPRKIYIEEGELADWLLETSLHHKEHLIITDPKINKWIGKAGQKDDAIDAEKLAQLARGKYIKEIYHPVNDRRRFKELVFAYHDTVKSQARIKNKIKASFRKNGIKCSGTTVYSVKQRDQWRKKLSQNKTTQLVVEELWDHLDQLDVSKEKFRSNIRTQGKRYPEIKRFMKIPGIGLIHAATISAIIETPHRFANKKKLWMYAGIGLMERSSGDKIYSRRLTREYNRPLKNAIKQAVESAIFARDNQFRRQYLKLTLEQRLASHRAKLTVARSLLAALYGMWKKGEEYDPDIDTKRMVAQKN

SEQ ID NO: 431917 - protein, 387 aa, unidentified
MRQKLAPSLTHKETGKMERTTFVGLDVHKRTTSVALAEGERGGEVRVFGEIPSTPESLQRLVRRLQRPGRRLDFCYEAGPSGYGVHRQLRGLGQDCSVVAPSLIPRRPGDRVKTNRRDASTLARLHRAGELIPVWVPDDAHEAMRDLVRARATARRVLGKARQHLQGFLLRHGRVYSGVRGWTQAYRRWLTTVRFDHPAQQIVLQDYIHAIEDAEARLARLESQIEELMPSWSMAPVVEAIQAMRGVGLIVAVTVVAEVGDFSRFESPRRLMAYLGLVPSEHSSGTRVRRGGITKAGNAHARRVLIEGAWTYRMQARVSRKLHDRIEGLPQAVRDVAWRAQVRLCQRYRRLVAVGKPKVVVTTAIAREMVGFIWAIARLVQPRPAIR

SEQ ID NO: 431918 - protein, 372 aa, unidentified
MTKIAYIGLDVHKNSITAAMLLPYKNDYEFVKKIPNYISKLKKLLKPLSQKYDLLICYEAGCCGYKIYRELTKIGYNCIVAAPSLIPRDNKRVKTDKLDARKLALYLRSGILRPVNVPDETLEMDRDLVRFRYYQAQNLTKIKTQIKSFLLRKSIKYDAHDKSGSWGKDFLIWLETMELPSNDRSMLNKYMHHFHYQNKFVDELNHDLLELSRTDKFIDQVAILRAFRGIDTNTAMVLLTHIPDFRSFPNPKNLSSYAGLTQSERSSAENKRQFGITKTGNKLLRNALVSAAQHYSKANKVGYGLRLNRKKLHSSISSVIDRADRRCRKKYYKMIFSGKHTNKAKTAVAREIVCFVWEAMMIYHGNELRAIS

SEQ ID NO: 431919 - protein, 350 aa, unidentified
MIIIGVDFHPEFQQITSVDTESGELEEKRLPHREEAERFYRELASRGAAVRVGMEASGHARWFEHLLKELQFDLWIGDAAEIQTKRVRKQKTDRQDAQLILRLLLEERFPRIWVPSAENRDLRQLLWHRHRMVQARTRIMNQLQAVALNEGLRSKKKLWRERGRQQLESILLSPWASRRRTDLLQLLDRLNPTIAELTRAVEREAENCADARRLMTHPGVGALTALGFVLIIGEAERFHCGKQVASYLGLVPLEKSSGKRRRLGHITKQGNSMARFLLVEAAQATVRSNPSWRSRYFHLMMRRGRKTAKVAMARRLAVQLYWMWRKGWNYEQLISFGSHAGQPGNPDGVH

SEQ ID NO: 431920 - protein, 464 aa, unidentified
MKNKSVRMKIINPDCAGIDVGSRSHYVAIGQQSGQVKEFGVYASDLQELSKWLLQNSISSVAMESTGNYWQNLYIELVSKGLIVVLANGKFTKSMNRKKTDVMDCQWIQKLHSLGLLNSSFLPDNKTERLRTLCRHRQNMIEMKADTSNKMQKYLKLLNFRLDIVVRDVTGLTGIKIIDQICKGNLDPKSLAEFRHYNCRKSEEEIAKALVSNKREDYLFGLKQEYERYKFYLSKIDQCDKRVAKYLKNITSSGKEKPEAKPYKRINKNGIKGIDLNIVSYHYFGGIDLFQIPGVSHSTILALMSEIGADGFKKFPTAKHFASWLRLAPNNKISGGKMLSHRVPKGSNRLKVALRNAANAVGNLKDTQLSSFFKKIAFKKGRQKAITATARKIAIIIYNMIVKKQPYNPPEQYLFLDQKRKQIAHIRTKIAKFGINPDEIGIFSRPEYEAKYHAKVAAVNQCIT

SEQ ID NO: 431921 - protein, 350 aa, unidentified
MTISHYIGFDVHKKSVSYCVKTADGRIVEEGKLRATHEALRQWASQRPEPWHGAMEATLFSGCIYDTLQPFAAKLQMGHPAQMKAIFASKKKNDKLDARKISDLVRVDLLPACYVGPPEMRELRRMLRYRNLVVAQAVQMKNRMSGMLMEVGAAYSKRRLHGKEYFSELLDQLEEVPESVKDLLRLSRGALDLFESVQRQLLDRLRKEPLLRQRVELLRSIRGVGAVTALTWALEICDPQRFASIGDAVSYCGLTSALVESADKQQRGPISKQRNAHLQTVLIEAAKLAPRWNPQLAALHERALQHGHRNRATLEVARKLVAYLLAVDKSGQPFQVRTAPTSETEAQKVA

SEQ ID NO: 431922 - protein, 456 aa, unidentified
MSRKQKNNKKKIGTPVLHCLNGNAAGVDVGATEIYIAVPPDRDLQPVRRFSTFTEDLHAAATWLKGCKIETVAMESTGVYWIPFFQILEAQGFTVFLVNARHVKNVPGRKSDVSDCQWLQYLHSVGLLRGSFRPEQAVCTVRSILRHRDSLVQMASSHVQHLQKALDQMNLQLHHVISDITGLTGIRIIEAILAGERNPHTLAALRDRRVKATKDTIAKSLVGDYRREHLFTLGQSLAAFRHYQELIRACDSEIEQYLEAFESKVDPPEASVPKSKDEQEPSAGEPCFELGSHLHRIFGVDLTQVPGINVLTTQTLLAEIGPDLSCFASAPAFTSWLGLCPDNRVSGGKVLSVKTRKVKNRAATALRMAAQSLHRSQSYLGHFYRRMRAKLGAPKAITATAHKLARIIYHMLTMGQAYDETICAQNEVQNRQRLEARLRKQARQLGFEVVVANTVV

SEQ ID NO: 431923 - protein, 345 aa, unidentified
MEISTIGLDLAKNVFQVHGVSPTGEVVVRKTLRRAQVLPFFAKLAPCLVGAEACGTSHHWARELTKLGHEVRLMPASYVKPYVKRGKNDAADAEAICEAVTRQTMRFVPIKSREQQAALSIHRARSLLIKQRTQLVNMMRCVLAELGIAIPVGMEKALQMARKIVEGDAELDLPDEARNVIIALAEQMLQLHAQLRKLDLRLAALQRSDERARRLATIPGIGPVGATALVASVGDPAQFRSGRQFAAWLGLTPRQRSSGGKERLGRITKMGDTYLRQLLVVGATALIRSARSKPETVDPRFVAIVARKPARVASVAIANKMARIAWAIMARGGVFERGHAPMLAA

SEQ ID NO: 431924 - protein, 345 aa, unidentified
MKVTTAGIDLAKNVFQVHGVDEHGKTVLKKQLKREQMALFFANFPTCLIGMEACGSAHHWARKLQLLGHTVRLVAPQFVKPYVKTNKNDAADAEAICEAVGRPNMRFVPVKNVEQQAVLALHRVRQGFIKARTAQANQIRGLLAEFGLIVPQGIGHIAGRVPELIEDASNELPGSFRMLVAHLVDHLKVLDTHVLDLEAKIKAWHRESELSRRLEQIPGIGPVTASAMVATIGDAKAFESGRQLAAWMGLVPRQHSTGGKAKLLGISKRGDTYLRMLLIHGARSAILAAQRKATKEDSWVGKLLLRRNPNVAAVALANKNARVVWALLAKDRTYRVEPATMAAGA

SEQ ID NO: 431925 - protein, 351 aa, unidentified
MDHIGIDVHKKDSQICILAEGGELIEQRIRTEPERFAAVLGDRPRARIVIEASTDSEWVARCLEALGHEVIVADPNFPPMYATRTRKVKTDRRDARALADACLLGAYRRAHRLSDAQRHVRGRLTVRDAIVRTRTRYISLIRALLRQQGSRVPSGSAEAFVHRVATMTLPGRLLSTIAPLLAIMRHLNAQLAYSDQTIEQLAAHDVRVQRLRTVPSVGPVTATAFVATIDDVRRFRRAHEVEAYLGLVPREFSSGESQRRGHITKAGHAHMRWLLIQVAVSILRRRPPQAEALHAWALHIAARRGKHIAVVALARRVAGILYALLRDGTTFDPRRSPRPVVAAMLPAEAIG

SEQ ID NO: 431926 - protein, 349 aa, unidentified
MRFYNQQHRFYCGVDRHARTLSLHVLDATGKSVLAKTIAANPDAFLTAIAPCRDGRAVACECLFAWYWLADLCHDQHIPFVLGHALYMKAIHGGKAKTDKIDAHQIAVLLRGGMLPQAYVYPKGMRETRDLLRRRTFLVRRRAELLAHLVNTNSQYNLPPLAQKLCYAANRAALDLPARFADPSVRKSVEADLALIDAFDAQVRALELYLTRAAKVDDPRAYQRLRSIPGVGPVLALIFLYEVHDARRFPEVGHFLSYARLVRCAHESAGRKKGSGGHKVGNAHLKWACGEAACLLVRSSEQAKRWLARREKRHGKAKALGALAARLGRAVYHLLRKGEAFDPRRFFAS

SEQ ID NO: 431927 - protein, 378 aa, unidentified
MTSTKCIGMDVHKQSISIAVMSSVGKVVMECVIETKASTILQFIDGLRGDLRVTFEEGTWAAWLYDLLKPHVTEVVVCNPRKAALLKDGSKGDRIDAHKLAELLYMNKIKSVYHGEHGLRTLKELARSYLTITKDLTRVMNRLKALYRSWAIPCTGSEVYAPRYRAEWLGKISEAGVRRRAEHYYQQLDVLRILRQEVRRDLLVEAKKHKAWKLLRLIPGIGPIRAALLIALMQTPHRFRTKRQLWKYSGLGLETHDSAQYDVAEGRLQRSKKPATVRGLNKDHNHDLKDIFKGAATRVSGSHGPLRDFYENLLAKGRKPTMARLTLAMKIAAITLIVWKKEVRFDANYLKPQAAGAPLAEAHFYPWERFPRRWPSGS

SEQ ID NO: 431928 - protein, 315 aa, unidentified
MFVGIDVSKDWFDAAWQAEGQLRTQQFAYTDEGIEQLMEQMPPEAVCVMEATGTYHARLALKLFEAGRGVSVVNPLVIKRYGQMKLLRVKSDRADAQLILGYAQQERPALWQPASEQVQELQQAHGWLNDLIGQRVRLLNRQHAVSYRAKPSAFVVGQMAAQLQQLNERIDECERHLEVLVKKSFAELYERLLTIPSIGAKTALELIIVTDGFTRFEDVKQLGAYIGVSPTTLRSGSSVKGKGSIAKLGQGRMRQLLYLCTWTAKSCNPACKKLHQRLKAQGKPAKVINIALAHKLLRQAHAVATKNVRFSAEMA

SEQ ID NO: 431929 - protein, 339 aa, unidentified
MTWWTVAIGVDTHKQAHVAVALDRLGRLIDSLTVPATMVGYRQLLVWAHGLGQPTFGIEGCGSYGAGLARFLTDHDETVFECERPRRHERHGDKNDLIDATLAARHVISGDGLSLPRGSGQREQLRVLLLERRGAVRARTAALNQLDAAIMTAPAELRQRLDGVPKRRLVMTVARLRPRPDGVTQVLRRIARRIQLLSSEITEIDQTLDHLVAATAPDLLTECGVGPVCAAQLLVSSGDPARMTTEASFAALAGTNPLEASSGKQRRHRLNRGGDRQLNWALHVIALQRVHHHDQTKAYYQRLLADGKTTKEAKRCIKRALARHFYHRLRELHPLALTT

SEQ ID NO: 431930 - protein, 364 aa, unidentified
MQCISNNTELSSLEGTRCQFNGSKAVIKLGIDVHQEFYTVVVQVNGSNPKPPQRFRKEGFLHWAAKLKGRGAQVHAVYEACGFGFGLQRQLSALGIECYVVCPQKLDERNRRVKTDGLDAKALCLKLDRFVEGNREALALVRVPTEEEEQLRAIHRQREQLVKARKIMEAQGRSLMVNHGIEPVNKWWKRRTFAELAVPAWMKELLSNSQPILLALEEKIRALSVQLQAAARPNQPRGFGALTSVVIDREIANWHRFKNRRRIGSYTGLCPGEDSSGATRLQTCVTKHGNPRLRAALVEAAWRLVRFQPNYKPVVKWRSTLCKGALATGAARKRAIVAVARQLAVDLWRIRTGRVRAEQLGLLN

SEQ ID NO: 431931 - protein, 343 aa, unidentified
MQAITTIGLDIAKSVFQVHGVDAAGQVTIRRQLKRRYVLAFFQKLSPCLVGIEACASSHHWSRELKALGHTVRLMPPAYVKPYVKRQKNDATDAEAICEAVTRANMRFVETKTAEQQSGMVLHRARHLFIRQQTAVINAIRAHLAEFGIVAPVGRNGVEELLNVVTDPSDKRVPEIAGACLAALGAQLHRLKEQILEFDRMIRAWHRSNKMSLRLDDCPGVGPVLATALVGSVADPKTFRSGRNFSAWIGLVPKQHSSGGKDRLGGISKQGDRYLRGLFVAGALAVIRYAKIHGTKHRPWLTALLARRPTKVAAIALANKIARMVWAMMARGERYKQPVALAA

SEQ ID NO: 431932 - protein, 372 aa, unidentified
MKSILYVGMDVHTTNYTLCTYSIEDDREFGLVKFGPDYLNIVRYVRRLKEHHGQDIRIVCGYEAGGLGYSLYRSLNASNIECVILAPSTMPKAPNERKTDYRDAAKIARCLAYNSYRSVYIPDAEDEAVKEYIRMRDNTKDHIKQLKQRIVALCTRWRKEFNGTKKLWTIAHMKWLQNLEFENQIAQEAFDEYVIQLNEANARLKRYDERIEKWAKLPRYAENVSKLTCFCGVKTHVALATIAEVSDFNRFPNANRFASYLGLVPGEYSSGENINRLGITKQGNSHIRKLLTEAAQCYSRAIPGRPSVELMKRQEGNDPKVIAYANKGNERLKRKYRSIAARKPKPLAVTATARELACFIWGMMTNHLEQVY

SEQ ID NO: 431933 - protein, 429 aa, unidentified
MEEVDDAELVVERVAALDLGKAGLEACVRVPHSQRPGRRMQELRGYGTTTAQLLEMVAWLRQWRVQRVVMESTSTYWKGVYYLLEAEGFDCWLVNAREVKNVPGRAKTDRADAVWLAKVAERGMCRPSLVHPPEIRRLRDLTRYRRALVQDRTREQQRVEKLLEDAQIKISSVLSNLHGVSGRAMMDALIVGERDPRTLAQLAKAQARKKTGALEEALRGFFTDHHATILQMMLDNTDRISAQIAALDARIEEAIAPFSDQAARLAEIPGVDAVAAAELIAEIGVDITRFPSAAHLVSWAKFCPQTHQSAGKSKAKGRGKGNPWLAGTLGRIAFANSRSDTFLGTRYRRLARRRGGQKAIVATGNSVLTVVYHLLLDPDASFIDLGPGYYESRINKHRRARDLAIQLQALTNQHIVIRDGKAVITDTAA

SEQ ID NO: 431934 - protein, 424 aa, unidentified
MKFKMQDKQNQLIERISDRHLVVGVDIAQQFHVARAVNYRGIVVGDPLTFENNEEGFNRFLEWINKLKAKNSLDITIVGMEPTGHYWINLSKWLSNEKIDGVTVNPHLVKRNKENRDNTQSKSDKKDALVIADMVKNGYYAFVRSTPESFEKLRVLMSNRDVIVKRLVSSINQLNRWVDVVFPELRQVFKDVKGKGAIATLRLFPTPIELRSMQPQDIVGKWKSVMKRQPGLKKAYLLIDLAKRSIGTHQALDAYKLHLEQLLEEYDLATTQLERVEQEVTNVLQQIPFAKKLLAIKGISEISLAGILGEAGDLSGFAHGNSLLRHAGLHLSEASSGKWKGQIVISKRGRSRLRRFLYLATMSLVMNNPEFKELHANNVKVKKIKKMKSIMKLCGKLARLFVGIAKRNESYSPEKLQPFSAQAA

SEQ ID NO: 431935 - protein, 381 aa, unidentified
MQMDHAITGTPAETILHGALELSKNSWLLALQLPDRAQPSLYPITGGDTEGLMAKLTAARERCEKVSGKAPSIVLCYEAGYDAFWLARFLKARGVECLVVDAASMQVNRRARRAKTDRIDVGMLLRALIAWGQGDRHVWSVVRVPSVDEEDLRRSHRERDRLVRERTAHINRIKGLLFGQGIRGINVKSKYKTLQIDKLVTGDARPLPPRLASEITREIARLALIQEQIATLERERDQAPTPCEATEKKRVQLMCLTGIGPAIAAVMTREVYYRQFDNRRQVAGFLGLATSPHDSGDVERSQGISRAGRGQVRGIMIQAAWLWLKHQPKSAITRWFVQRTAGQSGRIRRIMLIAVARKLAIALWRFLEQGLVPQGAMLATR

SEQ ID NO: 431936 - protein, 414 aa, unidentified
MDVLHERCVGLDISKKDVKACVRTPSTKRRGSFTTETTTWGSTTNAVLALRDHLLAARVTLVVIEATSDYWKPFYYVLACELNVILVNARQVKNLPGRKTDVSDAAWLAQLGAHGLVRPSFVPPEPVRELRDLTRARTTATRERSRVVQRLEKLLEDTGIKLSAVASDIMGVSGRAMLEALIRGEGDPQVLADLAKRKLRNKIPELTEALTGRFREHHAFLARLHLDHYDQLTTMIDQLTGRIEEAMAPFRGALDLLDTIPGINRAVAEVIIAETGGDMNRFATAKHLASWAGVCPGHHESAGRTKSTKVRPGNPYLKGALGLTAFGAVRTKDTYLQARYKRLTARRGPLRALVAVEHSIITALWHMLTDNVPYQELGGTYFTQRDPERATRRAVNQLNQLGYTVTLNPRENPA

SEQ ID NO: 431937 - protein, 417 aa, unidentified
MKCFVGLDVSSTKLDVCIMLNDTSTPVTASLSNDLSGATEIKNHILDLNHTYHFERIVIGMEATSLYSFHPAMFFHEDSHLKELHVEIMVEQPNKIKKYRDAFEENKNDTIDAFYIADYFRIERFSPSFLKEEKYMALQHLTRTRLQIIEQLTRTKQHFIENIYYKCNTLAYQFKKEELSTNLWSSTMMTLITDEMTLDELANMPLQELADWLQQLGKGHFKDSEKLAQTIQAAIRGSYRLSKLQQDSVNVILGLLAREIRNLEKMIKEIDKAIEDMVETIPEYQCLTSIPGVGKVYAAGIIAEIGQIERFKDHPQVAKFAGLNWREKQSGNSNSQHTSLVNRGNRYLRYYLVEAANSVRRYDDEYKDFYKKKYHEVPKHQHKRAIVLTARKFVRLVVVLLRNHQLYTPPRRLMEDK

SEQ ID NO: 431938 - protein, 392 aa, unidentified
MEAMIETCCGIDVHQKTIVCCILDGPLDTNKPKKSYKIFGTRTCELREALEWLEENQVTDIFMESTGQYWVPVFNIFSEGNFNMVLANPEHIKNVPGRKTDMKDAEWIARLGRVGLIQSSYIPAPEVMELRLMTRRRQSYTQKRTQSKNELHNILQRSNIKLTGYLSNIFGKTGQALLQLFINGEVLTLESVGACLHGKVKASPKDILQAMDGKISLTDRRLLDDSLDEYQFYTRKIKKIEKDIEQYILYHFPLEYELLQSIPGVKQHSAAIILAEIGPNIEAFRTAGHLASWAGLSPGSYESAGKKKSSRVTRGNKYLKTALVTSGGMAGRSRDPAFGSLYHRVASRGTKMKAVVACGHKLLRIIYKILDDKVPYNEKRALGLRQQGLALN

SEQ ID NO: 431939 - protein, 356 aa, unidentified
MHTQVTKKIDFTGQSLFIGLDVHKKSWSVTVVVDGIEHRTFTQPPDPKALNNYLQRMFPGGAYNSAYEAGFCGYGIHRELNSLGIRNIVINAADIPTNQKDKLNKRDPVDSRKIARELEKGSLHGIHIFDRDLEELRSLNRTRFYLMRDLRRSKNRIKSFLQYYGEPIPPEFDNNQWTLKFVSWLKQVQMKTPGGQDAFSYLIRSYEHQREQMVSLSRQVRVRIREYDNELYSLLKSISGIGPLTSSALMTEIGDINRFPHIDHLSSFVGFVPRMRESGETTHTGGITFRCNSFLRTLLIEASWQAIRQDPALMQYYHRHLVNNKGHKVIIKVARKLLNRIRYVMKNKKPYETGVA

SEQ ID NO: 431940 - protein, 462 aa, unidentified
MHKDTKQKQQKSKKSVNKNKLPAHLEHINKMAAGIDIGSKSHFVAVPEGSDEVCIREFPSFTTDLFSLADWLAKCGIETVAMESTGVYWIPLYELLESRGFDVKLVDARHVKNVSGRKTDVLDCQWLQQLHTYGLLSGAFRPDEEVCVLRAYMRQRSMLIKQASTHIHHMQKALSQMNLQLHHVISDITGETGMRIIRAIVEGERDPIILASYRDRRCKNSLEIIAKSLTGNYRDEHIFSLTQALELYDTYKDKLKACDDKIEMQLTTFEDCSKQTHSDSLVRKKSKAHCKNKLAFDARSHLIRITGVDLTVIPGIEASTALKIVSEIGLDLNRWKSSKQFASWLGLCPGNKVSGGKRLGSKSKRTSGNAASALRIAASTLHSSNSALGAFFRRLKSRLGAPKATTAAAHKIATIMFEMIKNHVEYNEVGQDYYEKQYRERMIKNLSLRAKTLGFELKEIAC

SEQ ID NO: 431941 - protein, 343 aa, unidentified
MECPTARMARNMKKFVFFIGIDVSKLTLDIATMQNGELRFHRKIQNTMESITEFVEELKLLPGFKVSKAVFGLEQTGIYSNRLLHALGKMKAGIVVQDSGHIKSSLGSMRGKNDKMDAARIATYLYRNRENLMLWQGKRRIIGELASLSALRNRLASTLRALKVPLKEDRLFIDEKLSVQNNRLCEKSICSLSSDIAALDSRIKEVWKGDAKISHLMALITSIPCIGDMTAIQMIISSNEFQTITTPKQFASYAGVAPFPYQSGTSLQGRMRVSHMANKKVKTLLHTCAVLSIRFVPEMKEYYTRKTKGEGKHSMLVLNAIRSKLILRVYACVKADRTYIRKE

SEQ ID NO: 431942 - protein, 375 aa, unidentified
MNTSITHVAMDTHKKEHTVAVGYPGQDKPEILTVANTVLEIRRMVRRILKQAPGEVVFCYEAGCCGFALQRRIESYGGHCQVIAPSLVPVKRGERVKTDRRDAIKLLTLFRAGLLTEVRAPDPQQEADRDLTRLRQSARENLQRVRHQILKLLGRHGYVYTDGDHWTVRHRNWMRTLEWDSLLLREVFDAYSTELQHCLQRLESLDRRVLALAGEDRYRETVGLLGCFYGIDTMTAIVFLTELFDLARFASPRQLMSYLGMTPSEESSGDCHYKGPITKSGNGRIRRLLVQAAWHYRHPQATTPKTLRDRRKDQPQWAVNLAERAGHRLRKRYWHLLNKGKPPCKVVVAVARELAGFLWAMLREQRLRRTPRTID

SEQ ID NO: 431943 - protein, 388 aa, unidentified
MKDNNSVQQNANAESINSVADIATAISNKKFIAIDLHSDNAVICVKENAFDAKTQTVVGRIVSRKTCRFTHGSFEFFEYLERYCSHFEHEMIVESTYNWYFLADEAEKKGWNMRLADPSTVSANKIKAANDETDAKFLAERLRTNTVKTTPILTHDERARRDLVRLRGDLIQQRAGYYTMLINQFRNVLCQKINKSFITQLGNDFEQKGEAALQELFSTRSERLKIAHYLNSIAFLTKEIDAIEEQNKVDFEQDKTSMSTVTLLQSIKGCGPILGRCIAAELGDFSRFASAGNFKSYCRLAPTSKLSNGKSKGSGNAKNGNAYLSWALTELANLVVSFNPEAKKCYERLFNRYRLRVVAIRAVAAKLAVAIFHMLRDGAVFEIKRCFS

SEQ ID NO: 431944 - protein, 460 aa, unidentified
MSLTGLVSQNSQEDVVVQGSGLSRGDKRRNAKLARLRELVPTDNAILGIDLADEKQAIVLTDHDSQVLARTRVKAKAWRLGPVLRWGREQARKHGFADVTVGCEPTGHRWRVLDQLAAQQNMVLVCVQPLLTGRARESEDYTRDKRDDKDAVLIARLVAQLDCYAPERTDETWARLRHLGARRDRLISESTACVQQLRDLLECAWPAVLSAAAQPFDSVNWCAALAVVLERCNGDPRRLARLGPRGFEAAVRRELPRWGGQRAWRRIITAVFTALTDAAGVFAQRRGALERARWVLADWRTCQARLAEVETRMVEVLDELGLTEYLTSIPGISAVGAAAILAETGDPTRFDSPRALVKHAGLCPRENTSGTYTGQSRISRRGRPRLRLAAWRAVWGALPNNPVMAARYQHLTTRERNQLNDGQARAAIAAALLRWIHVIVTRRVTWDAALAGANELPAAA

SEQ ID NO: 431945 - protein, 345 aa, unidentified
MDKIIRIGIDTSKHVFQLHGVNAAERPVLRKKMRRKEMIDFFTTCSPTVIAIEACGGSHHWARLLSSLGHEVRLIAPQLVKPYVKRSKNDAADAEALCEAMSRPTMRFVPVKSVDEQAALMLVGVRDRLIRNRTQLANAIRGYATEFGIAAAKGLAHVPLLLERIQADETVPELARELFASQADEYARLEEKIADVDAKLKAWERNDERSKRLKTIPGIGPIGAALLIMKTPAPELFQSGRQFAAWIGLTPKDHSTGGKLRLGCITRAGDEALRAALVVGATSVIQHARRTGKASVWLTELLKRKPSKLAAIALANKMARIAWKIMVSSETYNAKSASAVMADVA

SEQ ID NO: 431946 - protein, 357 aa, unidentified
MKILGCDLHAKQQTIAMVDRETGEFTEKTLSHEGNEVREFYAALEGPVVVGIEATGAMQWFLELLEELGIVCRVGHPAKIRAAETRKQKHDRRDARLMLELLIEDRFPEIWMPSIEERDLRTLLRDRHQWVKIRTRVQNTLQAMALNHALRRGRGLWTATGQKALQALSLPSYTSQRRDELLRLYGQLQRRIQELDGQVEKQVQQRPQALRLLTHPGVGPVTALATEVFLGDPSRFANGKNVASYIGMIPCEHTSGKRQRLGKLTKEGNSLLRYLWTEATIHAVRKDPELKRFYRRKLIQKGMGKARIAAAHKLGIRLWIMLRDQIDYKEFCRRGQQRQCGEAHAGMPNYDSGPALQ

SEQ ID NO: 431947 - protein, 353 aa, unidentified
MAEDPSSVIAVIGIDIGKNAFHVVGLDGRGAIVLRQKWSRGQVEARFANMPPCLIGMEACVGAHHLSRQLRALGHDARLMPAKYVRPYSKGQKNDFRDAEAIAEAVQRPTMKFVATKSADQLDLQALHRVRERLVRQRTGVSNQIRAFLLERGVAVRQGLRVLRAELPGILARRCDVLSPRMVRLIEDLAGDWRRLDERIESLSGEINALARQDAGCERLMSVPGIGPIISSAMVAAVGAGDAFEKGRDFAAWLGLVPKQISTGDRTILGKISKRGNRYLRALFVQAAWVVLIKPKSWERYGLKPWIEAAKRRLHHNVLAIALANKLARIAWSVLARGRGFEARLIASVTQPV

SEQ ID NO: 431948 - protein, 464 aa, unidentified
MKTAGRMRKRVCTSRPLLERVCPDAAGIDCGSAEHYVAVPRDRDPEPVRCFSTFTEDLHRLADWLVACRIKTVAMEATGVYWIPIYEILEARGLVVFLVNARHVKNVPGRKSDVSDCEWLQELHSVGLLKGSFRPAAEIAALRSYVRHRETLVQSAATTVNRMQKALVEMNLHLRVVISDIAGVTGLRIIRDIVKGQTDPRELAKHRDPRCKASEDEIAAALTGHYRPEQLFVLSQNLDLFDAYQRQIEACDGRIEAHLAGLVQRAALPATPLPAARSRRRARANEPNPDVRALLHRLTGIDLSQIDGIGISHALSLVSEIGTDMSRWPSPDHFASWLSLAPDNRVSGGRLLSSRTPTSANRAAVVLRLAAVSAGKTETALGAFYRRLAFRIGKAKAITTTARKLAILVYRSLKGDIVYQDPGAAAYDIRHRRSVLRRLRQRASALGFTLLNTQTGEILEAGVS

SEQ ID NO: 431949 - protein, 406 aa, unidentified
MRLLVGDDWAEDHHDVEVMDATGRVLARRRLPEGVAGMARLHELIGQQLGEAGEDAEVVIGIETDRGPWVAALVAAGYTVYAVNPLQASRFRERLGVSGAKSDPGDSHMLADMVRTDSHQLRAVAADSAQASGIKVVARTRKTMIWERTRQVQRLRHQLREYFPAALEAFEDLAAPDALELLGKAPDPARAARLTRAQVSAALKRARRRAIADQTTQIIAALRSQQLAQPAALTAAYAVTVRALAAVITTLNDQVKALESQVEAHFGQHPDAEIYLSQPGMGRILGARVLGEFGDDPHRYPGARARKNYAATSPLTRASGKKKTVTARFIHNDRLIDALMAQAFSALNASPGARAFYDDLRARGIEHNDALRRVANRLVGILHGCLKTRTLYNEATAWSHQQNLAA

SEQ ID NO: 431950 - protein, 315 aa, unidentified
MNIIAGIDISKATVDVCVAGKTRSFANDLQGYRQVAKYCKAASLVVMEATGTYHLGLACYLHSRDFKVAVVNPARPCYYAKSLGLRNKTDKVDARVLAEFGRTHELELFVPPTDAELNLCRLVRLRSDLVAQRVQGKNRISDPAVTGFEGSLLAAQAAFLDEQIDQVEREIVRVLKSDEALGRACDLLTSIPGIGAVTAWSILAEVRDVRRFASAKKVAAFAGLCPSLRHSGTSLTGSGKLSRQGCRPLRKALYMAAVAAIRCSGPFQTFYERLLAQRKAKRAALVAVMHKLIRVAYGVLKGGVPFDCQPGLTPS

SEQ ID NO: 431951 - protein, 360 aa, unidentified
MKKVSKPMRKMEAADKPEMTVGLDMGDRYSRYCLLNADGDVVEEGRMQSSETALRRHFEGEPPMRIALECGTHSPWVSRLLSALGHQVIVANARKIPAITGSESKNDRNDAEKLARFAAYDPQLLSPLEHRSSERQLDLNLIRARATLVRARTMIVNALRGLVKSAGGRLPASSTESLPARAPAAIPPALAGVARPLVEQIALLNAQIAGMDKQVEALAAKYPEIKLLRTVPGVGPIVAAAYVLTLERPDAASNRSAGAFLGLRPGQSQSGDSDPQRRISKTGDGCLRSLLVQSAQYILGRFGPDSELRRWGLKLASTGGKRGKKRAVVAVARKLAVILHAMWRNGERFQAFRQPVAKAA

SEQ ID NO: 431952 - protein, 481 aa, unidentified
MVVLGRKNRIVEQSNVFDSLPLCCIKINVMKEDKTKEQTKKRAIQGLPVIQPYAAGADIGDTQHDIAINNGTSGLIVRTFKSFTEDLREAVKWLIEEGITTIAMESTGVYYLPFYLMLEEAGIEPYLVNAKHVKNVTGRKRDDTDAMWIQRLHSCGLLQKCFQPDNNDRRLRTYVRQRKGLVNRCSDEVRRMQKSLELMNIKVHTVISDLQGKTGMQIIEAILDGEKNPVNLSKLKDPRIQASDEEIIKSLEGIWEDEYLFTLQQAHDTYFFFQQQIKDCETKIYDHLLNQTAMINQGDITSEQYPTTRKTKLKKNQYYFPVTPFLKTMCGVDLCQIPGISESHALEFISETGRDTSKWKSSKHFSAWLNLAPNTKITGGKIFSSRIMHKKNKAGLVLRVAASSLSRNKTPIGDFHRRMCAKYGGKGACVATAHKLSRTIFCMLDKREEFRMDMLLESQKKFRENRIKQLEKQLARMKHVA

SEQ ID NO: 431953 - protein, 426 aa, unidentified
MNCNTQNAKIAAITEKTLVVGIDIGSETHYARAFDWRGYEYSKKPFMFNNDDEGFEAFQIWIEELKEKYGKDKVIPGMEPTGHYWFNLGSFLQKKGMRPVHVNPHHVKKSKELDDNNPSKNDRKDPKVIAGLVNEGRYSYPYIPEGVYADVRNLSNLRLQAQGELTRIKNRIARWFSIYFPNYKDVYGKPDALSGLMILKKAPLPEDIIKLGVDGVNKIWRDAKLRGAGMKRARTLVAAAECSVGCKEAQESARYEIQILLSDFDLYAEREAELVKMIDNKLKEIPYVDRLLEIKGVGIKTVVGFVAEVGDIGRFDDPKQIQKLAGLAIVENESGKHKGEHHISYRGRKRLRYVLYEAAVSVVAHNADFKEIYQQYIAREKNPLKKMQSMIAVACKLLRVFYMLATTENHFDGRKMLTDIRRPAEA

SEQ ID NO: 431954 - protein, 431 aa, unidentified
MSKYLNSLVVGIDVASEFSFASILAPDGSQYRKPFKIFHTALGFNYLIEQIKKAEKEFSTTPVFFMESTGVYHLTLFHFLKDKKFETFVINPLVTNCNKNKNIRKVKNDRNDALSIAQLGKFQDIKVSSESDIKIFTLKLLVRDYYKLIDTRSGFKKKLSNSLCISFSGYQKVFSNTCGLVSINILKKYPTPQAVISAQKQDIIDILLNSRKGIKWAEKKYDNLVEASENAQFVSLTSPWLSVSITTSIAIYEAIDAEIATLLKKIKCFIDSDEMSITFRKNILLLMSIPGIGYNTAITILAEIGGIDKFVTPKQLVAFFGVDPAVNESGNFKGDKVKMSKRGTRFGRRALYAVALASIRMKRNGEATNHVLLKYYKENLKGKKAKVALVAVMHKLIKYLFAVLRNQEEYQVRDPKLHQKMFLENQHTQAA

SEQ ID NO: 431955 - protein, 388 aa, unidentified
MAARTVNNLSPAGAHDDAVRCILAIELSKKSWIVAVNTPLSDKISHHTLKPCDGKGLLDLCEQIRMRVAGATMKRVEIVSCYEAGYDGFWLHRLLEAHGIRNYVIDPASLQVDRRARRAKTDRVDVERLLRSLMAYLRGEPKVWSVVRVPSVAEEDDRRRHRERDRLIGERVQHVNRIKGLLALHGIYDYQPLRPDRMQQLERLRTADGTLPPRLKAEILRELQRLELIVGMIKTIETERDAIASAKIETECGNAKKIQELAKIKCIGPQFATTLVGEVFYRSFDNRRQLASYVGLTPAHFQSGSMCHDQGISKGGNAKARTVMVELAWLWLRHQPASCLSVWFHERVGKLKGRIRRITVVAVARRLLIALWRYLETGLVPDGATLKV

SEQ ID NO: 431956 - protein, 463 aa, unidentified
MQEKRNKEVERHRGQLQGLPVIRCLVAGIDLGSEQHWVCAPTSDGSGREIADFGATTPELIRMAEWLKQRQVESVAMESTGVYWIAPHEVLEAQGLEVLLVDTRQLARVPGRDKKTDPTDCEWIQRLHSCGLLRGSFRPQEQICMLRTLVRDKASLVAESADWLRRMQKSLDQMNVRVHRAVSDLEGATGMAILRAIAAGERDARKLAQLRDRRCRQSEEQIAEQLSGHWREDHLFSLQQALKMYDAIHERIAAYEKEILGRLHQMERPDQPGQTAPPLGNANKAQKIKKHGQEAKRQALYRMSGVDATQIDAIGVDTVEVVISEYGLDLSRFPTEKQFVSHATLAPHVPKSGGKPLKKRKHNSASTRVAAALRMAALSLRHSDTALGAYYRNIAKRIGGDVAVFATARKLATLIYRLLRWGQPYVDEGAQAYENRYRQLRLQNLTARVNALGYQLTPINAGA

SEQ ID NO: 431957 - protein, 461 aa, unidentified
MKRSQKRRAADSTSTAAKAGGIDPHQNPHAAGIDIGARELVAAVPQSTTGPAVRTFTSFTADVEALRDWLLECGIKTVAMESTGNYWITAYDLLEAAGIEVCLVNARHVKGVPGRKTDVQDAAWLQQLHAAGLLRKSFRPAQDIVSMRYLMRYRQNLVNAASQQIQAMQKVMTEMNLKIQHVFSDVDGVSAQAIITAILAGERDPAKLAALRDRRCRSSLADIKSALAGHYREEYLFVLKQSQSTWQRLQGDIVACDGQLALLTRRVHAEAPSPLPEPASGTQHKASKNSPQIDIFEEAWRYYGVDLSGVPGVSTGLLSVLMSELGTGAQIVTAFRSGSAFASWLGLCPDNRISGGRILKAKTRQVSNRVANAMRMGAYGQHRSQTKMGEYTRRMKGRLGKAEGITAGAHKLARIVYALISTRKAYDESEAFRITPRSLERQHAQLLKQAQSLGFQLVPAA

SEQ ID NO: 431958 - protein, 355 aa, unidentified
MQLYAGLDVSMDETSICIVDRDGKIIKECRTETEPMAIRFALDGYADRLHRVGLEAQAFSPWLFTELRGMGLPAIVVEAVHMQKALSAQRNKTDRNDARGIAHMMRVGWFRQVHVKSSESQHLRVLLSNRRLLKRKFIDVENEVRGTLKAFGIKIGKVSRGKFEARTLAVVAAALPLLQDLVRGMLTVRRMLWTEYSRLHNMLIRIVRRDVVCRRFLTVPGVGPVTALAFKTAIDDPRRFTRSRTVGAHFGLTPKRFQSGTVDYDGRITRCGDSEVRTALYEAANGLMVRCKKWSALRAWGIGVAKRRGHKRAIVAVARKLAAVLHRMWLDGTEFRWTQADGSHGGNTPAIAMTA

SEQ ID NO: 431959 - protein, 366 aa, unidentified
MDAIYIGVDFHSRQQTICYLKTETGELVITELKHQDKERVRAFYQQFLGHVIVGLEASGYSPWFEAMLEELRCEVWLGDATEIRRRARWRYKDDRRDAELIRDLMVHHEFPRLHQPTPQSRDILRMLRYRQKLIKVRTMTKNSLQAIAMQAGLAKGRRLFTIAGQAEFKAVAMSPVLQYQRDHWLELLKPLNQELLETMKWFKAAAKGDAAISRLRTHPGIGLLTALCLQHTLQPVSRFRNQRKVVAYAGFDPMVRRSADSAIQLGISKAGSRMLRYLLVEAVHTAVRYDPDLDRFYKRVAERRGRPKAKVAAARKLLIRAYIMMRDEIDYAEFRRRAVAARLARRSQGPPSVPEVLIGQSASPAA

SEQ ID NO: 431960 - protein, 383 aa, unidentified
MRAVCGLDVHKDSVFLCILHDSGEIFENVYGVLTFQLEEMCRVMQSHGVTEVTMESTAVYWIPVWRVLEPHFRLKLVNPYFIKQLPGRKSDVKDAQWIAVCTLKDLVRGSFVPPERIQQLRQYDRRIFDLDAEIVRKLSKLDAVMQRCNIRLSNYVSNTDTKSYKDVVDSLCNGVTDPEELIRKIHGRIVNKHGRETILPSLAGVVSEAEMDAMRQLRKELTLAEEHKEECHQKMVTICKTYYPKEFARLMTIPGIKERAATSLIAEIGVDMTKFPTAAHLASWSGLKPRNDVSNGKFKSRRITHGNVFLRKTIIECAWGASRTKDCFFSRFSYRMTQVCKKNKMKVLVAVARKLLIAVWHVLHDQTDYKDFDPDCKKPATNG

SEQ ID NO: 431961 - protein, 359 aa, unidentified
MRKGSRGSVEVEKPAMTVGIDLGDRFSRYCRVNSDGEVIEEGRIATTREALERHFSGEPRQRMAMECGTHSPWVSRWLREMGHEVVVANTRKLRAITHSESKNDHNDAEKLARFAGYDVRLLSPIRHRSPERQRDLNLLQARDTLVRARTMMVNAARGLAKSTGQRLPQCSTETFAQVAGTAIPSGLEPALVPLFEQVASLTEQIRQMDKQIEALGKRYPEVERLRSVPGVGPVIAAAYVLTLDSAETARNSRAVGAFLGLRPRQSQSGESDPQLGISKTGNAYLRRLLVQASQYVLGRFGPDSELRRWGLKLAASGGKRGKKRAVVAVARKLAVLLHHLWRSGERYQPFPQEAHALAG

SEQ ID NO: 431962 - protein, 437 aa, unidentified
MTYVGVDWSDNFHIVYVTDQTGDSLAAFKIDHTPEGVESLFLKVKEHAKDSAEVLFALETPKGLLSSAILEAGFTLYPINPKAVDRYRDRYKVSGKKDDYFDAMVLANILRTDRQNHRALVPDSLLTRELRAYTEGYQALVKTQTRLTNQITSCLKNYYPVALGIFGKIDQSITLSFLSKFPTPDFFRRGSKAKIERFLKKNHYPGAREKMLEIYALSKKPQFEIEEPIAKANSLLLLSLVRQTKETLSSLKEFELKIAELLEQHPDTDVFSSLPGAANITTAKLISNFGDNRERYGKVSCVQADAGTCPVTIGSGKSLRVSFRYSCRKPFRAAITQFAFTSLQKSEWAKQRYAKYRHNNSKDHNLALRCLGNAWLEIIYPMWRDRKPYDVEKHLIGVFKEQGIFSKDAKIPVFASQSMIAQNYRGSSPQVSIIGLT

SEQ ID NO: 431963 - protein, 346 aa, unidentified
MEHYVGLDVSLKQTAICIVDGTGKVQREGIVSSDPESIAAFIKSYAPNVVRIGLETGPTATWLWTELRKLGLPVICIDARHAKAALKMQLNKSDRNDAVGIARIMQCGWYKEVRVKDLDSHAIKAVLISRALLVKIKRDIENQIRGLLKNLGLVIGQAKMNLFATRAAELTKDRPELAAAVVPLLKAREAVGQQIADLDRQVMRRARDDAQVRRFMTAPGVGPITALCSLATIDDPTRFRKSRSVGAYIGLTARRYASGEVDWTGRISKCGDKMLRSYLYEAANVLLTRVAKWSALKAWGVRLAKRSGLRKAKVAVARKLAVILHRMWIDGSEFKWSSKQAASQSA

SEQ ID NO: 431964 - protein, 389 aa, unidentified
MPSVSERPEAPTAIQTHLAASFVSLELSRSIWLITSLSPASGEKMSKHSVRAGDVAALLARFSELKRKASERTGKSFPIVVIQEAGLDGFWLHRVLQSEGVESHVVDPSSIATSRRRRRAKTDRIDGEALLRALLAYKRGEPRVCAMVKAPTPEEEDRRRLCRERKVLIAERVKHVNRVKGLLFSQGISGYEPLRRDRRQRLDELTTGDGRPLPVHLKTQIRRELDRLELLLGQIKEAEAERDALLAAPQPAAPAPAGRMLLEFKGIGAELAAVLWLEALFRHFDNRRQLASYAGLAPTPWQSGSVDHEQGVSKAGNPRLRTSLIQLAWLWLRHQPQSALTLWFKERVSGNGGHFKKSTIVALARKLLVALWKYVTAGVVIDGAVMKDA

SEQ ID NO: 431965 - protein, 391 aa, unidentified
MILVGVDVAKDKHDCYIMTSEGEVLFKSFTIANNMEGFNQLYEKILSVIDNFDNVKIGLEATGHYSYNILGYLLDKGLTPYVINPLHSNLYRKSLSLRKTKTDKVDSRIIASMLMSDVSLKPYSNTLYHNEELKSLTRYRFTKVQERAKLKISISRLVTILFPELEKLVPTLQMNSIYALLYEFPSAHAISKAHLTRLTNLLNTTSKGHYTKDKAVLIREAAKNSIGSNMPAKSLELKHTIKLIKELTSEINEIEEEIKIIMNKINSPILTIPGIGLSTGAQILAEIGDFKNFSSPDKLLAFAGLSPSTYQSGNMYSSNAKMEKRGSKYLRFALFNAAIYVSYWEPTFSQYLKKKRVEGKHYYVAISHVVKKLVRLIFHLEKTNERYSTVI

SEQ ID NO: 431966 - protein, 406 aa, unidentified
MLNAVGIDVSKGRSTVAVLQPGGVIVHKPFDVPHKSRDLHDLAQYLGALEGDTKVVMESTGRYHEPIRNVLSEAGFFVCTVNPHLIKNYGNNTIRKVKTDSADAKKIARYTLDNWAELREYTSMDTTRTQLKTLNSQFSFFMKQKTAAKTNLIALLDTTYPGVNKLFDSPVRADGSEKWVDFAYSFWHVDCVRKAGITAFTDRYKRFCKHHGYEFQENKANTIYMNSKNLIATLPKEAVYKELIQESIRQLNLLSENVEHLRKMMNELASTLPEYHTVMNMYGVGPTFGPQLMAEIGDISKFQHREALTAYAGVDPGKNDSGQEVHNSSHASKCGPSRLRHTLFQIMTTMLQNGVKENDAVSSFLFKKKAENKPYLVYMTAGANKFLRVYYGKVKECLRNQEEAEQ

SEQ ID NO: 431967 - protein, 439 aa, unidentified
MARKKRATDEVAEIVYERCCGMDIHKASITACLNIGGKREVKEYSTMTDDLLMLAKWLKENNVEMVAMESTGSYWKPIFNILEIQEIPAMLVNAQHIKTLSGCKTDKKDAKWISGLLRHGLLKPSFVPGREQRELRELVKYRISLTEESTRVLNRMEKILQGANIKLSNVISSTGTKTELAIIKALSEGVYDPRLLSELAKGTLKNKKAELIRSLNGLIEDHQRFMLKSMYNHLERLNAEIETVESEIDKRMEKDNEIIKRIDGITGVGKTSAQAILAEIGADMDQFHSEGHLSSWAGVCPGQNESAGKRKSGKTRKGNSVLKKTLIQCANSASHAKDSYLSAQHKRIAARRGRKRANVAVAHSILIICYFIIRDGTSYEDLGGDYFDRRNKDRVIHRSIAKLESLGFDVIIKEKMEVTQAPSVIKGKPPDALSAENVA

SEQ ID NO: 431968 - protein, 426 aa, unidentified
MSITQNEKISQVKNTTLVVGIDISSETHYARAFDWRGLELSKIFKFESTSYGFENFSEWLAEICKTNQKDNIIIGAEPTGHYWFTLAEYLKEHDIKFVFVNPMHVKRTKELDDNHPSKNDRKDPKVIAKLVIEGRYLIPYIPEDIYAELRIMNENRMRINREMIAIENRIKRWFAIYFPEYKNVFGNWECDSSIEVLINAPLPADAVNMGAEAINGLWRAKKIRAVGMKRANLLVETAKSSVGVKHGASAARCEISMLIEDYLRKKEQMQRVVEILETLCIQVPNAEKLLNIKGVGILTVASFFGEVGDIRRFDSPKQIQKLAGLAITENSSGKYKGRSCISKRGRKLLRYTLFQAVMSMTMHLPEFRELHRYYTTRDKNPLKGKQSKVALCCKVIRIFYALLIKGTEYDSQKLMKDIIRPEPMAA

SEQ ID NO: 431969 - protein, 422 aa, unidentified
MNQSHQFKATIGLDWADQKHDLWIRPADGSKSEHLRLEQSPEALHEWAAKLRKRFGTGQVAIGVETSRGPVISALMPYDFIVLFPINPKALKDYRAAFSVSGAKNDRTDAQLIEEFIRLHSEKLKALQPDTELTRKLSGFVQDRRHLVDERTRIVNQVHAKLKTYYPLAETLIGSEMNSLMAAEFLSRWPDLESLRAAPLPKIRAFFYKHNSRSAKKMEQRLEAIQTAKALTTDPGIIEPARELVLALAGMLKCLHKSVARLEQAIELAMDQHPDAPIFRSLPGAGPALAPRLLVAFGTQRDRFQSAQEVAQFYGVAPVVIQSGNSELVRLRRRCPKFGRQTFHENASCVSKTEPWGRAYYEQQRKKHDDKHHQACRALAYKLIRIYFSCWKTRTEYKANTYLNALQKHGSPLHNRLNRIGE

SEQ ID NO: 431970 - protein, 340 aa, unidentified
MTAVGIDTHKRTLAVCALDGVGQVLGERTFPADPAGLATLVAWVGEVAPGATVGVEGSSSYGAPAARVLHAAGVDVREVPPHLSRRERGRTRRPGKSDPGDALAIARVTLQEPDLPPVRLEDPSEELGLLADARDELVTAQTRARNRLHAHLVVLLPGYRITASRLVSERRLGAVEAALADLPGIRADLARGLLDDVRQLGRRAAELRSRIEALVAGHPLLGLPGVGPLVAARLIAETGDVRRFRSADAFAMLAGVAPIPASSGESRRMRLNRGGNRRLNRSLHTIALTQARSHPPARAYLDRKRASGMSWLEALRCLKHRISRPVFRLLQAGRWEPSAT

SEQ ID NO: 431971 - protein, 414 aa, unidentified
MESSYKIAGIDVHKKMLAVVISDVAQVGEFRFERRKFATGAMELQAWAKWLGEQEVREAVMESTAQYWKPVWQALEGQCRRQLAQAHSNRAPKGRKRDFADAERLVRRQVAGELILSFVPDPEQRLWRTLTRTQQPWTRDRVRLQNQLEGLLEEARIKLSSQVSDLLGLSGRRMLQALADGENDPVQIAKLAAPGLRASQKPLADARSAAATLSPLHRQIMKLFLQRLKLIETQIDALESRVAEQLRPFQDAVKRLAEVPGLGADSAQQIIAEVGPRAATFPSPDQMASWVGCCPGREESAEVSTSDSSPKGNKHMRRLLSQAANAAVKAKGSVFEILYRRLAPRRGHFKAIWAVAHRLCRIIWKLLHEGVDYEERGYRTNPHAVQKRTNRLVRELRRLGYQVQLTSSKAGAPA

SEQ ID NO: 431972 - protein, 367 aa, unidentified
MKDNITHWVGMDVHADKIQIAVFWGNEQEPREEYETDTDSRSLKRLLKKLTALPGKVRCIYEAGPCGYELQRFLSGNEISCDVAAPSLIPQRAGDRVKTDRRDAKKLGRLYRSGELTTVAIPDKSQEAVRDLVRAREDALEDVRRKRHRLEKFLLRHGYRYREGRPWTLAHSKWLGGICFEDAFLKTVFDEYKISVDQAEEQLQRLSLAVTEVSTTVQYKKPAGFQMTLRGIQTLTAMTILSEFGDLRRFGTAREFMAAIGLVPSEFSSGAKTRRGSITKTGNAHVRRVLVEAAWHYRHKPVPGKAVKARRAGQPLGVLSIAQKADVRLYRKFRRMTDRGKRSTIAAVAVARELAGFVWAIGQQTRA

SEQ ID NO: 431973 - protein, 391 aa, unidentified
MRFVGIDIASATHVVSAVGEDGTVLLKPVSFGEDAAGYALLWEKLGSAKDTLVTMEATGHYWKNLFAALATRGFEVAAINPLRSRRFAQEDLERNKTDSIDSLGLARFGAQKRPAVSRVPDAAQDELRELVRLRDRLVQDFGNCTRRLHRLVDLGFPEFKRCVKRLDSRLSTGLLQAYPTARAFQEASVGEVAGLRYDERHRVGDALAKQLIELAQHSVGAHHGPAYQVQVRYLCEDFEVLRKRLGDIDDDIAAQLAAHEVGTLLTTIDGIGPTTAARLIAELGNPADFATAAALAAYVGVVPGLKQSGKRQGKRANLSPIGHARLRRALWMPTLVAVQRNPWVRAYYQRLRANGKPPKVALVASMRKLLIAVHVVARTRKPFVPHVEGTQ

SEQ ID NO: 431974 - protein, 394 aa, unidentified
MKLIGIDIGKNKHFFCVMDQQTGEIISQPVSFSNDKEGFDFLVQKIKSYPKDSILIGMEDTGHYHFALLKYLLDLQYTVALINPKTTDFNRKMQGGITKNDKLDTINICDVLDTPERKKQYRITKVNSFDLYEQKQLTRHHHNLKEEENVYKNRLQKCIDIVFPEFNKLFNSKYGIVYMNILKMFGSAENIANTDIRTIRKCFEIECRGNRISLTPERLKECARSSIGISSSAEVIQIKHLTAQIELIEEQLTEIDKKIEEFSIQNNSPILSIPGIYHFSGTSILAELGDISNYSKPSQIIKFAGVAPLHYESSQFNAQHTAITKKGSKYLRKTLYQIILPVIRHNPVFNKYYQLKISQGKGHRCAQGHCVRKLLRIIYHLLKTNQQFDPQLLR

SEQ ID NO: 431975 - protein, 403 aa, unidentified
MNAVGIDVSKGKSMVAILRPFGEIVYSPFEIKHTSHDINSLVDLIHSVDGESRVVMEHTGRYYEVLAHQLSEADIFVSTINPKLIKDFDNDSLRKVKSDKADAVKIARYALDKWQNLKQYSLMDELRNQLKTMNRQFGFYMKHKTAMKNNLIGILDQTYPGVNTYFDSPARSDGSQKWVDFASIYWHADCVRKMSLNAFTDHYQKWCKRKKYNFSKSKAEEIYGKAKELVPVLPKDEITKRIIKQAVEQLNSASSTVEELRILMNDTASKLPEYPIVMAMNGVGPSLGPQLIAEIGDVTRFTHKGAVTAFAGVDPGVNESGTFSQKSVPTSKRGSADLRKTLFLVMDVLIKTMPQDDPVYQFLDKKRSQGKPYYVYMTAGANKFLRIYYGRVKEYLASLPQSE

SEQ ID NO: 431976 - protein, 342 aa, unidentified
MYYIGLDVHKKTISYCVKDASGQVHREGTIGATRNELDCWVQTLPQPRIMAMEATIFTGWIYDHLLPHAEQVKVAHPLMLRAIAAAKKKNDRIDAGKIADCLRCDFLPECHMASTEIRDRRRTLRYRHLLVRQMVQMKNRISGLLLETGVSHNKQRLHKVGYFRELISKNEEVQENIRPLLRLSRETIVRCQKTEYALVSSLERDPLLAERLKRLRTVPGVGPITALTWALEIGDVARFRSVKQAISYCGLCGAEKSSADKVLRTPLSKQRNKHIQHVLVEAAKLAPRQSHELALIREREMQKGNRNRATLAVARKMVAYLLAVDRREREFVPAEGHTTAAA

SEQ ID NO: 431977 - protein, 324 aa, unidentified
MTDAVLGIDVSKNTFDTNLGAGIKARSQSFANSPDGWHHLIAWLGEHKIGQVHACLEATGRHGLGIALALHETGHVVSIVNPAQIRDFARTKLGRNKTDQIDAVHIREYAELFKPRPWTPPSPAMRRLCELQTIRAGTVAGLTEWKNRRGSGIVDDLALSLAKTTIQHFTSQLEAVDRAIAETIDNDVELSAKRDLLVSINGVGEALAGIVLAELPGPDVLGSSAAVTAYAGLNPQQRQSGISVNRPVRISKIGNAVLRTALYMPALSAMRYNPAVAALVDRLKAQGRLKGKQIVIAAMRKLLVLCFGVLKTGKEFDPAMAMGK

SEQ ID NO: 431978 - protein, 367 aa, unidentified
MSKSSKLFVGMDVHKDSIDLATGEERGEVRHHGAIGGDLAALSRAVRKLESLGKRLVFVYEAGPCGFVIYRFLRARGHECWVVAPSMTPRQASDRVKTDRRDCLKLCRLARAGELTPIYVPDAADEAMRDLVRTREDAVIMQRQARQRLSALLLRNDIRYAGKSAWTQAHRRWIAHLKLPAPPQQIAFEEYVQAVNEATARIERLEQAIATERGHWRWRPVAQALEAFRGIQAIHATRIVAELGDLRRFAHPRSLMGYLGLVPTENSSGARRRQGAITKAGNSSARRAFIEAAWAYQHHARVSWVIARRQTDLPQPVIELAWKAQLRLCARFRKLAARGLNRNKIVVAIARELAGFIWAAGHSVKPV

SEQ ID NO: 431979 - protein, 367 aa, unidentified
MKKVSTAARKQSRNFSQPNLTIGLDLGDRSSCYCVLDDSGRIMMEQKVSTTAKALQAALGAMPRSRIALETGMHSPWISRLLSGLGHEVIVAHARNVRLIGESRKKDDRLDAQTLAQLARIAPQLLCPVKHRSAKAQADLTVIRARAGLVRARTALVNTARGLAKSYGERLRGCNVRNMNPEKAEGLSPELQAALEPLLAGLESLSEQICEYNEQIEKLAQESYPQVALLKQIKGVGTLIALTFLLTLEDPHRFRKSRDVGCYLGLQPGRRNSGQSQPQMHISKEGDPYLRTLLVQGAQHILGPFGVDCDLRRWGLKLAERGGKSGKKRAIIATARKLAVLLHHLWVGGDGYEPWHNCCRIAIPLAA

SEQ ID NO: 431980 - protein, 452 aa, unidentified
MLPRDGAVIGIDLADEKQALAVIDHDVRVLARKTVRVKAFRLSEALGWAAEQARAKGFTSVTVACEPTGPRWLQVQRLCAERGLPMVCVQPLVTHIARQQQDYTTHKTDEADCVMIARLAAELHCYVPEELDEVWADLRHLGRRRAALITSCTASEQRVRDFLSVAWPVVTEACAQPFKSKTWLAALQVVASRCDGQPEELADLGMEAFASLARSALGGWGGQRLRGPVCQAVFTALTSAEGVVRAHRRGLLRRIAAELGDLQRARGQLRDTEAGMIAALTSLGLARLAGIPGLTATGAAAILAETGDPNRYDSSSSLVKHAGMSPSDNASGAFDGQAHISRRGRPSLRLTAWRTVWPMLLHNPVMAAKYQAMTAAAGRAAAGARDDGTGRAGHPSAAAEAARRRRAKARVACAAALLRWIYSIVVHGTSWDPDVAAGRKDHQAAPSYREAA

SEQ ID NO: 431981 - protein, 343 aa, unidentified
MQVSTIGVDLAKNVFQVHGVDSAGKVVIIRQLRRKQVIDFFSKIPPCLVGMEACGTAHHWAREVSKLGHTVRLMPPSYVRGYVKRSKNDAADAAAICEAVTRPSMRFVPIKSADQQALLMLHRTRDLLIRQRTQLTNALRAHLAEFGLVAETGREGLAQLAAIITDESNREALPSAMKQALQAIVDQLAALELQIGTLDRAIHAHHRANDMSCRLETVPGIGVIGATAIASTVTDPSDFKSGRDFAAWIGLVPRQHSTGGKERLGGISKQGDRYLRRLLVIGATAVVRHARQCPQKHPWVMKLLGKKPAKLVAVAVANKMARIAWAIMAKGGYYRAPELAAAA

SEQ ID NO: 431982 - protein, 356 aa, unidentified
MEHFAGIDLHSNNSYIAIIDNDNKRVFKKKVSNDLYNVLHVLEPHRKQIKGIVVESTYNWYWLVDGLMEKGYKVHLANPSAIKQYEGLKHSDDVTDAFHLANLLRLGILPEGYIYPKEVRPVRDLLRKRLQLVQQRTALILSFENLLTRNLGRRLKVDEINKLTEEDVEDIFQQEYLILSGKASIATINFLGTRIEQIEKAVHKAAKLKSEYKLLMTVPGIGKILALTIMYEAGPMERFAKVGNYTSYCRCVGSERISNGKKKGKGNRKNGNKHLSRAHIEAAHYAIRHYEYVKRYHQRKMAKTNNVVARKAIAHKLARACYYIIRDQKAFDPGKLFAHKIAATVNPSYCWDNHAT

SEQ ID NO: 431983 - protein, 344 aa, unidentified
MQITTIGMDLAKNVFQVHGVDKRGKAVLRKPLKRHQVLPFFANLDPCLIGMEACGSAHHWARRLSVLGHTVKLMAPQFVKPYVKTNKHDAADAEAICEAVARPTMRFVPVKTAEQQAILAVHRARQGFVKARTACANQIRGLVAEFGIVMPKGLAHIAKRVPGILEDAENGLPETMRPLVERLATHLKALDRQVSELEAQIQAWHRQSATSRQIEKIPGIGPITASALVASVGDAKTFDNGRQLAAWLGLVPRQHSSGGKPTLLGISKRGDTYLRTLLIHGARAVVRVAERQTEADPWLKRLLARRHKNVAAVALANKNARIVWALLAHGRDYRADYTPAPITA

SEQ ID NO: 431984 - protein, 415 aa, unidentified
MCKVIMIGCDLHDATTVLKVADGPDATVRKGFATSNRSAMIEWVKDFASQRGAVRIVFAYEASGQGFGLYDDLTDAGIECHVLAPTHLPHTTHSRKNKTDDKDALMILDEVRAHVLAGRTLPDVWVPNHQTRDDREIVRLRLEVATQRTRLKNQIRNLAKRSRLAFPDDFTSSGDWSKRSVAWLREVAAGKTGALREGVRTALASLMELYQAMSAQIQALDQAIRRLSRTERYAQSYRKLKLLSGVGTLTAMVFLTELGDLARFANRRQLAAYLGLAPSAFESGERDDRKGHITKQGPQRVRHVLCQAAWAALRVSPEWRAKYDRIRRGSKSRSRIAIVAIMRQLGVEMWQTARSPELDAMLDERDALASQKTKKTTSARAPQKGAAPSTPPSPRPRRGEAEATATRKGLARHPE

SEQ ID NO: 431985 - protein, 343 aa, unidentified
MDHYVGLDVSLKETHFCVLDGTGAVIARGREATQPELLARALRAHAPDARVVVLETGGQSSWLQGALAALGVPAVIVDARRAKAALNCRMNKTDANDAEGLAELARMGWYRRVTAKRRETRLGRSLLLARQQLVKHRRDIENQVRALLRGFGLAVGGVPRAGFEQRVWELVAREPLLEDAIGPLLQVRRSLCLQIGELEGRIGKAVKQSDVCRRLMTVPGVGPMTALAFTTAIDDPARFAKSASVGAYLGLTPRRHQSGDVSWSGRISKHGDGLARHMLYEAANSLLSRVRAWSAPKAWAARLVRRIGGKKARVALARKLAVILHRIWLDGTEFRWSAKEAAA

SEQ ID NO: 431986 - protein, 422 aa, unidentified
MSCLPALAGVCPHPMPVRRDIIILTESTLIVAGADTHADTLHVAAISMTGAALGDREFPTTRTGYATAIRFLTSWGQIERIGVEGTASYGAGFTRALSTAGIEVVEVTRAVKSTRRLKGKSDPLDAYSAARTALAGDGLATPKDDATSGLRALHIARRSAIKHRTAVINQIKARLISAPDMVREKYRASTTLKMIEALARCRPDAQAEPWAQSVLVAAKMLAQRVQFLETQVESLQAQIDAIVTEANPGLRAAYGVGSDTAAQLLITAGANPHRLHSEAAFAALCGAAPVPASSGKTNRHRLSRGGDRAANNALHRIGLVRMSHHQPTKDYVQRQLALGHNRMEILRKLKRAIARETFKLLTRQIAVPEYADLRPARQAKNITVTAAANHFGIWPTVISRIERGLQRDDTFADTYRNWLRAA

SEQ ID NO: 431987 - protein, 329 aa, unidentified
MVYFVGCDVSKAKVDVSLVDEHGIELLRDTVVNNIVELTGFFLSLSGYCPDDGELRCSVEATACYHHPVVEAATLSQTACFIINPIVTKQQIKATIRGKKTDRTDALMIARLGLRGEGWRAVPEQYQTAKYCARGQLRIHQLKQALRAYATHVQDVLEDELPETVRIALNQTDVELTNLKIAFERAAAIAAPTELSGLLQTIPGVGPYVAASLLGELQGMERFNSSKALIAYAGLDPKIRQSGHTLNNTGRLTKRGSVYLRRSIFIAASQARRCDPVLKALYEHKRAEGKSYTVAVVVIARKLLTIVRAVWLRGTPYTTDLQKVLDRVI

SEQ ID NO: 431988 - protein, 386 aa, unidentified
MGSQTFIPREYDVFAGLDVDKKSIAATFSSHQGFIRSLSIPYKLEALLNHVRNHFADQKVAFAYEAGPTGYGLYDGLAAQGYTCLIAAPSMIPRAPGQRVKTNRLDSKALSESLRGGQLKSIHVPSPIYRELRHLTQLRDTMMSEAVAMKQRIKSLLLFEGIAFPPAPAGSQWSFIVKAKLRKLPCSSTVRFKLDQLLDSLEFAEKQVFKSTKEIRRFCQTDPELSQCIEYMMTVSGVGWIVASQLLARIGDWRELENIRQLGGFLGLVPREHSTGDKTDRGPITHTGDGRLRSKLIQAAWSAIRKDGELREFFRSVCQRHPRKVASRVAIVAVARKLSVRISVVLMQQRPYEVRKKVHSAPLTQEETSPQGTTRRCAEPGETDNS

SEQ ID NO: 431989 - protein, 438 aa, unidentified
MKRRRAYRATDVKDGLSERVVQAAPEGAAVAGVDMGKYEMQAVMRWKDGSFERPWKAKNPSEIPAVVGLLRKVADHRPLIVAMESTGTYGDALRAALAAAGLEVHRVGGKAAHDYAEVFDGVPSQHDGKDAAVIAELAAFGKSSPWPFRQQSEADAEMAYWADWLDAQQRIQMLWTGRLESLLARHWPEATRLLDLSSMSLLRALAHYGGPAKLAEDAAAATRLVKWGRRPVVTAKIENVIASAAQSVGVPQQEQDVQRVQKYAAQALAAYRQTQHARRELVRLAKPNEVIQRQAKVVGTATACVLWVSLGDPRDYPCGEAYRKAMGLNLKERSSGKYQGRLKITKRGPSIVRRWLYFAAMRTVQAEPVRRWYEAKKAKDQDRGKGALIAVARKLAMALHAVGARGEPFEPWRLFPGRSLARQVRQAKRKAASVTSQG

SEQ ID NO: 431990 - protein, 358 aa, unidentified
MRIIGCDLHARQQTLAMLDTTTGEIANLTLTHEGNNVREFYCKLPRPVRVGIEASGSMQWFLNLMDELGIECQVGHPASVRAAEPRKQKHDRRDADLILKLMVENRFPSIWLPLKELLDLRALLLHRHQWVRMRTRVQNALQAIALANGLRRGPSLWNQAGQDQLASLPLAPHTAHRRNELQALYAKFAMEIEKLNQRVEKQAGERPTAVRLMTHPGVGPITALATDVFLGDATRFADGKALASYVGIIPREYSSGGRQRLGGLTKQGNPLLRFLWCEAAIHAVRKDPELKRFYCRKLFQKGLGKARVAAARKLGIRLWILLRDQIDYNEFCRRGQRRQKYGGACAGMPERVMAQNSR

SEQ ID NO: 431991 - protein, 409 aa, unidentified
MNKVDIAPFEVFCGIDVGKSLNHIVALDRHDDKPLINRKVPQEEAEIRAALEEAGDFGLALVTVDQFGAFGRLVVGVAKSMDIPVAHMSPRRFRQVAETYGEDKFDEKDAFILADASRTTPRNIEFVGNRAESMAEIKVLSSRRDDIVEERTRCYNRLHDFIHQVSPPLEELFSKRKLHNDLEIRLIARYGGPIGFRQAGRARASTWAAELKYHCVDGPKKVEQVFDVLDLQTVMLPGAAVIEEQIRSIASRIIELLAEEKRLNLMIEQRAKMIPEVDLLQSIPGVGPVYAALIAVEIGDIGRFRDSNHLASYAGVAPRKEESGTSVHKRRKRKGGNRRLKNALMQSSQRSVQCDPLARAYYERKRAEGKKHLQALRALARHRVTVIFAMLNEGTFYEPPVEVDENGRG

SEQ ID NO: 431992 - protein, 369 aa, unidentified
MKHSIIFVGLDVHKDSIDIALADDGRNGEIRFYGTIGGDTASLDKAIRKFRRSGTELRFVYEAGPCGYEIYRHLTAQGFPCDVIAPSMTPKKSGDRIKTDRRDALSLARLYRSGELTPVYVPREDDEAMRDLVRGRGDAVNATRKARQRLSAFVLRHGFRYSGRNAWSAAHLRWLAGIKMPHPAQQITLQEYINSIEENSERVDRLTEQILNLIPVWRMAPVVAAFQALRGVAAIVATTMVVEIGDLRRFENPRQFMAYLGLVPSENSSGQTTKRGGITKTGNSHARRALIEAAQTYSYPAKVSRDLRKRQEGLSREIKDISWKAQVRLCGRFRKLMAKGKNRNRTVTAIARELSGFMWAIAKEVPMPA

SEQ ID NO: 431993 - protein, 414 aa, unidentified
MKAQTVNFDQLIEKGCGIDVHKNLIVATIKGEGLPEQTRSYDGFTESLEQLRDWLKENGVTHVAMESTGVYWKPVFNVLEEDFEVILVNARHIKNVPGHKTDKKDSKWIAKLLLCGLLKGSFIPLKPIRELRDLTRYKRKVIGHIASEKNRIQKILEDANIKLSSVMSDMSGAVATKIINALIGGEENVDELVKFHHGKMHCTKEELAASLRGKLTDHHRFMLQAIKESIAEKERLIGKLDEQIDKMLKANELKLDAELLETIPGVGKDGAAYILAEIGNDMSQFPNEQHLASWAGMSPGCNESGGKKKSSRTTHGDKYLKSMLTQFAWAATRTKKTYLRSKYDSLVGRRGKKRALIAVGHKILIAAYFILKDKTVYKELGGEYLDSRKKDRQIQRYLDKLKELGVEVNTEMVA

SEQ ID NO: 431994 - protein, 371 aa, unidentified
MLHDHLSDGPAAIRTQFGAIFVSLELSRSNWLVTSLSPGKGEKMSKHSITAGDVAGLLKLFADLKRKAMARTGQSYPIITIQEAGLDGFWLHRALQQEGIESHVVDPASIATPRRRRRAKTDRLDGETLLRALLAYKRGEPRVCAMVVAPSPEEEDRRRLCRERRTLIDERIAHVNRIKGLLFAQGISGYAPLRRDRRARLEALRTGDGRALPSYLKTQISRELDRLELLLDQIKAVEAEQDALLAAALKGMGANFTAVLWSEAFYRQFSNRRQLAAYAGLAPTPWRSGSIEQEQGVSKAGNPRLRSTMIQLAWLWLRHQGQSALARWFKAHSQRGRKTAIVALARKLLVALWKYVTAGVVIEGAVMKSAA

SEQ ID NO: 431995 - protein, 339 aa, unidentified
MEVTTLGIDLAKNVFQLHGVDVHGKIVLQKKIQRRYLLEFMVSLPPCLIGMEACGGAHHWGREFQRLGHAVRLIPGQFVKPYVKSNKNDANDAEAICEAVARPNMRFVPVKTIEQHDLQAMHCVREQIIKSRTALANQIRGLLCEYGLVIPQGIEKVRKAIPLIAEDAGNVLTDMARSLVWSLYEALVGLDERLVQVTRLIEQICRSNEVCQRLVKVEGIGPITATALVAAVGDARHFNNGRQFAAWIGLVPRQQSSGGKSKLLGISKRGNSYLRKQLVHGARSVVYRSRTREDTQSHWLHSLEVRRGMNRATVARANKAARIAWVLMAKEESYRPATA

SEQ ID NO: 431996 - protein, 391 aa, unidentified
MVCVGIDVAKDKHDCCILDSDGTIRADCITIPNNMDGFKQLLQTIRDCTKRSDKIKVGLEATGHYSYNILGFLLDNDLAVYVMNPLHTNLYRKSLSLRKTKTDRVDARTIATMLLSDVDLKSYTDTAYHNEELKSLTRYRFDKVRERAKLKQSVSRLVTILFPELEKLVPSLHIASVYALLSEYPGAKQISEIHLTKLTNLLVTASKGRYGKDKAIQIRDAARTSIGSVMPAKSLELKHTIKLIRELTSEIDEIEVSIQKIMDELHPPILSIPGVGIQSAAMILAEIGDFSNFESPDKILAYAGCSPSTYQSGKLTNCYAHMEKRGSRYLRYALYNATKYVCHWNPVFAEYLAKKRAEGKHYNVALSHATKKLVRLIYALQKSGKAYLVAA

SEQ ID NO: 431997 - protein, 348 aa, unidentified
MLADQLDYVIGVDPHRDSHAVAVVHVQTGAVVFETNIVANSDGYAQALKLVDGHARGRRAFAIEGTGSFGAGLTRFLTERSERVLEVGRLRRERRSGGKTDALDAVRAARSVLAQQRPATPRAGGERQALQALVAAREGAVNAKRAGLCQLRDLLITTPEPLRSELRPLTRARLLQRLAATRPDGRRDPELRGSMLALRSIARRVLQLTAEERELAREIETLTRKLAPQLLDQPGVAPHAAAQLVLSWSHQGRINSEAAFARLAGAAPIPASSGQTIRYRLDRSGDRKLNRALHMILVTRKRSHPATIAYIERRLQEGKTRREANRCPKRYLARSLYRLLEHRAPTAT

SEQ ID NO: 431998 - protein, 352 aa, unidentified
MQQVATLGIDVAKNLLQLHGVDAHGKVVLKKRLVRHKVLAFLAGLAPCLIGLKASGSAQHWARELTKLGHTVQLISPQFVKPYVKGNKNDPNDAEAICEAVSRPHRRFVPIKSVDQQDMQALPRIRERQIKARTALVNQIRGLLVESGVVMPKGVAQVRQKLPFMLEDAENGLTMLAREWLQALAAELQALDQRIQATDGQIQQVLESHEACQRLAPLAGVGPLTATALVAAVGEATTFKNGRELAAWLGLVPRQHSTGGKPLLLGISKRGDRYLRKLLIHGARAVVRTVEGKQDGRSRWLQGLLVRRGKIGLGWPRPIKLHASPGSYSRRGSAIAQRPERTYGPRVADAPA

SEQ ID NO: 431999 - protein, 352 aa, unidentified
MEVTTIGLDLAKSIFRVHGVDATGQVVVRRPLRRAQMLPFFARLPSCLVGMEACGTSHYWARELIKLGHEVRLMPPAYVKPYVKRGKTDAADAEAVCEAVRRPTMRFVPVKSPEQQAVLSMHRARDLLVKQRTQLVNMIRSLLAEFGLNIPKGLERALLMARRIVDGKAPDVPMEAAKIVSTLSQQALDIHVRLRQIDRDLLVWQRGNDVARRLMTIPGIGPVGATALAASVTDPHQFRSGRQFAAWLGLTPLQKSSGGKERLGRITKMGDKYLRKLLIVGMTSLVCRAKHNPQTIEPRLANLLARKPVRVATVAMANKTARTIWAIMTRGETYRAGHQPALAHNNNVTRIS

SEQ ID NO: 432000 - protein, 352 aa, unidentified
MNGQNFCYFIGIDISKKFFDVAIIENDRTASYVFENTKKGTNAFIRLLKNQKISLDNTLICMEHTGVYGKLIITKLVEKQAHFCVEMPIKITKSIGLHRGKNDRVDAKRIAFYASKNYRELELYKPIAEVLERMKILLKIRKKLVNTRADINKYPNELERFSPEIGKLARKNLKRINKNLEDEIKRIQAEIKKLILSDDKLNKTVGLVTSVTGIGQITALHLTVFTNFFTCYDNPKQLACYSGVVAFEYTSGSSIHRKSRIHPMANRTLKKHLHMSALAAINHDPDIRAYFLRKVEEGKNKMLIVNNVRNKLVHRVCAVIKRQQPYVKNSLKLLPFFLGFNMEIPPFRHAHE

SEQ ID NO: 432001 - protein, 343 aa, unidentified
MNTFYYIGLDIHKKVIAYCIKTLDGRLIGQGKIDADRKSLDEWVQGLPGSWIGAMEATIFTGWIYDFLKPYAADLKVAHPQMLKAITAAKKKNDRADAEMIADLLRVNLLPECYMLSEEIRELRRILRYRNHIVRTAVKMKNKMSGLLMEVGASYSKKRLHGKKYFNSLLERVEEIPHSVKELLKLSRASFEMFSAVQKRLVEALRTNSLIRDRVQRLMSIQGIGEVTSLTWVLEIGDPKRFGSIRKAISYCGLCSAQKESAGKEQRGPISKKRNKHLQTILIEAAKIAPLWNPQLAALHDRELKKGNRNRATLAVARRMVAYMMAVDKNETDFMLREEESAA

SEQ ID NO: 432002 - protein, 351 aa, unidentified
MIRYHIGIDVGKSKHHACAHDTAEDRYTKVFPFTVDRQDFERFLLFLRSQGPVNEILVGVEASGPYALTIGNFLLEHGYTVVEINPFQASQFRKAQGKKAKTDRVDARSLAAFLAVGSYKPLTIGDPLWENLRELTRFRVDLIQDRTCQVNRLQETIAIAFPELGAHLASLDSPTSLTLLAEYPGPQALVEAGTNAVCSCLFEASHHRLGITPAQAIITAAGTTIGLLHRQRALALKLEVLAQGILAVNMQIQRVEAAIEEMFRQLPYDKSDFPVGGVQSLASILAEIDDVNRFPTLKQFLSHFGWCPRTFQTGGFSQEHPRMSHAGNRYVRRMLWLLAIIAVNTVPAYRD

SEQ ID NO: 432003 - protein, 359 aa, unidentified
MNATTIGVDLAKNVFVACVGDGMGRVIETREFNRCGFLAWLSSLPRGTVIGMEACSGAHCWGRTMAALGLAPRLMAADFVRAYRKRQAVKNDRADAAAILAALHAPGMRFIAVKTEAQQQRLAWHSLRLGWIEERTALLNRIRGVLAEFGMVVEPGATRLRRWLAEHEFDTAQPMIVRHLIESVRDQLDALDARIGECDRQIAAQQAKDAAARRVRELPGVGQLTADAITASVGDARMFSNGRQFAAWLGLTPSQYSSGGKPKLGRITRRGDSYLRSLLVQGARSVFAATLRKARSAPDTLTRLQQWIVGLNARVGYHKTLVAIANKHARQLWAVLAKGEAYSPEAWRQWGQTAEQPAA

SEQ ID NO: 432004 - protein, 317 aa, unidentified
MTEVTFPQLVQRACGIDVHLKVVVATIDGVGLQRETRSFKTFTSSLNELKEWLLSNGVTHVAMESTGVYWKPVYKVLEDFIPNVWIVNARHIKNVPGHKTDKMDSEWICKLLLAGLLKPSYIPPKEQRQLRDLTRYRNKLIQQISSEKNRMMRILEDCNIKLSSVVSDTSGATATSLIDMLCEGKVLTLDDIKSVYHGKLSASPEELLEACTGFVEEHHIYLLQMIRKDISQTQQLVSELSERIKKLLSKYDNVLELLREIPGFSTKVVEDLVSEIGLDMSHFPSEKHLSSWAGLSPGNNESAGKKKAPESLTETNR

SEQ ID NO: 432005 - protein, 407 aa, unidentified
MIFVGVDWAEAHHDVHVQSEDGRRLSGGRLPEGVEGIARFHEMVGVHAQEPDEVVIGMETDRGLFVGALVAAGYQVFAVNPMSTSRYRDRHSTSGAKSDPGDAKVLADMVRTDRHNHRPVAGDSELAEAIKVLARAHQSMIWSRGRQTNFLRSTLREFYPAALVAFDNLTSGDALEVLRVAPTPTLGAGLSCSKIAAALKRGGRLRRVEQRAEEIQEALRTPQLQGSAIVATAMGTSVSATAAVIVTMNVQIAELTKELDAGFEQHPDAEVIRSLPGLGTILSARVLGEFGDEPNRYATAKCRKNYAGTSPITRASGTKRVVLARYARNMRLADAIYQWAFTSLTASPGARTFYDYRRAAGDTHHAALRHLGNRLVGILHGCLIHHTNYDENTAWGHRAEIELARAA

SEQ ID NO: 432006 - protein, 408 aa, unidentified
MDVVYPVCCGIDVHQARLTACLRRVQEDGHVTKDVREFDTTYPALLVLLDWLVAQHCPVVALESTGVYWKPVYHVLAGPLEVLVGNAQDMQQRPGRKTDKADARWIAELLAHGLIRPSFVPPPAISALRDLTRTRVALVQTRAQAKNRVHKVLEDTNVKLASVVTDLFGVSGRRMLAALIAGERDPQALAGLALGRLRRKLPQLEVALTGQFTVHHATIIQASLELIDLLTRQIADLDRQIGELVAPLEPQITQLDSIPGVDKTAARDILAEIGAEMSRFGSAARLASWAGVCPGNNESAGKRRRGKSRQGNRYIRRVMVQCAWAARKTPTYLGRTFRRLEVRLGGQKAAVAVAHKILVIVYHLLAEGTLYDEERYDRLQPRQEAQQRQRAIKVLERLGYHVNLERVA

SEQ ID NO: 432007 - protein, 335 aa, unidentified
MEFTFFIGTDVSKNELDFAVIQGKQLIFHREIQNQVKPITAFIKELLKLPDFDLNRTVFCMEHTGIYNNHLLVCLHKLKANVCLEAASQIKNSLGNIRGKNDKIDAIRIAEYAFKNREELRLWTPKRDVVVSLSQLASTRSRLIQVRKMLNTAINENKGFINKKVAAENGKLCSKTLQAINIDLARTEKAIDSLINEDPELKRLFRLVTSVSGVGKITATQIVISTNEFKDINEAKKFACYSGVAPFTKESGIFKGKARVSHMANKKVKTLLHLSALVAIRHNQELRAYYERKVIQEKKNKMCVINAIRNKLILRIFACIKQNRDYEKNYIRLVA

SEQ ID NO: 432008 - protein, 387 aa, unidentified
MPQPNDLSRSLVALDQNSTIIAVIEMSQSSWLVAGMLPGIERQARKKLDPSPERLLALLHRWQDEAVRAGRTITRIALAFEAGRDGFWLARWLAARGVEAHVIHASSVTVSREHRRAKTDRLDTELLKRGFLGWLRGERGHCSMARVPTIAEEDGKRPNRERDCLVGERTRIVNRIKSTLARLGIRNFKPTLRKAAERLATVHTPEGVPLPPNTLAELQRDMARLGFVVSQIREIEQARQKRLEQQPESGPHAMVRLLARIVGVGVETADLLVHELLSRPMRDRRAVARYAGLTGSPDESGARRREQGLARAGNARVRRGMIQLAWRFLMFQKESALALWYRARTADSRIGTRKTMIVALARKLIIALWRFVTTGEPLEGVVLRPAS

SEQ ID NO: 432009 - protein, 352 aa, unidentified
MKMYKREEHKSKLLFAGIDLHRHRWHVTMRTEEGELFSGSILGQWKVLQRLFDRYPGYQIQAVYEAGYFGFWLHDLIVEYGARCVVTPPSLMPVEYGNRVKTDRRDSRKLAHLLSKGLLKAVWVPTDEERSQRQVIRRRRQLIGDRVRTQNRIKAELQFFGIEIPAPTGQWSKAYVANLHRLHLRDRWVQESFHRLLEQYDFLSELIRTQTKVLQQLAELAQYKERVAILRTVPGIGLIAAMELLLELQDVARFRRADQLAAYVGLTPSQYSSADKIRMGRITAIGKNHLRGTLVEVAWRLIGKDRAMRRKYERIKVRSGSKRAIVAIARMTLLRTRRMLLEGTPYVMGRAA

SEQ ID NO: 432010 - protein, 371 aa, unidentified
MLLSVHYRWWTLSLQKTASLERVHQTLTEYYVGLDVSLRSCALCIVDTKGNVILERELDCEIDVIVECLSDCDLPIERVGFEAGTMSQHLYFGLEAAGFDVVCMEARQVNAALSAMRNKTDKNDARGIAHVLRTGWFSPVHMKSREAHGQRALLSTRKALLKKTMDLANEVRGLLKIFGIRLPKTVKHGSFDDVVRPMILIDDILAHALVPLLDARVVLYQHFLELDRRVKRAASHDDVCMRLMTVPGVGPIVALSFKSAVDDPTRFKRSRTVGAHFGLTPRRYQSGEHDNPGRISKAGDRDVRAALYAAANALLMRTMAGSQIKSWGMRLMRTKGRRRAVVAVARKLAVLMHRMWIDGTEFRQDQVGGMA

SEQ ID NO: 432011 - protein, 343 aa, unidentified
MDYFAGLDVSVKETSVCIVDDAGKIVREARVASEPEALLQVLTNAIYRFKRVGLEAGPLSQWLYSVLAEAGLPVICVETRHMRAMLKAQINKTDRNDARGLAQMMRVGLYRPVHVKTLRSQKLRVLLTHRKLLQSKAIAIENDLRATLRNFGLKVGTIGPVKYEMRIRELVENLPDLAVLMEPLLLVRRVIREQLGILHRRLLAIVRDDDVCRRLMTIPGVGPVVALTYRVTVDVPARFRNSKAVGAVFGLTPSKYQSGENDRTGAISRCGDEMMRMMLYEAAQSMLMRSTKWSWLKAWAMKVARHRGMKKAIVALARRLAVIMHRIWVDGTEFRWTREVAVA

SEQ ID NO: 432012 - protein, 341 aa, unidentified
MYSIGLDVSKATISIHVPLNSLDLEIENNLKALKSFYAKLKKLYKLELDKLVFVYEPTGSYSAILTKFCSTKNIQAFIINPKQSSNFAKALGHRSKSDKIDALMLSRAIAVARKDEIRVPVVNATAETIKELMSYYMFTLKQRVAINNHHEALKAKDGNAYALKDLLKRHKEMKDKESEILNKIKDIIHEDDDISQAYSNIKTIPGIGEIAGIVLIHLFIRYPNANQKQITSLTGLDPVVKDSGTSVKSKPKISKSGSRLYRGVLFMATMVSIKYNDEMKEFYDRLKENGKHSTVAQIAVMRKLIVIAHSLYKNNTQYDKELYKEACGKIKQIDEEKEFAA

SEQ ID NO: 432013 - protein, 265 aa, unidentified
MNSIIVGIDISKDTFDAAVLINNKVQTRKFNNNSEGFNKLVTCLKNRGTGHVCMEATGIYWKNLAKYLYDYGYKVSVVNPVRIKGFAMSKLSCTKTDKADSVLIADFCKAMKPEAWYPQPLYIQELQQLVNRLNILIKHKTQETNRLEGASKAIANNIQMHIKFLETQIKEIEQLINDHIKNNKDLHNKAMLLESIPSIGTKTQAIVLAFLADIEKFSSAKQVVAFVGLNPKHSQSASSVRVLVESLELVIQIYVSLFICLLCLP

SEQ ID NO: 432014 - protein, 341 aa, unidentified
MSTITIGLDIAKSVFHLVWMNTTGKVLKRKMLPRKKVAEYFANLEACIVVMEACGSTHYWSRVITRCGHEVKAIAPQFITPYRKGNKNDYNDAEAIAEASQRENMRFVPLKSLEQQDIQMLHRIRERLIKNRTALSNQIRGLLAEYGLVMPKGINHLKAHLPGFLEDATNELSTATRRYFLGLSEELDELSVQIKSVDSEVLGINKQNEVCQRLSTMTGIGPIVATAFYAGIGDGKAFKSGRHVSAWLGLVPKQHSTGGKPVLLGISKRGNTYLRTQLINGARAALRHCENKTDQVSIWARQLKERSNYNNATVALANKMARMAWAMLHHQEDYKFKTVIN

SEQ ID NO: 432015 - protein, 345 aa, unidentified
MQIQIAVLGIDLGKNSCSLVGLDSQGRVVKRRRMRPAGIPGFAKSLPPCIIAMEACCGAHHLGRLLKAQGHEVRLMSPVYVRPYVKAQKNDDRDAEGIAEAATRPTMRFVELKSQEQLDMQTLHRARDRLVGERTALINQLRAILLERGIIIAKGRRNLERELDALLCGENGLDVSPRSRMLIEGMREEWRGLDQQIDIFDDEFVVSAKTNESARLLTTIPGIGVLNATALTAAIGDAETFARGRDLAAWLGLVPKQNTTGGKPRLAGITKRGNCYLRKLLIHGARAALPTLSKSETPLGGWLRGLLARVHKNVAVVALASKLARIAWAVLRRKEVFNHSALVVV

SEQ ID NO: 432016 - protein, 319 aa, unidentified
MAQNEVVVVGIDVAKDKVDACIRAFKLRQTWLSTAQGHRKLVAWLRKYQVNKAVMEASGGYERAWARVLREAGIEVRIVDPKRVRSFALSAGRLAKNDAIDAEMIAWFAETFSEAPSQLHDAAREELQALVKARLDLIDFRMRLVSQSEHAAPGLVQKAHAHILKSLASEIARLEAAISIKIKSTPDFAERAEIIESVPGFAKTSSANLVAGMPELGQVSDEIAAALIGVAPYDDDSGKRRGERHIKGGRRWVRNAVYMPCVGAATQNNPVLQAYYQRLIAKGKEPKVAIIACMRKLIVILNTMIARRQKWDPSRYSLT

SEQ ID NO: 432017 - protein, 367 aa, unidentified
MIIGCDFHPSGQQVFGMVKETGEVFADQWIGHQGTEVDEFYGRLPAGVVVGVEASGNLLWFERKLAEYGHELRIGDAAKIRACEVRKQKHDRRDAELITRLLAEDRFPQLGWVPSLGERDLRQLLRHRDQLVGMRRQVKNQLQHMALNQGQQKKRQLWTKSGRELLETLPLERWTARRRDDLLRWLDQLNGECAGLDQAVTEAAEAHAETRRLMTHPGVGPVISLGFVLTVGPMERFGRSRELVSYLGLNPQEHSSGERQRRGRISKQGSVFLRRLLIQGAQTAVRGDAELARQYRRLAAKKHRAVAKVMVARKLAVRLFWMRKTQATYPELVRRRGSSSHSVVMQADRLSEHPASSQGAHRSAAGE

SEQ ID NO: 432018 - protein, 391 aa, unidentified
MIYVGIDVAKNKHDCCILGSSGTVLREAFTLSNDRKGFQELFSAIQEALHQEGTDQIKAGLEATGHYSENLVAFLRNSGIQPVVFNPLQVNLFRKSQSLRRTKTDKVDAKCIAQLLMSAESTPVPASYQIPELKTLTRHRSRLVSQRTKLKQSISRLVDILFPELPSVCCSATQASIRTLLLELPSARQIAVCRIDRLTNLLYAASKGRYSREKALEIKQLAQQSIGANSPASEMELRLTLQQLDFLLAQLKQLEKAIQTIVAEIHSPILSIPGIGPTLAAIILAEIGDIHRFSSPDKLLAFAGLDPSTYQSGKFTAGHTPMVKHGSTYLRWALMQAARLASIHCATFRDYMDSKLAQGKHYFVALGHVSKKLVRVIFHILTTNEAFVPQA

SEQ ID NO: 432019 - protein, 419 aa, unidentified
MTTKKDSTVLSVVHPVCCGLDVHKKKISACLLGTGEAADNILIREFGTFTDEIEQLRAWLAEHECPIVAMESTGVYWRPVHNILEGEVEVILVNARHIKNVPGRKTDIEDSRWLAGLLQHGLLRGSFIPAKEIRHWRELGRSRRKNTEAIGDYKRRVHKLFESANIKIDSVVSDLFSMTGRNLISRLLSGTFTLSLADVQECARGRLRDKAQELYRSIQGFFEEHHRFLLAGMMRILKTLEQENEGISARMKELMQAQQDLLNRLDEVPGISELSAQYVLSELGQELETFPSSAALASWAGLCPGNNESAGKRKSGRSPVKKHHLKSIMIEIAWAAVKKKGSYYRDKYWRLRYRLGPKKAIVAIAHRIVKALYAIIKHGERYKELGEDYLAQRSNVNKLVKIKKEAKFLGYDLVKIVAV

SEQ ID NO: 432020 - protein, 410 aa, unidentified
MKRYCGIDWATDHHDIAVVDGDGRVVARRRVDNDAAGFAELLMLLAEAGDTAGSPIPVGIETDRGLFVAALRATGRPIYPINPLAASRYRARYAVSGAKSDAADAVLLANIVRTDPGAHRVLPADTVAAQAIRVLARAQQDAVWARQQIGNQVRDLLKDFYPAALAAFAELPEGGLARRDARTILAAAPTPAQAAKLTRARLHRLLVNAGRKRYLDRDTDRLREIFADTYLHQPPQVEAAMGIQLTALLGQFDAACRAAEDLAEAASAHFEQHPDATIITSFPGLGNLTGARVLAEIGDDRARFADARGLKAYAGSAPITRASGKKTVVLHRHIKNRRLAAVGPIWALGSLRASPGARRHFDARRDTGDWNRQAQRHLFNKFLGQLHHCLHTGQLYNEHQAFPPPLELAA

SEQ ID NO: 432021 - protein, 402 aa, unidentified
MAYCGGLDWGSAEHGVCIIEHDSGKIAAQFPVPHDAAGIADLMRRLARLAPPGDLPIAIERPSGLIVDALVAAGHPVVPIHPNVVKASRPRYRAAGGKSDRGDAYLLADLLRTDGHRFRRLVPCSDDIKALRALVRGRDALVAQRLVLANQLRALLDSFWPGAAAIFADIDSPIALAFVRRYPTPDSAARLGEKRLKAFMAQHRYCGRRTASELLARLRSAPPGLAGDSEADAKGELVRAWTAVLTKLVTQIAELASRIEHTIGELPDGKIVTSFPRAGRICAAQILAELGDVRERFQAEDQLAAEAGVCPVTHQSGKSRGVVFRWACNHRLRAAITCFADNSRHSSPWAADIYQRAKGRGCDHPHAVRILARAWVRVLWRAWQDRTLYDPARHRCSPASAA

SEQ ID NO: 432022 - protein, 443 aa, unidentified
MKLSKSQKRSIEKRKSISGKTIVAIDPASKKHQVAILSPDALPLMQSFKIFNTGRGFNRLLKKLKGIKKEFPGAEFLFAIEPSSHYWIPLLFFFKKRGYQFVLVPGLFVKRTREIEDHTSRQDDPKDAHIIGELVLNGKYCEERMPQDIYAELRNFSNDWLELSGEKSALRMKIRMLLDKYFPEFLKLFSDFLGASGRFLLSNCPFPKDVLQQDNRLLKEQVYKISRCRIDDERVDELIESAETSIGIDEGILGARFRLRHLLEKYELCEQHQKEIACEIDAYLNCIDYTPFLLSLPGVGLISVMLLLGQTGDLRNYNTVADLLSFAGLDLIYADSGNRIGKRRISKRGRKQLRLILYQMTLAFIQHHNIARRKYLRQRIAGKKPTQAIVSSISFFVRVMFSVVKQERDYLTLDASDPVYEEINQLEKQLEEQSKRNTQKKAA

SEQ ID NO: 432023 - protein, 396 aa, unidentified
MATIWAGIDAGKTHYHRVAIDEGGRRLLSRRVTNDEPELLELLAAVLALGDEVTWGIDLADGGAALAIAILINHGQSVRYISGRAIHRASEGYRGEGKTDAKDAAVIADQVRIRRDPHSLRASDETVTDLRILTNRRTDPVADRTRTVNRLRAQLTSIFPGLERALDLANTGPLTLLTGYQTPAAPRRIGVKRLETWLRNRKGIRADRLAETAVQAAGRQHTSLPGEKLTAQLVHTLAKEAVVLNQRIAEIDKLIEARFRDHHTFEVITSMPDLGVIPGAEFLAATGGDMAAFGTPDRLAGFSGVAPVPRDSGKISGNLRRPQRYNRRLQRVFYTSALFSIRYREGSRRFYDRKRAEGKRHTQAVLALARRRVNVLCALLRDGRCYQPTPPIALAA

SEQ ID NO: 432024 - protein, 326 aa, unidentified
MSIILGIDVSKDKLDLVLLNEKGKFHKVISNDPAGFKTLDQWLISRHIDRVHVCLEATGQYGDEVSEYLYGQGHDVSVVNPARIKRYGESKLHRNKTDKADADLIAEFCLKEKPALWEPLSPDLKHLRALVRRLIDLQANYQQEENRLSSGEKDAWVIQDLSGHAEYLKARIQATEEEIQNFINQTPGLKAKQDLLVSIPGVGKKSSARLLAELGEISGFENAPQLAAYAGLNPKGFSSGSSVHKKTRISKQGRSELRACLYMPAIVAMTHNPVVRALKERLQKKQLPTMAIVVACMRKLLHIVYGVLKSQMPFDPDYDRQFNYSA

SEQ ID NO: 432025 - protein, 353 aa, unidentified
MVYLERGYNLKELPWSKTVSNSFLFKEACMILVGVDVAKDKHDCYIMTSEGEVLFKSFTIANNMEGFNQLYEKILSVIDNFDNVKIGLEATGHYSYNILGYLLDKGLTPYVINPLHSNLYRKSLSLRKTKTDKVDSRIIASMLMSDVSLKPYSNTLYHNEELKSLTCYRFTKVQERAKLKISISRLVTILFPELEKLVPTLQMNSIYALLYEFPSAHAISKAHLTRLTNLLNTTSKGHYIKDKAVLIREAAKNSIGSNMPAKSLELKHTIKLIKELTSEINEIEEEIKIIMNKINSPILTIPGIGLSTGAQILAEIGDFKNFSSPDKLLAFAGLSPSTYQSGNMYSSNAKMEK

SEQ ID NO: 432026 - protein, 312 aa, unidentified
MYAGVDVAKASLQVHLQGRQSEFKNTPSGLRQLCLELRKTSGVHVVCEATGGYEHALVKALHKEQIPVSVTNPAQVRAACQARGQRAKTDRIDAQMLTDFGQRYQPQPTAPTTPSQDQLVALTQWLQQLIHGLALAKTQAEHHQDPFVGRQHSKLMTHLESQIEAVEKQIKALLEKDPVLQQRVDCLDEIKGVGARTAWMVLAHMPELGRLNRQEAAALAGLAPWTRESGTMKGMRCIGGGRPEVRVALYMACLSAVRSNPVLRPLYQRLRAKGKLPKVALTAAMRRLLIYMNHQLKHLAADVPASGGDKTK

SEQ ID NO: 432027 - protein, 454 aa, unidentified
MPKKAKIETTATGKKFKVVNPNAAGIDIASSEMQVCVPEDRDCDCNRTFGCFTQDLTQIADWLTSCHIETVAMESTGVYWLPLYFVLKERGFDVVLVNARDVKNYSGRKTDEADAEWLMMLHSYGLLKCSFQPENEARAIRNLTRHRSNLLQSSSREALHMQKAMEQMNLKLGNVISDLLGKSGLAIIKAIIDGNHNPLELAMLAEDNCKASKEEIAKSLEGSWSEDHLFELGQAYELYNFIQKQIQQCDKQIEMHLIRYRAELDSSSDGDMPRSKKKIGKKNAVDFDVEKYAFDIWKVNAMSIPGMSAISLLQLIGELGHNFADKFDTCHSFCSWLNLVPNNKISGGKLLSSKVPQKTNTCGQVFRLCANSLKRNKTTLGYYFRRIQSRCGYSQAIVATAHKIAKIFFTMVKTHTEYDESKTGINEKALLERKILMTQRRLDKLNRQLEVSFA

SEQ ID NO: 432028 - protein, 485 aa, unidentified
MKTKRQEGASKTSRQAAAASQGKWHEMNRKQRREMTRKIQNEDLRLEIVHPDAAGIDIGNESHYVAVPPTRDSQSVRRFGCTTAELKAMAAWLNQCSIHTVAMQSTSVYWIAVYDILEQAGLEVHLVNARDTKNLPGRKSDVQESQWLMKLHTYGLLRNSFRPSQEVRTMRTYWRQRNDLVRAAVRHIHRIQKALTQMNIQLANVLSDVSGMTGQAIIKAILAGERDPRKLAAFRDPRVKASEEQIALSLEGNWQQDLLFVLHQEQDGYEFCQRQMTECDRQLNHYLEQTEDRSQGAPLPEEKRTERLKKKKGNKPQFDLREGLFRMTGTDLTQIDCVDVMTATTVISEAGWDMSKWETEHHFVSWLRLCPDNRISGEKIIGKGRLPTNNRVTTALKISASNLRLSNTYLGAQFRRLRTKLGAPIAIKAMAAKLARLVYRILRYGMKYVDRGAAFYEAQHRQLQIKHLKWKAAKLGFKVIEAPAA

SEQ ID NO: 432029 - protein, 401 aa, unidentified
MAVVVGIDVAKEFHWVAIVVAETGKVLVSQRVDNDPDSIDGLIGRLRDLGADHGPVTVGIDLMGGIASLLTAMLLDTGIRLVHVPGLVVNRARRATKGGEAKSDPRDAKTIADQLRLREDWREVTAEDEITLDLRILVGRRRDLVVDQTRRLARLRETLTSIFPGLERAVDVTNLGDLHLLARYVTPAEVRRAGRRRITEYLLRAGVRRSYAEPLVDKTIAAAQVQRTVVPGQARLAEFAREFATEAIAARRRIGELEAQIREGLDRHPDAALITSMPGMGAILTAEFLAEAGDLTRFASADQLASAAGLAPVLQQSGKMHYLRRATAGSKTMKFVFYQSAFAAIRSDPASKAFYARKRAEGKRHHQALIALARRRINVLHALLRTRQPYRTDHRATATAA

SEQ ID NO: 432030 - protein, 343 aa, unidentified
MDQYVALDVSLQKTAVCVLNASGSVVIEAELPSEPAALTAFIQTHAPRAARVGLESGPTSPWLWHSLRAAGLPVVCMDARHAHAALSVRPSKSDRNDARGLAEMVRMGWYREVQVKSLAAHERMALLGVRRRLVDMRVEIDGQIRGILKTFGLVVGSGNKGAFAQRARMLVQDHPVLSALVDKLIEVRAVAVAKVAALDKEIRRFVRDDPTLRRFMTVPGVGPVTALAFRSTIDEPDRFKRARDVGPYLGLTPRRYQSGETDRQGRISKCGDRFTRTCLYEAANVLLTKVQRWSPLKAWGTRLARRIGSKKARVAIARKIAVILQCIWTDGTEFWWTKEPATA

SEQ ID NO: 432031 - protein, 387 aa, unidentified
MPQRDDLSRSLTAFQQDSTLVAVVELSRSSWLVAGIVPGIGRHPLKKLAPDEEALLRLLQRWRDEAAGAGRTITRLAVAFEAGRDGFWLARWLRARGVEAHVIHPTSVAVSREHRRAKTDRLDTELLKRAFLGWLRGEPDHCSMAAVPTLEQEDAKRPSREREGLVGERTRIVNRMKGALARLGVRGFKPTLRNAAERLAALRTAEGAPLPPNTLAELRRDMARLRLVREQIAELEAARLERLRQAPEDRPHAMVRLLARVVGVGLETADMLVREVLSRELRDRKALARYAGLTGSPDESGARRREKGLARVGNARVRRGMLQLAWRFLRFQADSRLARWYRARTADARGGTRKAMIVALARKLLIALWRLVTTGEAPEGVALRPAA

SEQ ID NO: 432032 - protein, 285 aa, unidentified
MELHTIGIDLGKTVFHLVGLNLRGEVVVRKKFSRKQLLHFTANLQVELIGMEACGGAHFLGRALREQGHEVRLMPAQYVKPYVKTNKSDYIDAEAIAEAVGRPKMRFVPIKSDDQLDLQSLHRVRERWVMRRTAVINQIRGLLLERGITLRKGRCHVDEALPGILEDASAKLSGALRVLLAQLKLELDHLQMRIDEADAVIKKTAGENEACRRLVAIPGIGPITATAVIAAIGNGAAFKKGREFAAWLGIVPGEYTTGGKQKLLGISKRGNSYLRRLFVHGARVC

SEQ ID NO: 432033 - protein, 371 aa, unidentified
MKQQTKSSNITVGLDLGDRRHRFCALDERGEVVEQDSICNDRVSLRKLAGRYHGALGVMEAGAHSPWISRFLEALGWRVVVSNPRKVRAIYQHERKSDQRDALMLARIGRMDLALLYPVRHGTAEAQQDLLRIKLRDSLVRARVAVINSVRFTLKSLGYTVRNPSSARFHKVVMEEVPESVREMITPSVQALAELTARIKMLELEINTLAQMKYPQSAQLQQIPGVGPIRALYFVLKIENPNRFAHVRDVGAYAGLCPRRDQSGESDPQLRISKRGDAYLRRLLVSAAHYILGPFGPQSALRAYGLMLAADGTARAKKRATVAVARKLAVLLLSLWKSQQPYQPFPGACLNGEQEDRRSGTIALHRMEATD

SEQ ID NO: 432034 - protein, 358 aa, unidentified
MAVNEGTRRIVGGVDTHKDLHVAAVVDEQDRVIETRSFATTRQGYRQMLAWMRAFGDLQRIGVESTGSYGAGLLRFMQQAGIAVLEVTTPDKQDRRRRGKNDDLDAQNAAHAAFAGQRTVTPRSRDGMIESLRVLMACRKTAVSARRVALQMIHNTIVCAPDGLRDQLRSLTRMQLVRTLASWRPDLTAYRDLESAYRIGLKSLARRYLELHDEIADLDVMIAAIVDELAPNLVARNSIGHIGAAQLLLTAGDNPERLRSEASFASLCGVSPVPASSGKTVRHRLNRGGDRAANSALHIIAIGRLRTDQRTKDYVTRRIAEGHSKLDAIRALKRYLAREVFTLITQRRREINATRIAA

SEQ ID NO: 432035 - protein, 346 aa, unidentified
MRFYDQQHGFYCGVDLHTRKMYLCVLDREGNKRLHRNMRAKPDDFLRAIKPFRDEVVIGVECMFTWYWLADLCLDEGLDFILGHALYMKAIHGGKKKDDKIDSEKIARLMRGGTFPLSYVYPREMRATRDLLRRRTFLMRRRSELLTHVQLVNHQYNLDPFEKRLQSVCNRDVLDRFEQDSTRQNVEADLQMIGHYDQLLKQLESNLLRQAKLQDPQARFLLQTIPGVGNLLSLVLLYEIHTIDRFASVGDLLSYARLVTPKQTSDGKVTGHSGAKIGNPHLKWAFSEAVLMMMRHSKDAQHFVARKEKKHGKARAMTMLARKIARAVYQMLKRKEAFDAVKFFAN

SEQ ID NO: 432036 - protein, 344 aa, unidentified
MSQASTIGLDIAKNVFHAHGADERGAMVFSRKLTRAKLLEFFASQPPCVVALEACSGAHHWARQLQTMGHEVRLIPPAYVKPFVKRNKNDAIDAEAICEASQRPGMRFVAVKSEEQQAAGLVFRTRDLAVRQRTQLINAIRGHLAEYGWVAPTGRAHMAMLADLLEEEEMISTLPEAAQPMFKLMVGMLADLNKQIAVLDREIGRRAKEDEAARRLMTIPGIGPVAATAILALAPPTETFRKGRDFAAWLGLAPRQHSTGGKQRLGSISKMGERTIRRLLIIGGSSVVRQASRYGAPAGSWLERMLARKPRMLISVALANKMARMVWALLTKKEDYRAPAAVAA

SEQ ID NO: 432037 - protein, 372 aa, unidentified
MASIIYVGMDVHTTNFTFCCYTADSDRGFAVAQTEPDYRQVIKYMERVQKQRGEECKFVCGYEAGCLGYSLYHQLTRCGVDCVILAPSTMHQEKGKRIKTDRRDAENIARCLAFSLYSPVYVSTTEDDAVKEYIRMRDDIKADLKRVKQQIIAFTTRHGFAFDGKSYWTQKHLKWLETLVFEHPLYKETLQEYLILYYMLDEKVAVYDTRIEEMSHLEHYEENVQKLCCFRGVAAHTALSLLVEVGDFQRFRSAKHFAAYLGLVPGEHSSSDKQIRTSITKAGNTHLRRLLVEAAQSYNRGAIGKKSAALKARQGGNPAEVIAYADKANERMQRKYYRIAFKSRHNIAKTAIARELACFVWGMMTGNISNAA

SEQ ID NO: 432038 - protein, 421 aa, unidentified
MAKTVEIVYPVCCGMDVHKNFLVACIAVTNEHSHTEHHIRRFSTFTGDLRRLAEWLASHNCKNVCMESCGKYWMPVFNALEKANINVCLTHPKYVKAIKGKKTDKKDAKWIAELFKCDLVRSSFIPPPDIRQLRDLCRYYVKLTGFAVGEKNRAQNCLTMCNFKLDDVFSDVFGKSATRVLDAMLEHGSGDFELDGLVHGRCKSSPEQIRAALEGELDPAQAQKLNLVRQHINDINALKIALEKLILELAAQYQPQIDLLMTVPGISSSLTAVRIFAEIGADMSVFETAKQLVSWAGLSPQNQESAGKKKTTRIGRAGAYLKPLLVQIALSCGKSDKCPELKSKYLALKKRRGGKKAVIAIARKLLTAIWHILSKNETYNAELYRKADKPPAARELTTTQAAAFLRNKGFLIVDEKTGEVT

SEQ ID NO: 432039 - protein, 315 aa, unidentified
MKQEETYVGIDVAKDRVDVAVRPGGDTWSIDYDEPGMSELVSCLRTAEPTAVLLEATGGLEMPLVSALAAAALPVVVVNPRQVRDFARATGKLAKTDALDAQVLAHFAEAVRPPVRPLRDADTQELNSLTTRRNQLVTMLVSEKNRLSRASHSVRPSIQSHITWLEQELSDLDKGLREALRRSPVWREKDDLLRSVPGVGEQLSLSLLAYLPELGTLNHKRIAALVGVAPFNRDSGPRRGKRSVWGGRSRLRAVLYMGALVASRYNPVLRAFYQRLLAAGKPKKLALTACMRKLLTILNAMAKSGQRWAPRVNST

SEQ ID NO: 432040 - protein, 343 aa, unidentified
MTRYAGVDVSLETSSICIVDGAGTIVRELKAESEPGALAAALTATELPFSRVGPEAGPMSQWLHAGLAEAGLPVVLVETRRLRVATKTMPVRTDRIDARAIAQVVRTGWFRAVHVKSELSQETRALLTARKLLVAKLRDVDNGVRGLLRGFGLKVGTVGERAFPRRARGLAHSRPELAAVVEPLLQVREALLAGRERLHRLVLAAVRDEPTCRRLMTVPGVGPVTALTFCSAVDDPARFGRSRASGAHFGLTPRGYQSGETDRVGHISKQGDGLARQALYEAANVLLTRTSRWSALKAWGMSVARRAGMRRAKVAVARKLAVLLHRMWRDGTEFRWGRETAAA

SEQ ID NO: 432041 - protein, 428 aa, unidentified
MEQTERNRLEEFRQLKKEIRHSKEYLIVGIDIAKDRHHAFFGTATGKTLLRRLVFSNDGEGFGKLLDQTEALRVRHGLKRVVYGMEPTGNYHKPLGEYLIQMGRMVVLVSGVTAKHNRESLDGRWDKHDDKDSANVADLISQGKCLYYEYPPVELRGLRGLLSLKRRLKRQEQSYRVRIRNHLIAQYFPEMDRDYERLGAEGLSIVRWCLAASEIAQLDVDPFIERVTSRRVNMEKRRRLEALWEKAGESIGCDEVPGVDHEAKMMVEGLKQVREMIKETKERIEEICNRFPEYPFLLTIPGFGPDVSSKVLGAVGDPDRFENRKQVLKQAGLDLSANRSGKNSARAIPQISKQGKADLRYALYQAAFIASTKNRDFMRYYTSKLRGREKEKGINGKILVKLSAKMLLIAWTLMRKKEAFNPTYLNAE

SEQ ID NO: 432042 - protein, 381 aa, unidentified
MPDVSSTAPAGVRLWVALDVHKHSIVAATLPAAGGSPVLQRIENSERAIRRLVERLGGPEGLAVAYEAGPCGYDLLRLLGRVGVACDVIAPSLVPVRAGDRVKTDRRDASKLVRLYRAGELSFVAPPTAAQEGLRDLVRCADDLRCARTAARHRVAKQLLRHGRIYRAGKKSWTRQHIEWVRRQRLEDSNAQRALEHMLCHLDAVDAQLAAIEHELAAIATSDPWRDPVAWLCSFRGIGIRTALGLLAEVGDFRRFGSARELMSFLGLTVAEYSSGDRQHRGHLTKTGNRHARRLLIEAAWHYRHPPRRRTRTAPLADPVPPAISARAWQAQIRLHHRHRHLTGHGKRSTVATAAVARELAGFLWAAMTHQPLRQQLTAAT

SEQ ID NO: 432043 - protein, 403 aa, unidentified
MNVKRYRWFCGIDVAKNKHVACIMDRDGRIVARSQSFYNNAEGYQVLLKRIKETCASDRPLIGMEATGHYWYALHDFLVERGYDVVVINPLQTKQQAKKGIRKSKTDKIDARHIATLIKNGEHRAALVPDDFAMTCRQLSRLRARQVQHISRLKTLLWSRVTPIWPEYETLFAEPFRTTGRKLLLAAPTPSDVLALEPEQLDELVRKASRGKFGPVKVEQIRQAAARTIGIRRGLKGARIGIRSIITQIEALMPIRSQLEEHIDALADQLPAYYFTLPGITRIGAVSLFGETDPITAFQAPGQLVAFAGLDTNAFQTGQCTGERLQRRITKRGSPFLRHTLWRMAHRACYQEGDLRDYWLRRKREGLHHLAAVTATALKLCHVVWRILTDQRDYQPQPPTKNA

SEQ ID NO: 432044 - protein, 352 aa, unidentified
MAIKTLGIDIRKSTFHLIGLDERERPTLKQKLTRAKLMEFAAKLPPCLIGMEACPGSQYLARRFAEYGHTVRLMAAQFVKPYVKSNKSDFLDAEAIAEAVTRPTMRFVPVKNPEQQDLQALHRVRSALVAERTATINQARAFLLEYGLPITRGTRALRHTLPGIIADETNAVSFRMRSILQRLWGQILDLDQRIEDFSGEIEALGREQPACQRLMTIPGIGILTATAFIAAVRDGRVFRSGRELAAWLGLVPAQYSTGGKPKLLGISKRGNVYVRTLLVHGARAVLARGARRDARLSAWLAGLSRRAHPNVAAVALANKLARIAWAVLTRGDTYQGTTARGNAALEGTGMAA

SEQ ID NO: 432045 - protein, 418 aa, unidentified
MKIVYPICCGVDVHKTFLVATLITSQGIIPHYSKKRFSTFNNSILEFKQWLIDNNCFDVCMESTGKYYVPVYNLLEDTIRITVANPKWVKAVKGNKDDTKDSKWIGDLFRLGLVPGSYIPQKPIRILREYTRYRFKLVCCKSSEKNRFQNAFTVCNVALDAVVSDMFGKSASSITDYLVSSDSFDPEHCSSLLQRSLKKKADTVIESIEGYQMTQEQKERILMVRSHLEFVQQSIVTLDEKLDKMVAPYESAITLLRTIPGVERTSAITIISEIGTDMSQFTNSKRLCCWAGLTPGNNESAGKKKSVRITRAGVYLKPALVQVAHAAVKSDKSPYYKTKYERLYKRRGKKRAIIAIARMILTAIYNMFVTGEEWNPSDLYKIDLPQEMLEKQKEKAIKQAVKLLISNGVIKASDISVA

SEQ ID NO: 432046 - protein, 351 aa, unidentified
MSHKTDATVVHTIGIDTGKNTLHLIGLDDQGAIVLREKIARGRIAARLANVPRCLIGIEAGMATHYVARELGALGHDVKQVPPAYSKPFRQGHKNDFRDAHAIAEAVQRPSTRCVPVKTDDQLDLQALHRVRSRLVGQRTAVINQIRGFLLEHGIAVRQGLRFLRQQLPDILAKRSDVLSPRMIRIMEDLSGDWRRLDERIEHITKEIEVLAGTDVNCGQLMTVPGIGPIVASATVAAIGNGAAFARGRDFAAWLGLVPKQMSTGDRTILGRITKRGNRYLRMLFVQGARAILLRPKSWAKHSFGPWLTTAARRLHRNILTIALANKLARIALSVLIQGRSYETRIVPAAA

SEQ ID NO: 432047 - protein, 394 aa, unidentified
MRDRPPVTDGPAFRVAPCDEMDPPRFSYGLWWASMGFVQLMRQRTGGVHMTVSTIGLDTSKSTFHLVCLDERGNEVHRKKLGRSKVLAYFTGLERCLVGLEACGGAHWWGRELETLGHEVKMMSAKTVKACRVNAKNDYNDARAIAEAATRPYVRAMPLKTPEQLDLQALHRSQAMAKKQRNQTASSMRGLLTEHGIVVPEGIGVLRRRVPEVLEDADNGLSDVFREMLAEAYQVLCQQCERLAECNRRLNRAFARDGRAQLAASTPGVGVMTATAVSAMHGDLRQFRRAEDFSAALGLVPMQHSTGGRTMLGSINKRTNPYLRTLFINGARSVLRHAERHPNDPMCRWVLEVAARRGKNVATVALANKLARVTWAVLTTGQPYSPERLRTRSA

SEQ ID NO: 432048 - protein, 365 aa, unidentified
MKKVSRGAGRMEKPEITIGLDLGDRFSHYCMLNEDGDAIESGRIQSTEEALRRHFEGEPAMRFALECGTHSPWISRLLEQLGHQVIVANTRKIRAITASESKNDRNDAEKLARFAFCDPRLLSPIRHRSPERQQDLNLIQARSTLVRARTMIVNALRGLVKSAGCRLPACSPQGFEARAAASIPPTLAEAARPLINQIAALNAGIQQMDRGIEQLAERYAEIKTLRTVPGIGPLIAAAYVLTLDRPDAVRHSRQAGAFLGLRPRQSQSGDSDPQHRISKTGNVYLRSLLVQAAHYVLGRFGPDSELRRWGLKLAASGGKRGKKRAIVAVARKLAVILHRIWQTGNPWQAFPQSANNTASKDVRMA

SEQ ID NO: 432049 - protein, 357 aa, unidentified
MIVIKYYTSTTQFNCGIDLHARQMYVCVVDRNGKRLVHTNIKNNDFAYFLKLVAPYRHDLTVCAECMFGWYWLADACADAGIHFVLAHALYLKAIHGGKNKNDRLDSEKIAHLLRTNFIPPGYVYPAAKRPLRALLRQRLLYVWNRSELLSRLQSHQLAYNRPTHRQTLYNRESWSEQLLAAEPDPVRQLALQNDLALITHYDTQLATLEKELLRLTKQTASRDFTLLQTTPGIGDYLGLTILHEIGDIARFPTVKDFLSYCRLVKGTVASAGKIKGLRGAKLGNPYLRWAFGEAAVVAKRDPLVIGPLAQRLEARLNNKFKANTVLAIKLARAVYFMLKQKTVFDPERLVAALSHN

SEQ ID NO: 432050 - protein, 350 aa, unidentified
MIIIGCDYHPGFQQIAFVDTDSGELQERRLQHCEEAEKFYRNLAAQGMKVRVGMEASGHARWFERLLAELHFELWIGDAAEIRTKRKRKQKTDRQDAQLILKLMLKDDFPQIWVASWENRDLRQLLWHRHRMVQARTRMMNQLQAVALNEGLRYKKRLWREAGRKQLEAFRLAPWASRRRRDLLELLDRLTPTIAELTQAIEQEAEKCPEAQRLMTHPGVGALTALAFVLILGKADRFQCGKQVACYLGLVPLEDSSGDRRRLGHITKQGNSLLRFLLVEAAQVTVRSIPEWRRKYFHLALRRGRKIAKVAMARRLAIALYWMWRKGWDYEQMKKFGSHAGQPEHRHGVK

SEQ ID NO: 432051 - protein, 341 aa, unidentified
MSTVYVGLDVGSTTFHQITMQPDGRITVSRRFPMSEANLIRAFTGLGQDVHVHMEAGELAPWVRSVISPLVKRVVISHPRSNAWIANDPNKCDRIDATKLADLLRMNRLTEVYYAQETPRRDFKQLVQHYDDLTDQQVRLKNKIKARLRAQGIIVRDGRLFTRKWRMDVVEKVPSPDVRQAIMQLYSVLDQTLAARLAARKLMFEAAKSFPEIALFRDVPGVGPIGACRFSAYIQTPHRFSNVRKIWRYCRLGVSHRSSDGKPLGHPKLDRAGCGQLKNVSRRAFEAALRRSDHNAFKRAYERALESTRNKIHARLSVQRKIVSVLRAMWLKMAPYRDELI

SEQ ID NO: 432052 - protein, 371 aa, unidentified
MKSIIYIGMDVHKKTYSLCALLKETGEIIGETKIPADVSLIIKFIENAKKSVDSDDVQIKTGYEAGCLGYSLYWQLAAKGIECDILAPSTMHRSAKNKVVKNDRRDAKNIAVNLANGTYKSVYVPTDEDVEIKEYIRMMHDFKIELKKVKQHINAFLLRFGHHYPGKSKWIPAHIKWLKELELSDIYREILDEYLSQLEILSEKIERFKYRLEELSQKETYNEKIGQLRCIKGIDTTAAMTMHAETSDFDRFPTANAFASYCGLTPGEDSSGESYHRLGITKQGNSMIRTTMVEAAQVLVRGTIGKKGKKVKSKQKDQDVKVIDYADKAVVRLQKKYHRMIFRGVKRNIAITAVARELACFVWGIETGHIS

SEQ ID NO: 432053 - protein, 343 aa, unidentified
MIYVGVDLHLRFCYMTVLDANGKRLWQGRVENVESDLQQFFANLKSSHQEKGGIAVAVEACGFWCAFVDCVEPLVDRVVLVHPAKVKAIADAKLKNDRVDSDTLAQLLRANLLPEAWKADRATRDLREVLRMRVALGRDRTRYKNQIHAVLHLHGQRAPVSDLFGRQGRAWLKTLAVRPAARQAIDTSLRMVDQLDSELRALDRQLQKSAQQDPDARWLLSIPGIGAFSAMVLKAEIGDIRRFPDKKSLYNYAGLVPVIRQSADHLRRGGITRSGSPLLRWVMSEAAVTATRYSPAARAWFTRLAQRKHPHVARTALARKLLGAVWALWTQGLCFDERIFAAM

SEQ ID NO: 432054 - protein, 344 aa, unidentified
MSLTIGLDIAKHIFQVHAVDDSGEPVVRRKLRRSEVLAFFAKLEPSVIGIEACGTAHYWGRALSELGHEVKLIAPHYVKPYVKRSKTDAADAEAICEAVGRPTMRFVPVKTTEQQAIQMVHRARSMLVRQRTMLVNAVRSHLAEFGLVTGLGLAKTAALVAEVLKAGEDECPIPEIARTVIRCLAQQVAMLDNQIRRLDAELLAWHRTNAASKLLASIPGVGIVTATAIAATVPDPGYFGSGRAFAAWLGLTPRANSSGGKDRLGRITKMGSQYIRTLLVVGATAVVRSARIKDGSWLSEWARSLLEKKPARVVTVALANKMARVAWAVLTRGHYFRPSLVAAG

SEQ ID NO: 432055 - protein, 369 aa, unidentified
MKKNNTRTQSSRRAARPKPMPITIGMDLGDRHSEYCVLDQNGEVQKRGSVATTKAGMRREFGRRKHSRIAIEVGSHSHWVNSLLRKLGHEVIVANARRVRLITESSLKNDKLDARTLARLARVDPQLLHPIQHRSEQAQEHLTMLRARGNLVEARTQLVNAARGLVKPFGERLAKCDADQMRRERLEGLPAGLRQILEPLLEAIEELTRRIAVYNAQIEKLAREQYPRTALLEQVYGVGTLIAFTFVLTLGDAQRFRKSRDVGCYFGLRPRQSQSGESDPQLGISKEGDQDARQMLVQAAQCILRRDAPDTDLKRWGLKRCERGGKSAKKKAIVGVARKLAVLLHHLWVSGEVYEPLRNSQLAQRSAAA

SEQ ID NO: 432056 - protein, 421 aa, unidentified
MNQLTDTEYSAYVGIDWAAAKHDICVQAADGGAREFACISSQPEAIEAWAQALYRRFGGPIAVALELSKGPIVSALQKYDFFVLYPINPSTLAKYRETFTPSGAKDDPTDAELAVDLITRHAERFSPLKPQSTTMRKLIGLVEQRGKFVSDQGRVVNRLGHALKQYYPQVLEWFDDHNTVVFCDFVSQWPTLVQVKRARKASLERFFKSHHVNSSQLIEKRITAIKAALPLTSDPAVIEPHRLQVEILIEQLRITIKALKRFDKEIAASANRLPDYALLFNPLPGAGHILAPRLLAAFGEDRQRYPQADALQKYSGIAPVTKRSGKTTWVHWRWQCPTFVRQTFVDWASQTINKSAWAGAYYRQQRAKGCSYQVAVRALAFKWIRILHRCWQNRTPYDESKYLEALRRKGSPLLKYLAEPA

SEQ ID NO: 432057 - protein, 451 aa, unidentified
MTNHPLELTMETRFVGLDVHREVLQACILDAQGRLLERHRFDLTRPHLEAFIRERLRPQDRVALEATTNTWAVVDLLEPHVAEVVVGNPLRTRAIAEAKVKTDKVDAEVLAQLLRCDYLPRVWQPDAATRRLRELTAHRAGLVADQTRLKNRIHSLLAQRLLRVPVAVLFSQPGRAWLNQLALSESDRLMLAGHLGRIDQLQADLASVEKHLAEISYPCQEVRLLMTLPGMGAAAAQGLWAALGDWRRFRDGDQAASYLGLVPSTRQSASACRHGSITKAGNSHARWLLTQAAQHLALHAGPLGVFFRRLARRKNHNIAVVAAARKLVAIAWLMLKNGEPYRYSRPESTRAKLSAFRTLATGQRRKKGPLRDRPQRRAPGERTHRTEGLNEIYASEGLPPITASEQLADGERRALEALGLGALPQEVQTPRRRLSRRQPSPRARGVPVPRV

SEQ ID NO: 432058 - protein, 375 aa, unidentified
MKEKVRFLGLDVHAETIAIAVAEPDGEVRSLGTIPNRAESIRKMIRKLGPAEKLRACYEAGPTGYVVYWQLAELGVQCEVVAPTLVPVKAGDRVKTDRRDAEKLARCYRSGDLTAVWVPDEGSEALRDLVRAREAAKQDQVRARHRLSKFLLRSGQRPPTGVRPWTRPYLIWVAQLRFPQSAQESTRQDYLHEVEHMRARVARLEQAIMEAVKLASPALQQVINDLQALRGIADISAVTIAAELGQVSRFGSARELMGYCGSVPSEDSSGKRIRRGGITKTGNAHLRRIVGEAAWSYRRPPCIWYGLRRRQESISEEAKEIAWKAQHRLHKRYMRLGAAGKPQGKIITAVARELLGFIWAIGIRAETIASQQAAA

SEQ ID NO: 432059 - protein, 323 aa, unidentified
MNKDRVYFGIDISKDVFDVMDSSDNYFQFENDFNGFKNFVKLLGKESHCVMEATGYYHYKLAYYLIENNIRVSVENPLSVKRFIQMRLSKIKTDKSDAKMICLYAQSVDLKPWEGHSKRQIECLQITRLLSLYFKQTTALKNKIHGEDVLGNPSLLVVRSLKRSLKHTQKEIKHLEEKLTEIVKQDHQELLTRLESIPGLGRKTSIMLIVLTDGFERFTSASELCSYSGLTPIIRQSGTSIRGRARISKMGNRKLRNLLFMCSFTACKNNKACKALYDRIVAKGKSKKLALIAVCNKLLKQAFAVAKSGLIYDENYRSTLVKN

SEQ ID NO: 432060 - protein, 760 aa, unidentified
MGESTTFIGLDVHQASVTAAVWRPGAGAPEVGAAPVEVPKLVRWVQRLAAGGPVHVAYEAGPCGYPLVRALTRVGVHCTVVVPSLIPQAAGGRRQRIKTDRRDARQLVTYLRQGLLSAVTVPSEADEALRELVRCRQQLQRDVVRARHRVSKLLLRHDRRWTTTRPWTQAYRRWLRDLSWAEPGVALVCRTYLDALESAEARVRALDARLATWEVPAALAGPVAHLQCFRGIDRLHALTIAAETGDGRRFPSARGYMHYTGLTCWEWSSGARRRQGGISKMGNTHLRRVLVEAAWHYRTRPACGKGLRARQRGQPEAVCHLAWRAQERLHAKVRGLLGRGKRSTVAVTAGAGPPYEPSTFHLRQGYGGQVRSTGAGTRIEKPESPSAAPRNRDFPRDERTWHVPRRHAEAFQRLHRHVPSPQLSTLTLLSALLVAMNGCGGGTPPPRTSPAPRPSPPRAGTPPPIAAPVQSGEAAPLRIEVGPRGSGAFEDVGLEDYVRDVVVGELSIGAADAALAPAAYEAQAIVARTYALAGRRRHAAEGFDLCSTTHCQVFARNQWRRSRWASAVDAAVARTRGQYLESAGRPIEAVFHAHCGGHTSAAVDVWRSAGATYLRGIDDPYCLREQESAWTSTLDLEAVRLALNRRPRTEVGDRLDGVQVLRRDAGGRVVEVALTGSRAPVVTGEDFRLAIMAVAGPSSLRSARFEVERLGAQVRFTGRGSGHGVGLCQIGMIGRLRAGQTPAQVLLAYYPGAIITVAGT

SEQ ID NO: 432061 - protein, 398 aa, unidentified
MKGQDIMIYVGIDVASQKHDCFLLRDTGEVFSKTSFTIKNDFEGYKKLHNSILQFVESTKDSNVRIGLESTGHYSKNILLYLIKQGYQTTLINPILTNMDRKASTVRKTKTDKIDAEAICKFLDKNRFDFKPYTLLSYHIDALKSLTRQRFSLVKQMTQQKLIFQRLVNVIFPEFLSHFSNDYGESVLNILYSYPTPKKLAKAHKESITKLLHSRCKITSSEILELAKNSIGQSEEYLGFELKHTIDMIRFYQSQIEIYNKQIEIELNETEYGKIITSIPGVGIITGAMIISEIGDINNFTTQDQLLAYAGLDPSVYESGQFESSHNKPSKRGSKYLRWAIHQASSVIWQHDNTFKDYYLKKIKEGKHHYVAIGHIDKKLIRVIFSLLKNKSMFIPQK

SEQ ID NO: 432062 - protein, 337 aa, unidentified
MLVKDLSTKIHVGIDVSKLTLDAFILERKLHRKFKNNSKGFTSLFQWVKKQSRTAPDTILFCFEHTGLYSLQLALFLEENGLFYSMIPPLEIKNSLGLTRGKNDMVDSMRIADFSLRYEDKLHISRLPTRKIRNLHSLLTLRDKLAKNMRGYIITYNESLRVMQPDDFPELFCGYRNTIAKLKEEIGNVERSLKAILKSDTRLWTTYKLVTGIKGIGLIVASYMIVYTHNFTRFDTWRKFACFSGIAPFDHESGTSVKGKTKVSPIANKRLKTMLHLSAICAIHTDTELKEYYHRRLAEGKPKMSVINIIRNKLVSRAFAVVKRGTPFVDIKRYMDV

SEQ ID NO: 432063 - protein, 401 aa, unidentified
MKRLSGGIDVGSESHHIIILDEEDNVLYNKKITHKIDEFTKSINLFRKIEKKERGKLSFALEGKNGHSNPLDRILLNKGFTLYNIDNLKLKRFREAFAGEWRDDERDSLMLSKMLKLKDHINSQREKVFIKIEKPSPVTESLKLLSRHQQTLINEKVRLTNRLRKKLLEICPQILELGKVKNKKIIAILAKYPDFSKYKRITLKSLLKIKGIGKRQAPFLLKRLNNIEYMPGLTDIYKTIILSFTKRILVLREEIKDIDKKLDEIGNQSKEVNHLKTIPGVATKLASRLIGEMGDITRFPSEKKLAIYCGVACVDNNSGKVTKAKAVYKANKICKQTLITMAGGSIRLSLQCKAYYLKKRMEGKSHNHALRCLARQMIKVIHRMLTEDRDYIVRKELKKVA

SEQ ID NO: 432064 - protein, 352 aa, unidentified
MKYYIGDDAHKKYSMFRTVDEKGNVGSPERVTHDKELYKKYLTTLPPCSPIAIESVGNWYWMIEAMEKAGHKPILVNPKKAKLLMGNINKTDKLDAKGLAILNLNGSLPAVWIPPAELRDQRELSRMRMSFVEVRTKYKNRIHATLAKYAIVIDSVSDLFGKQGRILLEGAIRELPPETRKSVEEQLILLDQVSRQIEQIEKHIREVVEMTPMMQLIKTLPGVGDLLAIIIALEIGTVERFASAQHLASYSGTVPRVSSSGGKTHYGQVRTDVNHYLKWAFIEAASCINLQQHKMQGRHVMELLTRVQKQRGYPKAAVAVGRHLAEATYCMLKRNEPYHEPNLKKAVLSSQG

SEQ ID NO: 432065 - protein, 309 aa, unidentified
MSIHVGIDTGKSMLDVGFYPDKRCERFANTAEGHRALLLALAPLDVPHIAIEATGGYERGIVDALAQAGYCVTRLASHRATAFARAMGSFAKSDALDAQVLARMAAHITPQPYEVPAAERAELAELVRCRLQMVSQRDDNKRRLLQTRLATAQRALRGMIEAASMQIRELDRCIATATKAADPASRLREVPGIGPVAEATLIAYLPELGRLTRQQIAALVGVAPYIDQSGCRNGARRVRAGRWIVRRAMYMAAWAAIRTKGSALGERYRTLRARGKVAKVALVACMRCLITAINAMVRDQTGWRQPAAA

SEQ ID NO: 432066 - protein, 414 aa, unidentified
MNRQQWYAGIDWATESHHVFLTDGSGRKIGEKIFKHSGAGLAEMAAWLMAASQAKEPGHIQIAIEVTHGPVVETLIERGFTVHAINPKQMDRFRDRFTLAGAKDDSRDAEVMASALRTDPRCFRLLAAPDPIIAELREWSRIAEDLSAERNRLTNRFRQQLWRYFPAMLELESDLGAEWFLDLWEAAPTPCKAARIRETAAAKILKRHRIRRFAAGHVVAVLRTAPVQVAAGTVKAACAHTETLIARIRLVNTQIKEAQRHLDALTARLIPTEDSEAGQQKQHDVEILASLPGVGRIVLATLLAEAWDALLRRDYAALRRLTGVAPVTKRSGKSCIVIRRQACHDRLANAMYHWARIAVQYDAKSKAKYTALRGRGHSHGRALRSVADRLLNVACAMLKAGTLFDPSLKTQNAP

SEQ ID NO: 432067 - protein, 478 aa, unidentified
MKANHRRCCGIDVHKNSVTVCVLAPVGQRHIETKKRKFPTFTRDLKQLRAWLKNCQVTEIAMESTGQYWRPLWNLLEGEFSKLVLVNPQHIKGLNGYKTDPKDAQWIADLLEGGKLKGSWVPERPIRELRDLTRQRVNILEDLNRAKNRIEQLCQAGNIKVSSVATDLFGVSGRKMLEALVEGKRDAGWMADYARGSLRGKRHELELALDGTFTEEQRWLLEKELRQIEFLEGQAGTLEQEIERRVTRFAEPMRRLLTIPGIDRKTAWTIVAEIGVDLSAFADAKHLASWAGLCPGNRESAGKRMSGRTRKANRYVKRAMCQAAWAASHTKNTYLSAFYRRMAIRKGAPKAVMALAHHMIVVVHQVLSRKEEYVEFGGDYYDRRNKPKTVARLVARLAKLGYEVDLKPQQAAVAEPIVEAVRAEGPSVGEVPRLEPQSSRPRRGRPCKCIERGIICKHHTAREANSLIQELASPGRFS

SEQ ID NO: 432068 - protein, 345 aa, unidentified
MTESKIVAFDLAKRIVQACVIDGTGAVIAEERMGPERVLSFTARHPHATVALEACGGAHHWGRALERQGHRVLLLPPQRVKSYGDPACKDDRRDARAIAEAASRSYLRPVPVKSEEQQALQSLDRVAALLARQRTQTVNALHGHLSEFGITLPKGPHLLKRRFTELEASPRWRELPEELRAAMGELFAAFLALEDRLSAIKARLAKGAKQSKLGRLLLEIPGIGPMTAVSLEAAIGDDPGRFASGRQFAAWLGLTPRVSASGERRQLARITKRGSARLRSLLVVCAQAMLRQYRQGRHGDPLACWARHLLARKRWNVAVVALANKLARIVWKVASSGAAYQARTA

SEQ ID NO: 432069 - protein, 468 aa, unidentified
MTVKQEGEVGVGKSRKSSKGKKKRRIVKLESLKQLNLNAGGLDIGAAEIYAAVPEGRDEVSVRRFETFTADLNSLADWLEVCGVDTVAMESTSVYWIPVYEILEERGFELYLVNARQVKNVTGRKTDVLDCQWLQQLHTYGLLRGSFRPSQEICELRTLLRHRGNLIRWRAAHIQHMQKALNLMNLHLTNVISDITGVTGMKIVRAIVAGERKPEVLAQYRDPNCKNSEEVIAKSLEGNYSSEHLFVLQQAIELYDIYTAKIRVCDDEIEQLYGAFEPQVDIMSKPLKAPKKNRRKNKNAPEYDLRTYLYQMTGVDLTAIDGLEVLTVQTIISEVGIDMSKWKSVKHFTSWLGLAPENDVSGGKVLRTGTKKVKSRANLAFRQAAMGASRGQSAMGVFYRRIRARHGPAVAIVATAHKIARIFYVMLKEHREYISPDPSQYEARQKERSIKHLKRKAAMFGFQMVPAG

SEQ ID NO: 432070 - protein, 394 aa, unidentified
MRYVGIDIAAEKHVVAVLDDERQVVVKPTTFGEDAEGYAKLVALLGEPADALVAMEATGHYWKNLFAALASHGFAVALLNPLRTRRFAGEDLERTKTDAIDALAIARFAAEKHPTATRLPNETTQEMRELVRLRDRLVQDFGDQVRQLHRLVDLGFPELTRHVRDLDSELAQALLSRYPTAKAFAEAREGELANLCYDGRRHVGRALAQTLIAGAKISVGQHHGEAYRIQVECACETLALLRKQLRRVERDIGTKLDAHEVGKLLTTIDGIGPTTAARIIAECGDPADFRDAKALASYLGLVPSLRHSGKRIGMRAGLTNLGNLAVRAKLWMPTLTAVRRNPWLRAFYERLRAAGKLPEVALCAAMRKLVTAIYSVAKNRKPFTPRLTAAEVTP

SEQ ID NO: 432071 - protein, 331 aa, unidentified
MFPVGIDVSKNTLDLCMLYDGIKGRIKTRNIQNNRHSVENILRWLRLQHCGPEDVHVVMEATGVYHERLATELHDAGFRVSLANPHRSREFARGMGIMTKTDKVDAYMLACYAFLKKPHRWEPPAPEIRYLGALLRRRDVLLGDALREENWLEKYLSTDTPADIISSCRRMAQLLREEVSNIERQIKAHIKACPALRRDYTLLTSIKSVGPQLGMHMLVVLRSHNFASAEQAAAFLGVVPIEKRSGTSVRSRPRMSKIGPPQLRAKLYMSALCGKIYNKRMRNIYDEMCLRGKPKMVAIGALMRKLVHWCYGVLKTGTVFNDESLKQVLST

SEQ ID NO: 432072 - protein, 411 aa, unidentified
MRLYVGDDWAEDHHDIEVMDEAGKVLAKRRLPEGVAGMTGLHELTGRLLGEDEQDAEVVIGIETDRGPWVAALVAAGYLVFPVNPLQASRYRERHGVSGAKSDGGDAHMLADMVRTDSHQLRPAAGDSPEAEAIKVVARTHKTLIWERTRAVQRLRHQLREYFPAALEAFEDLDAPDTLELLGKAPDPARAAKLTRAQVSAALKRARRRNIADKATAILAALRGEHLGQPPALTAAYAATARSLIAVITTLNEQVRILGEQVRQHFGRHPDAEIYQSQPGLAAILGGRVLGEFGDDPHRYADAKSRKNYGGTSPITRASGKRKVVAARFIRNDRLIDALMSWAFSSLNASPGARAFYDAQRAKGLEHNDALRRLANRLVGILHGCLKTRTLYDEATAWGHRENLPQSSVAA

SEQ ID NO: 432073 - protein, 362 aa, unidentified
MRDTTIDDAEGRLTVGLDVGDTYTQACVLDEAGEVIEESRVATTPKAFLRRFATMPPARVVLEAGCHSHWASRLLGELGHEVIVANPRMLRFIYGSDSKNDKADAAYLARVGKLDPALLHPVVHRSEQCQADRALLRSRQALVRTRASLITHARGMVKIFGAKLPRCSTDAFARKASDHVPDVLRAALDPVLEIITSVSAQIRELDRHVESLAQEQYPETRLLSQVPGVGSLTALAYVLTVEDPTRFERARAIGSYLGLRPRQADSGVLKPQLRITKAGDEMLRGLLVECTQHMLCSLGPDSDLKRWGLKLAERGGKASKKRAVVAMARKLSVLLLRLWVTGEVYEPLRNARVRGELVPTTS

SEQ ID NO: 432074 - protein, 317 aa, unidentified
MKMTQSSILTAGIDTGKEKLDIVIHGQPRGLIVSNDARGWKKLTAHFAEAGVGRVGIEATGGYERGVVRHLQAQGLTVIVLQPLQVKAFAQLHLRRAKNDRLDAALIAACTSMMSDPTTAPDPRLDALTDHLTFIEQQEEDHARLKTRLEHVEEPRLARIIKDDLKRMEKRRTAELRRLLAAVRAEADLARRFELVISIPGIGERTALALILRMPELGRISREEAASLAGLAPFVHQSGKHKGETHIGGGRSRLRRSLFAAAVPASFRWNPALVALYTRLTRRGKPPTSALIACARKLLVFANTVLARGTPWTEQRV

SEQ ID NO: 432075 - protein, 364 aa, unidentified
MNKCHSNTELSSHEGTRCQFNGGTGVIKLGIDVHQDFYVVVEQVEGSNPKPPQRFQKQAFLHWAAKLRSQSAEVYAVYEACGFGFTLQRNLSALSIHCYVVCPQKLDEQNKRVKTDGLDAKALCLKLDRFVQGNRAALAIVRVPSEAEEQKRAIHRQREQLVKARKQLEAQGRSLMVNHGLEPVQSWWKPRAFAALPVPQWMKELLANSQPILVALQQKISTLTLQLQAAAAPTNPRGLGQMTSVIIDREIGDWNRFNNRRQIASYTGLCPGEYSSGQTRLQSCVTKHGNPRLRAALVELSWRLVRFQPNYKPIVKWRQILATGALATGAARKKAIVAVARQLAVDLWRIKTGRLRAEELGLIN

SEQ ID NO: 432076 - protein, 436 aa, unidentified
MTIVMGLDQHRAQITAEWIDTETGEIGRTRVRPADRAGVRRFLGRFGGQRLEVALEATTGWRFVVQELQAIGAAVRLAEPAETAARRGRKKRPKTDRADARHLRELLMVDRLPESWIPPEHILDLRARVRLRHTLVDQRGEWQQRIHAVLYHHGCPHHHGIGLLTAKGRAWLDSLGLPSTAREQVTVALRMIDMLDVQLAPIDTELRAYARRQPGCKALMGHYGIGHLTAVTILAELGDARRFSSSRDAVRYAGLDITVKQSDQRRAPGHLSRQGPPALRWRSTRPPNQPAGTAAPTATTTSKRPSDSAATARASRSRASCSSAVTTPCASSATRRCNPREIGLARAALTHTDAPRPAPGIVLPPRPRGRPPTTERPQSFTQRDHPINHHVAGRPHGTVVDRDTAGRPRAPHPYRQTRTRPPGRHAVSPQPRRPSA

SEQ ID NO: 432077 - protein, 367 aa, unidentified
MKATAKEKKTAARFVGIDLGKRTYEAAIVGKCGKVTKSNGKTTVAGRQALYQKLRPGDQVALEAGNLAFMMAEEMTATIGCTVYVLNPSQLALIYGSMKKTDKEDSLKLAHIIEDTKEERLPTVPIPSDQEMNRRKIVAGYRRAQQSRNRDINKLHGLFLAQGITTKVRADLATGEARKEAIKELAGLEREEAEYLVAGLELHDRRIETLNTKMAQESASDEAIKRLQSVPGVGPMVAFAFVSHVAHERFENAGQVSNYLGLVPRVYISGETVRYGRITKRGNGFLRALLVQAAWALIRTKQGGKLKELYQYMTVEKAKSKKTAIVAVARRIAELLYTLMRDGTRHEARPFVRGETTAELAKLAMSA

SEQ ID NO: 432078 - protein, 341 aa, unidentified
MHNFSAVAGLDLSLNSFTTSLISSNEKFKSKIKTFKRTKEGLEEFVKWIENQGFPKEKVLVVMEATNNFWEEVAVKLAENKIAVSVINPRVIKDFARSLQRKAKTDKIDAEVIALYGVRMKPKVLDISKSKRFGKLRNLVREREFWLRERVRLENYERTLKSGVFVSEEGKERVKEMIEKVLLYIEEIEQEIKREIEKEEELREALKIVGSIPGIGEVNGVVILVETGLFKGFRRGKEVVSYAGIVPRVYESGTRKGSKGITREGNRRLRQAVYFAAVASLRSKCGVFKEFYDRLKERGKAKKVALVALAGKILRIAFALVKKREYFDARKLQSQISSVGA

SEQ ID NO: 432079 - protein, 347 aa, unidentified
MTEAYDGRQVVGIDLHRRRSVIVRMTDDGRKLETVRITNSPAALRREIAKAGQHPRVVVEATYGWYWAADVLEEAGAEVHLAHPLGVKAYTYRRVKNDERDAADLADLLRMGRLPEAWIAPPEIRELRELTRYRDKLVKLRTSVKDQVHAVLAKLGIPVTCTDIFGTWGNTWLDGLDLPQPYAGKVASLRQLNAELTGEITLLEQVIGDLLAGHEGYAAIQQLPGIGPVLGAVIVAEIGDIRRFRRPEQLCSWAGLTPRHRESDTKISRGHVTKQGSRILRWAVCEAIQRQPDGTRPQQVKDGIIARRGAEARNTAKIAAARELLTLVFYGMRDGHIRRAVRPGQAA

SEQ ID NO: 432080 - protein, 353 aa, unidentified
MMIIGCDYHPSWQQICWLDTATGETGERKLEHASGEAEKFYRGLPGHALIGMESTGNCQWFVEMATTAGHDVWIGDAAQIRASEVRQQKHDRRDAALILKLLLEGRFPRIWTPSGSEKDLRQLLIHRYKLVRIRAQVKTELQHLAMNQGVTKKRKLWSKAGEKVLRELPLKPWASRRREDLIKVREMLNGQIDLLDQAVVEAAEKNEKARLLMTQPGVGPITSIAFVLTMGDVNRFPRGKQVASYLGLIPREYSSGGRQRLGSISKQGNRFMRMLLVEAAQGAVRCDPGFRNEYLHRCHKKAKGVAKVAAARKLAIRLYWMLRTNTAYPEVVRVESSSRVPVVGEARLLSERS

SEQ ID NO: 432081 - protein, 364 aa, unidentified
MKGMAMKERLSKKQMFFNKINLTKDDKIYIGVDVHKKSYSVAIWLNDAPAIDFVMPSDNKKLVQMLKKIQIAVKNIVYEAGPTGYSLARELRKANLPVQVIAPSITPRPAAKHSKTDRLDCRTLAKYAANQLLRPIAIPTIQQEQDRQLCRLREQLVSKQKRVKLQVKSFLLQHGICEPEALKSWANYAIEQLRKIKLSEQLRYCLDTLLDELSFLKAQLKNLEQKLNELFGKKRYAKAVRILRTHPAVGPVVSRQFATELFNPKRFTDKTEIAKYLGLAPQITQSGQNLRDGPIMKTGRPQLRSNLIEVAWLWITKDPAARKTYYRILHNTGEKNKAITAMARRMAVNLWKMLCDNKPYVQPV

SEQ ID NO: 432082 - protein, 384 aa, unidentified
MKKNISRFVEMKAVAVETKTCLMSPPAGRGSQPTGYQAVVGLDVGDREIHYCVLDLDGKVAVEGAVATREPSLRIQFEGTARMRIALEAGTHSPWISRLLLGWGHDVIVANPRKVRLISRSDLKNDRADARTLARLAHVGPELLSPIQVRSEKTQVDLALVKARDVAVQSRTRIINSVRGLVKSTGRRLPKSSTLTFARKAKEACPEALLPALMPLLRVIDELTREIELYEKLVVQKAETEYPETAAIRTIYGVGPLTALALVLVLNNDRGRFPRSRDVGCYIGLRPKQRESGKRSPQLGITKAGDSLLRRLATQSAQYILGPFGKDSALRRWGLALALRGGKNAKKRAITAVARKLVILMHRIWITQEVYEPLRGMAVESTAA

SEQ ID NO: 432083 - protein, 353 aa, unidentified
MATYYIGADVHCNSIEMAILNRKKIVKRYTVPASILAVAQVLDSLGGKKYIAIEEGPMAGWLYRNLHQKVERFVVADPRRNKLISSDGDHDDKIDSAKLAMLLKGGYLREVYHSDNKQRDELKQWVNLYHDRVRDAVRNINKIRARCRMHGVKIPRKVLRQQQHRAQWLKKLKNTALAKQLLMLWVGYDATAKQARMAKQQLINFSGKYPVIRLWKQLAGIGTIRAVTIFAYLDTPWRFKKKNKLWKYCGIGLQRTASGTDKKGKPKPARLQLPWASNRVLKNAILGAALTAINQKQNTFKTDYERMVQNGIIPSNARHTVARKLLTVMWGMWKRSFQLKRKSFSEPAVQCVL

SEQ ID NO: 432084 - protein, 408 aa, unidentified
MDVHKTWIYACIGITDENGRTDYKEKRFTTFTKGLRELAGWLAKYDCKEVSMESAGRYWIPVFNVLEKTCSVTLAHPKYTKPQRGNKTDRKDAKWICDLFMCNMIKSSFIPPPDIRHLRDLIRYRFKLTSCLTGEKNRVQNCLTVSNLKLDDVFSDVFGKSSKSILLYILEHPGEHFDVAPFVHGRCKHPIEEIQAAVDGSISREQAVKLRELLKHIDELQVHKQNIEAEIMRLAEPYKAVLELLRTVPAFSADPITAIAVLSEIGPNMSVFLTAKHLSSWAGCCPRSDQSGGKIKYTRISRAGTYLKPLLVQLANAVVKSDKYPEFKERYRRIKARRGHKKAIIAICHMFLTAIWNILSKQEPYSAKGYLVDQQKNPPLAITKEQGLHLLRSRGYIIKDDLPSPVSG

SEQ ID NO: 432085 - protein, 343 aa, unidentified
MVSIGIDTHKATLAVSAVDELGRQRAARTFSNDPRGHACLLSWAQRQPAPRRVGIEGAGSFGAALAEVLVAAGEVVVEVPAQFTDRERRSLLQHGKSDPGDALAIARLTAREPRLPALRRPGIVADLKLLVGARDQLMAERTRLVNQLHADLLVLAPGYGLRLPNLTAHRHQAAVARLLGRRDGVRADLARARLRRLRQLGAEAERLEARIATLLAASGSSLPQLAGIGALTAAKLLGEAGDVTRYRSSAAFAAASGTAPLPASSGQRQRHRLNRGGNRQLNRALHTMALVQSRWDPRAQAYLARRLGDGKTRLEAIRALKWHLGRAVYRTMLADARRAAGPA

SEQ ID NO: 432086 - protein, 340 aa, unidentified
MNYTGLDCHNQYIHSQQISEDCYLMKRDCIPTTDTALSNFLNSLDEPTHVTLEAGRNWWWITQLLLDHHQVSEVSVVDARRSRRIAEELSVRSGYGRAKTDRIDAEMLAEQTRHHLAPAIYIPSLEQLQRRSIVRYRFNLVHQHTCLISILQSFFALHGLRLSIKCLIESWESQLIYLKVLSEPLLFLVKQQINQIEQLREHIKQCNDYIEQLIPANEPRLKLLSSLPGVGAVISRQIDTEIITIDRFDSDRHLSSYSGLAPIEQESAGRKGVVQLNAHCNYYLKNAFLMAAHCARHHPKYRLKYQRDLKRRGKKIAKINLARKLVKSVYWMLTRQQPFQ

SEQ ID NO: 432087 - protein, 410 aa, unidentified
MAERFVGIDVGLREHRIAVLDRDGEAVGQSFTIAASKDGVATLVRTLAARAATPAQTLIGLEASGHLWENLEAALVGAGYRVIVLNPLQTRRYRDVVRRKAKTDDIDAHVIAGLLRSGVAQASYVPDEQIQSLRELARLRARLLADRQDYQRQLVAQLDVVLPEHRAVLGDLLTARARGILAQFPTAQHLAQANPRAIRRAAEEAGARGVSLDDATGVRDRARRSLYSGKAAAARAHVVRTLVSQLERLTSAIDEVDHAATALLPPGEPGTGPSDAELLQTIPGIGPQPAATLLGELGALIRFTDARALVAYVGFYPVIHESGDRAAPPRLSRVGSRLARRSLYLAAVNAVRRSAEWRTIYLRKKAQGKTAKQALVVVAVKLIHALYAMLKHRQPYNPSRLLVAPATIGS

SEQ ID NO: 432088 - protein, 343 aa, unidentified
MNRLNVIGVDLAKNVIQVSVLSRSNRELANKSLTRKKFAEFLAQQRPSLVAFEACATAHHWARVAQRHGHAVKIIPAKAVTPYRNGHKTDENDALAVAEAALRPNVKEAPLKTIEQQGLQAIQRSRELLVHERVSLSNHLRGLLLEFGIVIPQGFAALHRRIPEVLEDGDNEVPDLYRPTLHLLYERLCELRDAIQQVTTEIKVLVRQHPACERLTALEGVGPISAILLFATLGTGEAFANGRQFAAYVGLTPRQYSSGGKVKLVGISRHIANRRLRAVLIQGARAYVHKMKEPRSAKDRWLQDLIERAGYGKAAVALANKNVRTAWAMLTQNTEYQRYPLAA

SEQ ID NO: 432089 - protein, 420 aa, unidentified
MTTSNSTRAAAVLVAIDIAKVRNEVLIEAPGHKRRRRLLVLNTRAEYDHLIEVLQAYGRPVVCAFEATGNYHRPIAWRLAEAGFEVRLVSSLALARTREALHNSWDKNDPKDAQVMLHMLRIQATQVYHDPLRAGINDVQELSKTHEAIARAKTEIQHRILTHYLPLYFPEIDRFRGNSRSDWFFAFLHAFPTPASIMVLTKEEFVTAAWDVVGRKVSKTQILMDIYETARSSIGLPLPLDAPAIRMFRMVIDEARSLIRQRNEIEAQADELLRHSPDYQLLRQIPGIGPINALTIIAEAGDLRRFGHHRQFIKFCGLDLSTQQSGQDRGQTRLSKFGNARLRRTLWIAGQVAIRQRENGFRHKFERYIARDRDNPDLRRKAMTAITAKMARVVHAVVKGDSDYRPFVEGRVPGGRTSVS

SEQ ID NO: 432090 - protein, 342 aa, unidentified
MKIIGCDFHPSFQQIAMVDTETGEHTEKKLTPAEAVQFYSQLPGPVLVGMEACGNTLWFERLLAPLGHELWLGDAGKIRALEVRKQKTDRRDAELLLRLLLEKRFPRIWVPSPEQRDLRQLLLHRHKLVGMRRQVKNQLQHLALNQGVQQKHKLWTAAGRKLLEELALTGWTAQRREELLLLLDDLEPRIGKLDQAVKAAAEKDRVAQRLQTHPGVGPITALAYSLTLGEIGRFRHSRQVVSYLGLNPAEHSSGGRQRLGSISKQGNPMLRSLLVEAGQSAARLVPELKRAYQRLKHRKHSSVAKVMVARKLAVRLYWMWRNQQPYSATRMRGSPSHPVAEV

SEQ ID NO: 432091 - protein, 402 aa, unidentified
MDKNRIVAGLDVHKDSIYLCIMGHDETIIFQKTYGVLTPELRQMCSDMVERGVTEAAMESTAVYWIPVWNELCGSMELKLVNPFFIKQLPGRKSDVKDAQWIAECLLKNLIRGSFVPEPVVQDMRKLNRRIMDLNEDMTYNTNRLDAALQRCGFRLSNYVTHVKGKSYQSVLHAIIEGQKDPEELARLVHGRTVNKHGKDTIKAAVTGLFSETDITILSHTKQMIDLIEKQIEECQKELTALCEKHFHEQFRRLQTIPGVKERAATAIIAETGVDMKMFATAAMLVGWCGLRPRNDVSNGRFKSRKVTHGNKYLRQMLIEIAWSAGRKRNCFFSNFSYTQTVVKKKNKMKILVAIARKILVAVWHMLTKEEDFIDFYLNRLEREKKEEDRKNKMLGKASSTE

SEQ ID NO: 432092 - protein, 427 aa, unidentified
MKYKQNFRIMQITDKTLVIGVDISKKVHYARAFDWRGVELDKTINFKANSTGFKEFKEWVYKVSEANDKEKFVVGFEPTGHYWYTFAQAIQAEGFMTVQVNPYHVKKAKELDDNSPGKSDHKDPKTIAMLVKDGRYRIPYIPKGKYAELRKANNIREEWLEKMLSIKNKVQRWLDTFFPEFTQVFSSWEGKTALITLEKLGLPEKIASYTADEIVSIWREKVKRAVGIKKAEMLLKSARNSVGIKDGQEMAFYEIRLLLKEYHDVRTVMDEIETKLGEIVLTIPGVERLLEIKGIGIKTVAGFLAEVGDISRFDHPKQIIKLAGLNLRENSSGNHKGETTITKRGRSRLRAILFRAILPMVAKNAEFNALHKYYTTRKDNPLKKKQSLIALCNKLIRVAYTVITKNVKYDPIKMLGDIRREHENQAA

SEQ ID NO: 432093 - protein, 354 aa, unidentified
MKHLQLKDGDRLRRQCIGVDISKKKFTFCLCQSTEQDLHFYTKPKEFDNSETGFRHLLEWSGTEVDSSVPYSFLMETTGCYHESLALFLARKGMTVIVVHANKAKNFARLNGQRTKTDPVDSKMLATMGCDTPGLKPWPIPDEKYLQLRDMSRLSEQLEKTHAQVLCRMEATTHSGYVTKSVLRAHKSLLRSIEKVQAANEQHMAELVNGDPVIKAGVDNMESIKCIGKKTAVLVTAETLGFHQMTSAKQVASYAGLDVKKEQSGDAEKKGHMTKRGNAHLRAGLYLPAMVASWSNPQLMEDYKRICASHPQSKNIALVALERKLLCLMYSLWKSGREWDPEYGQDKKQEEAMS

SEQ ID NO: 432094 - protein, 341 aa, unidentified
MKQPITKNYLGIDVSKPWFDVSLMSVIDYVKQTIITQRFDNTTSGMSAFKSWLKSSGVTLDTNSLLVIENTGVYHRLLWSFCSKHNLPLHIGNAAHIKWSLGITRGKNDVIDSVRLCQYCSKQSDELKASPALNPVFMKLKDLMSSRSRLVTQLHSTKNYIKELQCSQDKILLSTLEKAHKAAIEGIKKSILQIEELINRIVQEDPVIYKNYLLIKSVPGIGHLTAVYIICCTNNFAGKVTGKQLASYAGVVPFEHSSGVSIKGRNRVHKMANKELKKMLHLCALTAIKYYPEFKDYFNRKKASGKNGMLVLNAIRNKLILRVVSVVNKQQPYVDNASIAA

SEQ ID NO: 432095 - protein, 341 aa, unidentified
MKHSKTIVGVDTAKRVFQLHWVEMETGEMVSLQVKREKFLEHFANRAPCLIAMEACGGSQHWARQLLALGHQVKLLPGKMVKPFVAGNKNDAQDARAIWTAVQQPGIKTVAIKTEEQQAVLALHRMRQQLVKFRTAQINGLRGLLAEYGEVMPQGKAGVRKGIPEALQRLSDRLPAIVIDTLREQWGRVAKLDEQVSDIERRLKQWHKTDDASRRIADIPGVGLLTATAAVATMGDAGAFQSGREFAAWLGLVPRQSGTGGRVRLLGISKRGDTYLRTLLIHGARAVLTNSKAPPEWALNLAERRPRNVAVVALANKMARTIWALLAHDRVYQKGFVSQPA

SEQ ID NO: 432096 - protein, 388 aa, unidentified
MYHIGIDISKFKHNCFIATDAGVKVKEFIFDNNASGFNELLDSLKSLGDPSEIKIGFESTGHYGTNLKQYLSNLGYTYVEFNAYLTHMFSKASSLRKTKTDKVDAKVISSMLGSVDYETLHTKFYHNNVLKELVRQRYAYLQSRSKELVKLTNLLDKTFPEYKPFFKGRLGQGAIFILKRFKSKARIAKMTIKDFELIRSKTKGRLTYPRFNQLKILARDSIGISDKVYDLLIQTVISSIKYLTETLEVLDQEIVNLFSKTDSKLITIPGLGIITAATIYAEVGDFKNFSSPAKLIAFAGFDVRIIQSGTKESYGKLVKHGSPLLRSAIWTYALPAVRFIPTMNDYYHKKRDQGKHHKVALAHVCRKLIRMMHYIEFNNVSYNPNLSR

SEQ ID NO: 432097 - protein, 419 aa, unidentified
MKSIQSKKANVINKDTLIVTVDISKVTNVGYCRCPNGIDVKPFSFMNNAQGFNTFWNRIMKTKNTHDLKDIVVGFEPTGPYGEPLTHFMKKKKAKLIQINPMHTKRVKELEGNSPNKTDQKDPKVIADIIELGHALTVVQPEGPAAELRKLTHARERAMQRRTAIFNQLQDLVFVIFPEFSQVFKNVKTKSARFILENCPTPEDIIKYKLKNLTITLRKVSRGQLGEERARELYAAAKTSIGVREGRQSILFEIKEILSIIETTEYFVTGIEKEMSHHLKDIPYSRFILSIKGIGEVTVAGLIGEVGDFREYKTISEILKFSGLDLFEISSGRHNGQRRISKRGRSLMRKLLFFAAINVVHKGGIMHEYYQGCLARGMLKMKALIAVSRKLLGLILALVRNHCEYIENYAVKQELKKAA

SEQ ID NO: 432098 - protein, 349 aa, unidentified
MIHVGIDHHKRYSHVVAMRDSGEIVWDGELASAREAFESLREVLPKGECVQSVLEAGRNWGILYDALEELGMNPKLANPLKMRLIAETFTKTDKIDATTHAIILKAGLTPLVHVPNKEVRDQKNILRQRVWLVKLQTMLKNRIHNLLDRNHLKAPEKTDLFGSYGRAWMNALELGEPDGKLLKSDLALLDTIKSHIRQTEKWIDESLKENPLIPILLTLPGVGKTLAALIALEIDVIDRFAAPAKLCSYSGLVNSTYSSGGKTTHGGLVGSCNRHLRYAFVEAAWAAARSSPYFGAFFRRLKARKGAQDAVGATARRLCEIAFICLKKQRAYQEKPYRFRSGRLDNCLA

SEQ ID NO: 432099 - protein, 473 aa, unidentified
MSKGSGSGTTRGDRRRNARRERLRGLLPRDGAVIGIDLAEDKQALAVVDHDVRVLARKTVKVKAFRLGEALDWAVAQAKVKGFKQVAVACEPTGPRWMQVQRLCAERGLPLVCIQPLVSHIAREQQDYTPHKTDESDCVLIGRLAAELHCYIPEELDETWAQLRHLGRRRAQLITAATASVQRIGDFLSVTWPVVTEVCAQPFKSVTWLAALQVVTSRCGGDPARLAAMGPEEFTAVVRAAVPAWGGKKGWGTICGRVFAALTDTEGVVAWSRRGLLRRVADELGDLARTRAQLRAVAADMVMVLSELGLSRLGDIPGLTAVGAAAILAETGDPRRYDSSSSLVKHAGLSPSENASGAFEGQARISRRGRPGLRLTAWRAVWPMLRLNPVMAAKYAAMTQAADAAVASDAGSQPARAAASAARARRAKARVACAASLLRWIYSMVVHGTSWDAAVASGAAACQHAPRCQPEAA

SEQ ID NO: 432100 - protein, 341 aa, unidentified
MGDVTTIGLDIAKSVFQAHGADASGAVVFRKKLSRARLLTFFAAQPRCVVAMEACAGAHHWGRELMKLGHAVRLIPPAYVKPFVKRQKNDAADAEAICEAAQRPTMRFVPVKSAEQQASGVVFRARDLLVRQRTQLMNALRGHMAEYGHVAPKGVMYLDRLVVEIEDPQSEIPEAARTSLKTMVRMLDRLDTEIALLDAEIARRAKEDPVARRLMTIPGIGPVTAAALVALAPAPEAFRCGRDFSAWVGLTPLQRSTGGKQRLGQITKAGERTLRRLLVIGASAVIKQALLRGAPAGSWLAQMLTRKPRMLVAVALANKTARIVWALLAKGGIYRAPALAA

SEQ ID NO: 432101 - protein, 445 aa, unidentified
MSEKKPVEIRVSVDVGYRRHSVAIGLPSGEVLEEFEVAHRPEGFAEFFSRIERHQKVRDCEVAVAMEGFNGCARPLDRMVRRRGYRLYNINNLKLARFKEIFPAAAKSDRIDARKGLELFQLSDHLPLAKEVLQEVKGTPEGNEVLKRLTRRRRRLVDERVRVISNLQTDLQAVCPGLLEITKNAGNQWFLNFLVSADTLPQLARLRSVTLLKIPAVGRKYARLIEDWQKRAHFSEEVEWVGEMIQEDSQRCLDLDEKIKALRAKIKEVAKDSKIAKILLSIPGFGTICTAELAGEIGTIERFSKEGSLALYLGMSTLDNSSGKYQGSKQPKHVNTRAKAAMMVALDRHRKYVPESQRYYEKKRSQGKKHNQAIRALGRHLSRIIYKMLTEGREYQMRPEKGNTKGKVSPRSLIKTQIRKPKISAKGKKQQNLPTERVIGPSSSA

SEQ ID NO: 432102 - protein, 414 aa, unidentified
MCAIDIGKAGLVACVRVPHPTNPGRRVQEVREYASVTPALLALADWLRCERVELVAMEATSAYWKPVFYLLEAEGFQCWLLNAKHVKNVPGRPKTDRLDAIWLAKVMERGMCRPSLVHPKPVRRLRDLTRYRRSLVRDQTREKQRLEKILEDAQIKLDSVISDLHGVSGRQMLQAMIDGQRNPTILAELARGVMRRKIPQLREALTGHFDDHHALICATMLRRIDTLTADIAELDARIEQMIAPHAETLNTLDEITGVGLRSAQEIIAELGVDMTVFPTAAHLVSWAKFSPIDATSAGRHKGNSTGKGNPWLAATLGEVVAGISRTNTFLGERYRRLARRRGKKRAIVALGNSVLTIVWHLLSDPNTHYQDLGPNYYESKISQRRRQRDLIRQLEHLTGQKVTLQPPPELLAAA

SEQ ID NO: 432103 - protein, 343 aa, unidentified
MQTITTIGLDIAKSVFQVHGVDAGGQVIVRRQLKRRSVLAFFQKLPPCLVGIEACASSHHWSRELQALGHTVRLMPPAYVKPYVKRQKNDATDAEAICEAVTRANMRFVPTKTPEQQGGLVLHRTRHLFIRQQTAVINAIRAHLAEFGIVAPVGRHGVEELLNVVADPSDRRVPEMARACILAFGAQLRRIKEQILEFDRLIRAWHRSNEMSMRLDEAPGVGPVLATAVVAAVADPKSFRSGRNFSAWIGLVPKQHSSGGKNRLGNISKQGDRYLRGLFVAGALAVIRYAKIHGTKHRPWLTALLVRRPTKVAAIALANKIARMVWAMMARGERYKEPVALAR

SEQ ID NO: 432104 - protein, 337 aa, unidentified
MKATLSKKQRFFNQIKLTKDDDLYIGIDVHKATYHVALYLNGGHAIDFITPADNIKICTTLKKLKSAIKNIVYEAGPTGYSLARQLQQESLPVQVIAPSKTPQSSARDSKTDRLDGRKLAEYAAKGLLRPIAIPTRTQEVNRQLPRLRIQFVKKLKQTKLQIKSFLLQHGIGEPQSLRYWSQLAIEKLNKLQLLNPLRYTLDMLVTEYKFLNEKIKDIDLKLEETFAKTIHAKKIKILQTHPGVGRVTSMMFAVELFNPGRFNNKEELAKYVGLAPTIIQSGQSLRDGPISKTGRPQWPEDLPYTSGRCYAITNHTEKQHNLLEATEKINANETGFK

SEQ ID NO: 432105 - protein, 418 aa, unidentified
MEAIVESCCGLDVHQATVVACLLVGTPGKKPRKDVRTFGTVTAELVRLREWLVAEGCTQVGMESTGVYWMPVYTILEEAFKLVVGNATHIKQVPGRKTDVKDSEWIADLLRHGLIRPSFVPTKPLRELRDLLRYRRKLVESTTSERNRMLKLLEMGNIKLSTVVTDVFGVSGRSMLQALLDGQQTPEQMAKLAKGRMKGKLLQLTAALDGRMEEHHRFLLKMQLERLEEVEADIARLDQRIDEKLEPYREVHTRLMQIPGVDRVGAAVLIAELGVDMSVFPSVRHCAAWAGVCPGNNESAGKRKGQPARKGNVHLSTALVQAAVSASHAKGTYLKDKYWRLKAKRGPKRAAMAIAHKILIAAYHMLSRGVDYKELGPTFLDQLSADVTKHGLVKRLERLGYQVTLQPIEPQPQPTVAA

SEQ ID NO: 432106 - protein, 381 aa, unidentified
MTTTATHNAHDTTPGRALFVAFELSEKTWKLGFTTGHGQKPRERSIAARNQTRVLQEVAQAKRRFGLPETAPVFSCYEAGREGFWLHRFLEAQGIPNHVVDSSSIEVNRRKRRAKSDALDVRKLLSMLMRYAHGERDVWRVVRVPSVEAEDQRHLHRDLETLKQERASTTTRIKGLLSSQGVRLTSVNKLPEQLEALRLWDGSPLPSGLRRRVLRVYAHHQFLSEQIAALEAERRARLQSAHDASIEKVHQLMQLRGIGINGAWLLVMEFFGWRELKTRREVGGLAGLTPTPYQSGESAREQGITKSGNRHVRWMTTELAWSWLRYQPESALSCWFRERFGGGGKRMRRIGIVAVARKLLIALWRFLETGVIPQGAELKAA

SEQ ID NO: 432107 - protein, 347 aa, unidentified
MNFYTKQHSFYCGIDLHAKQMFLCILDQKGDVLLHRNMPNDSKLFLKLINPFRSDIVVCSECIFCWYWLADLCHDNSIPFVLGHALYMKAIHGGKAKNDRIDSLKIARLLRSNMIPQAYVYPKKMRATRDLMRRRSHFVRIRADLLAHIQITNYQYNLPSFEKKINSKGKRLNLVTHFPDTSVQKSMEASSAVLDQLDQTIRKIELFIESQVRYHDIHSYRLLRTVPGIGQVLAFSILYEIEHIDRFPRVQEFLSYSRMVKCSKESAGKRYGSSGSKIGNVHLKWAFSETAILFLKNNEPAKKWLTKKQKKHGKAKALTILGAKIARCVYQMLKTQRRFNSMTFFNN

SEQ ID NO: 432108 - protein, 420 aa, unidentified
MSPLSDQPFTAYVGIDWADLKHDICLQAAGGTRREFDCIAHQVAHIDEWANGLYRRFGGPIAVALELASGPIVAALQKYDFFVLFPINPLTLARYREAFQPSGAKDDPTDAELALDLLLHHPERFSRLRPQSAGMRSLMSLVVQRRQLVGDKTRFTNRLCDTLKQYYPQALEWFEDRDTVLFCDFLTRWPTLAAVRRARTTTLEAFFHAHNCRCARLIEARLASIRAASPLTEDPGIVVPCRLHVLALVAQLRTVLTAIDWFDRETAAVAGTLPDYALFQDLPGAGRQLAPRLLVAFGEQRDRFHGADELQKYSGIAPVTERSGKKSWVHWRWQCPKFLRQTFVEWAGQTINKSFWAGAYYRQQRARGSSHPAAVRALAFKWIRILYRCWQTRTPYDETTYLNALRKRGSPLLRNLELPG

SEQ ID NO: 432109 - protein, 298 aa, unidentified
MTYVGIDVSKDTFVVAYSPEKTSKTRTFKNTTKGIHEFIQTISKDEHHCVMEATGNYSALLVYLLSEAGITTSLENPLKVKNFARVMLSTVKTDEVDARLIALYGEKMNPAPYKLRSDAILTLKQKRTVIRQLKKQLIATKNLKGSMEVLPFFDSKCRKSIEQTIAFLEKQVKHLEEDLSDLANSEYKKQMDLLSSIKGIGITLAAALIMATGGFTYFDNAKQLTRYLGLSPTYQQSGTSVNFKGHINRNGDSSLRSQLYVAAFSSLRCNIGCRACYDRLRSNGKPGKVAVSKFAVSK

SEQ ID NO: 432110 - protein, 401 aa, unidentified
MTAIPLHQITAPAPTLHLAFELGWTQWKLAFTIGHGQAPRFRTIPARDVALLQAEIAKAKRRFGLAADAVVASCYEAGRDGFWLHRYLLKQGIDNFVVDSSSIEVKRRRRRAKSDRLDAFKLVTMLLRYQSGEKKVWSVVRVPEVAAEDGRQLHRELLELKDERTSHVNGIKGLLASQGVALAEVDQDFPERLSQLQLWDGSAVPANLQARLRRAWERWQFVDRQVKDLENERKQRIRCAQTPHVEPVRRLLGMRGVGLNGAWLLVHEVFAWRQISNRRQLGGLVGLVPTPYQSGESQREQGISKAGNRHLRKMLVELAWGWLRWQPASALSRWFQRRFGAGPKRSRKIGIVAVARKLLIGLWRYLEHGETPEGAQLCSWRPKVNVREPKDAATRGAALSA

SEQ ID NO: 432111 - protein, 404 aa, unidentified
MRVIGVDVSRTVAEIAYLERGCVHSGGRVGVERCSLQRFAKGLRPTDHVVLEATGNTAAIVETLKPFVSRVVVANPLQVRLIAEARVKTDKIDAAVLAQLYASGFLPEVWMADERTRALRRQVARRSQIVRQRTRLKNEIHSVLASHLIPRCPAADLFGKKGRVWLSEQPLPLDERVGIEQRLHELDRLAEDLVVIDRALGIEVLHDANLKRLLTITGVNATIAIGLLAAIGEIGRFPSPQKLVSYFGLNPRVRQSGEQPAQHGRISKIGRSHARAMLVEAAWAAAKAPGPLRSFFLRIRARRGMQIAAVATARKLATVVWYVLTEQEDFSWTRPSLVAMKERHLQLLAGLPAKRGQRGIAADYSVKALRDRERSMVEKAERAYTRFVGHWRPNGPKRGSAGSA

SEQ ID NO: 432112 - protein, 427 aa, unidentified
MLKINYMSTLFVGIDVASKSNVVCAMDFYKNQLIKTSVSNNQPGAYDLICQIVSVMQKHSDLNTVVVALESTSIYSIHISNYLSSCEELMPYHPYVFCLNPKMTANYRKSFIGMNKTDLLDAFIIADFARAGRIETDPWRGSQFLALQRLTRHRLHLVEAQTREKTYMVSNIFLKFSELSVLPKEEQPFCDNYGSTASSVLTEFLSMEDIINTSPEDLVAFLGEKSRNRISDPAKTADLLQKAARDSYRLNKCLYDPINISLASSFNCIDAFKQEIKVIDKAILKTIAGLNPNAYTILNSIDGIGPVFAAGMIAEIGDINAFYSQDALAKYAGLTWTKSQSGDFEADESRMTKAGNRYLRYYLGEAANSMKKHVPEYRDFYNKKYNEVPKHKHKRALALTSRKLVRLIFGLLSKEKLYSTDRADALS

SEQ ID NO: 432113 - protein, 427 aa, unidentified
MNQNKSATNFAATLGLDWADKKHDLWIQASAGGKPEHWVIDQTPEALHEWVAQMRARFPRGRIAIALETSRGAVISALGAYDFIVLFPINPSMLCSYRESFCVSGAKDDRTDAMLLEEYLRFHMAKLRPLEPDTELTRQLAGLVENRRGLVDERTRLVNQWHSLLKTYYPLMEVLFENMTLPLAAHFLLKWPDLASVQKAGPAALRKFFYGHNCRSDKAVEERLQAIGKAQPLTQDPALIVPAVLKAQALAGMLKALHQSIEQMETMIEQTTEAHPDAALFRSFPSAGPAMTPRLLVAFGTNRDRFASAQEVQQFYGIAPVKKQSGQSKVIHMRHRCPKFARQTFHENASHAVRTPGWAKTFYDQQRARKKGHHASVRSVAFKLMRIYFRCWKDRECYDANLYEKALEKHGSPLASQMKKEAAAKGK

SEQ ID NO: 432114 - protein, 268 aa, unidentified
MHDVTLVGIDLGKHSFHLHGQDRHGKAVFRKKVNRKQLIEFFAKFHPCTVVMEACAGAHYMARQLAGWGHQVKLISPQFVRPFVKSNKNDFVDAEAICEAASRPSMRFVTPKTESQQILSALHRVRDSLVRDRVKTANQLHGFLLEFGISLPVGQAVIKRLPAVLAEHALPPRLVAILERLHGHFKYLSEQISEIDAEMARQLADDELGQCLLSIPCVGPITASVLAAEMGDGKQYGCSRDFAASVGLVPRQYSTGGKSNLLGISKSV

SEQ ID NO: 432115 - protein, 388 aa, unidentified
MIYCGIDVAKRKHAVSLLDEKGAQVKPVFMIENTRDGFDRLNLELEAVADSPLTVGLEATGHYWLALYEELSQRGHTLIVLNPLQVAAYRRSGVRKVKNDRHDALWIADFIRIANLPATSQNIPVILQMRELSRFRYRLSEQIGDCKRKILTILDRVFPEYEQLFSSVFLKSSRQVLKTAVSAQEFADYDLSELSFLLHKASQGRFGEAQAERMQTAARQSVGIGFLTNAVRVEMGCLLDQIDLLEEQRTQVDQVIEQLMQQIPQHITSIPGIGPVTGAAILSEIGDIQRFEAPEKLVAYAGLDATVYQTGQFEASEAHISKRGSPYLRHALWQAAMMAAQYDPDLMAFYQTKRQQGKHHNVVIGAVCRKLIARIFIVLKEQRPYIIR

SEQ ID NO: 432116 - protein, 393 aa, unidentified
MVYVGIDVAKDKHDCFIATYDGEILYDAFTIQNDMDGFEDLFFKIKTASRDLSKVKVGLEATGHYSCNILGFLHNKGLTTIVINPLYTSLSRKSVSLRKTKTDKVDARTIASMIMSDVSLKPYSDTVYHNEDLKSLSRYRFDKVSDRSKLKQSVSRLVNILFPELEKLVSTLHAKAVYELLSEFPGAHQVASANLKHLTALLSTVSKGHFGREKANEIREAARRSISSYLPAKSLELRHTIKLIRELDAEIAEIETEIKKIMDSIASPTLSVPGISYALGSVIVSEVGDFSRFDNPDKLLAFAGCSPSTYQSGQIYSTHAKMEKRGSKYLRWALLNAAKYVCKWEPTFAVYLRKKLAEGKHYNVAVSHAAKKLVRLLYHLETTGEKYIPQTLS

SEQ ID NO: 432117 - protein, 362 aa, unidentified
MFESTTIVAFDQHAASVVAAGLLPGQQTPALHPLPSDFSTIGRFVSRLTRQGAVRCCYEAGPCGFELQRWLATRQVPCDVIAPSLIPRRPGDRIKTDRRDARQLAILYRAGALTAIHIPTEQEEAARDLLRCREDIRADLLRARHRLSKFLLRHGRRFTETKKTWSKRHDSWLRAQVWPLPALDQTHRAYLRAVDEAVARLQAVALDLRALLTLAPLAARVARLRCFRGVDDLTALTIAAELGDARRFPTAPSTMAFVGLVPAEYSSGSKQARGAITKTGNAHLRRVLIESAWHYRHHPFVGRALRLRQAGAPAAVVQQAWAAQHRLHRRYHRLASRGKPTQHVVTAVARELTGFLWAALTQ

SEQ ID NO: 432118 - protein, 347 aa, unidentified
MKRIAVDLAKSVYQVAESVQVGRVDRRKRLDSGAFARYVQEQIEPVEWVMEACGTAHHWGRVMQEKGHRVVLLHPRYVRPYRRRNKTDRNDCDAILEAARCQDIRPVPVKSVQQQQVQQLHKLREGWKKSRVQRINLLRGILREAGVETPNGIKPFLRQACELIERPEVRALRGALQVVLAEINLYEQSMRECEEQLARWHADDEIVRKLDEVSGIGLLTASAFKTAVGKPERFASGRHLSVWLGMTPSEYSSGERRRLGRISCKGNVYVRTLLIHGARAALLAAKRCKARTPERLTQLQSWALQTAERIGHNKAAVALANKLVRICWAVWCHERRFSGNWRSTKPA

SEQ ID NO: 432119 - protein, 419 aa, unidentified
MAKRAKKRCEQLPILHPDAAGIDVSASELFIAVSPDRDPHPVRSFPTFTRDLNALADWLQQCGIRSVAMESTSVYWIPVYQILESRGLEVCLVNAQHLKDFPGRKTDVSDCQWLQYLHSVGLLRASFRPAGFICAIRSLWRHRSSLIQMAAEHVLHMQKALDQMNLQIHRVLNDITGMSGLRILDAILAGERDPVTLARLCHGGVKSSEDTIAKSLEGDYRPEHLFALRQSLAAFRYYQRLVVEADQEIQRQLGPLKTATTAEPTVPKRTKASAYQRRRYEPKMFDLRGELYRIFGVDLTNVPGISAITAQTILCEIGTDVSRFRNASAFASWSGLCPENKISGGKVLYTKSRRVRSRVATALRMAANSLHHAKDYLGEFFRRITRKLGKPQAITATAHKLARIVYHLLGTRQAYVDNE

SEQ ID NO: 432120 - protein, 315 aa, unidentified
MIVGIDVSKKSFDTAWNMADISHHQTYEYSDKAIKTLLSETPRDSHYVMEATGVYHSKLALRLHQAGRKVSVINPVVIKRFGQMALTRVKSDKADAQLICRYGEHSECDLWSPSKDEIHKLQQAHSWLDDLIRDRTRLLNRKEAHGHHAVPSLFVKREMKAHEKSLKEQIKRCEAYLRAVVKKCFPELYEHLTSIPSVGPKTAIELIVITKGFTQFESVKSLSAYAGISPTTYSSGTSIKGKGGIAKMGRGRIRQLLYLCSWTAKRSNKPCMELHQRLSEAGKPAKVINIAIAHKLLRQAFAVATKGVYYSENCA

SEQ ID NO: 432121 - protein, 343 aa, unidentified
MLYYGLDVHKKYTTYCVMSQEGAILNEGRCSNEDLPRHPAFSLKGRKRAVMEAGGNWYYIYDLLEPVVDELLLAHPLRVRAIAAARVKTDVIDARTLAHLLRADLIPAAYVPPPAVRELRELLRYRLDLVKQRTALKNRVHALLAKEGLLSPCTDLFGRRGRQWLAALPLRPAKRQRLDGFLRVLDCLTREIHETESAIRQKAVADPAAQLLVTIPGVGALSALTILAEIGDIGRFPDALHLVSYAGLAPRVRSSGGKTRLGHITKQGPGALRWVLIEATHIAVRKPGRLQDTYRRLRRGKNAAVATTACARQLLTAIYYMLTRSDAFRTDGSSRMPLALEVA

SEQ ID NO: 432122 - protein, 341 aa, unidentified
MAVAGGLDLHRGQLTFDYIGLGTGESCRGRISPADRVSLRGWLRRFDGTPDVDFAVEGCTGWRYVVEELQRADIAAHLAEPAQTADRRGSKRRAKTDWADARHLRQLLAEGRIPESWIPPAHVLETRAMVRLYKDLLEERISWQQRVHATLFHQGTPVVPKLGTADGARRLAAAELSAAGRQAVGTGLRQIDRLNAEMTPLRRQLVRFSSRQPRCRALRQSCYGIGGLLSVAVWAELGDCRRFASSDDAVRFTGLDITVYASGGKRARGHIARQGSPVLRWALYEAALYASRPTSPGYAYFCRVRQRIDGQRALLSVARKLARRCHHTLRDLGEEALQPAT

SEQ ID NO: 432123 - protein, 397 aa, unidentified
MYIVGIDIAKRKHEAAVIDGEGAVIIKPFSFTNNCSGYNRLLAMLTKAKLPLDEVSFAMEATGHYWLALFTRLQKEGFRVQVINPVQTNSIRSFYIRQAKTDPRDALLIAEVIRFGHFSESTLHPENIYELRELCRGRHAIVSMQADVKRKVVALLDQVFPEYETAFTNMFSDTSMAILQTCPTPKELSEMPLEELCHLIEVSSHKRFRMAKAQELQELARNSFGFAMAGDVFSTMIRLYAKHLDFLKQQVREMDRKIAEIMDTLDTPITTITGIGPTLGAYILSEIGDISRFSSAAKLAAYAGIDPTMRQSGEYNGVRNRMSKRGSPYLRHAIWLAASSAVLHDPALKLYFQKKRDEGEPYMASVGHACRKMVSIIYAVMRDNKAYTPCIPNEISA

SEQ ID NO: 432124 - protein, 386 aa, unidentified
MQHTSRLLSRFTQDTIVVGVDVHKYSHAAVAMDAWGQEKGRLAFSNDDLARCTDWLRSLGRRSGIIVGVEDANCCGSHLVEALRQEGFAMRSVPAILTERERKQSTTRRKSDFIDAKRVGKVILTKYEETLPAVESIADEEELRTARELDLLLMERRDLVKQNTILKNQLHGLLHQYYGDHYADRFRKPFHRDAVSLWLNDLEEKAGIEEGLKRILASGIVRRIRRLLLVETQIAVISKEVSSVGAHSPAVAALYEELHGCGMMTACAITAELVTPRRFPSEDKLAMYAGVAPREHSSGRHDRLSTNPFGNRLLSRAIHTIALSQIAVKGDTRGKEYYRKKLTEGKTKLWALRCLKRQIVKQVFRILREQAAAAHAASGQDEARVR

SEQ ID NO: 432125 - protein, 414 aa, unidentified
MDVIVERCAGLDVHRDSVVATVRVPGKGKSRRRRAQETRTFATTIAQLEQLGDWLESFGVTLVGMEATGVYWKPVFYVLERRFECWLLNAQHLHNVPGRKSDVIDSRWCCELVELGLVRPSFVPPPEIRRLRDLTRLRATEVQERSRSIQRLEKVLQDAGIKLTSVASATYSVSARAMLEALLGGVTDPVALAELAKGRLRTKIPQLEEALASRFDVAHHGVLVAGLLAHIDALDQAVATLEARIGIATRPYADLIELLCTIPGVGVRLAEILIAECGVDMTVFPTAGHFVSWAAICPGTNQSGRKRRSGKTRHGDTWLRTALTEAAHAAVRTKNTYLAAHYWQLRGRRGQFKAIGATRHDILIAYYHITRDRVPYHELGPDWLARRHSPEHRTRRLVKQLEALGHRVTLEAAA

SEQ ID NO: 432126 - protein, 401 aa, unidentified
MHDHLKHPTAIRVQFAAIFGSLELSRKTWLITSLSPGKGEKMSKHSVTAGDIAGLKACFAELRRKAAVRTGKTFPIIVIQEAGLDGFWVHRALQQEGIESHVVDPASIAAPRRRRRAKTDGIDGEALLRALLAYKRGEPRVCSMVVAPSPEEEDRRRLCRERDTLTTERVRHVNRIKGLLFAQGIADYQPLARHRRKRLDELCTGDGRPLPQYVKAQIRRELDRLELVLAQIKAVETERDRVLVSPAPVAVTNPGFEAARDQPTAAGVAMLMAWRGIAADSATKLWSEGLSRHFSNRRQVAAFAGLAPTPWQSGGIAHEQGVSKAGNPRLRATMVQIAWLWRRHQPQSALARWYFAQVGVGATKARKKVAITALARKLLVAFWKYVSAGELIEGAIMKRVA

SEQ ID NO: 432127 - protein, 408 aa, unidentified
MQVLYTRCAGLDVHKDTIVACVRCVSPPMHQEVRSFGTTTTQLLALTDWLAEHDCTHVAMEATGVYWKPVWHVLEAEFELVLANAAHIRNVPGRKTDVNDAMWIADLLAHGLIRSSFVPPQAIQQLRDLTRTRKQLVREVSQHSLRIQKVLEDANLKLGSVLSDVLGKSGRAMLDAIVAGQSDPALLAALAQGTARNKAAELREALRGRITEHHRTMLRLHLQVIDALQCTLAELDAAVGKALAPIRQRARLLTTMPGISDLTASVVVAEIGVDMSRFPSAGHLISWAGLCPKSDESAGKRRSTRVRKSGTWIKTTLVTAAWAAVRVKTSYLRAQFLRIKARRGAKKAILAVAASMLTAAFHMLRDGTEYNDLGANHFDHQDRTKTIRRLMKRLQDLGCDVPVLVHTG

SEQ ID NO: 432128 - protein, 354 aa, unidentified
MPERAKARVTVVGIDIGKNSFHVVGLDRRGAIVLRQRWSRGQVEERFANMPRCLIGMEACVGAHHLARRLRALGHDARLMPPKYVRPYSKGQKNDFRDAEAIAEAVQRPTMRFVVTKTPDQLDLQSLHRVRERLVSQRTGVTNQIRAFLLDRGVAARQGLRFLRCQLPIILATRSDVLSPRMMRVIEELAGDWRRLDERIDGLSQEIEALARQDPACERLMTVPGIGPIISSAMVAAIGNGAVFMKGRDFGGWLGLVPKQISTGDRTILGAISRHGNRYLRALFVQAAWVVLVRIKDWDRYGLKAWIDAAKKRLHHNVLAIALANKLARIAWAVLNKERVFECVRTRATASQPA

SEQ ID NO: 432129 - protein, 350 aa, unidentified
MGNINLLAIDLAKNIFQLHGLDKQGNCVLKQRLTRDKLVEVISKLPACRIVMEACGSANYWTRVFKRLGHDVNLISPQYVKPFVKGNKTDRNDSEAIAEAASRPSMRYVEPKSIEQQDIQCLLRIREQLIAERIALSNQTRGFLAEYGIVINQGVAAFKQRIPVVLENKQNELTELMRHHIQRLYDRFCALEAEIQVYDKAIQSVCKISESARKIIQIDGVGPMIAASILSLGDLKRFKNGRHFSAFLGLVPRERSSGHKQIRLGMSRRGDNYLRQLLMHGARSVLIRIDKKDTVQSQWLKNLVARKGVNKATGALANKIARHIWAVITQEGCYDRNKGYGNAKAIAIAA

SEQ ID NO: 432130 - protein, 341 aa, unidentified
MKHEINVLGIDIAKRVFHAVGMDNTGKIVYRKRLSRHDLMPCIAKLPPVRIGIEACGGAHYWARRFRAYGHEVKLMAPQFVKPYVKSNKNDSRDAEAIAEAVTRPTMRFVPIKDVDQQDIQALHRVRERLMGERTALVNEVHGLLHEYGIVIPTGVAKFRQAVVGKLESEKDKLTPLSQEMFWKLVDEFAALEKQLAYYQEKLEALATTHPECQRLMTIPGIGPLSATALVAAISDASAFKNGRQFAAWLGLVPRQHSTGGKERLLGISKRGDNYLRKLLIHGARATLRWVGRKPDRRSQWIRQLVERRGKNRTAVAVANKNARIVWALLTSHQAYDLAKG

SEQ ID NO: 432131 - protein, 348 aa, unidentified
MAYFVGLDVSVKETSVCVVDDSGKVISEQKVLTEPDNIITLLTSIGETYARIGIEAGPLSQWLVNALIAADLPVICVETRHMKALLTAQQINKTDRNDARGIAQMMRVGLFKPVHVKTLVAQEQRMLLTSRKLLQRKLLDVESDLRGTLRNFGLKVGAVSGGRYDARVRELVEGFPGLAAIVEPLLTVRRVMRQQFAVLHKMLLDTVRDDPVSRRLMTAPGVGAVVALTYRATIDQPQRFVHSRAVGAHVGLTPKRYQSGEIDYDGGVSKCGDALLRTMLYEAAQTMLTRAKKWSWLKAWGMRVAQRRGIRRAIVAVARRLAVVLHRMWVDGTEFRWSKDSATVLNAA

SEQ ID NO: 432132 - protein, 409 aa, unidentified
MKPLYVGIDVSSRTNVVYLMKPDGSKIKDFSVPNSKDGAGKLVQEILSALTSHSLTDLTIGLEATSVYGDNLVLFLRENGSLTPYNRKIHVLNPKQVSKFKEAYNDLPKNDYVDSFIIADCLRFGRINKEVYLDDYRYQALKNLTRARFFTVQNLTREKQRFLNVLFKKYSSMAQEKVFSNTFGATALAVYEEFDSADALAYMDLQELTSFLQEKGKNHFPHPEEVAKAIQKAARSSYRLPKTINDSVNQVLSISISSMKALESQVKSLDKAIAKQMETIPNTLTSVKGIGPVYSAGIIAEIGDINRFSNQAKLAKYAGLAWKQHQSGNYESQNTRLIKTGNRFLKYYLSEAALSLVKCDTEYNRFYHRKYNEVNKYQHKRALALTARKLVRLVFRLLKDNRLYIPPKA

SEQ ID NO: 432133 - protein, 348 aa, unidentified
MSKSNQYVGLDVSLKETSICVIDDAGKIVWRGRVDSTPEAIATAVKQHAPRAVRIGLESGQLSSWLFHELKGAGLPVICVDARHAKAALSLKVNKTDANDAFGLAQIMRVGWYREVTVKGLDCQAVRALLVARAQIVSQITTLKNCVRGILKTFGRVLPKGLRSQFPARVRAAIDGHPVLGTIIEPTLRVLEAMRVQLRVYDKAVIQRARSDDTARQLMSAPGVGTVVALAYITGVEDPARFKRSSSVAAYFGMTPRRYQSGEIDHAGRISKCGDGMVRSLLFEAAKVLLSRSARPSALKTWGEALGKRIGAKKATMAVARKLAVILHRMWTTGTTFQWNAEAASSAA

SEQ ID NO: 432134 - protein, 414 aa, unidentified
MPETAYALYVGIDWGTVTHQVAVLDAQRVLLGERAIAHEAVALHALTEWLTQLARGEPARVAVALEVPRGAVVDTLLERGFHVFALNPKQLDRFRDRYTVAGAKDDRRDAFVLATALATDQPAFRALAPEDPLIIELREWSRVEDELREEWGRLASRLREQLHRFYPQALTLCPAADEGWFWALVELAPTPAAALRLRRAAVVTLLRAHRIRRLTADQVLAALQSPPLRVAPGTVQAASAHVALLLPRLDLVDRQRRDCARRIERLLDALATTGEHQGHRDVTILRSLPGVGRVVAATMLAEASRLLAARDYHGLRTQAGVAPVTRQSGKRLLVGMRYACNPRLRNALYYWSFISVRYDVHSRQHYQLLRGRGHSHGRALRGVVDRLLTVLMAMLAAQTTYDPARRSAMLALVP

SEQ ID NO: 432135 - protein, 414 aa, unidentified
MQVYLGIDWSTRKHAAYFTNDKGDPLHFLEVEHNLAGLIQLDAARHRLGIALQECIVGIETAHTLVLDFLAERGYERIFILHPNLVKSSQGRFRQSGAKDDRSDARLIADLLRTDLHRLYPWRPDSSLTCQIRARISLVHFLTRQIVAITNRLWSVLLRYYPAALEVFSGLNALITLAFIQAFPTPQAASTLTYAEFTDFIAAHHHRRPAAWPQAYARLHTPYPAAHPSFVIAYAPQAVLLAGQLETLRRTKYQMLEETHDLFLQHPDAPIFASLPGTGKLLQPALLAKLGDDRQRFPSPAAVQQIAGTCPITRRSGKSSVVLFRIACDKQFRNIVHDWARASIITSPWAAAYYQSALARTKSEPHAFRCLANRWLAILWKLWQSRQPYDEAYHLQHYFLRSIPRSQVFALPVS

SEQ ID NO: 432136 - protein, 346 aa, unidentified
MMIIGCDFHPSWQQVSWLDTETGETGEQKLVQASGDAERFYPQVAAPALIGMEATGNCHWLVDLLSELGHELWVGDAAQIRASYVRQQKTDKRDAAHILKLLVEGRFPRIWMPSSEVRDLRQLLLHRYKLVIMRARVKNELQHLCLNKGVQRKRKLWNQAGQQILRELPLKPWAGRRRDDLLKLMAMLDQQIEPLDQAVKAEAQRDKMALLLQTQPGVGAITALAYVLTLGDVSRFPRGKQVASYLGLIPREHSSGGRQKLGAITKQGNRMLRMLLVEAAQAAVRYDPQFHKEYLHRCHKKPKAVAKVAAARKLAVRLYWMLRTQRPYPEIVRIESSPRVPLVGAS

SEQ ID NO: 432137 - protein, 419 aa, unidentified
MNEPKCWENITHYAGFDWAKDHHDVVIVNQQGKIVQDLTFDHSAEGWAKWKEVVATYPHLAAAIETNQGAAVEQLLQSGVVVYPVNPKSAERYRDRKAPSGTKTDFLDAWSLGDALRVDGHGWRALKPLDPLIHELRLLCRDEVELIGKRTELVNQLQAALHEYYPAALKAFDDWTATPSWKFVQQFSTPELLQKAGRRKWEKFLHVHHLYRPEINEKRLEIFSKAHEFCSSAAVTRAKSRLALAVIKLLQALEIQLEDYRKEIRRLFNEHPDHDLFGSLPGAGEKLAPRLLSEMGSDRSLFESAQALQCYVGTAPVSFQSGQVHQVYVRFLCNKSFRHAVHLWADLSRKFCSWAQVYYQQLRAKGKTHATALRCLGQRWLKILWKMWQTKTCYNPDLHMANQLKHGSWVLTIKTGGTK

SEQ ID NO: 432138 - protein, 389 aa, unidentified
MKPNSQMTLDRYFRQCVGIDVSKDKFTACLQMYDKASDEGCHTMSIDFDNTKSGFNQFVKWSRKEAVKDFPLTYLMEPTGAYYEHLAYHLHRIGLTVYVVLPNKARKFCEAEGIKTKTDAMDARCLALMGCVSRKLKPWNPPAAIYRELRQMTRFHADLCQIRTSASNRMEALEHMEGANKSVVGNCRKLIDKIDKLMEDNGKAMMQKVAEDKNLETRVKRIATVKGIGEPTIVCVIAETQGFHLIENRKQLVSYSGLDVKARQSGNDDPRHVISKKGNAHIRAALYMPALVATRHNPQIKAAYGRICQKHPNEKMIGVTAAMRRILLLIYTLWKNGEEYDPTRAKTHTPQKRMKEEHTKLEYGPEDCMGPSREPIDWNATDKDGNPPF

SEQ ID NO: 432139 - protein, 392 aa, unidentified
MRRYIGLDVHRDYCYAHLLEAGQGEGRRLRFPNTAEGWADFVAQLGPEDAVALEVSSGAFRFYDILADRAGQVVVVDARVMRRLGSRKRKTDRDDAKLLAERLALGTLPGVWVPPAAIRELRALVNLRRQLVEQRSRWKNQIRAVLLRHGYRAPRGLWRARRHLEQLWRLSLPEGERVWLAVALEQLRSTTEHLRAVERDIAQRVRHCRPVRQLLSIVGFHIVAAATYYAYVGDPWRFASGKHVVSYAGLAPRVTQSGTVNRRGGISKEGPAVLRWALVEAAAMAARHGPPALRTFYLRLRATKGHQVAVVAVAAKLARIAWTLWRTGQLFAGIRPERYAAKLSVLDQNAVPYPTAQVMAWLADRVGRILDRPASSGGNASRATRGALAASA

SEQ ID NO: 432140 - protein, 385 aa, unidentified
MGSQAFIARDYDVFAGLDVDKKSISVTFTDHQGLLKSMRMPYSVDHLVNHVRKHYGDKKVAFAYEAGPTGYGLYDGLVAQQYPCLIASPSMIPKAPGQRVKTNRLDSRGIAENLRGGQLKSIHIPTTLYRELRHLTQLRDALVSEMVAMKQRIKSLLLMEGLEFPPAPPGSQWSFLVKAKLRKLPCSSVVRFKLDQLLDNLEFGEKQVLKVTREIRRFCQNDPELSQCIDYLKSLPGIGWIVASQMMARIGDWRQIKNIREVPAFLGLVPTESSTGERTTRGSITHSGDPRLRSKLIQASWSAIRQDGELLKFFRTVAKKHPRHLGPRVAIVAVAHKLCVRAAVVLMKQRPYEMREKVQSAPLTQEETVPQGTTRRRRVPGEKIS

SEQ ID NO: 432141 - protein, 338 aa, unidentified
MSLYAAIDLHSNNGVLAILDESDHVVRLKRLPNDLPTVLSELAPYRDQLAGVAVESTFNWYWLIDGLMDHGYPAQLVHAAAVPQYAGLKHGNDDTDACHLATLMRLGILPLGHIYPRAQRPTRDLLRRRSQLVRIAVSMMLSMLATWSRYTGQCLSMKAFLRLTPEQIAHALPDPTTRVGLQMQFTLWRAIQDQIGHIEAWVVDHVGHAPDLEGVRSVPGIGKILGLTIVLETGAIDRFASVGDYASYCRMVKSERLSNGKKKGEGNRRSGNRYLAWSYIEAANFAIRWSPEIRRWYDRKRAKRHRMIAIKAVAHKIARACYYLLRDGTRFEVQRAFA

SEQ ID NO: 432142 - protein, 416 aa, unidentified
MNAADIDVSSRKSTVAVLRPFGEVVRLPFDVSHSSEDLAGLARQLKALDGETRVVMEHTGRYYEPVANVLHEAGLHVSAVNPLLIREYGGNSLRRVKTDKADAVKIARYALDNWADLRDYTPMDTIRYDLKTLNRQFQLASKQKTATANNLIALQEQSFPGIRKCFDSPVRQDGTQKWVDFTYTFWHADCVRKHSLNAFAERYRKWCKRHGYIFKQSNAEEVYALAKSAVTLVSSSEVTKLLVQEAANQLTGISHSVETYRAEMNRLASMLPEYPVVMEMYGVGESFGPQLMAEIGDIRRFEHKKSLVAFAGVDPMPNQSGEKNVRSNRSSKRGSPYLRKTLFNIMGIYLRCSPADEPVYQFLDRKRVEGKPFYIYMTAGANKFLRRYYAKVRDYLATLDGLPPVDMDSTGLSQPD

SEQ ID NO: 432143 - protein, 426 aa, unidentified
MPYRIAGVDVHKKMLAVAVADVEVEGEWRFDHRQFGTSPSQLRALAEWFVEHAVEEVVMESTAQYWRPVWDGLEREWQPRRRRGEAGPMAGALHLAQAQSNNAPHGRKKDFPDAERLVKRLVAHELTLSFVPDATQRLWRTVTRRKYQVTCNRVQLQNRLECLLEEMHIKISSLVADLLGPSARRMLRAVASGETDPGMVAALGSARLHATPEQLRDALGPCADLNRVYRRLLAMILDELDVIETHRRELDEELAGLLRVHQEAVQRLAAVPGLGVDSAQQIIAEVGSTAATFATSKRLASWVGACPGHDESAGVNYSHRSPKGNRQMRRLLNQAANAAVKTKGSIFELVYRRLVVRLGHNQAIGAVAHRLCRLVWKILHDGVTYEERGPVVTKARAQRRAAKMIRELRSLGYRVEPVPAPAITLA

SEQ ID NO: 432144 - protein, 348 aa, unidentified
MAVYIGVDFHARQQTISYLTTETGEIRQLELLHEDPAKVRAFYEQFAGQRIIVGFESSGYAAWFEELLEELGCELWIGHATYIRQFAKRRQKNDRRDADLILELLHTGDFPRIHRYSRTTREMLQQLRYRQRLVKMRTMAMNMLLFMASSRGVSLRTQLQSKRGQAKLQQLALPATLGTQRDELLSLLQTLNEKISTIERWLEQQTKADLAVQRLQTHPGIGLLTSICLRYTLEDAGRFANTRKVSAFAGFDPMQDQSDERNRMGAISKQGSRWLRFYLVEAGQVAIRKDADLQRVYQRVARRGGHTKAKVAVARRLLVRAFIMLRDEIDYAEFQRRGVAARSSRGTA

SEQ ID NO: 432145 - protein, 349 aa, unidentified
MNTQYDVWLGLDVGKTSHHDCGLGPAGERVFDHELPQDEAALPDVITTLQDEHGHVLVIVDQPNTIGALPVAVARDGGADIAYLPGLAMRKAADLYPGQAKTDARDAFIIADTARTMPHTLRSVDRESDVLANLKVLAGTDEDLAHDITRAINRLRSLLLQIHPALERVFKGTVLTRSIVLDLLIRYRGPAGLRGAGKSGVKWWAKNHTRKDPSVLIDAIFDALAEQTVTVPGTEASESVVPRHAARIKALKAERAEIEAEAEELADSLPLLQVLTSMPGVGVKTASQILLAAGDFSAFKTAGHLAAYAGIAPVTRRSGTSIRRSVPVPGGQQTVEERVVPLGVGGVVS

SEQ ID NO: 432146 - protein, 351 aa, unidentified
MLIIGCDFHTRFQQIAMAEDSTGELLLERRLDHESGEAHAFYRNLHGPVRVGIEATGPIHWFERLLAELGHELWIGNSAKIRASEVRKQKTDERDARLILDLMLAKRFPKIWVPTPAERDLRQLLWHRHKLVCLRTMLGNQLHFLAMSQGLCRKKKLFTKKGRAELTGLALGPWTRRRREELLKLLDQLDPAIAELDRAVLEEAQRRDDAVLLMTHPGIGPVTSLAFVLAIGPVTRFCCSRKLVSYLGLNPTEDSSGGRRRLGAISKQGNTMVRWLLIEAVYPAVRKDLALRQDYQRLKFRRGHAVAKVAIARKLAVRKYWMLRSGAAYAQLVRRQGSPGVTLVDASPSLG

SEQ ID NO: 432147 - protein, 410 aa, unidentified
MERQVERCCGLDVHRDTVAACVRIGGGPGQRTQQHVQTFRTTAGDLVVLRDWLAAHEVTHVALESTGVYWKPVYYALESDFTCLLVNAAHIKQLPGRKTDVKDCAWIAQLLEHGLLRGSFVPPAPIRELRDLTRYRKAVIQDRTRVVNRLHKTLEDAGIKLASVASDVLGISGRAMLEALVQGTTDPALLAELARGRLRGKLPALRQALAGRFRGHHAFLIGQLLAHLDYLDEAIGILSGQVETVIAPFADALTRLDSIPGINQRTAEVIIAEIGADMSAFPSAGHLASWAALCPGNHESAGKHKSGKMRKGNRWLRTALIEAAAGASRVKNSALQARFRRVLRHRGPKKAVVAVAHALLRAAYHVLADHAIYRELGADYYDRQHGQRVTRRAIQLLERQGYRVTLEPAA

SEQ ID NO: 432148 - protein, 449 aa, unidentified
MMEPQEIEDEEHEQVLERVAAVDVAKASGMVCTRVPHQARPGKRRTRVWPVDATTNAILELGGHLAAEGIEKVTLESTSDYWRIWFYLLEAAGLDVQLVRARDVKQAPGRPKTDKLDAVWLAKLTERGMLRPSFVPPAEIRQLRDYTRLRTDLTRERTRHYSRLEKLLEDALIKVSAVASKLDTKPVRDMLEALIAGERDPQVLAGLARGRMRSKHDRLVQALTGKFDDHHAELARMLLDQIDALSAQIGTLTTRIGELIAAIPAAQGIDADGSTGPGAGRGPGAPVLPAADRLDEVTGIGREAAQAIIAEIGLHMSIFPTPGHLVSWAKISPQTVQSGAKNRPGKTGKGNPYLKGVLGEAAAAAGKTGTFLGERYRRLARRRGKLKALVATARSILVIVWHLLTDRAARYRDLGASYHASRIDQNRKMRNHVRQLEALGYTVNLTQAA

SEQ ID NO: 432149 - protein, 370 aa, unidentified
MLDTTTFIGLDVHARSIKAVSLDVMTGEVRCATFGYDAGAVAGWVRSVDPEARCVYESGVTGFDLQKRLSGLGVDCVVGAVSKMIKPSADRRRKNDRNDAEFLARMLSVGNVVEVWVPDDECEAARDLTRALEDARDDLSRSKQRLSKFLLRHGLVFDERTPTGRRKGNWTRAHWSWIESIRFAEGADNDVLAYYVDAVRRAAEDKARLEGLVEAEARKPRWRKRVDSLRCLKGVDTASAADLVFEAGEFSRFGNARSFAAWVGLTPSEHSSGESDRRGAITKAGNKHLRKTLVEAAWHYLTCSGRPKGLAKGQAPDRGARRHAAKGVRRLVERREALLARGVHGNKANVATARELACWVWAVGLMAEEA

SEQ ID NO: 432150 - protein, 435 aa, unidentified
MEEVEDEPLFCDRVAGIDIGKAEVVVTIRVPSETRKGGRQQETRKFGTTRRELLALADWLRAWQVERAGMESTSDYWKPVLFLLEREGFDCLLYQASQVKALPGRPKTDKLDSAWLAKITEQGSLAGSFVPPEEIRRLRTHTRYRRKLVQMRTAQKERCEKLLEDAHLKLSSVISDIHGVSGRDMLRAIIAGERSPAALAEMARGVMRRKTARLEEALDCSFFTQEHAFILEMMLDSIDQLTAQIEILDGKIAEMCKPYERQVKQLDGIPGFGITTARDLIAEIGTDMSVFPTAGHLASWARQAPRVTESAGKRKGKNATGRGNLYIGGTLGEASVSVGRTQTFLGARYRRLCTHMPRKKAQGAIMRTQLVIAHALLSDPEARYEDLGPDYYERRADTRRRARSHVRGLERLGYKVSIEAIDPGTGELLPVATDR

SEQ ID NO: 432151 - protein, 464 aa, unidentified
MTPGKMLWRNRKERKEWGRRLQSEDPGLEVVHPHAAGIDVGNSAHYVAVRPDRDPKPVRRFECFTADLQRLADWLQSCGVKTVAMQSTGVYWIPLYEILEERGLEVYLVNARHTKNLPGRKSDVQESQWLLKLHTYGLLNNSFQPVSEIRVLRTYWRQRAEHVREAATCIQRMQKALTQMNVQLANVISDISGLTGQAIVRAIVAGQHDPRELAALSDPRVHASQEEIAKSLEGNWRPELLFVLQQEVDMYDTYHKRITECDQRLQKHLGSFKNARSLQTPKEKSKTKKPAAKNAPCFDLSSELQRVTGVDLTRIDGIDVMVAQTLLSEVGLDMSRWKTESHFASWLGLCPDNRITGDKVRSRGTRRVVNRAATALRQAANTLMRSRSYLGAQYRRLRTKLGAPKAITAMAHRLARLVYRMLKYGQAYVDKGTEYYEERFRQQQIQLLRKRAAKLGFQIAAIHA

SEQ ID NO: 432152 - protein, 373 aa, unidentified
MTASMDEEAPAMESMRWVGVDVHAKESVAVVLDQATGEITAQRIAGRPDEVVEWLSTLEPPFRAVYEAGPTGYGLVRRARERGLDVVICAPGHILKNATDHIKVDKRDAVRLARLLSAGELRLVRVPEPEEEQLRDLVRSREDLRVDLTRIRNRIGKFLLRREIYAPKHTETWGVLHRKWLQSLRFEDRASELVFEDAMHGHDILVARRAQLERALAEIAETSPWALTIARLRCLRGIDTLSALGLVAEVGDFRRFQHPRFLSSYLGLVPSEHSSGEKRRQGGITKAGSKHARRLLVEAAWQYRHVPRTSHHISQRQRGQDQRVIDIAWRAQRRLYKRWQRLHDERRKRRTVVAVAVGRELAAYCWEIATLSS

SEQ ID NO: 432153 - protein, 403 aa, unidentified
MIYVGDDWSEAHHDICVLDEAGKRLGSRRLPEGLAGIRALHELIATHVEQPQGVVIGTETDRGLWVEALVAAGYQVFAINPLAAARYRDRHHVSGAKSDTSDAKLLADLVRTDRHNHRPIAGDSEQAEAIKVLARAHQNLIWERTRHTNRLRNALREYYPAALVAFDDLDHGDALGVLGRAPTPQQGARLNLAGIQSALKRGGRQRNIAARAREIQAALRTEQLAAPAAITAAFAATTTATVGILTEINRQISELETSLAAHFETHPDADIYRSLPGLGVILGARVLGEFGDDPNRYTTAKCRKNYAGTSPLTIASGKKRAVLARHVRNRRLYDAIDQWAFCALSTSPGARAFYDQRIHLKDSHHQALRALGNRLVGILHGCLRHHQPYNEHTAWAHRTSTAA

SEQ ID NO: 432154 - protein, 347 aa, unidentified
MDVHEQTISIAVMNSAGKLIMESIIETKAITILQFIQGLRGDLHVTFEEGTWAAWLYDLLKPHVTKVVVCNPRKNALLKEGNKSDRIDARKLAELLRNGSLSAVYHGENGVRTLKELSRSYLTISKDLGRVMNRVKALYRSWAIPCAGTQVYAPRHRPEWLSKITEAGVRRRAEHYYQQLDALQALRHEVRKDLLVESQKHHATKLLRQVPCIGPIRAAQLVALMQTPHRFRTKRQLWTYSGLGLETHGSAQYRYVEGQLQRSKKPQQLRGLNTNHNHDLKNIFKGAATMASISSGPFHGFYEALLAKGMQPTMARLTLARKIAAITLIVWKKGARFDPQHLKQQAA

SEQ ID NO: 432155 - protein, 345 aa, unidentified
MKSKIISVDLAKDVFEVAVANCQYCILERRRLSRKEFSTFLATQAPALVLVESCGTAHYWARQAEAAGHRADIVPAHYVKPYRRRGKTDRIDTEALLEAHRCEGIKPVPVRSVEQQQIQQLHRVREQWKRTRTQRINGLRGFLRELGFAIPEGAKIAQRRAREILDDEAIPAPLKVVFTRLLEEIATLENDITSVERQLKALTKANANVQRLQTVSGIGLLTSTAMVASAGSPEHFPDGRHFASWLGLTPREYSSGNKRRLGGISKQGDCYLRMLLTHGARAVLARAKQLQRAGKHLSRLQQWACQLEQRIGHNKATCAIANKLARICWAVWKYESDFDSNRAVA

SEQ ID NO: 432156 - protein, 385 aa, unidentified
MAILVNGEKVHGYTILNDAIGFNRLLGDLKTVHNPEIIFEATGVYSRRLQAFLEECGYAYTRLNPLEAKKQLDSLRVRKTDKIDAEKLAKSQLVHNRKPTYVQEEVYQHLHDLSRFYQNMTEDLVRAKNRLHKVLQVTFPELENLLFTPTGEQYWNLVMAFPCKEFVLSLSQSDLYEIIRQSTSKRISEKRITYLTDKLIELAKQSFCAVKKTSPMLEEVRYYAQELLRLSERRQVVLNDMVALAQPLPEYDILRSIPGISETTATSIIGELGDIRRFQSTNQINAFIGIDLRHYESGNFLAKEHITKRGNPYTRKILFKCIHNIASASHTNPCHIADFYEKRKRQSTIASTKPHTIASIHRLIRTMYYLITHNKLYDYSLTQNR

SEQ ID NO: 432157 - protein, 344 aa, unidentified
MKIIRVGVDIAKSVFHCHGVDRFEKTQWQGKYRRERWLGALSKRVPKGSEIGMEACASSHYWGRELQKMGYKVKLVAAQFVKPYVKSNKNDAVDAEAICEAMSRPNMRFVAVKSVQQQDVQASHRIREELVCQRTAKANQIRGLVGEYGLIAPVGIGQLRKALPTWLEDAQNGLTEMFRVLLCGLAEDLRSLDDRIQVLSEQITQHVRQDPVTNKLMELRGVGPLIASALAAAIGDGRQYTKGRDFAASLGLTPRQHSTGGKDRLLGISKRGDSYLRKLMIHGSRAVMRHAKNKEDNLSRWVNGLASRKHVNVATVALANKTARVAWALVYNETSYDPAKVAHV

SEQ ID NO: 432158 - protein, 347 aa, unidentified
MRFYTQQHAYYCGIDLHARSMYLCVLDQTGTVVLHRNIAAEPGELIAALAPFRPDLVVAAECTFTWYWLADLCADENLPFILGHALYMKAIHGAKAKNDRIDAHKIAALVRGGNFPLAHVYPKARRATRDLLRRRLRLVRRRSELNVHIQNTTSQYNLPALQKRLAYRCNRDGVAERFLDPSARKSVELDLALMDVYDGMLLDVERHILHAAKEHDGDTLHRLQSVPGIGKILALTIHYEVGDIARFPTVQDFASYARLVKPSKESAGRVHGHGGGKIGNAHLKWSFSEAAVLFLRDNPIGQKLLARYERRHGKPKALSILAHRLGRAVYYILKRKTVFDMQKFIAS

SEQ ID NO: 432159 - protein, 326 aa, unidentified
MEVLHPRCCGLDVHKQTVVACVIAPKIKETRTFSTMTGDLIKLREWLLDYKVTHVAMESTGVYWKPICNVLEGANIKLSSVATDITGVSGRAMLEAMVSGVSDPKKLAEMARGRMRKKKGSLEEALSGLMGEHQKMMLISQLRHLDFLDGEIAQLDDEISRRMQPFDEVIERLDEIPGVDRRRAEEYMSEVGKGSKAFATGEKLASWIGLCPGNNESAGKRKGGRTRHGNRWLCSALVQAARGAARSKGNYLSAQYHRLAPRRGDKRAIVAVAHSISVIMHNMVVKGTTYQDLGQLYFDNRDREHVIQRAMKRIEALGYKVSLQVA

SEQ ID NO: 432160 - protein, 427 aa, unidentified
MGAQDITRIEQFRQFKKEIRGNPKVLIVGIDVAKSIHRAFFGTATGQTVLKGVRITNDAHGFLHLITQVKYYMNRDGFEEVVFGVEPTSVYHKPLAEHLVRKGHLVVYVTNDAIKKNRSLLDGRWDKNDTKDSANVADLISQGKCHYYDFAEGHLQDLRNLLLFRKRLRKQIHSCQVRIKNNLVAQYFPELDPLWNKAEDENLTIVRWCLSPQKIAQMEFEKFVNLFPAKPKKVIQRNRLKKIWEASKHSIGCQGALAMELEAGLMVEHIKFLKEQIDQVEKAIQRICCNYEEYRYLLSIPGFGPYVSAVVLASIGNPYRFETISQVIRLSGLDLGANRSGTKSERAVPIISKKGKSELRYALYQAAKIASSLTPVFRGYYNRVVEGRQKEKGISTKMRVKLSVKLLVIAWTLMKKKEPFDPVHIAT

SEQ ID NO: 432161 - protein, 410 aa, unidentified
MYNAVGIDASKFKSTVTVIQPAGVVIRKPFDVLHTSSELNTLVAYLKSLEGETRAVIECTGRYHEPVVKSLEDAGIFISAVNPKLIKGQKQNSLRKVKSDPADARKIARYALDNWAELRQYSSMDTIREQLKTLNSQFDFFMKQKVAAKANLISLLDNTYPGVNKLFDSPAREDGSEKWVDYAYSFWHVDCVRKIGLKAFTERYEAFCKKHHYNFQKGKPAELFEAAKQLVAVFPKEKSYKLLIHQSIQQLNLASEHIEILRREMNQLASTLPEYDTVMSIYGVGETYGPQLIAEIGDVSRFTHREAITAFAGVDPGVNESGQFRQRSNRASKNGSTRLRKTLFQIMTTYLQNKPVNEPVYQFLDRKRAEGKPYLVYMTAGANKFLRIYYGKVKECLRNLEQNSLPPEES

SEQ ID NO: 432162 - protein, 414 aa, unidentified
MELLHERCAALDIGKKDLKACVRTPGPKGKRSRSQEIRTFATTTNALLQLRDWLIAERVSLVVLEATGDYWRAPFYLLEDDLNVMLVNAAHAKGLPGRKTDVCDAAWLCQLGECGLLRASFVPPEPIRQLRDLTRYRTTLTAERSREAQRLEKELEDAGIKLSSVATDILGVSGRAMLAALIDGERDPQALAELAKARMRRKIPQLVEALIGNFGEHHAVLCRLHLQRIDQLSAAIEELSARIEQQIRPFARQLQQLATIPGVGQSVAEVIVAETGADMSRFRTAAHLASWAGVCPGHHESAGKRRSGKTRHGNRWLTAALGTAAMAAARTKDTTYLGARYQRLAPRLGKKKAIVAVEHSILIAVWHMLTDDVDYADLGGDYFARLDPQRAMHRIVRQANALGFTVLFEPIQAA

SEQ ID NO: 432163 - protein, 432 aa, unidentified
MPFGQPKRDTRGAYMRYFVGIDVSKEFHVVNVIDEDEKRVLKNFKFLNSKDGFDFFKVKLSLLSKDKDSFVLGLEATGVYGENLYDFLSSNGYNIKLLNPFQTSRYRQNYTMKSVKNDNIDSLYIALLLKDDRFSSGYVASDEYMALRVLYRNRNSCLKESKEIQKRILSILTVTFPEFEKFINPFSVSGLTLLKKYPTAAHYKGVSANSILKLFRHIKGNNFSKEKATKLLELAKNSVYSGKAKKERAIALNSLIRLYEKYQEEIATLDKEIDSLLNSDSLSSDDKTAIKEAKQRAESIIKNLHTIPGVSTKTISAILSECGDLSRFPTISKLLGFIGLHPTQDSSGKKELFGHLSKRGNSTVKHALYLASVSCIRHNSELRKLYNDKRAAGKSKKEALIIVSRKLITIIYAIFKNNEPYNPSRVFAMVRQ

SEQ ID NO: 432164 - protein, 428 aa, unidentified
MKYNTQNAKIKSITEKTLIVGIDVGSETHFARAFDWRNYEYSKKPLEFSNTEAGFMTLKAWMADFAEKYGKNVVIPGMEPTGHYWFNLGAYLQDNGMKPVHVNPHHVKKSKELDDNNPNKNDRKDPKTIAALVNEGRFSYPYIPTGIYAEIRSLSNLRLQTQEEITRIKNRIARWFSIYFPEIKDVYRNPDSVSGLMILKEAPLPQDIVKLGVDGINKIWRDAKLRAAGLKRAKTLVTAAEHSIGSQEAPDSARIELKNLLNDYEIYKNREEDLMSLTEEKLSEIPHIDKLLKIKGVGLKTVSGFVAEVGDITRFDNPKQLQKLAGYAIVECSSGKHKGESHISYRGRKRLRYVLYEAAISLIARNEEFKEVHRYYRTRKENPLKKMQSVIAVACKVLRIFYTILTKGVTYDGAKMMQDIKRPQMLAA

SEQ ID NO: 432165 - protein, 413 aa, unidentified
MVEVVWERCCGLDVHQKTVVACLITPGPGGHPQKEVRTFGTMTADLLELADWLRAADCSQVAMEATGVYWKPLWNLLEDEFTLLLVNARHIKAVPGRKTDVKDCEWLADLLRHGLLRASFVPDRPQRELRERTRYRTALVRERTAEIQRLHKTLEGANLQRGSVGSKVLSVSARQIVDALLAGTTDPALLADLARGKLRAKLPALERALVGTPGLHQHFLLARQLAHIDFLDETVEQVSTEIAERLRPFAAALERLDGIPGVGPATAEVLLAEIGADMRRFPSAGHLAAWAGMCPGNYESAGKRQKGKTRKGSKWLRTALLEAARAAARKKGSYLAAQYHRLVPRLGKKKAAVAVGHSILRSAYYLLQRETTYTDLGGTYFDERYRGRAERRLVRGLEQLGFEVTLTPKDPAA

SEQ ID NO: 432166 - protein, 387 aa, unidentified
MISVGIDVGKRSHEVCLMDAEGHQIGKFFRFQHSRQGLTALVELLRRQPEPCIIALEATGHYWLALYHHLLQEGFKLVTVNPLQSHAYRRSTIRKVKNDRRDAWIIADLLRIGRVRPGYVPGPEIQPLRDLARFRMELVDQVGDAKRRILGVLDKVFPEYESFFSSVFIATSKELLKRAATAEEFAALDLKEITQVVTKASRGRLGLERAERLQQAARTSLGLPYLRDAATVELRCLLAQVEFLETQVKATEDAINKLFSQVSQYLTSIKGIGTMSAAAIYAEIGDIHRFPTLESLVAYAGIDPTIFSSGEFEGTKRHMSKRGSPYLRKALWMAATGARRWNPDLDAFFTRKLVEGKSYGTAMGALCHKLLGRIHVILKENRPYEMR

SEQ ID NO: 432167 - protein, 412 aa, unidentified
MIKREKIELVKGSDIYAGIDVSCDIHRVRFIDNLGQEIIRGISFSNDREGFNKLEEHMKKYGIDHNIIFGLEPTGDYWKPIGYYLKSKGYRVVLVNPYHLKRTKEIIDNSQQKDDRKDSYLIADLVKQGKYFFPIIPEGIYGEMREISISWRRTKQQITRLKCYLSNFLAKYFPEYRSIFSDILGKSSFYILSHYPLPEDIKRIGKVRLTRIIKRVSKGKIKQEKIDRLYEIAKDTVGIKEGKETARMFLKEILKELERLIRRREKLKGKMKDLLMRSGYGDYLLSIRGVGVVSACLFLGEIGDPRRYKKSSQIEKLAGYNLVEESSGKKKGQKQISKRGRETLRYVGYLVANVAIAKNKEIRELYRYKVEVLKKNRINAMVGIAVKMLRIMFAVCKNKEYYNSEKIRENFI

SEQ ID NO: 432168 - protein, 355 aa, unidentified
MEGTKYIGMDVHKDSISIAVLNSSGKLVMECVIETKAITILEFVHGLRGSLHLTFEEGTWAAWLYDLLKPHVAKLVVCDPRRNGYLKQGSKSDRNDARKLAELLHSNMLRPVYHGEHGVRSLKELARSYLTITKDQARVMTRVKAVYRSWAIPCVGKQVYGQRHRLEWLGKIEEPGVRRRAEFYYAELDALRSLRLVVLRELLLESKKHSVSTLLSQIPSIGPIRAALLIALLQTPDRFRTKRQLWAYSGLAIETHDSAENQYVNGQLQRSRKQASIRGLNQNHNHDLKNLFKSASAVAAAKAGPFQKFYDAQIGKGLKPEMARLTLARKIAAITLIVWKRGVSFDARYLNPQTA

SEQ ID NO: 432169 - protein, 368 aa, unidentified
MDSSCDSVGIDVPESLLLRAKEEPIMSNDTRIAVDVAKAVFEIAISERPGHVLRRERAQRAQFLPFMAQQPKATVVMEACGSAHHWGRKLQDLGHRVVLLPPHHVRPYIRRNKTDRTDAKGILEASCNEEIRPEPVKTVDQQVLTSLHRLRSGWMTERTARLNALRGLLRELGVFIPVGSRQVVPAVWCLIEDADSDLPEALRPIFAEACHEIREIEARIKQVERQLEATAEQLPAVGYLRTIPGIGLLIATALVAFIGDIRRFPSGRHFASYLGLTPREYSSGLKRNLGRISKRGDGYLRTLLIHGARSVLVHARRQQPDRLREWANNLAKTHVHNKAAVAVANKLARIVWAVWSHQQPFAPIAKVA

SEQ ID NO: 432170 - protein, 340 aa, unidentified
MNTVCRIGLDTAKNVFQVHALDAAGRKVAPRRLRRTQVLDWFARLDRASDCVVGLEATGGSHYWARELQRLGYRVRLLNPQAVKPYRQGQKNDARDAAAIAEAVAREVVSEAPIKSEEQQALLARQNYRRRLVDARTALGNQLRGFVAEFGIAVPQGWKRLKQRLAEAVEDADNGLPADLRAVLADGADELRELDRRIDAQDREIARQAHADERCRRLMELDGIGPLTALRLVAICGDGTAWGNGRGFAVSTGLTPRQHSSGEQVRLGAITKQGDVELRTLLIHGSRSTLRRRQPLDPWTERLRQRRPHNVAAVALAHKRARIAWAMLAHSTCYQAPSAA

SEQ ID NO: 432171 - protein, 321 aa, unidentified
MTNPTTRAAGIDIAKHTLEFAIHGLPIHLSVENRRPGWRRLVTELRKAGVARVGLEATGGYERGVVGYLRAAGFTVLVLQPLQVKAYARLHLRRAKNDALDAVLIAACTAAIDASPEPPDARLAPLADALTFVEQIEEELARHQTRLEHIELPRFRRLVMADIRRLEARRRAELQRIVQALACHDDLCRRLHLVQSIPGIGERTAIALVLRLPELGRLTREQVAALAGLAPFDDDTGLHRGQRHIAGGRKRLRRSLYAAALPAASFWNPACIALYKRLMAKGKTHKAALVACARKLLIFANTVVQRGTPWTDRTASAGAAC

SEQ ID NO: 432172 - protein, 416 aa, unidentified
MLFIGDDWAEDHHDIEIEDADGRRLARARLPEGLEGITRLHALVAEHAPAAWAELLPEQVAGQVVVGIETDRGPWVTALRAAGYQVFAINPMSAARYRERHATSGAKSDAGDAHVLAEIVRLDRDHHRPVAGDSDLADAVKLLARAHQNAIWERTRHVLRLRSTLREFFPAALEAFGDLTASDTLVLLERAPSPELAAKLTRGQLAAALRTARRHHVEAKAVALQEILRAPALRQPPVLGSAYATIVVGQVRIIAALNAQITQLTEVVDEHFGRHPEAEIYLSQPGLGVVLASRVMGEFGDDKTRFADARTRKNYSGQSPITRASGRKTVVLARYASNRRLGAALHLQAYAALTGSPGARAYYDALRARKIGHHAALRQLANRLVGILHGCLKTGTLYDENTAWQHHLPGAENLAA

SEQ ID NO: 432173 - protein, 388 aa, unidentified
MQTVADRPEAPTAIRTDLGAIFVSLELSRSTWLITSLWPGGGEKMSKQVVRGGDVAELLERFARLREKARARTGKVFPFVVIQEAGLDGFWIDRALQNEGIESHVVDPASIATSRRRRRAKTDGIDGEALVRALLAYKRGEPRVCAMVKAPTPEEEDRRRLCRERKVLIGERVQHVNRVKGLLFSQGISGYEPLRRDRREQLDTLQTGDGRLLPDHLKAQVCRELDRLELLLEQIKAVEAERDVLLAAQQVAAPAPAAMLLDIKGIGPEFAAILWSEGLFRHFDNRRQVASYAGLAPTPWQSGSVDREQGVSKTGNPRLRTTLIQLAWLWLRHQPQSALTLWFEERVRRNGGRLKKTTIVALARKLLVALWKYVTAGVVIEGAVMKRT

SEQ ID NO: 432174 - protein, 308 aa, unidentified
MPQAVIGCDLSRAVIDICELPSGRIGQIANTSDAIAVWLDTLDHDIRLVFEATSGCDGELIAALATRGHPFSRVNPRQAREFARATGTLAKTDRVDARVLAQMGAALDLPATIPLSPARSRLADFLRRRRQLVDMRKAEKLHRQSAGQPEIAQAIEAMIALLGQQIAELDRQIAGFIAQDQALSEQAHLLNAVPGIGPTVLATLLGELPELGTLCRRKIASLAGLAPHARESGTWRGARRIWGGRRKVREALYIAALNASRRIPVLTAMRDRMRAKGKAPKTILIAVARQLLVILNAMIRKRQPLQLG

SEQ ID NO: 432175 - protein, 346 aa, unidentified
MMIIGCDFHTRYQEIAWLDRDTGETGEQRLEHGGESVRQFYAGLRGAVRVGIEATGYSQWFERMLHQLGHEVWIGDAAQIRASVVRKQKTDQRDAAHVLELLRTDRFPRIWVPTPAERDLRQLVLHRVKLVQLRTRVQNQLQAMAMGQGVCRRKKLWSTRGRAELERLALDPWAHRRRAELLRLLDELEQSIGELQGAVEQQARQHPDAVLLMTHPGVGPVTSLAFVLTIGPVSRFSRGKKVGSYLGLNPSEHSSGGRQRLGSISKQGNATMRWLLVEAGQTAARLDPLLHRSYQGLKFRKGSAIAKVAIARKLAVRMYWMLRSRHDYAALVRMSGSSSSAVVPEV

SEQ ID NO: 432176 - protein, 449 aa, unidentified
MREPQEIEDEEHEQVWERVAAIDVAKASGMVCTRVPHQSRPGRRVTKVWDVDATTNAITELADHLVRHGIEKVTVESTSDYWRPFFYLLEAAGLRVQLVNAREVKNVPGRPKTDKLDAVWLAKLTERGMLRPSFVPPAEIRQLRDYTRLRVDLTQERARHWQRLEKLLEDALIKVSSVASKLDTLSARDMIEALIVGERDPKVLAGLARGKMQAKHAVLAEALTGRFDDHHAELARMLLDQIDALSGQISKLTARIEQLIAAIPAAQGVDADGATGPGAGGGDDAVVLPAAARLDEITGIGPGTAQVVIAELGLDMTQFPTAGHLVSWAKLCPRTIQAGAKTRSRATGKGNPYLKGVLGEAAAAAAKTNTFLGERYRRIVKRRGKLKALVAVARSILVIIWHLLADPAARYADLGAGYHANRIDTGKKARNHIRQLEALGFTVTLAPAA

SEQ ID NO: 432177 - protein, 424 aa, unidentified
MRSIALDVHRDFCEVAIKEGAEVRSAGRIKTSRAELELFARSLGADDQVALEATGPALQIKRLLEPHVGRVVIANTRKLRAIAEAKVKTDKVDARTLCELLAAGFLPEVFGPAEETRALRRRLQRRAALVRQRTRAKNELHAVLNRNLKGRPPMSDVFGVRGRQWLKGLALPADERETVAGCLRQVDFLDQEVSETERVLAQSALASEEIRRLMSVPGVNLVSAATFWATVGDARRFETPRKLVSYVGLDPRVRQSGEGPARHGRISKQGSPAARHMLCEAAWIAVRTPGPLRAFYERVRARRGAQIALVATARKLCVLFWHLLTKQEDYAFGRPSLTRHKLRRLELLAGDPSRRGRRSGSAASKREQSHERELSEQFEAAYRRLTDDWQPKRSGAGATRGRASLKASRKSQAARQGSAPKPAL

SEQ ID NO: 432178 - protein, 341 aa, unidentified
MKVTRVGLDIAKEVFEVHGVNEHGKAQVRKQLRRARVLEFFANLEPCLIGMETGSGAHYWARELQKLGHTVRLMAPRFVKPYRKNDKSDRNDAEAICEAVGRPNMRFVAVKSEEQQVMLSLHRMHAGLKSERDALANRLRGLLCEFGFVLPQGAARLRSGLPAVISQERLPVLMNQALADGWQRLRELDDQVNRHERQIRALAQQSEPARRLMEARGIGPMTATAAVATIGDAKLFKNGRAVTAWLGMVPRHNGTGGKIWMGRITGRGDTYLRTLFVQGARSVMNTTRGKNDPLSLWVERLRARGGDNVAAVALAAKNVRMVWAMLARGEAYRPPLQGVGA

SEQ ID NO: 432179 - protein, 375 aa, unidentified
MALLIEGTVHMIVIGTDTHKKTHTCAAVDALTAAARGELTAPARGGSFGKLLVWARALDPERVWAIEDCRHVSGAFERFLVARGERVVRVAPKHMAGARRSERERGKSDSIDAFSVARAALKEGIENLPGAYLDGMALDIRLLVDHREDLVTARTQEQQRLRWHLHDLWPEFEIPIGALDTSKWLGKASRRLARAERSTRVWVARELVRQIGARTTRIRELESELAKLVASYAPQLLAERGCGPLTAAKLIGEIAGADRFATDAKLARTSGSAPIPASSGNTNRHRLDRGGNRQLNCALHRLALNKAHWDPETAAYLERRQAEGKSRKEALRCLKRHLARRVWKLLQSPGPRQDAQPQKPISIYCNLPNSGFTLT

SEQ ID NO: 432180 - protein, 332 aa, unidentified
MFIGIDVHKRYSQIAVLDQNGEIVEEVRVENANLDDFAQQYAGSKAALEATSNYYHIHDTLSEYLDVTVANPGELKLISDSDKKTDRVDAKQLARMVRLGSIPESYVPTDEVRQARALVRGRQKLVENRTEYANKIHGLLSDHGITREVKPLSVKGREFLAELSLPAPWDALLESYLELIQVLTEQIESLEAEIEERAGSLKETQLLMTIPGVSYFTALTIYAELGEINRFDRAKEVVSYVGLNPIIRESGDSRFEGSISKRGSGRVRWLLVQASYTAVHTCEDEYLSRFYNRLARKKNSKTAIVATARKLLVSMYHMLDREEVYDPPGVSA

SEQ ID NO: 432181 - protein, 372 aa, unidentified
MLIIGVDFHPEFQQIAWVDTDTGDFQERRLQHREEAETFYRALAAAGQKMRVGMEASGHARWFERLLGELQCELWIGDATQIQSKRGRKQKTDRQDAQHILRLMLKEDFPKIWVPSWENRDLRQLLWHRHRMVQARTRIMNQLQAVALNEGLRCKKRLWRAGGREQLESFRLAPWASRRRHDLLELLDRLNPTIAELSQAIEQEAEKCPEARRLMTHPGVGALTALAFVLIIGNAERFPCGKQVASYLGLVPLEKSSGNRRRLGHITKQGSSMVRFLLVEAAQVTVRSLPEWRSRYFRLMVRRGRKTAKVAMARRLAVRLYWMWRQGWDYQPVFDGTPSRFPGCPACEPNLSTESLSSQPIFCNRQLHPHWD

SEQ ID NO: 432182 - protein, 325 aa, unidentified
MMKLKYSICCGLDVHKNVIVATIVTTNKDGISEYLQKSFSTINSDIQRFHNWLIENNCYHVCMESTGKYWIPIFNYLENDIDICLTHPKYVKAIKGKKTDKKDSKWIADLYKFDLVRCSFIPPKDFRQLRELARYRFKLVCMKSSEKNRIQNCMTISNVGIASVLSDPFGKTATEIMSYLLEHTADSMDEKAVRKLIKKGAKAKSDEIIEAIKGYNIETDQAKKLELAQGHLEYLDDMITQTEVELYVRIKPYYEFVEFVSTMPGMTELSSTIVLAETGVDMDIFDDAKHLCSWCGLSPANNESAGKKKSVRIAKAGDLPKLAIT

SEQ ID NO: 432183 - protein, 385 aa, unidentified
MRGNAFVPREYDIFAGLDVSKRSISVTFSNHQGFIRSLSMPHKVEHLVNYVRKHFTDHKVAFVYEAGPTGYGLYDGLVAQAYPCLIVAPSMIPRAPGQRVKTNRLDSRALSENLRGGQLKSIHVPTVIYRQLRHLTQLRDTFVSEVVAMKLRIKSLLLFEGIDFPPAPAGSQWSLIVKAKLRKLPCSNSVRFKLDQLLDSLEFAEKQAVKTTREIRRFCQSDPELSQSIKYLMTIPGIGWIVASQLVARIGDPREIKNIRELAGFLGLVPTENSTGDRTDRGSITHTGDGRLRSKLIQAAWSAIRKEGELREFYRSVCRTHARQLASRVAIVAVARKLSVRISVVLMQQRPYEVREKVHSAPLTQEETVPQGTTRRLREPGDKNS

SEQ ID NO: 432184 - protein, 321 aa, unidentified
MVYIGIDISKSSFVAAYPSAKGYRTQTFPNTAAGVRKFIATLLVTEYHYVMEATGNYGFLLLYLLHQSGIAVSLVNPKQIKHFSRMMMAVTKTDEKDACMIAMYGEKMNPPIYKMPSQAILLLKQKKTVIRQLRKQLVASKNLRGSLIVLPYRDKACVRTLDKTVDFLTKQIEQLEAELADIASSEFDKQLKALTSIKGIGITLATALILTTGGFTCFDNAKQLSRFIGICPTHQQSGTSVNIKGHINRNGDEHLRSLLYVASWSALRSNAACRECYLRLKANGKSSKVALIAVANKLVRQAFAIVTTNSIYIDGFVSTKK

SEQ ID NO: 432185 - protein, 345 aa, unidentified
MKTTTVGLDLAKNVFQVHAIDEAGEVIVRRALRRRQMIPFFSKLAPCLIGMEACGTSHYWARELSGLGHRVRLMPPAYVKPYVKRGKTDAGDAAAICEAVTRPTMRFVAIKSPEQQSLLALHRARDLLIRQRTQLVNLIRGQLAEFGIVLAKGIQHVLRLVARLVDGETLDIPEQASKVVIILAEQLRDLQVRIGGLEKDLKNWCRGNQAVKRLKTIPGIGTITASALVASVTDPHQFTSGRQFAAWLGLTPRANSSGGKARSGRISKMGDQYLRRLLVSGMTSQLRSVRRHPDRHPWTTSLLHKKPAKLVAVAMANKTARIAWVVMTREETYRAPQPLNQEAAE

SEQ ID NO: 432186 - protein, 344 aa, unidentified
MQQPTTIGVDLAKTVFQVHGVNQTGKAILKRKLRRNQVLDFFAGLEPCLVGLEACAGAHYWARELSALGHEVRIMPPSYVKPYVKRGKTDAADAEAICEAVTRPTMRFVPVKSAERQAALLEHKTRDFLVRQRTQLVNTIRAHLSEFGIVVAKGIHNVDRLLEAAKDLPEAARPAVDMLADQLRETQEKIDDVTARIEGAQNADPLARRLATIPGIGAVTASAIAASCQRHASGVTPEVDNFRTARDYAAWLGLTPQPHSSGGKERLGRISKAGNRYLRRLLYLGASCRRHAFGVTAQISARRCRRPGDDCEPDRIHRRGWSWSLSGDLGRGVFAVEVPFCGCG

SEQ ID NO: 432187 - protein, 354 aa, unidentified
MERYVGLDSHARSCTLGVMSAGGRRLKSLVVETNGKALVEAVRGVGGRVHVCLEEGTQSAWLFELLKPHVAEVVVAVAPERKGSKDDQRDAWARANELRTGAIETRVFKAPEHLAGLRNAVRAYGFAVTDVVRAKNRLKSVFLSRGIGTDASVYDAAKRMAWLKQLSSPHRELAEWLGRQLDQLEPLREEAERLLLAESKKHPIIRKLSTAPGMGPIRTAQVVAIVATPERFRTRRQLWSYSGLGIVTRSSADWVQDRTGKWVRGHHAQTRGLNRKRHPRLKAVFKGAATTVIAQLAGDPLHADYEQMVKSGIKPTLAKLTLARKIAGTVLSMWKHQEVYDPKRHRPTPEPEQK

SEQ ID NO: 432188 - protein, 372 aa, unidentified
MPDVSSIAPADVRLWVALDVHKLSIVAATLPPAGGQPELVRIETTEKAIRRFVERLGGPAGLAVCYEAGPGGFALWRLLRSIGVACDIVAPSLVPVRAGDRVKTDRRDAKKLVALHRGALLRYVCPPTPETEGLRDLLRCRDDLRCARTAARHRVGKQLLRHGRIYRDGVKSWTLKHKAWIARQRLDDPLAQLALEQMLIHLDGLDRQLAALDAQLQRIADDQRWAWQIERLRAFRGISTLTALGLIAEIGDFARFSHPRELASWLGITPSEYSSGDQQHRGHITKAGNRHARRLLIEAAWHYRHPPRRPRTGPQPTDRAWQAQIRLHARHRALSERGKRSTIVTVAIARELAAFLWAELTDQPTREQTTAA

SEQ ID NO: 432189 - protein, 403 aa, unidentified
MYVGIDWASRAHELCVVDEEGLVVERFGFAHSERGISGALERLAELGSPAGLPVAIERPDGLLVDRLLDAGHPVVPVHPNAFHAARPRWESAGSKSDPGDAYRLADLLRTDQHRLRPLRPLDPATRELQALVRLRDDHLAARIAATNQLAALLGRHWPGAVAIFGRLDSEIALSFLERYPTLESAARLGEARLASFLRRYSYSGRRPPDELLTRLRAAPRPAHALDPGIVAELVRAQVRLVRTLLQTIAQLERVIATTLDQHTKAQLLRPLPRIGTISLGQIVAEVGPLVDRAASADEAAALCGAVPVTKRSGQQRAVCFRYATNAKARKALTLYADNSRHASPWAERIYRQARARGCRHPHAVRILARAWLRVIWACWHTDTHYDPARRRGRDRHLEPTTLT

SEQ ID NO: 432190 - protein, 367 aa, unidentified
MDTLEVVPQRFIGLDIHKNYFVATGVNSNKEQILGPQRVPNARLEAWAERELCPTDAVVLEMTTNTWKVVDTLEPFAYSVTVVHPPHVHLITRAQVMTDKKASLILAQLHAAGLLPPIWIPPTEVRYLRALIAQRWKMVRLGTQTKCRLQSVIHKYHLEPPPKSDPYTPQIRTWWESLPLEPLEHFRLQSDSDTVAFAQQQKERLETCLARHAARDERVPLLTQIPGIGFINALTILAAVGEIGRFPSANKLVGYAGLGTKVHDSGITHWRGRITKMGRRDLRRAMVEAVQSAVRHHDYWKAEFQRLCGQTAKKKAKVAIARKFILCPGLQAESQESTRWYDCLTVHSPPSGQVGYRSRIDSHSLGQ

SEQ ID NO: 432191 - protein, 341 aa, unidentified
MEHYAGIDVSLECSSVCVVDGNGKIVREAKVASEPQALIAWFGSLGFGLERIGLEAGPLSQWLFAAMKAAGLAVELLETRHVRKAFEAMPVKSDRNDARGIAQLMRLGWFRPVHCKSMSAQETRSLLTARKLVQSKLHDVENSLRGILRGFGLKVGKTTGQKFAGRIEELVAGHPHLQMIAKALLAVRAVLRTEFAAFEKQTRRMVRSDTQARLLTSVPAVGPIVALTYASAIDDPARFKSSKQAGAHFGLTPKKHQSGETNYTGRISKIGDASVRTALYEAANVMLTKPVKGCSQLKSWAMRIKRRAGMSKAKVALARRLAVIMHRMLADGTPFNAAAAA

SEQ ID NO: 432192 - protein, 399 aa, unidentified
MIHNGLGEIVRPPFEIDIYQSGFDQLQHVIAQAQAEIQAEVVLIGMEPTGHYFENLARQLVAHGRPVTLINSYAVKSNRHQQLMQRQKSDEIDVAAIGDLLQRGQGTPYRPLTGVYLALQQIDRHRLALVRSQTRLKNRIIGHMDRIFPGLVLTNKAAQERYTPLFKTDFWKCQTLQHLIRICPNPHQILAMSPKELAEAFRQHGGRMGPATAARILEQAQKTLLPDPELAAVRSQCLQSDLALLESIETQIAELENMETKLVEQTPYQVWTTLKGLSTVQAASLAAAIGPPENYCHVGQIVRRAGLVPSCHDSGTYQRKGKGGHITKVGDAFLRRALMNATNSLLMHQPVLARYFHKKMRDKEPPVAKVATARKALSILWATLRDGYSSTLIAQESSS

SEQ ID NO: 432193 - protein, 359 aa, unidentified
MKKEQRKQISFKGQRIFIGIDVHLKSWSVTIASEHAVLKRFTQSPSPEALHSFLTREYPDAEYKSVYEAGFCGFWIHERLMELGIDNIVVNPADVPTTTGEKLRKTDAIDSGKLARSLRAGELKGIYIPDKVSLEIRSLTRLRDSVTKDQTRQKNRIKSHLRYLGIEIPQEYCERGRCWNKSFVAWLRSVESACEYGKQTLDQLICQYEDLRKRRLEMIRLLRRLSRTERFSEPLGWLMSVPGIGQLTGMTFMSEIDDISRFKNADQLASYIGMIPMCHSSGEHDGTGDITLRCNSKLRSVLIEAAWVAIRQDAAMTQAYTEYCRRMKPSKAIIKIARRLVNRIYFVMKHKRKYVNNVA

SEQ ID NO: 432194 - protein, 433 aa, unidentified
MLFVGNDWAEDHHDMEIVDEQGRRLARRRLPEGLEGITRLHALIAQFVPEDWAELDPAEAASRVKVGIETERGQWVQALIAAGYEVFAINPMSVARYRERHSTSGAKSDAVDAHVLAEIVRLDRAHHRPVAGDSELAEAIKLVARAHQSLVWDRTRHLLRLRSVLREFFPAALEAFPDLDAADALELLAVAPDPDRAARVSRSRIVAALRRANRRSVEEKAAAIESVLRAPALRQPAQVQAAFAAIVASQVRLITALNVEIAQLGEVVADCFGRHREAETYTSQPGLGVVLGARVLAEFGDDRTRFADAKARKNYAGTSPVTRASGTRRVVLARYARNERLGDAVQQWAFGSLKGSPGARVYYDALRARNIGHQAALRQLANRLFGILHGCLKTGTLYDETPSGPTTTPPPLDIEKPGMSVALFESVGQDTVG

SEQ ID NO: 432195 - protein, 314 aa, unidentified
MICGVDVSKQTLEVRVEQEGPGGSFANSQEGIAQLADFCRAQQVHLVAMEASGGYEKLPFALLWAEQITIVNPRAVRRFAEGMGYLEKTDALDAGVIAHFARTKKSKPCSPASAQEQHLRALVTRLRQLTEVQTAQSNQRLLVTDSTVQELCQQMLTLVKKQIRRLEKAIAQLIGADPLWQQLDASFRTIKGVAGRTVSRLMAEMPEIGTLSHKRISKLAGLAPLAWDSGKAHGKRAVRGGRRPIRDTLFIVAGVVARFNPDFMAFRQRLTLAGKAKKVIRVALAHKLLIRLNAKAREVRQQFSQATVSSAIGA

SEQ ID NO: 432196 - protein, 365 aa, unidentified
MKKTSIVRVNGNMIFKGQKLTIGLDLGDQWSCYCVLDEAGKIILEQKVATTPEAMKKAFAKIPRSLIALETGTHSPWVSRLLTELGYKVIVAHAQKVQLITKSSRKDDRHDARTLARLARIDPELLGPVRHRSAQAQIHLTVIRARAELVRARTALVNAARGLVKSYGQRLPKCGTQQVSRELGAGLPAELREVLEPLLKEIESLNERIQEYEVRVEKIAKESYPHVELLKQVKGVGTQIALTYVLTLDDPHRFPKSREVGCFLGLRPGRRDSGESQPQMRISKEGDRYLRMLVQGAHYILGPFGADSDLRRWGLKLAARGGKSAKKRAVVAVARKLAVLLHRLWVSGEVYEPLRNSQKVMRAVA

SEQ ID NO: 432197 - protein, 411 aa, unidentified
MEVAVITAVGIDVSKSKSTVAVRRPGGEIVLRPFEVHHTNSDLKKLASTLKKLGGDIRIVMEHTSTYWRPIALTLKEAGFFVSVVNAMLLHDFSDNTIRKLKTDRADALKIANYALTFWDTLPPFNNEEETRLLLKMQSRANERITATATALRNGLIALADQTFPGVNIAFDPNTKNANGHEKWVDFFLRYWHKDCVCQYSMEAFTESYRGWCKRKNYKFRTDTAHKIYLLAQEGVATLPRCESTKMLITQACKSLNAVCEAKQSTPLEMQRLAAMLPEYEVVMQVEGAGPITGPALMAEIGDVRRFKNKKALVAFAGIDAPPFQSGAFESKSRHVSKRGSPHLRRTIFIVSNIILTRSNPENAVYCFMDKKRSEGKHYYVYTVAGSAKFLRVYYARVTEFLRSQLSPDAC

SEQ ID NO: 432198 - protein, 330 aa, unidentified
MSFKILKFNCCGLDIHKTWIYACIGITDSNNRTEYKQARFSSFTKGLNELCNWLAKYNCMDVCMESTGKYWIPVFNILEQHNLWVTLSHPKYTKPMKGNKTDRKDAKWICDLYMCGMVKPSFIPPADIRELRDLVRYRYKLTCMITGEKNRAQNCLTVSNLKLDDVFSDVFGKSSRSITEQILQHPGKNFDVAPFLDGRCKTPVEEIQAAVDGAISKEQAVKLRQCLDHIDELNQHISEVEQEILRLSDKYEAALNLIRTVPGFDKNPLTSIQVLSEIGGDMSVFPTAKHLVSWAGCCPRNDKSDRKIKSTRISHAGFYFNQFWCRLQML

SEQ ID NO: 432199 - protein, 342 aa, unidentified
MDHFAGLDISVKETSVCIVDETGKIAREVKVASEPEALLAVLKNPAYHFKRIGLEAGPLSQWLFSALAEAELPVVCVETRHMQAVLKAQINKTDRNDARGIAQMMRVGLYRPVHVKTLRSQKLRMLLTHRKLLQSKAIAIDNDLRGTLRNFGLKVGMVGNAKFEARIKELVENLPDLAVLIEPLLVVRRVLREQIEILHRRLLAIVRDDEVCRRLMTVPGVGPVVALTYRATVDVPARFRKSKAVGAVFGLTCSKYQSGEIDRSGRISRCGDEMMRVMLYEAAQSMLRSKKWSWLKAWAMQIARRRGMKKAIVALARRLAVTMHRIWVDGTDFRWTREVVAA

SEQ ID NO: 432200 - protein, 430 aa, unidentified
MDEVDEQELHVERVAALDLGKAVLEACVRVPHESKPGRRMQEVRTYPTTTAALLQMADWFRCWGVTRVVMESTGDYWKGVYYLLEAEGFECWLVNARDVKNVPGRAKTDKLDVVWLAKVAERGMCRPSLVHPKPIRQLRNLTRYRRSLTRDRSREMQRVEKLLEDAQIKVSSVVSRLFGVTGRLILDALVAGQRDPNVLAQLAKGRLRPKTAQLREALRGFFTDHHAAILAMMLANIDRLSAQIATLDTMIEQAITPFAHQAQQLAQITGAGPIAAQELIAEVGVDMGRFPSAAHLVSWAKFCPQTHESAGKRKNKGRLKGDPWLAATLGNMAAATARTGAGFLGARHRRIARRRGPQKAIVATGNAILTIVYHLLSDPTAQFHDLGADYFTTRIDKNRRARSLAAALEAVTGQKITIRDGQAIIEAQAA

SEQ ID NO: 432201 - protein, 322 aa, unidentified
MITLGIDVSKAKIDCCIFPSGLTGKRKTKRFDNAQSGFVKLVKWLTELDVNLSDTRAVMEATSVYHENLAHFLYDMGLTICIANPARVRAFAKGLSMLNKTDKADSEALVYYANTVKLATWQPEKENVRILKALINRYAVLEEDLQREKNRLEKAQSTQTFPQVLLSINIRIQQLEQEIIRLDETISSHVNGDSELKNDLALLTTIPAVGRKTGLLMLGLLRSHHFEKASQVAAYVGLVPIHFQSGSSVNKRSRLSKAGDSKIRSSLFMPSIVALQYNPHIKALYQRLREKGKPKMLIVSAAMRKLVHLCYGVLKHQTAYQI

SEQ ID NO: 432202 - protein, 344 aa, unidentified
MRIVGVTGGVDTHADVHVAAAIDHNGGLLGVESFPADRAGYEELLGWLVGFGPVTRVGVEGTGSWGVGLSRFLADQEIVVVEVDRPNRQKRRKVGKSDPTDAVAAARAALSGEASVTPKGRNGPVEQMRVLMVARRSARQQRIQSLNQLRHLVFTAPEEIRVRFKDRYKTSLVSEAANMRPNQGSDPVIYTTYLMIRNLARRIRGLNNEMADIDRMLTDLLKQTAPGLFELHGAGTDTAASLLVTAGDNPDRLGSEGSWAHLCGVTPLPANSGKVTTRFRLNRGGDRQANAALYRIVLTRMAHDPPTRAYVARRRAEGLNTAEIMRCLKRYVARQTYKHLPQTT

SEQ ID NO: 432203 - protein, 320 aa, unidentified
MENIAQWVGIDVSKATLDVYIRPLGKAMIVANTESEISNLVELLLSYSLNLIVLEATGGLETELVIQLQAALLPVALINPRQGRDFAKATGKLAKTDAIDAQILAHFGEAMKPQVLAIQSEMARQLSELISRRRQLVEMQTAEKNRRSRTRGQALADIEAHIEYLEEHLKQLNQKIAELTQNNLQWIDKVNLLKSTPGIGQVISTTLVSDLPELGQLTAKQISRLVGVAPINHDSGQHKGKRMINGGRAHVRAILYMGAVVAMRHNPVIKAFYERLVERGKSKKLALTACVHKMLVILNAMVRDNLPWRVTDNLQPIANA

SEQ ID NO: 432204 - protein, 338 aa, unidentified
MKHYGGIDLHSNSNYLGIMDEDDRKVLQKKLPNELCEVLKVLKPYKKKLEGIVVESTFNWYWLVDGLMENGYKVHLANPSAIKQYEGLKHSDDSRDAFHLAHLLRLDILPEGYIYPKEGRPVRDLLRKRSQLVRQRTMNILSFKNLVSRNLGKQISSNEIKRLKEEDVENLFQEEYLIIAGKANIATIRFLTERIKEIEKAVLKKAKLKDEYKNLLTAPGVGTILALTIMLETGDIKRFSEVGNYVSYCRCVRSSRISNGKIKGQGNRKNGNKYLSWAYVEAANKAVSDYAYVRRYYQRKSAKTNKVVAIKAVAHKIARACYYMIRNQEVFNPKKAFG

SEQ ID NO: 432205 - protein, 410 aa, unidentified
MIEAILERCAGIDVGKKFVVVCVMTGAARDEPHTQIKKFGTIVSELQRLGEWLVAEGCTHAVMESTGSYWKPVFNLLEAHVRVILANAADVQNRRGHKTDPNDSRWLAHLLRHGMIRPSFIPPLAIRELRDLTRRRRQLIGENSRERNRVQKVLEDANIKLGDVLSDVFCVSGRLMLAALLDGQMIAEQIADLAKKKAREKIPQITASVADHRLSDHQRFLIRHALRHLEFLDEEVEALNREIRRRMEDPSLAEAFHLLQGIPGIKEESAASILAEIGADMEQFPTAAQLSSWAGLCPANHESAGVKKSVRTNRGNVWLKTTLTQSAWAATNRKGSRLQSRYHALKARCGNKRAIVALGHTLLKTIHAVLSAKMPYREDAPIAQDDRNVERAQHHIRCLKKLGYNTFAVE

SEQ ID NO: 432206 - protein, 369 aa, unidentified
MEERIKFFVGLDVHADSIEVAVAEAGRQPARCVGRIAHDVAKLLKLLKPYGDSQYVHVVYEAGPTGYGLQRALAKRGYRCQVIAPSLVPKRAGDRVKTDRRDGLRLAELSRAGELRAVWVPDPADEAIRDVARAREDAVKARMQARQQLKAFLLRHELRYPQRTSWTQTFYRWLATLSFQSDGAQTAFTEYWQAVTAADERVGRLSAALVRSIEDWRFEPVVKALLALRGIDHISAIGLVAEIGDLSRFAHPRQLMAYLGLVPSEHSSGERVVRGSITKTGNTHARRLLTEAAWSYRFRARIGYGAQRRAEGLPQVIRDLGWKAQLRLSGRFARLQARGVHTNKVCVAVARELAGFVWAIGRQAQLEQH

SEQ ID NO: 432207 - protein, 354 aa, unidentified
MSHLELTVGIDLGDRHSHLRLLDTESGEVIEQSRILTNPKAFEKRFRGWQRLRVAIEASTHSPWVSRLLEECGHDVLVANSRKLRLIYAEGRKTDELDAEKLARLARIDPKLLAPLKHRGEASQAHLALIHSREALVGTRTKLVNHVRTTVKSLGYRLPACSTRAFHRRVAKHLPEPLRPALGPVLETIASLSAQIREYDAKLEAVAKELYPETRLLRQVNGVGPLTALAFILTIEDPSRFEVSRTVGAYLGLVPSKDQSGGCDPQQHISKRGNEMLRKLLVSCAHYVLGPFGQDSDLRRHGLKIGGRGGKNAKRRAVVAVARKLSVLLHRLWVTGEAYEPLFNANRFGGGQAT

SEQ ID NO: 432208 - protein, 350 aa, unidentified
MEYIAFDSHKRYTFASVSEHTGNVLSSGRINHSRGAITEFLSAWKPGTEVAVETIGNWYWIVDEIEAAGMVPRLVHARRAKLMLGSVNKTDKLDCFGLNRLQRTGTLPTVWIPPGEIRDLRDLPRTRMVLTRQRGRLKNRVHATLAKYGITTEGATDAFGKRGRQELETKLPLLPPHSRFCVERLLEQLDEVQAQIELLEDRMKETFRTSQELELLQTLPGVGFILAVVILLEIGEVSRFPAASRLASYSGTTPRVHASGDKIRYGRMRQDVNRYLKWAFGEAANVICLNHRRSAVRHVSRLYLRIRQRKGHQKAVGAVARHLSEATYWILKKGEPYREPRWHTVSSTKG

SEQ ID NO: 432209 - protein, 467 aa, unidentified
MKHDQQRARTGKKTRVSSSLLERIQPDAAGIDCGQNSHFVAVPPDRDPEPVREFRTFTAELYRLADWLVQCRVKTVAMESTGVYWIPLYEILEERGFDVLLVNARDVHNVRGRKSDVSDCEWLRELHSVGLLRASFRPAAAIVPLRSYLRQRATLVEEAATRIQRMQKALTEMNLKLHTVLTDLTGQTGFKIVRSILNGERDAERLAAHRDHRCHASHAEIVAALTGNYRAEHLFALRQNFAAYEFLLQQITECDAAIEKQLSELAAQQPPPSTALLAPRRKTSSKHQPHFDIRSPLQRITGGADLSQIDSIGPQAALQIVAEIGTDMRRWPTEKHFTSWLALAPNNKISGGRLLSSRTPPSANRAAVILRRCAMSLGRTSTALGAFFRRLAARVGKAKAITATARKLAVLVYRVLSGDLVYNDPGATAYHQLNRARELKSLRKRAKLLGFELVNHSTGEVLLHPVS

SEQ ID NO: 432210 - protein, 339 aa, unidentified
MKLYCGIDLHGNNNVISIIDEKDGVMFEKRMANELPMVRQALKPYQDELVGIVVESTYNWYWLVDGLMDDGYKLHLANPAAIQQYDGLKFSDDKSDARWLAHMLRLGILPEGYIYPKANRQVRDLLRKRSQLVRYRVSNLLSVSNLIARNQGLTVKSDHLLQLKEEDISALMEEDNLALAANANLAVLHCVNEQIKAIEKVVKDKTKLRPEFQMLKTVPGIGDILALNIALETGDIGRFPTVGDFSSYCRTVKSERISNGKKKGKGNAKSGNKYLAWAFIEAANFAVRYNPSARKFYQRKSAKRKAVVARKALANKLARACYYIMRDRVPFNNERLFTT

SEQ ID NO: 432211 - protein, 327 aa, unidentified
MNIKRIGLDTSKAVFTLHGVDQDEKIVLRRNVRRAELETFFAKLPPTLVALEACGRSHHWGRRLAALGHTVRLIPPQYVKPFVRRGKNDRNDAEAICEAASRPGMPSVPVKAAEQQADAIVLSARELLVRQRTQLVNAVRGHAAEFGIVAAKNISHLPALLEAIAVEATVPDAAKAMLAFLGIQVAQLDEQIAELERRMKQQHKANPISQMLAEVPGIGPIGALSLTLTIDPGRFQSGRHFAAWLGLTPKEHLTGGRQRLGGISRAGNERLRQLLVVGAMAVIRYAKPGSKTASAWLLALLERKPRKLAAVALANNVALYEIPGRRF

SEQ ID NO: 432212 - protein, 415 aa, unidentified
MGYKVAGIDIHKKVLMVVVMLIQAGGLVEKIERRRFGTTTPELEKLAAWLQALGVQEAVMESTAQYWKPVWGALEGKIPTLNLAQAFSNRARRGRKDDFRDAERLVRRLVAGELVLSFVPDPEQRNLRTMTRMQVHLTYDRGRLHNQVECLLEEMRIKLSSVLSDLFGVTGRHILGAMVKGETDPQKLAAWAGNRLQCTAKELVAALTGHVQPMHQRLLGLYLERLQLIDQQIDELQHMIAEALQSEQEAVQRLAEVPGFGADSAQQMIAEVGPQAATFPSAGEMSSWVGTCPGQNQSAEENHSSRSAKGNRYARRVLTEAANAAVKTKGSHWQVVFRRLLPRLGYQQAAWAVAHRLCRVVWKILHDKVRYVEQGVNRDPKARAHRARTLARALRQLGYNVELTPLTPAPAPTSP

SEQ ID NO: 432213 - protein, 352 aa, unidentified
MDDPILAIDLGKFNSVCCWYEPASKAATFRSARTTRAELERALTQQSVACVVIEACSPAGWISDACDELGLRCLVANTTGAAWQWKNVKRKTDRDDALKLARLAAIGELATVALPPRHIRQWKSLIGLRKRLVGERGRGQNRIRGLFVGQGLAAPVGNKAWTEVGLYGLDALAKPLTECRPEEFWRGELTLLLARHRFLDGQIHAAESALDQWAKSSPAVQLLLSVPGVGVRTAEVIATHLHERRRFKNAEEVSAYAGLVPRQYQSGICDRRGRITKRGPKLLRAAMVECAWCSLRYNRWALATWRRLTGNGLSKKKAVIALARKLLIRCWALLKSGQPWRNPLPARTPLAG

SEQ ID NO: 432214 - protein, 420 aa, unidentified
MKAYNINDFAALIGIDWADKKHDVCEHQVHNKKHHYSIIKSTPEALYDWAMSLKKRYPNQKIAVACELKKGPLIYTLTKYNHLVLFTINPSAVANFRKAFTPSGAKDDPTDALLQVEILTLHMDKSSIIEPESAAIRSLAQLVEYRRSLVQDSVDLSNKITATLKNYYPQALEWFKEKDTYIFCDFISKWPSLAKVKRVKKQTLLDFFNSHNSHYVHVNEARISSIKSAMPLTEDSGVIEPNQMLVEVLIKQFKVLLKGIEMLDKAIKLAYKAQHDKVIFDSLPGAGPQLSPRLLVAFGSNRDRYDDASELQKYAGIAPVIERSGKKMWTHWRYSCPTFLRQTFVEWAGFSIRYAFWAKAYYEQQKSKGKPHNSIIRSLAFKWIRIVFRCWKTNTPYDESTYLAALKRRGSPLLKFAINS

SEQ ID NO: 432215 - protein, 370 aa, unidentified
MKRKILYVGLDVHKNTTDVAIATDRSNGKVRSYGKIASSLDALNKLIKKLQVDDKQLRFVYEAGPCGYQIYRHLDTKGIACSVVAPSMIPRRSGDRIKTDRRDAINLVRLFRAGELTSIYVPATEDEAIRDLLRCRDDMKRFERKARQRLLSFLLRHGHQYSGKKNWTQGFYNWLATVKFSHSAQQVTLQEYIEVTKECSERIKRITEQIQIHVDEWSRAPFVKAYQALRGVSHIVAATVVSEIGDMRRFPTPKQLMAYLGLIPSEHSSGKSVRRGPITKTGNSHVRQALIEAAWTYKMPARISNILLKRQQGLPKSVRDISWKAQTRLCARYRRLFARGKSKQTVVTAIARELSAFIWAIDKEIQLTQA

SEQ ID NO: 432216 - protein, 312 aa, unidentified
MSEFIGIDVSKAQLDVHAHVSAVGFSHANDEAGLEQLIKHLREMDVQLVVLEASGGYERLAAASLTQSGFQLAVVNPRQVRAFAIACGVLAKTDRVDARVLAHFAAAIRPAVRAIADEQRQLLDELLGRRRQLVGMLVMEKNRLLQARDKRVRRDIKTLVEILEKRIAGCDGELQQLIQTSPLWRAQEDLLRSFNGIGPVNARTLLIELPELGKLSRKKIASLVGVAPIPDESGTRRGPRFIRGGRAQVRTALYMAAVSAIRTNACIRTFYLRLKAAGKPGKVALTACMRKMLTILNAMVRNQTRWQEPVSG

SEQ ID NO: 432217 - protein, 354 aa, unidentified
MNTTQNSTKSKIVKVIGVDLAKDHCDVIGYDENGKICLRLDGCSYATLREILSNLPQAVVLMEACKGSMFHARSIADLGHEVRLVKGADVKALRNINHKNDLRDAAYIAKLYFVPGTTYVYIKSQQQQSLQFLQNEYKSLQELRIQAGNQIHAGLEEFGCPVRKSSKFIKTRMVAHLEKHAELIPEDVMASFKRRREIWLNLLQQEEEAKRRLEQVAATDANAKRIMTVPCVGPQTAVGLLVHVGVDFGRFKNSRQFAASLGLVPKQNSTGGNNTLNHITKCGPKRLRSNLVQCAQLVLMYAEKWKGNFGDWVRKMRDSGKKHGVIVCAIAAKLARIIYRLMKDKVDYTSVLSC

SEQ ID NO: 432218 - protein, 391 aa, unidentified
MTKRKPETVNDLSRCLDPLDIDATLIAVIEMSQSSWLVGGLVPGVERQPLKKLAIDEHALLSLLNRWRAEAEKNGHRITRIAVAFEAGYDGFWLARWLAAQGIEAHVIHASSVAVTREHRRAKTDRLDTELLKRSFLGWLRGERGHCKMVAVPTLAEEDAKRPSRERETLVGEATRIIARVKAAFVRLGIRGFNPKLKAAATRLETLRTPEDEPIPPNTLAALKRDLERHQIVKKQIRELEQTRLDRLEQAPAKGPHAMVLLLARVIGIGVETADMLVQEVLSRNMRDRRAVGRYAGLTGAPDESGTKRREKGLARSGNARVRRGMIQLSWRFLRFQEDSALARWYRQRTTDAPSMRKTLIVALARKLLIALWQFARDGVVPEGVRLRPAA

SEQ ID NO: 432219 - protein, 319 aa, unidentified
MAQNDLAVVGIDVAKDKVDLCIRALALRQTCPNTAQGRRKLVALLRRHQVGKAVMEASGGYEREWRKVLHDAGIEVRIVDPKRVRHFAQSAGRLAKNDTIDAEMIAWFAETFGEMPSQTHDAAQEELAALVKARLGLVELKIRLQSQSAHTAPGPVQKAQARVLKSLAAEIEKLELAIATKVKATPHLAERAEIIESVPGFAETTSAILVAGMPELGQVSDKIAAALVGIAPYDDDSGKRRGERHIKGGRRWVRNAIYMPCLGAATQNNPVTKAFYRRLIAKGKEPKVALVACMRKLICILNVMIARRQKWDTARYAPA

SEQ ID NO: 432220 - protein, 487 aa, unidentified
MAKRKQQSTFERLKSGKLNREQRKELIRKIEVEDPRLPVLYQNVAGIDVGNESHMVSVPMDRDERPIREFGSWTQALQELVEWLRACDIVWVVMQSTGVYWIALYDVLERAGFQVCLTNARDTKNLPGRKSDVQEAQWLRKLFSYGLLRNSFRPPEEIRQLRSVWRLRDRHVKDAAEEIQHMQKALTQMNIQLANAISDVSGVTGQAIIRAILGGERDPYKLADLRDYRVQASREEIARSLEGTWREEDLFELQDAVDRYDFCQQQMRRCDGKLKALLEKIPSRPAMPGKAEGRAAENEAPKKRRGQPDRGPAARKNQPTGFDLQAELKRICGVDLTRIDGVGVMTVQTFVSEVGPDMSAFQSEGHLVSFLGLAPNRQVSGGKLIRHERRRNKSRVASALRMAASTLQNSDSYLGARFRHLRARLGPGKAIKAMAAYLARLIYRMLTRGEEWVDRGAADFEKRHRMRQEQTVRRLAKSLGFDLKPAA

SEQ ID NO: 432221 - protein, 480 aa, unidentified
MNIKARRTKKQVNVENQAINLLSKEELNKKIEVVEKELRSYTWRELETNGKFAKNDKLSFITDDMLIAGCDIGSETHYIRAIDVRGRELSSGAFEFSNTSEGFANARAWVLALAAKNDKKQIVLGLEPTGHYWFALAAWMISNGISVVQVNPYAVKQSKEIEDNSQLKDDRKDPKLIANLVKDGNYGMPYLPEKVYADMRRLSMFRDQLTEDRIRNINRLHRELKIYFPEYMDAFGKIDGAFTLEVLKVSAIPTDITVLGAEGMKNIWHNAKLRGRGYSRANEIVSYAEKSVGLTDGTDAGREAVKWYAEQILRLDEQLAEIERVLHEKCREIPYAENILAINGVGENILAGILAEMGDISRFDDVKEIQKLSGMGLVACSSGKHKGQTKISHRGRKRLRYWLFQAAKSAVSHADEFKQLHEYYTTRINNPLKKMQSLVVIACKILRVIYTILKTGTTYDPQKLLKDIKHPTASQAPMAA

SEQ ID NO: 432222 - protein, 355 aa, unidentified
MKDVSGVWNGQTIGIDLGDKQSHMCVLDEAGTEIELSLIATTRRALTSRFHGLARARVVIETGTHTNWVGEVLAECGHEVVVANARRVRAISTNDRKDDRADARLLARLGRVDTNLLFPITPRDREHRCDLSLVRTRAALVAARTELINHVRGTLKSAGHRLPSCSSESFHKRTLPDELASILRPVCCVIGELTDKIGNLDERIEALCELKYPQTKLLRQVTGVGPITSLCFLLTVGDVRRFKSPRAIGSYLGLTPRRHSSGESAPELRITKAGDTMLRTLLVQGAHHVLGPRRPDSDLRRFGTRLAGRGGKNAKKKAVVATARKLAQVLFALLRTGEVYEPLRNHPGAQLSESA

SEQ ID NO: 432223 - protein, 410 aa, unidentified
MEVILSCCAGLDVHKDSVEACVRRTSAGGKVEHEVRHWGTTTRELVEMSDWLSSLRVTHVAMESTGVYWKPIFNILEEHFEILLANAHHLKNVPGRKTDIRDCQWIAQLLQHGLLKGSFIPPRPQRELRDLTRQRTQLVDEASRISNRVQKVLEDANVKLGSVASNVVGASGRLMLEAIVSGQDDPAQLADLAKRRLRAKIPQLEQALYGKLTEHHRWMLGLLLDQLKSTEQFIARLDERIAELTRPQQPVLEKLDAIPGVDRRVAEVLLAEIGPDVTPFPTDAHLASWAGICPGNNESAGKKRSGKTTKGSRWLRQALVQAAWAASHKKNSYFQAHARNLMHRRGRKRGLVAVAHSLLTVIYHMLKDGTVYRDLGPQFLDRLRATHLIRFHVRRLQHLGMEVSVTPAEA

SEQ ID NO: 432224 - protein, 347 aa, unidentified
MESTVNLPVVGMDIAKNVFQLHWVDAPTGQIKRRTLKRDRVLTFFANREVSLIAMEACGGAHHWARTLQEQGHQVKLLPAGQVRPFVPRDKTDATDAQGIWVAAQQRHIHAVAVKSVSQQAALSLHRLRHQLMKVRTMQTNLLRSQLLEFGLTLPVGYRPLLAQIDQALVHAQAQLPDYYIVTLQEQVRRILDLQADMDAIEQRIIQQAKDNAATQAIMAIPGVGPLSATAVVASMAQPESFSSARQFAAWLGLTPRQTGTGGKVRQLGISKRGDRYLRTLLMHGARAVIARSTPTSWIARLLARRPYCVVVAALANKLARTIWAVLVKGKPFDPAKWNPETAALVV

SEQ ID NO: 432225 - protein, 424 aa, unidentified
MNCNQNFKISQVTEGTLVLGIDVGSNTHYARAFDWSGLELSKVFKFKNSFEGFQSFVLWVNDLCCKYNKSKVIAGLEPTGHYWFSLGELLKENNITIAIVNPYHVKQSKELDDNLQTKNDSKDPKVIAKLVIDGRYSFPYIPEGIYGELRVADKLKNDITQQIISIKNKIHRWLSIYFPEYENIYSSIDSKSGFLLLKETPLPKDIVELGSEGIVERWKQTKLGAVGLDKAKKLEEAAKKSIGCKNITSSARFEIKLLIEDYEYKQNQLNSITEELNKLCEKIPMIKEIAEIKGIGIATAISFVAEVGDIRRFKSAKQVQKYAGLALKENSSGKHKGLTRISKRGRKKLRTILFRATIPLIGFNKEFSSIYNYYIERKDNPLKKKQALTAICCKMIRIFFTILSKGIKYDETKMLHDIKRPVAA

SEQ ID NO: 432226 - protein, 357 aa, unidentified
MNHDATTTAGLDLGDSYSQVCLVDDTGEVIEQGRVRTTEAGLRHYFGKCSAMRVVLEVGTHSPWSSRLLEELGHQVLVANARKVRLIYGNDRKNDRLDAEALARLGRLDPTLLSAIRHRGVGTQADLEVIRARAVLVRSRTQLICHVRGAVKSMGQRLPGCSSDSFGKQIAEVPENLRDALQPLFACIEQFTAQIHHCDRQVEELARTRYPETEPLRTIPGVGPLTAVAYVTTLEDPQRFACSRQVGAYLGLAAGQKQSGGRDPQRRITKAGDPYLRQLLVGSAHYIMGPFGPDSALRRWGLSLSTRGGKNAKKRAAVAVARKLAVLMHRLWISSQVYTPFPGGGGDVPSPLTATTG

SEQ ID NO: 432227 - protein, 406 aa, unidentified
MRVVHERCAGLDVHKSSVVACALLAEGKQLRTFGTLTWQLEQLAEWLHSLDVQVVAMESSGVYWKPVFNILEVAGFELLVVNARHIKAVPGRKTDVKDAEWLADLLRHGLLKPSFIPSREERELRELTRYRRTLIEERARQVQRLQKVLEGANIKLEDVISNVVGLNGRRFLSALVAGEYDPEAVAATANYGLQRKRELLAQALHGTLGSHQRFLLDQLLSHIDFLEQRITALDREVKQRSHPFEAAIAHLDQIPGVGTRAAEEILAEIGIDMNRFPSHRHLASWAKVCPGNNESAGKRRSGYAGKGNRWLRSILVECAWCATRKKDSYFKAQYHRLAARRGRKRALLAVGHSLLTVIYHLLRDGVLYQDLGPNYFDQRDRSLVARQAIRRLERLGYRVSLSEGAA

SEQ ID NO: 432228 - protein, 346 aa, unidentified
MHIVGCDFHPSWQQVSFFDSETGEIAGRKLVNGTGEAERFYRSLPSPVLVGMEATGNSSWFVRLLEQLGHEVWIGDAAQIRASYVRKQKTDKRDASHLLKLLMEGRFPRLWTPSWEQRDGRQLLIHRHKLVEIRSRVKNGLQHLMLNQGVQKKHRLWSEAGQRALCELPLEGWARCRREDLLELLAKLDEQIGELDQAVAKTAQGDKVARVLMTQPGVGPITALAFVLTIGDATRFRRGKQVASYLGLIPRERSSGGRQRLGAISKQGNRYMRMLLVEAAHIATRYDEGFRKQYLHRCHRMDKNIAKVAAARKLAVRLFWMMRTHTAYPEIVRIESSPRVPLVGAS

SEQ ID NO: 432229 - protein, 386 aa, unidentified
MHEPKDDLSRSLVTLDQHSTLIAVVELSLTTWLVGGMVPGFERDPLKKLVPDEEALLKLLHRWRDEAVKAGRKITRMVVAFEAGRDGFWLARWLRAREIEAYVIHPTSIAVSREHRRAKTDRLDIALLKRSLLGWLRGEKKHCSMAAIPTLEQEDAKRPNREREQLVGKRTGVVNRMKAALVRLGIRGFNPKLRKAPQQLADLRTPEGGSIPPNTLAELQREMAHLRFISEQIKQIEGARLAQLKQAPLHGSSAKVVELVQVNGIGIETADMLANEVFSRDLRDQRAVARYAGLTGSPDESGRRRREKGLAKAGNARVRRGMIQLAWRFLNHQKESALAQWYQASVAAGKKRKTMIVALARKLLIALWRFVTTGEVPQGVALRTAS

SEQ ID NO: 432230 - protein, 350 aa, unidentified
MFIIGCDLHTRYQQIAMLDTVTGEVVTRRLEHENGEARAFYASLAKPALVGIEATGCTQWFERMLAELGHELWVGDPAEIRARAVRRQKTDTRDAEHMLDLLASNRFPRIWIPSLQERDARQLLKHRDKLVRMRTSVKNQLHYLAMSQGVCRKQKLWTERGRRELEGLPLGTWASRRRQELLELLDRLEPRIEELDEAVKVEAEARPEVLRLMRQKGVGPVVGLAFVLTLGPVERFPRSKQVVSYLGLNPREASSGGHQRLGSISKQGNEMLRWLLVEAGQSASQADPELRRKYQRLKLRRGTKVAKVALARILAVRLYWALREASPHRSPVRMPGSPAQTLVDASPSRL

SEQ ID NO: 432231 - protein, 423 aa, unidentified
MSQNQSEIQYAAFLAIDWADQKHVWSLQEANSSTRLRGEVDHMPEAVETWVAQMSQRFPGRPIAVAVEQSRGALVFLLSKYEQLHIFPVPPAMTANLRKAFYSSGAKNDPSDADLLLDLLQRHREKLRRLSPDTEATRRIQNLVEERRKLVDEKTAQSNRLEAHLKIYFPQIPRWFGDVDIPLVCALLERWPTLEALQKARPDTLRSFFRKQHSRKEELIESRIKAIGEAMPALKDRAVVEAKVAVVKVLVQLIQVLHEGIEGLNRQIQEAAEAHPDFFIFDSLPGAGAVMAPRLLAAFGSQRERYQNAAEVQIFSGIAPVSESSGKSSWVHFRFACSKFLRQSFHEWAALSITQSQWARAYYELQRRRGKKHHAAVRALAFKWIRIIYRCWKEQVAYDENVYLAALAKHNSPLVAATNAVAL

SEQ ID NO: 432232 - protein, 447 aa, unidentified
MELLYERCAGLDVHKKNVKVCLKTPGSGGRQNKEIRTYETKTVDLLEMRDWLKEKGCTHLAMESTGVYWKPIYNLLEGDFEILVVNAHHLKTVPGRKTDVKDSEWIADLLQHGLLKASFIPSAPQRELRELTRSRTRLVEERAREVNRLQKTLEDTNLKLGDVVSDVMGKASQLILHAVVNGETDPRRLASFAVGRVRASQQELERALRGNVTAHHRFMLGEHLKQIETLNAAIGRVSLELARRFTPPDDPGADETAQRASLEPSGATHEEAGRLPSSPEMSWQKAAQLIDEIIGISEEAAQGILAEIGIEMEQFPSAQHLASWAGVCPGNHESAGKRLSGKARKGNPWLRRLLVQAASAAGRSKNTYLAAQYHRIASRRGAKKAALAVAHSILVIIYHILRDQSSYQDLGGNYFDERDPQAVQKRLVKRLERMGYQVELQSMAQAG

SEQ ID NO: 432233 - protein, 423 aa, unidentified
MKSLRRQNFTAYVGLDWADSKHDICLLEAGSEQREFACVAHQVECIDEWAKSLQQRFGGPIAVALELAKGPIVYALQKYDFLVLFPINPLTLAKYREAFRPSRAKDDPSDAELALDLLVRHPERFAPLQPQSVGMRTLISLTERRRELINDKTRVTNRLTNTLKQYYPQALEWFDQHDTVMFCDFLSRWPTPLQAKRAHRASIKAFHHAHNAHRPKLIAERLAAIKAAVPLTQDPGVVVPCRLHAMVLVEQLRLALQAIEQFDRHIAELAPTLPDYRLFEGLPGAGPHLAPRLLVAFGEDRERFQRAEELQKYSGIAPVTERSGKKNWVHWRWQCPTFLRQTFVEWAGQTINKSFWAGAYYNQQRAKGSTYQAAVRALAFKWIRILYRCWKSRIPYDESKYLKALKKRRSSLLNNLVPDPLNA

SEQ ID NO: 432234 - protein, 370 aa, unidentified
MRHSRTLYVGLDVHKDSIAVAYAPEERDAEVVFLGTIGTRQCDIDKLVRQLTSKAKQLVFVYEAGPCGYWLYRYLTKKHLPCWVVAPSLVPKKAGDRVKTDRRDAIQLARLMRSGDLTPVYVPAVEDEAIRDLARAREDAIRDLKAAKNRLKAFLLRQDIRYEGRATWGPAHLRWLAEVVCPTPAQQIVFQEYVRAVSEHQERLQRLEAELREQVHTWRLSPVVQALQAMRGIQFTVAVTLIAELGDLTRFENPRPLMSYLGLTPSESSRGARRRQGSITNAGTTFARRALIEGAWASRYPAKVSRHLQLRLEPLPQAIQHIGWKAQGRLCKRFRHLTARGTHANQVVVAIARELAAFVWAIAREVQMTR

SEQ ID NO: 432235 - protein, 342 aa, unidentified
MEITTIGLDLAKSVFQVHAVDADGKVIVRKALRRAQVLPFFRNTPPCLVGMEACGTSHHWARQLTRLGHEVRLMPPAYVKAYVKRGKTDANDAEAICEAVTRPTMRFVAIKSEQQQAALALHRTRDLLVKQRTQLVNMIRSLLAEFGIQMARGLHHALDLAARVTQGAAPDVPELAARVITGLAGQIGDLQVRLTALEKELLAWHRTNELSQRLSTIPGVGLISATALAASVTDAGRFRSGRQFAASLGLTPLQNSSGGKERMGRISRMGDRYLRRLLVVGMTSLVRRARTRPDAVDPRIAAMLARKPARVVTVATANRTARIAWSIMARGGIYRAPEGVAA

SEQ ID NO: 432236 - protein, 345 aa, unidentified
MKRYIGIDLHTNSFTCCFLQEDGKETIRTWPLQGGGLDKFIEGLREDDEVAIEATGNAAHFCKMVKPHVTRVVVIAPWQFEAIRRSVKKTDKHDARAIALFLSKDMLPEARVKSDAHMQLSSLITTRDQLVKLRVSLLGKVHGMFVRHGLKIKREVLTTKVGFAREIAAHNWTSLEQAELSVIESQLYSLHAGIKQLEKEITAFAKNLQGYENLISIKGIGPLSAAVMLTHIGDIEDFKNTGKLAAYFGIVPKVSNSNETNNSGRIIKRGNKLARTTLVQCTLIAKRYSPYFHSFYENIKARRGTGKAIIATARKLLNTIFHTLKNGWIFQDFTTFTKISTCNQS

SEQ ID NO: 432237 - protein, 393 aa, unidentified
MKPEMSVLGIDLAKRVFHAVGMDERGKIVLRKRLSRHDLMPFLAKLPPVRIGMAACGGAHYWARRFREHGHEVKLMAPQFVKPYVKSNKNDRRDAEAIAEAVTRPTRRFVPIKDVDQQDIQALHRVREWLIGERTALINEVHGLMHAYGIVMPKGVAKFRQAVVEKLESAKDKLTALSQEMCWKLVEEFAALEKQLASDQEKLDALATTHPACQRLMTIPGLGPLTATALVAAVSDASAFKNGRQFAAWLGLVPRQHSTGGKERLLGISKRGDSSLRKLLVHGARTTLRWVGRQTDRRSQWMRHLVERRGKNRTAVAVANKNARIVWALLTSHQDSPLTTGEGQLLRASVASVRMEYGKVTKEEMPKLLMAMVLEKSMEESCRTMPGGSELMT

SEQ ID NO: 432238 - protein, 418 aa, unidentified
MNSDPASIPILRYIGIDIHKHYLVIGGMNSQKEWVLRTRKVRMSRFPEWVQKNINPSDAVVIESTSNAWEIYDLLAPLVAKAVVANPLKVGEISGAKVKTDRLDVERLLTLLIADIVPEVWVPPHHVRDLRSLISHRWRLHKQIAMTKNRLQSFIHRFNLITPEGPLFSEKNRSWWQQQDFSSIVRLQIEQDLLILEHLSNHKEAIHQELARLSNRKPWADDMVFLMQTPGLGIVLSMTVLSAIGDISRFKHAKNLVGYAGLGAGVHDSGQKHQGKGITKRGRKELRWAMVEAAWGAVRSDPHWKSQYEALKNRGKHSNEAIVAIARKMLITVWHLLSKREPRRHSTEEDLAYKMLIWAQRMDENALRGLTRQQFVKYGLLRLGKGFHLTRIVRNGLTRRIAPTDEVIALLPQLNLLE

SEQ ID NO: 432239 - protein, 366 aa, unidentified
MGKYSEVFVGIDTAKSKHAVAIADTGRDGETRYLGEIDSAPATIERVIKKLAGKYEKVRVCYEAGPTGYGLYRQIVTLGHECAVVAPSLIPKKAGDRIKTNRRDAVTLARLFRAGELTAVWVHEAVRDLVRARETAAADVRKKRQQLLSFLLRHGRIYSGSKYWAKAHARWLAAQAFEHPAQQIVFQDAIDAIEDCASRLQRLEEQLHAIIPNWSMAPVVDAYQAMRGVSFMVAVTFVAEIGDVRRFENPSQLMAFLGLVPSERSTGDSVRRAGLTLAGNRRARRALVEGAWTYRYQARVSERLQKRLEGIPKPVRDIAWKAQVRLCGRFRRLTAIGKKRPVIVAAIAREMAAFLWAIGQHIAPAY

SEQ ID NO: 432240 - protein, 351 aa, unidentified
MMIIGVDYHPSFQTIAFLMEETGECGEQELNHSDGQAEKFYRDLKQRGIRVRVGMEATGYSRWFERLLAELGFEVWMGDPAEIKAKRVKKQKFDREDARLLLRLMRENNFPQIWVPDPENRDLRQLLWHRHRLVQMRTRIMNQLQALAMNEGYRWKKKLFSAQGRAQLEKLALAPWASRRRQELLELLDRMNPTIAELTVAVEGEARKRPEAMRLMTHPGVGPLTALAYVLIIGTPTRFERGKQIGTYVGMIPCEDSSARKQRLGHISKQGCSLLRFLLVEAAQAAARNHPDWRRRYIHLAMRRHKSIAKVAMGRRLAVRLYWMWRNGCEYSPSLEFGSYAGQLGIGHGVK

SEQ ID NO: 432241 - protein, 438 aa, unidentified
MSNKVIFNLDEPFISVGIDVGADFSWMSIALPNQQFVGKPFKILHNSIDSLTTAVSKIKEAEELYSLESRIFLEATGIYHYPLFCYLRDKGFNCSVINPIITKNSTNINIRKVHNDRFDSKKAALVGLKPDLKVSLMPSDLALNCRNLCREYYDLMDNRSAYVNKLQGELRMAFPQYLGIFSKVTINTSLTLLETYTSPSAFLEADKQEIIDIIKSTARFGLTYAQNKYNAIIQAATDANQFGYIIDSNIKRIRLYISFIRKYDEEINSILESLHELVDADEDTDFVKQIHLIKTFKGAGFLSAVSIMGEIGDFSAFSKPKQLFAYFGLDPAVKQSGKFEGTKVQMSKRGSAIARRVIHTLTLQSISISRNGEAKNPVLREYYLKKCDSKPKLVAMGAVSHKVCNMIFAILRDNKPFKIIAPQEHIKQYNAAKCDMTA

SEQ ID NO: 432242 - protein, 347 aa, unidentified
MHIAVLGIDLGKNSCSVAGLDTSGRVILRRRLHRDSVVKLASRLPACVIAMEACCGAHHLGRLLQACGHEIRLMSPEYVQPYVKAQKNDERDAEAIAEAATRPTMRFVELKTEQQLDMQSLHRARSRLVGERTALINQLRAVLLERGIAVAQGRYRLQRYLALALDGDGDPLPLNPRIRRLIDDMRAQWSELDRRIAAFDAEFVAAARSDADARRLSTIPGIGAINATALVAAVGNAQSFARARDLAAWLGLVPRQATTGGRPKLLGITKRGNKYMRTLLIHAARAALPSLINTEGSLGNWLRALSTRAHRNTVIVALASKLARIAWAVLRSTATYSATIGGRPATV

SEQ ID NO: 432243 - protein, 360 aa, unidentified
MQKYKISFKGQNIYVGIDVHSKTWEVAVLTESGHLRRYSQESSAKVLFDFLRKHYPDGNYKAVYESGFSGFSTYYALQEFNIDCVVVHAADVPSTQYENVMKTDRIDAAKLARALKKGEILRPVYIRERNNIDDRTVLRVRKSIQRQLAANKARVKHLLHNNGVKIPMQFLKSKNTYWSRAFIHWLQNDVTLLSSTRVSLDLLIKQVLTMRSTLLEASRELRKLSVSDRYRKNFELLLTIPGIGPHVAMSILTEIYDVKRFSNERKFAHYLGLIPTSHNSGEHMSNGVKTFRGNKHLGPMVIETCWISIRKDIGLGSFYSNQIKRMKPQLAIVKVARKMSNIIYSVLKNETPYVSYKWDN

SEQ ID NO: 432244 - protein, 443 aa, unidentified
MKELPVLDSRAAFCDVGSEHMHVSIAGGLPQVFGTFTSQLHELRDWLLREGVHSIAMEATGVYWLSLYGVLEAVGLEVAMVNGRQTRNLPGRKTDMKDCQWGATLHAHGLLKAGFVPPAHIRKLQDYQRLRTDHIASAASHVQHMQKALERMNIKLHNVISSLMGASGLAIVHAILDGERDPAKLLELCHSTIRHKKAKDVIEALRGTWQPEHLFALRQALQSWEHYQRQIAECDQQIQLLLEEITFNDTQGDGIGEKPKATTGKRPSANAPQISGLHSMLIDLCQGKDLSILPAHTDYSVLQIISEVGTDLSKWPTEKHFTAWLGLAPGTSQSGKRKSNVKHSRSKVGRYFCVMARSLARNKDMALGGFYRRLAARRGGLIANIALARKLAALFWRVMVKGTAFVEDGLAAYEAKFLEGKKRSLRRLARELGQTVSSIPLTV

SEQ ID NO: 432245 - protein, 348 aa, unidentified
MDKITAVGLDLAKQIIQVHAIDAAGRVVLCKAVRRERLLALLAQLPCCVVGMEAGSGAHHWARELKKLGHEPRIMAAEFVRPFRKSLAAKNDANDAEAICTAVVQPNMRFVSIKSVEQQALLSLHRVRQGLIEERTASINRLRGVLAEFGVVLPQSAAVLQRALPALLADDGRLPPLVQRSLQALLEHRRDLDARIAGFDRAIAQHARSSASAQRLGALSGVGPLTASAVVATVGNAQDYRNGRQFAAWLGLVPRQYSSGGKRKLGSITRRGDAYLRALLIQGARSTLQAALRRAPARHDRLSAWVVQLAQRVGYHKTLVAIANKHARIIWALLAREQSLDLARASTP

SEQ ID NO: 432246 - protein, 344 aa, unidentified
MEQLIRIGMDTSKSVFQLHGVDASERPVLVRKLQRRQVVPFFAKLPPVRIGLEACGGAHHLARTLSALGHEPMLMAAQHVKPYVRRGKHDAADAEANCEAMSRPRTRFVAIKSVEQQAAQMLFGVREHLVRRRTQLSNAIRGHAAEFGLVAPKGLAHVAPLLARVAGDEAVPLLARELFELLGEEYRATSRRLAEIEKKLVVHYRQDETAQRLAAIPGLGPIGSMLLSVKVGDARAFASGRDFAAWLGLTPKNHSTAGKNRLGVITRAGDEMLRQLLVVGATAWLKQVRRNPAKASPWLAGLIARKPPKLAAVALANKMARIAWKMMVTGEAYRCDLAGSVAPG

SEQ ID NO: 432247 - protein, 429 aa, unidentified
MQNSLQEKLMRITPTTIIVGIDVAKEVHWARITDYRGIDLMKPFKVHNGIDGFESLISKLEKQRLKLDCDQVMIGMEPSGHYWRALGWYLKLHESKPVLVGVNPYHTKQAKELDDNSQTKSDPKDAQVIAHLIRDGRYFDTYLPEREYAELRQLNTERQRIMKQINRANNTLIALLDEFFPEYSMVWGNVTCPTSLELLKTYAFPSDVLSAPRERLLADIRSDSNGTEGNKLLGEMIQAASRSVGVKEGLKSVRLRMLNLIDELVYFEKKKLAIEAELEAAMSQLKLGEILQSMLGVGPIISAAFLGEVGDISRFSDWKQVRSLAGLNLVENSSGKHKGQTKVSKRGRPYLRQMLFMAGECGCRCNPEMHGFYRYMRDRKNNPLTTNQAYVATGLKIMRVLFHLAKTGESYDPSKALGAARLQQIASLG

SEQ ID NO: 432248 - protein, 403 aa, unidentified
MNAVGIDVSKGKSMVTILRPFGEIVSSPFEIKHTSSDIHSLIKLIHSIEGESRVVMEHTGRYYEALAHQLSAADLFVSAVNPKLVKDFNNDSLRKIKSDKADSVKIARYALDKWQSLEPYSITDELRAQLKIMNRQFHFYVKQKTAMKNNLIGLIDQTYPNANTYFNSPTRSDGSQKWVDFVSTYWHVDCIRKMSLNAFVEHYQNWCKRKKYAFNKSKAEEIYTTTKELVPVFPKNEITKHIIRQAIDQLNSTSVTVETIRTLMNETASKLPEYSIVMQFKGIGPSLGPQLMAEIGDVTRFTHKGALTAFAGVDPGVNESGSYAQKSVPTSKRGSSHLRKTLFQVMDVLIKTMPQDDPVYQFMDRKRTQGKPYYVYMTAGANKFLRIYYGRVKEYLSVLPNPS

SEQ ID NO: 432249 - protein, 343 aa, unidentified
MGEVSTIGLDIAKSVFQVHGVDGTGAVVMRKRIGRSKVLEFFGGLLPCLVGLEACPSAHYWSRELQALGHTVRLMPPSYVKAYLKRSKNDANDAAAICEAVTRPSMRFVAIKTQDQQTGLMLHRTRQLLVRQRTMLSNAIRGHMAELGIISAKGRNGTAELLQIIANVADDRIPPVARFCLDLLARQYLTLIAEVSSIDKRIHAWHRSCEESRRLEEIPGIGPIVATALVAEIGDWGAFRSGRNLAAWIGLVPKQHSTGGKERLGSITKQGNRYLRWLLVAGAMAVIRYARQHGTKRPWLIRIMDRRPAKVAAVALANKIARIAWAIMVRGERYREPKLLLAA

SEQ ID NO: 432250 - protein, 343 aa, unidentified
MQTVTTIGLDIAKSVFQVHGVDAAGRVVIRRQLKRRHVLTFFQKLPPCLVGIEACASSHHWGRELQVLGHTVRLMPPAYVKPYVKRHKNDATDAEAICEAVTRANMRFVAIKIPEQQSCLILHRTRHLLIRQQTSVINAIRAHLAEFGIVAAVGRNGVEQLLGVVADANDKRLPEVARACLAALGVQLRVLKAQILEFDRMINAWHRSNETSRRLDKAPGIGPVLATALVATVPDPKTFRSGRNFSAWIGLVPLQHSSGGKDRLGHISKQGDRYLRNLFVAGALAVIRYAKIHGTQHRPWLTALLARRPTKIAAIALANKIARMAWAMMVKGEHYKEPVALAA

SEQ ID NO: 432251 - protein, 368 aa, unidentified
MKKNNTCPKSSKGRKARKRSITIGMDLGDKSSHYYVTDSEGELVREGTVATTKKGMKQRFGSLARCRIAIEVGTHSPWVSRLLSSLGHEVIVANARQVKLISSSSRKDDRLDAQTLARLARVDAQLLRPIRHRSEKAQGDLMQVRVRAALVETRTSLVNTARGLAKAMGERIPRCDADQMGVGKMEGLPAELVEALRPLLETVESLTKQIKECDQKLEQLAGRDYPETELLRQVSGVGSLISLTFVLTVEDPSRFRRSRDVGCYVGLRPRRSESGQSRPQLGISKEGDEYLRKLLVQGAHCILSQKSPDTDLKRWGLKLAGKGNKNAKKRALVAVARKLAILLHHLWVNGEVYEPLRNSRSQEQKVVA

SEQ ID NO: 432252 - protein, 417 aa, unidentified
MRAVALDVHRDFCEVAIVEGGELRSAGRIETKPEALELFAQSLDVHDHVALEVTGNAWEIARIIEPHVARVIVVSPSDTGIRQARAKTDRLDARALAKLLWAGSLDAVWMPDERIRAMRRRLARRTQLVRARTRAKNEIHAVLVRCLKGRPPASDLFGVKGRRWLAEQELPIPERETVDAAMRQVEFLDAEIAAVEALIAAEALSWPEVKRLMTVPGVNVIVAATFMAAVGDIARFPDRRKLTGYLGLDPRVRQSGVGPASHGHISKQGSASARHALVEASWSTVRQPGPIAGFYVRIKARRGHSIAIVAAARKLACLFWCLLTRGEDYAFAQPSLTKKKLRRLELQAGAPRFQGGRGVWSTNDGMRTAERELALQAQRAYERTVKDWQQNKGAGTTAGRASSGSSKDQVARQTTSP

SEQ ID NO: 432253 - protein, 373 aa, unidentified
MIECLPEAGCGRSIDLGSNKTVGKRGRHTRISNKARTVDGVYQTRMMQGRAKKEKRPMTEEAVCVGVDVAKNTLEIAVSNSKETQQFKNDHEGITSAVRYIADLEPARIILEATGKYEMPLAVALQASRLPVVIVNPRQVRDFARATGVLAKTDRIDARILTLFGLQVKPEVRLLPDQKAREMGNLLARRRQLIEMLTAEHNRLLQADDSIRPSIEIHIQWLENAVSTINDDLDRQIRSSPSWCEKDNLLKSVPGVGKVVSTTLLIELPELGQLNRRKIAALVGVAPLNHDSGTMRGKRTVWGGRAKLRAVLYMAALVGVRRNPVIAAFYQRLLNAGKAKKVALVACMRKLLTILNAMIRSKTVWQYAALEIK

SEQ ID NO: 432254 - protein, 407 aa, unidentified
MQVLYPRCAGLDIHKDIIVACVRCVSAPEHREVQRFCSTTKGLLALSDWLAVHGCSHVAMEATGVYWKPVWHVLEGSFELVLGNAAHIRNVPGRKTDVNDATWIADLLAHGLIRSSFVPPAAIQELRDLTRTRKQLTREIAQHCLRVQKVLEDANLKLGSVLSDVLGGSGRAILKAIISGENDPVLLAALAQGHARKKTSELREALRGRITSHHRTMLALHLQLIDALEHALTELDAAVGLALTPIRQHVQLLRTIPGVGDLTARVLVAEIGVDMTRFPDSAHLISWAGLCPRNDESAGKRRSTRVRKSGTWLKTALVTAAWAAVRTKNSYLFAQFTRVKARRGSKKAIIAVAASMLTAAWHMLRNGVEYADLGADYFTRHDMQSTVKRLLKRLTDLGYPVQPASPS

SEQ ID NO: 432255 - protein, 440 aa, unidentified
MGAQSNGAALTETRGDPAAAGTHLFVGVDIGRFYHLVAAIPQERMENGSWERAVARRFATSADGFEELVAWLHSFDVSVDDIRVGLEPTGGLYSRTVVAWLVRHGFQVDWLQNWAVHDRRHLLIGKQAKSDALDARLIARLLYERECLGLVGGFLHRTPMAAEGLRMLVRNRFKLLSLHTRHRLQLAALEDVLFPEFKEVFRGSQTKLAARRVLEHFPTPADLAVAPREDIREVIYRQAKAMRLVEAADRLQTLAARSAGLVEGIEEIVRTQRHVLRELNVLDEELRIADAAIAEALESWPPRQRAILDSLPGMSVQRQAVLLSAIGDLGTFRTDRELRKLLGWYPEILESGSSVSKHRLGLSGNRLARRELWLWSMSIVAPRFPANPFKDYYARLRARNLAGHVAIGHVAGKLISVLFYCMRNGEPYDPVRHARDLGFG

SEQ ID NO: 432256 - protein, 312 aa, unidentified
MHELFVGIDISKDKLDVHVRPSGEYITLGTAPAGLHDLVARVQAWGPALIVLEATGGYEVVVAAALASAALPVAVVNPRQIRDFARATGQLAKTDALDAAVIARFAEAVRPPVRPLAPPAAQALGELVTRRRQLLEMLGAERNRQAQARDRQVQRQLGTHVRWLTKALADLDRDINDTLRSSPVWRAPDDLLKSVPAVGPVTAHTLIAQVPELGQLGRRQIAALIGVAPLNRDSGTLRGRRMIGGGRASVRQVLYMAALVGVRYNPRLAAFYSRLTGAGRPKKVALVATMRKLLTILNAIVRDQRPWQPQNA

SEQ ID NO: 432257 - protein, 462 aa, unidentified
MKRKKLASKEEKPRRRRVDWKALEIVHRDAAGIDIGGREHWVAIRPDRDEDPVRRFDCFTADLEQMAKWLVEKGVRSVAMQSTGVYWMPVYEVLEQSGLEVYLVNARHTKNLPGRKSDVQECQWLLKLHTFGLLNNSFQPTDEIRVARTMWRHRSNLVAQASSAIQRMQKALTEMNVQIHNVLSDLSGVSGMSIMKAILKGERDPWTLAALANPSVKASPADIAKSLHGNWREELLLVLRQEVELYQTYQDKIAECDQQLRRHLQSLASKVDLQAQPLGPRPKGKKAPRSNAPKFDLRSELYRITGVDWTQVNGIDVQVAQTVITEVGVDLSSFPSERHFASWLGLCPMNEQSSGRILNRRTPKVVNRATVAFRLAASGLLRSQSYLGAQYRRLRTRLGAPKAITAMARKLACLFYRLLRHGQPYVDKGTQYYESRYREQQIRSLAKRAHKLGLELVQPSAA

SEQ ID NO: 432258 - protein, 380 aa, unidentified
MQTITLYIGLDVHKDSIAIAVAEPGPKGEIRLFGTITNDIDRLEKALRRIRKAHPGAQLEVAYEAGPCGFVIARRLKQLKIPCLVAAPSLIPKQPGSPFKTDKRDARAIARLLRAGELTAVYIPEPTDEAIRDLCRARTDAVDDQRRCRHRLKGFLLRHGYRYQGKANWSQPHMRYLRELVLPHPAMKTILEEYLQGIDAAHERVQRVETSMLALLETWRLKSAVEALMAFRGFQLVAAMITVSELGDIHRFAHPRQLMTYLGLVPTESSSGPHQRQGGISRCGNSHQRWLLTECAEHYALPPKISKELSRRQEGQPKSVRALSWKAQNRLHLRFNRLLARRLQRNKAKVAIARELCGFLWALLRSQDCYRQPATAQTPN

SEQ ID NO: 432259 - protein, 358 aa, unidentified
MRIIGVDLHTRQQTIAMLDMKTGEVVEKTLQYEGENVREFYAALPGPVRVGIEATGSMHWFLNLMEELRIDCQVGHPAKIRTAETRKQKHDRRDAALLLKLLAEDRFPSIWMPSTEQRDLRALLLHRHQWVRMRTIVQNSLQAIALSNGLRRGSSLWSQGGQHTIESLPLAQFAARRRTELQTLHRQLNERIEELHEQVREQALQRPGAQLLMTHPGVGPVTALATEVFLGDTARFGNGKALASYVGMIPSEYSSAGRQRLGALSKQGNSFLRFLWGEAAMHAVRKDPNLKRFYRRKLIQKGLGKARMAAARKLGIRLWIMLRDQIDYEEFCRRGQMRQKNGGAYAGIPESDTGPAEQ

SEQ ID NO: 432260 - protein, 360 aa, unidentified
MGNERTFVGLDVHARSVTGHALDAVTGEVWQRKLCPDPGEVLRWVSGLPGPVKVGYEAGPTGYGLYRCLNDHGTLCVVAAPSKLHRPHGDRVKTDARDAELLAHLLKLGEIVEVNVPSVEQEAARDLVRAREDARSDLMRARHRVSKMLLRQGIVYSGGDTWTKVHDSWLRGQRFDQQSRQLAYDSAYEAMVLTVDRRDRLDRAIDEMAANSSYTPVVRRLGCLRGISTLTGFALAVEIGDWQRFTGATIGAFVGLVPTESSSGQSRSQGSITKTGNTHARRLLVEAAWHHAKPYRVPGKTMRDRWELAPPAARVRGHEGNRRLNQRWQRFNARKKRPAVADVAIARELAGWAWSLAVLE

SEQ ID NO: 432261 - protein, 351 aa, unidentified
MNISHYIGFDVHKKSISYCVKAADGKIVEEGKVRATHDSLRAWAGKRSEAWHGAMEATLFSGWIYDALKPFAAALQMGNPSMMKAIGAAKKKSDKLDARTIADLLRCNLLPACYVAPPEMRDLRRLLRYRNLVVGQAVQMKNRMSGMLLEVGAEYNKRRLHGKQYFNELLDQLEEVPESVKDLLRLSRGALETFAATQRQILDRLQKEPLLAKRVKLLRSISGVGEVTALTWALEICDPRRFPSIADAVSYCGLCAALASSADKAKRGPLSKQRNAHLQTVLIEASKLAPRWNRQLAEVHQRELQRGDRNQATLAVARKLVAYLLAVDKSGQRFEVRTTLPATPTEVAKVA

SEQ ID NO: 432262 - protein, 314 aa, unidentified
MTEKIFIGIDVSKDRLDIAASNGERWGCENREGDFAELIGKLQSWPVDLVVLEASGGYEGAVAGSLAKAALPVVVINPRQVRDFAKACGRLAKTDQIDASTLALFAEKIRPEVRPLKNEHTRELEALLQRRKQLLNMLVAERQRLQIAAPNVRTDIREHIHFLVKRLKDVNGDLDELMRKTELWREREQLFKPVKGIGPQTLRTLCALLPELGQLNRRKIAALVGVAPYNRDSGTLRGKRHCWGGRAEVRCALYMAAVSASRFNPVIRVFYDRLTKAGKAKKLALTACMRKLLTILNAMVRGASSWNETLHVTA

SEQ ID NO: 432263 - protein, 406 aa, unidentified
MRRQARRGPGPSSTLITPDRAGNVVGIDPHKRTLTATVVDPRGGIVASEHFRVSGDGHRALEAWARQFGPIVRVGIEGASAWGRHTAIFLIDRDYDVRDVCPNRTAHHDRARQRGKSDTLDSERIARETLAHPLLPKAFKRAGQDAGPDQHTELLAVWWTARCSLLKRRQHLLTESEALLRELPLELIERLPAAKRVRPRLAALPRVTRRRRFDPPTAARLHILAGYREEIANLDAQDRQITRQLAELVAQSGSTLDQLCGLSTVSVAELLVEVGDPRRFTEGGFGRFNGTAPLAASTAEGPGEPVRHRYNPGGNRRINAILYRMAITQLRCEPRAKRIYANARAEGHTKKEARRIVKRHLSDVVYRRMVRDLAAHPPSQPLLVAQPCAGAAQSRVARQGRAQRAA

SEQ ID NO: 432264 - protein, 313 aa, unidentified
MAQMVTNAGIDVSKQWLDVALWPKRDEVSRFKRDAAGLEELAFWLRERHVVRVGLEASGGYEREVIDALEAQGLEVALLNPLRVRRFAQAKGRLAKNDRVDARTIAQFTAVMIEAPQPSRRRELDSLREHLTFRRQLRAWIDDCTNRLEHLRDKALRRKAEALRVKFRGELAAHDKALAKLTAEHADWNGLAKRLRTVPGVGPVLSQTLIALLPELGQLSRRAIASLVGVAPFDDDSGKRSGKRHIKGGREAVREVLYMAALSARTHNPIIAEFARRLAGKEPKVMLVACMRKLLVILNAMVRDGMDWQVKTA

SEQ ID NO: 432265 - protein, 417 aa, unidentified
MDVVHARAAGIDISKRDAKVCVRIPGKRRGQFTSTVTTWGSTTNEILGLVEFLVKAHVTVVVMEATSDYWKPFYFLMEESLPVMLVNAKHAKNMPGRKTDVSDATWLAQLVAHGLLRASFVPPKPIRELRDLTRARVTLVGDRTRDVQRLEKMLESSGIKLSSVVANITGVSSRLMLTALIQGVRDPAVLAEFAQRRMRSKIPELVEALTGRFTEHHAYLAQLHLDQIDARTLAIESLTARIDLAMKPYESVRDALVTVPGVSTLVADVLIAETGADMAVFPDAGHLASWAGVCPGSNESAGRVKSSKTMAGNKYLKAALGIAALAASHSKTSYLAVRYRRISSRRGPAKAIVALEHTILNSVWKMLTTGEVFEDLGADYFTRLSPERVKARAMQQLQQLGYDVTVVERSGAIMVRS

SEQ ID NO: 432266 - protein, 349 aa, unidentified
MIWIGVDAHKQLHQALALGAEGVQGERTIPNTPAAWAALLEWAQQWPERIWAIEGAWYLGRGLAQYLAERGERVHEVNGRWTARRRRGMRTPGKSDRLDARAVAALLREEAETLPRVFAEDDAAAQVQLWSREHAEITEDKTRVINRLHALLLQCDTQYTDTLPALTPKAALTALAGYIAPGTTAIAHEREAAVRRLAVRLALLDAQERELRHKLERASTARFSPLRRIEGVGPLIACALVAELGRPRSGFGEEQLAAAAGISPLETSSAGAVRHRLNRGGNRRLNMLFHQIVLTQARIYAPAREYLARRKAQGKSTGEARRALKRLIVRRVYRAWKESFDDLVKAVAA

SEQ ID NO: 432267 - protein, 359 aa, unidentified
MQTQSNKIDFKGQNIYVGFDVHLKSWTVTIMTEKLTHKTFSQPPKPEALYHYLAKTFPGGTYYSAYEAGFCGYWIHNRLIELGVNSIVVNPADIPTTGKEKVMKTDPRDSRKIARSLRNGDLKPIHVPSLKTLEERGLTRMRSTLVKDLTRYKNRIKSFLYFHGIEYPEVFSNSKSHWSNRFNQWLEGLEFNNLTTKATLTVLLGQSNSLRGSILQITRQVRELAKTDRYKIQDKLLRSIPGVGITTAMIILTEIESINRFANVDQFCGFIGLIPSTNSSGDNEVIGDITPRGHSILRAAIIESAWTSARLDPALNKSYHDYCRRMEPNKAIIRIARKVSSRIMFVLKNNQPYVFSVVK

SEQ ID NO: 432268 - protein, 330 aa, unidentified
MKQYDHVFGVDISKKTVDITHVVNQQFSHRQFTNDDSGMEQLMEWFKELSPAFDKTLFCMEATGLYCFTLTHFLASHSIDTWIEHSLQIKRATALARGKNDKVDSQRIALYATKNLDRLRLWKPVNATLEKIRHLASLRERLVDTKKRLATPIKEFEDVGNLAMAKLLTKTIKSSLAAIDKDLKNIETKIIDVINEDDNLKLLYKLITSVVGIGFVTAINLIVHTNGFTMLKDARKLACYCGVAPFEYSSGSSIRGRTKVHYMANKKLKCNLHMASLTAVKLDADLKAYYERKVGEGKSKMCVLNAVKNKLLARVIAVVNKQELYVKKVA

SEQ ID NO: 432269 - protein, 340 aa, unidentified
MRIRKVTENTAGVKSFSSYDHFVALDWSVKTMAIGHMSRRDNGPRVFERPTDLKELKEYLRFLKGRVIITLEESGSAHWLYLELLDYADRIVVCDPFHNRLLCHGPKTDKIDAGKLCELLRAGLLKEVFHSDSTLYELRQLVSGYQDVVIAGVRVQNQKEALKLGHRDTGKNATFIKEILDKNILLYRQSKEQYEQRFEDMARRNYLVLFQKEIPGIGTIGAAKIVACVVDAHRFPHVGKYFSYCGLVKHEKFSGGKSYGRRKPRYSRVLKSVYKTAAIAVLRGNNPMREYYDHLLAQGVAEHNARHAVARYIARISYGMLKNGTRYEPYRWKDKAEKVA

SEQ ID NO: 432270 - protein, 359 aa, unidentified
MSQTVFVKKQKEQESPMKNITVLGIDLAKDVFQLHGVNEYGKKVIGKKVNRAELPTLIAKLPTCKIVMEACGSANFWSRKFMSYGHEVRQISPQHVKPFVQGNKNDKNDARAIVIAAQQDDMPTVSIKSIEQQEIQMLHRYRESLVHDRTALVNRIRGYLREMGLFIPKGLSQTRKQVPLFLEDAENELTFGMREIIANCHRKLLDLDQDIEKYTGKIEDFCKQNEVCERLMKLSGVGPMISSIVFATMGSPSHFKNGRHFAAFLGLVPKEHSSGGKQCLMSISKRGDRYIRSLLVHGGRSVVKNAGKKNNYLNHWVQRVHQERGYNKAAVAVANKNARHMWAIMSYGDKYVDHLKLCA

SEQ ID NO: 432271 - protein, 352 aa, unidentified
MKYYIGCDAHKKYSVFTAINESGEISPAKRVEHDRNSFRSFLKTLPPASQIAVESTGNWYWLIDEMEKAGHAPSLVHAAKAKLMMGHINKTDKLDAQGLAILARNGTLPAVWIPPGELRDQRELPRMRMALSQVRTKFKNRIHSTFAKYGITFDEVSDLFGKKGRILIEKSLDELPPETRNSVQEQLWLLDQLEQSINKAEKRIREVIKIDHDMQLLLTLPGVGPILTIVIALEIGIVDRFPTGERLSSYAGKVPRVKSSGGKTYYGKVRPDVNRYLKWAFTEAANAVVLQQHRLPDCHVLRLYWRVRKHKGHAKAITAMGRHLAEATYWMLKKNEPYHEPKVKTLVSYNQG

SEQ ID NO: 432272 - protein, 391 aa, unidentified
MIYAGIDVAKDKHDCFITNSDGEVLFKAFTIPNNLDGFDELYQKIQSVTDDLTKVKVGLEATGHYSYNILGYLLDKGLTTFVINPLHTNLYRKSLSLRKTKTDKVDAHTIATMLMSDVNLKSYSDTSYHNEELKSLTRYRFDKVKERAKLKQSISRLVAILFPELEKLVPTLHMASVYDLLFELSSVSDIASVHLTRLTNLLNTSSKGHYGKDTAILFREAARTSIGSHMPAKSLELKHTIRLIRELDSEISEIESEIKSIMDKINSPILSIPGINYRMGSMIIAEIGDFRRFDSPDKILAYAGLSPSTYQSGQLESSYSHMEKRGSRYLRYALFNATKFVCHWDPTFAAYLEKKRSEGKHYNVAISHAAKKLVRVIYQLERSGQSYIKAA

SEQ ID NO: 432273 - protein, 318 aa, unidentified
MNVIGLDISKDTIDVTLITAKGEMDYIRIGNSHEGFEKLIDWIKTKRVRKIAISMEATGVYYEQAAEYLSAVYTVYVINPLKIKDYSKSQFIHTKTDKADSKLIADYAKRHLDKLTPFRTSENPTLYKLINLLQQLKQQKHESQNRLHTAKDPFIRSTHETIILLLSKKIDETSKRIDSTIKQQKSLNAEYQNLQTIPAIGKDTAAILLRHLTDKTFRTANQFVSFAGLSPKIEQSGSSVNKKGRLSRYGHRQLKRALFMPALVAYRINAFPQLVKNLEAAKKPKMVVIVAIMRKLAKIAYYIHKTQKPFDKARHQTV

SEQ ID NO: 432274 - protein, 322 aa, unidentified
MTYVGIDVSKVTFVVAYSSVKTNKTRTFKNTVNGVHEFVQTISASEHNCVLEATGNYSALLVYLLSEAGITISLENPLKIKNFARVMLTVTKTDEIDARLIALYGEKMQPAPYKLRSDAILVLKQKRTVLRQLKKQLVATRNLKGSMEVLPFFDPKCKKTIEKTITFLEKQIKEMEEELASLAQGEYKKQMDLLTSIKGIGVTLAAALIVATGGFSYFDNAKQLTRYLGLSPTYQQSGTSVNVKGHINRNGDSSLRSQLYYVAAFSSLRCNTECKACFDRLRSNGKPAKVVVIAVANKLVRQAFAVVTQGKPYVDGFKSEKP

SEQ ID NO: 432275 - protein, 361 aa, unidentified
MRIIGCDLHARQQVLAMLDTTTGEMVAMTLKHEGNNVREFYSKLPHPVRVGIEATGSMQWFVNLMEELGIECQVGHPANIRAAEPRKQKHDRRDADLILKLLVENRFPKIWLPSKEQQDLRALLRHRHQWVRIRTRIQNALQAIALANGLRRGPALWSQDGQRTIASLPLAPHAAYRRSELQAMYATFAKEIEKLNQRVEEQACERPGARLLMTHPGVGPITALATEVFLGDAARFADSKALASYVGMIPSEYSSGERQRFGGLSKQGNPLLRFLWGEAAMHAVRRDPELQRFYRRKLVQKGLGKTRVAAARKLGIRLWIMLRDEIDYNEFCRRGQKQQKSSEACAGMPDTGHGAKQSPIV

SEQ ID NO: 432276 - protein, 414 aa, unidentified
MALRIVYKICCGIDVHKTFVVACIASTNSKGVTTYESHRFSTFTSGLKALLKWLLEHNCKDVCMESTGKYWIPVYNVLETECRIVLAHPKYVKAIRGKKTDKKDAKWIADLFKHDLVAGSFMPPADIRQLRDLMRYRFKLTCFNSSEKNRYQNCLTVSNIQVSSVASDVFGKSSQKLIEKILEGSDEPIDVASLVHGSMKDKVSDLELAIDGVFTPQQADKLKIIRTHMDNLQDRKEELEQLILALAAPYQQELAIILTAPGIKDPFTAIGIISEIGVNMEAFPSAKHLCSWAGLTPTNNESAGKKKSVRISKAGCYIKPLLVQCSNAAVKSKSHPEIRNRYLRLKKRRGHKKAIIAIARMLLTALYHMLKDKVNYNADLYRDANAVPDSKEITVEQAIRMAQLQGYKISSAVG

SEQ ID NO: 432277 - protein, 311 aa, unidentified
MDEVFIGIDISKQYCDLAVIPDGIQKRFTNDEEGQQAIVAFISPLRPARIVVEATGGYEMGVIRTLADSRLPVVAVNPRQVRDFARATGCLAKTDTIDAGILAQFARAIQPDIRPLPEKEAEVLRALVARRRQLIQMLTMEKNRLEKSPPAGSEDIRNHIYYLTEALKKIDKDISRCIRKSPLWKEKETILMSMPGIGPVISCTLVAALPELGTLNRKAIAALVGLAPFNRDSGAYRGRRTIWGGRSHVRAVLYMGTISAIKFNPAISAFYKRLIDAGKAKKLAITACMRKLLTILNTMMKNKTPWIEVAS

SEQ ID NO: 432278 - protein, 420 aa, unidentified
MNAVGIDVSKGKSMVAIMRPFGEIVSAPFEIKHTASDINSLVELINSVEGESRIVMEHTGRYYEVLAHQLSEANLFVSAINPKLIKDFDNDSLRKVKSDKADAIKIARYALDKWQNLKQYNVMDELRNQLKTMNRQFGFYIKHKTAMKNNLIGILDQTYPGVNTYFDSPARSDGSQKWVDFASTYWHVDCVRKMSQNAFIDHYQNWCKRKKYNFSQSKAEEIYGKAKELVPVLPKDDITKLIIKQAVNQLNSASTTVESLRTLMNETASKLPEYPIVMAMKGVGASLGPQLMAEIGDVSRFTHKGAITAFAGVDPGVNESGSYEQKSVPTSKRGSSDLRKTLFQVMDVLIKTHPQDDPVYQFLDKKRAQGKPYYVYMTAGEQVSKNLLRTSERISFISSRILIIIIIFRPALVWWSYFDT

SEQ ID NO: 432279 - protein, 524 aa, unidentified
MAAKQEATSQVKPNRKQRRDQQRRIWTADPGLEVVHHDAAGIDVGNSEHYVAIAPEKSAEPVRKFGCFTGDLREVVLFLKAHGVRSVAMQSTGVYWIPLYDVLEEEGFEVYLVNARDTKNLPGRKSDVQESQWLLKLHTHGLLRNSFRPVSEIRVLRTYWRQRGDHVHTASECVQRMQKALTQMNLQLANVISDIMGWTGQKILRAILAGERDAEKLAEMRNWRIHASQEEIVASLTGNWRPELLFTLKQEMERYDFCQRQIAECDHEIKQHLDTLPARHRETDPAVQPVAPPKKNKKVQGNSPQFALDKELQRITGVDFTRIDGINVMTAQTIISEVGLEMSRWKTEAHFAFWLGLCPHNASSGGKVLRRGTRKVVNRAATAFRIAGSTLRRSNSYLGAQFRRFRSKLGAPKAITAMAHKLAVLFYRMLRFGQEYLDRSQFFYEEKYRQQQISLLNRKGRPTRLLGYSRHQSAGVNISSFWRASSRRVLEIRKPAQGTGCASGCSEDRPPRWPTLNSLGKSRR

SEQ ID NO: 432280 - protein, 345 aa, unidentified
MEIHTLGIDIGKTVFNLVGLSPQGDIVVRKKFSRKQLLHFTANLRVGLIGMESCGGSHFLGRALRAQGHEVRLIPPQYVKPYVKTNKNDYIDAEAIAEAVGRLRMRFVPIKTDDQLDLQSVHRVREGWVYRRTSVISQLRGLLMERGITVRKGRRHIEAALPGILEDADNKLSGVLRVLLLQIYSEMRQLQSQIDEADAVIKRMAGEDEACQRLVEVPGVGPVIATAMVAAIGNGAAFKKGRGFAAWLGLVPGQYSTGGKQKLLSISKRGNPYLRRLFIHGAHAVLQQRTKQSSGLSEWLQKLDSRVHRNVAAVALANKLARMAWAVLAKGEKYRPPLLAEAACE

SEQ ID NO: 432281 - protein, 462 aa, unidentified
MKVEYRCCAGLDVHKRTAVACVLEGELGEDPVSETKSFGTTTAEVMGMLGWLKEHGVTHVAMEATGNYWMPIYNLLEGHFELIVANAAHMKAVPGRKTDVQDAEWIADLLRHGLLRASFIASREQRDLRELTRHRSSLAAKRGQAANELQKALESSNIKLQSVVTDITGVSATEMLAEMLAGNKDPKQLAQLAKRRLRSKIPQLEKALSGNLRSHHKLIIEQLLAAIGLFAVQIAELDAHIEALLRKNDDDINRLDGTPGINRRVAEVIIAEAGTEMERFPTEHHFASWIGICPGQNESAGKCKSGKTRKGNRSLRAALVEAAHGAIRKKGSYYGPQYRRIAARRGKKKAIIAVAHSLAIAIYRILKSETSYRELGAEFFDKLNPLQVLYHLTKRIEVLAVISRSLPCPKPHKSTRLRRPIFTRSHRAKRTSTKRREDHSEDRGEYFCALRPELARNWSAES

SEQ ID NO: 432282 - protein, 356 aa, unidentified
MQDQNKNLDFNNQAFFIGIDVHQKSWNVTIISSERTIKTISMNPSPKELYKYMTQNFPGGKYNSVYEAGFSGFWAHRELESLGFNNIVVSPTDIPTSGKEKLTKSDVVDSRKLARELSNGSLKGIYIPDQLIQELRSLVRARAQVVKNLVRIKLQIKSYLNFYGNKFPANYEITNWSGQFIKHLRSLSFNYDIGKEQLNIYLDLFEEQRSMLLKIVKSIKKYCTDYGFYERILLLCSVPGIGFINAVVLITELIDMKRFTNFDSLASYVGLVPSKRSSSEKEYTLGLKVQCKRKLREILVEASWVAIRQDPALVASYGRYVRRMSKQEAIIRVAKKLLSRIRYVWFTQQKYEFSLK

SEQ ID NO: 432283 - protein, 380 aa, unidentified
MPEAVIGLDVGKSSHWACVATRDGEVLLSTPVANREDDLDSLFGRFPDALVVVDQSRNIGALALARARAAGMSAAYLPGLAAHGAARLFAGDAKTDERDAMVIAKTALGIPDALLPVGDPGPTIAAARALAAQRNFLTCENTRNKNRLRSILLESCPAFEALVDLSDGPQLRLMASLGGAWSVADAGPRRAAALTRGAARGKIEALVRSTTSSTRPDAAVVAAEDRAVKLLARRISENSAEIEAITAEISALLEGDDTYRCLLTVPGIGPKTASELAISIDIEDFPSHDRLASYCGLAPRNRQSGTSISSVTASRQGNKRLKNLLIFSCNCLTRTEGRWGDYYTRCRERGMSHGKALKALARKRLKVIYAVMRDRVPYAA

SEQ ID NO: 432284 - protein, 391 aa, unidentified
MIYVGIDVAKDKHDCFITNSDGEVLFNVFTIANNLDGFNDLCQKIASVMEDVTKVKVGLEATGHYSYNLLGYLIDKGLPTYVINPLHTNLYRKSLSLRQTKTDKVDARTIASMLMSDVNLKSYSDTSYHNEELKSLTRYRFDKVKQRAKLKSSVSRLVCILFPELEKLVPTLHMASVYTMLSEFPDAKQVANAHLTRLTNLLSESSKGRYGKETAIAFRNAARTSIGSNMPAKSLELKHTIKLIRELTSDIDEIEHEIKLIMDEINSPILSIPGINYRMGSMIIAEIGDFNRFDSPDKILAYAGFSPSTYQSGQLDGAYSHMEKRGSRYLRYALYNAAKYVCNWDPTFAEYLAKKRAEGKHYNVAISHAVKKLVRVIYHLEKTNQQYIKAV

SEQ ID NO: 432285 - protein, 372 aa, unidentified
MNYNTVYVGMDVHKESFTLCAYTIDAEKGSHFQRTEADYKNVLKYLEFLRTVYGNDANFICGYEAGCLGYTLYHQLTEHDVNCVILAPTTMLEQRSKRRIKTDRRDAEIIGKCLAQHNYSPVHIPTATDEETKEFLRMRDDHKLALKKVKQQILAFCLRHNYRYDGNSHWTAAHIKWLKSLKPEALYKEILDEYLLTYTALSDKLERLDKRIEELASKDEYKESVKKLCCFIGVKTHTALSVLVEVGDFQRFASAQNFASYLGLVPGEDSSGDGQTRLGITKAGNRHVRMLLTEASQCYARGQIGFKSKELKSRQAGNSPQVIAYADKANERLRRRYYKMVLGKSKKPNVAKTAIARELACFMWGMMTDHVA

SEQ ID NO: 432286 - protein, 344 aa, unidentified
MNKVTIGLDIAKSVFHLVFMNQSGRVLRKKKLKRHQVLSYFIQLEPCIVVMEACGSCHYWCRELTKVGHEVKAIAPQYVVAYRKGNKHDYNDAEAIAEASQREGMRFVPFKSQEQQDVQLMHRIRERMIAQQTALSNQIRGLLSEYGIVYARGVATLVKELPFTLEETDNGLSMLARRQFQGLLNDLHELREHIKEMDKELKAFSQSQPVCERLMSMTGIGPLIATALYAGIGQGQAFNSGRHLAAWLGVVPKQHTTGDNPRLLGISKRGNTYLRTQMINGARAALRHIGDKTDNVSQWCRACLARMSFNKACVALANKMVRMAWAMLRYQQDYQPGLINKAAV

SEQ ID NO: 432287 - protein, 366 aa, unidentified
MQAVIGVDPHKHVLSAVALDERGGLLGRWHGEASNRGTEALRSWAAERAPGAAWAIEGSNRLGRHLALALLDDGADVRDVCPTRTADRRRRRPGRGKSDAVDAEAIARELQAHADLPRAFKGAAEGRPNPRREELAVLVRARRQLVDRHRRLLNEAEALLGELPAGLTERLPSGQKVQPRLAAAARVRRTGEPLTDLRLELLRAKAREERVLAADCAALKQRVADVLKHLGTSLPTLCGLGPLGAAELLAEVGDPRRFRSADAFASYTGTAPIPASSAEVDGHPVRHRLSRFGNRRLNAVLYGMAIVRLRVHPETQAYVARLLAAGKTKRDALRILKRRLACLVWRAMVREVVPGPGEGTPVSGAP

SEQ ID NO: 432288 - protein, 340 aa, unidentified
MTIVTMGLDLAKSVFQVHGVDEAGATVLVKKLHRKQMLPFFSKLSPCLIGVEACGTAHYWARTLSAMGHEVRLIPPSYVKAYVKRGKSDALDAEAICEAVQRPTMRFVPAKTVEQQAILTIHRTRSLLVRQRTMLANALRAHLAELGHVANLGIANLAKLTKEVLAAEKALLPMARTALEMLMRQVMTVSGEIAVLDRQLLAWHAQSEASRRLSGVPGLGILTATALAATVTDPNQFYSGRQFAAWLGLTPQQHSTGGKTHLGGISKQGDRYLRRLLVVGATAVIRHIKDNPTPLAKWVRKLMEKKPFRLVSVALANKLARIAWVVLTRRETYQPFKLPA

SEQ ID NO: 432289 - protein, 347 aa, unidentified
MKIIGCDFHPSFQQIAMVDTETGEQTERRVTLAEAAEFYRGLAGPVRVGMEACGNTLWLERLLTELGHELWLGDAGKIRAMEVRKQKTDRRDAELLLRLMLEGRFPRLWVPSLEQRDLRQLLIHRHKLVGMRRQVKNQLQHLALNQGVQQKRKLWTQAGRKLLEELPLTGWTARRREESLQLLDDLDHRVGELDGAVEQAAKQDPVAQLLKTHPGVGPITSLAFALTLGDVGRFAHSRQVVSYLGLNPSEHSSGGRQRLGAISKQGNPMVRSLLVEAGQSAARLVPELKRAYQRLKHRKHSSVAKVMVARKLAVRLYWMWRTQQPYTATRMQGSPSHSVAAGSKPSV

SEQ ID NO: 432290 - protein, 351 aa, unidentified
MIIGVDFHPEFQQMASVDTDTGEFQEKRLAHREEAEKFYRALTSKKVRIGMEASGHARWFERLLSELQFELNIGDAAAIRSKRVRKQKTDRQDAQLILQLLIEDRFPRIWVPSWENRDLRQLLWHRHRMVQARTRIMNQLQAVALNEGLRCKKRLWRDAGREQLESFALAPWASRRRRDLLELLDRLTPTIAELTQAIEEEVEKCPEARRLQTHPGVGALTALAFVLIIGRAERFQCGKQIASYLGLVPLEESSGNRRRLGHITKQGNSLLRFLLVEAAQVTVRSDQEWRSKYFHLALRRGRKIAKVAMARRLAVRLYWMWRKGWNYQQLKTFGSHAGEPGHRDGVQLNTE

SEQ ID NO: 432291 - protein, 411 aa, unidentified
MDTLVERCAGLDIGKADLKACVRTPGKNARRVREIRTFATTTVGLLQLRDWLTGHQVTVVGMEATGDYWKPVYYLLEDTFEVQLLNARHMRNVPGRKTDVADSAWIAQMVEHGLVRPSFVPPPPIRELRDLTRHRRTLVEERTRVVQRLEKVMQDAGIKLTSVASALLTKSGRAILEALLAGQDDPDALAELARGRLRAKIPALREALAGRFRVGHPGLLVAQMLAHVDFLDAAIAELDTTLERAATPFAATLKRVCTIPGVSVRTAIMLLAECGADMTVFRTPAHLASWAGICPGNNTSGGKSRSGRTRHGSVPLRTALTEAAHAAARTKNTYLAAHHAQIRGRRGLPKAIGATRHDLLIAYWHVVHDQVNYADLGPDWAQRRRSTEHRTRRLVHQLEQLGHTVTLEPSH

SEQ ID NO: 432292 - protein, 351 aa, unidentified
MPRKSSVCTVTAIGIDMGKTTLHMVGLDSYGAIVLREKVSRGRIASRFANLPPCLIGIEAGMATHYVARELAALGHEVKQVPPAYAKPFRQGHKNDFRDALAVAEAVQRPTTRFVPPKSNEQLDLQALHRVRSRLVSQRTAVINQIRGFLLERGIIVRQGLRFLRQLLPDILAKRTDVLSPRMVRIVSDLAGDWRQLDDRIEIVTDEIETLAKADDSCRRVMTVPGIGPIISSAMVAAIGNGSAFSRGRDYSAWLGLVPKQMSTGDRTILGRISKRGNSYLRMLFIQAARVILLRPANWPKHGFGAWLVRAIQRLHPNVLAAALANKLARIAWTVLAQERSYEARVTKAEA

SEQ ID NO: 432293 - protein, 345 aa, unidentified
MQIKSIGIDLGKTTFHLIALGIRSQVVIRKKFSRSQLLMYTANLPASLIGMEAGVGSHFLGRALREQGHQVRLIPAQFVRPFVKSNKNDYRDAEAIAEAVERENMRFVPIKTEDQLDLQALHRVRDRLVARRTSVINQIRAFLLERGISFRKGPASLRRQMPEILENADEKLSTAMRRLLDFLWQEWKGLQLQIESLNAALEQIASRDAACVRLQQIPGVGPLVSTAVVSAIGNGAAFKKGREFAAWLGLVPRQWSTGGKAKLLGISKRGNPYLRKMFIHGARAAVLRVKREGSSLGKWMSGLEARAARNVVIVATANKLARISWAVLASGHDYQPRRKALVFSN

SEQ ID NO: 432294 - protein, 358 aa, unidentified
MKIIGCDLHARQQTIAMVDTETGEFTEKTLSHEGNAVREFYAALEGPVVVGIEATGAMQWFLELLEELGIECRVGHPAKIRAAETRKQKHDRRDALLLLDLLVMKDRFPKIWMPSTEQRDLRTLLRDRHQWVKMRTRLQHTLQSIALNHALRQGRALWSTAGQSALQALPLPPYSSQRRTALLRLYVQLQKRIQALDKEVEVQARQRPHARRLLTHPGVGAVTALATEVFLGDPNRFATGNQVASYIGMIPCEHSSGKRQRLGKLSKEGNSLLRYWWTEATMHAVGKDPELKRFYRRKLIQKGMGKARIAAARKLGIRLWIMMRDQIDYEEFCRRGILRQKGKAHAGMPDYNSGPALQ

SEQ ID NO: 432295 - protein, 347 aa, unidentified
MKKVCIIGIDLAKNTFQLHGVDAEGRVVLRKMLRRDQIATFFANLPSCLVGMEACASSAYWARIIKECGHTVRRIHAKFIKPYLMADKNDANDAAAICEAVSRPHMRFVPSRTQEQADIQAVHRVRRCLVQSRTATINQARGLLAENGIVIRQGACHVRSHLSHLPAITDNQDNGLSVTMRRLLASIYENITFLDSRIIEHDKALHEIAKAHEACKRLMKIPGIGALTATILLTMAGSAADFKNGREFAAYLGLVPRQYSTGGKHRLLGITKRGDGYARTLIIHGARAVLRAMKIGRAPLGDGMRADWLARLMDRRGYNRASVALANKMARTAWSMISQGTEYQMVA

SEQ ID NO: 432296 - protein, 365 aa, unidentified
MQSTATVTTIAIDLAKNVFQLALADRDLRVFRSLRLRRKEFLAFWSNYPVVQVVMEACGSAHHFGRWVSALGHRVTLLPAQHVYRRRRNKTDAIDCVALLEALRAADIRPVPIKTESQQVIQMLHRARQQWQKMRTAQINLAHGALREFGIAVPEGAARAVACMRAEQANAQLDPMIRGLLQSLLQEIAMLERRVADVDRQFAAASRTDVVLHKLQTLPGIGWVTASAIRASVGDIERFANARSFSAWIGMTPAQTASGDKRKLGRSKQGDTYVRTLVIQGARAVLAAAQRQRLTTRPLSALGHWAATLADRRGFNKAAVGSGQQAAAYCRRNQKVPIKGRIDDCTDPASTIRSTSKRLTWGRSP

SEQ ID NO: 432297 - protein, 341 aa, unidentified
MKKFIRTAVDLGKNYFQFHGLASEDGVPVSRKLKRSKVLEFYAQIEPCRVGMEACGSAHHWARELIAMGHEVVLIPPAYIKPYVKRGKNDAVDAAAICEAMARPDMRFVPVKSADDQAVLMLHKSRELLIKQRTMSVNALRGHLAEFGLVVAKGIGRVDELLALAQADAQLPQIAKAMVTELARHLEGLDQSIDAIDDDIAKAHKKNQKSCLIDEVPGIGTLIASVVAASVPDPSVFKSGRDFAAWLGLTPKQHSSGGKEKLGAITKQGNRYIRKMLVVGATSVLRVVSKRKGALADWINALRARKPERLAAVALANKLARICWAIMTTGESFRTETYVKA

SEQ ID NO: 432298 - protein, 390 aa, unidentified
MIYVGIDVAKTTHYAAAADSDGVVLVEPFAFDNDVPGFAKFISKIASFPKEQLIIGLESTGIYSENLICFLFDSGYKLAVINPIQTATLRKTNIRKTKTDKVDTLLIIKSLMVNSYRLYTEQDTQSLKLKSLCRFRQSLKKSKARLKIQLSGYVNLLFPELLSFFKSGIHISTCYTLLKRCSSPAEIAALRLDSLSRLLSNASRGRFSRSTAEALKSLAKSSVGVKNPYISIQIAQTIQQIELLEQQIDEIENVIKDTICELDSVIMSIPGIGAIDGAMILGEIGNIDRFASPAKLLAYAGLDPTVCQSGKFKARSTKMSKRGSKILRFALINSAWQLTLKNDTFFNYYQLKLSQGLSHYGALGHVAHKLVRVIFTLLKHNVLFDPTRLV

SEQ ID NO: 432299 - protein, 466 aa, unidentified
MENNYILYVGMDSSKGKADAAILKVSDRRSVKPKFLRKKLSFKFVKSEVTSFLETVRSYSDDNCTSICFALEVTGIYSTNVYNFIKDNLNDNESIKFLNTDFVNQWRNAHNIAKSDPLDAQTISTIIGTDSDVQYVNDNVFENKNGYQDLKALVHRHYQIKKIYSQEINRLIAQCDCLFPELQYVFEPKSAAFIAVLSSYPTTHDIINASRLEVFNVVYEATKHRCSMDKIDKLFDLCHDTLVPDNISSYGRSIILDLVENIKNIKGQLKMIERYIRDVASLNPAYKLLLTITGCGPLTAATVIAETGDIKRFKNADCFVSYSGTSPRNKRSGTSVETMGKISKKGSRYLRHAIYMIAEFARRHNPVLKHQFERIKNGNKKRHKLANIAIANKIARYIYSIMKNESSFVIFHEHIMKLPEETQNTFFNSISLDFPKNTRKQIYQYSDINGELHRFVYIKTDEMIPA

SEQ ID NO: 432300 - protein, 311 aa, unidentified
MNNTIGIDISKDTLDAHRLADGQHKQFLNGKTGHAQLMKWIGKQSDPLIIFEATGAYHRQLERVLCPHIIPFVKVNPKQARRFAQASGKLAKTDRVDCEMLAKMGAALQLMPKPFTAENLYDLRELLSARRALIKDRTAAKARKATVINALIKQQLEKRLRQIKNDIAKIDALMLDVAREDQYMSERLDILFSIPGIGVITALMILVDMPEIGALNNKQVASLAGLAPMSQSSGKWMGKARIQGGRPNLRNAIFMPALVAIRHNADLKTKYDQLVTAGKEKKVAITAVMRKLLVLANALLRDNRKWAEKAA

SEQ ID NO: 432301 - protein, 369 aa, unidentified
MVAPTLTDIQLSKWRMRIPTNQREATEMKITTVGIDLAKNVFQIHGVDEQGKVVVRKRLRRQQVLTYFAQQTPCLVGMEACGGAHYWARKLQTQGHTVKLMAPQFVKPYVKANKTDAADAEAICEAVTRPSMRFVPIKNADQQAILSLHRARQGFVRARTAQANQIRGLLAEYGITLAQGINHVAKRLPGIIEDAENELPGLFRALLQRLVVHLRELNHQVQELEEQIDAWHRNNEASQKLAGIPGIGSLTASALSASIGDAKTFRNGRELAAWLGLVPRQHSSGGKPMLLGISKRGDAYLRTLMIHGARSVVRVAERKLTPTDRWSTNLLERRHTNVVAVARANKNARIVWALLAHDREYHVDYESAA

SEQ ID NO: 432302 - protein, 311 aa, unidentified
MTDDTIGIDISKATLDIHRLSDGKMMSFSNCPAGFKALSKLCAKTAVTRVVYEATGAYHSGLERALGAHLPLVKVNPLQARRFAQAQGVRAKTDAVDAKMLAVMGNAFVLQPDEPATKIQHDLKELRAFRSGLVKDRTRIMSRLKIQTLSITCRQSKARLAQVDKNISEVDTEIDRLINSSDTLAHSMKILRSIPGIGAVCATTILIEMPEIGSMDRKQVACLTGVAPMTRQSGQWRGKSFIQDGRKVVRDALYMPALVAMRFNPDLKAKYQAMIKAGKPPKVALTALMRKLIELANALIKANRNWVKKTA

SEQ ID NO: 432303 - protein, 346 aa, unidentified
MDYCGLDVAGVSSYLYLMNEKGRKLSCGAVETTKEALERRLKPFVRGGLSVAIEAGNQTAWIYEVLVGMGAKVTVVNPTKVKAIAESRRKTDKIDARILCELLRADALPHPVHMPGRDIRALRGLLVARRQLISARTKLCNVVRGMLRQEGMRLPPGALKSMVGWRRLLAQGYEHAHLPIVLATFVDSFVSLTDSIRDLEKHLAERERRDPRAARLQTIPKVGRIAALTFVAAVDDVHRFPSSRKLVGYSGLAPTVRSSGERTVYGSISRQGRRELRAVFVQIAHLVAIDKTPATRALRRWFERVAGKRGKKTAVVALARRLLVIAYRLLKDETVYDVKRLRRRAA

SEQ ID NO: 432304 - protein, 399 aa, unidentified
MLAVGIDISKSKSVAAILNQDGSMHTSPFEFHHTQPELDAFIKYILNSKQSATILMENTGHYHYPVLKAFQEAGLPVCMVNAYQIKKFGDMDLRKAKTDKKDAVRIARYALEKSYSLVPYTSMEQKYEDLRFLARQYNQRMLTLKTNKVFLLNLLDETMPGITNILPLTTRTPETSLSVLFINRFKSYDRIKKMGKSRFLDAFEKIARKSRNRQTKTYGLAIYEAALRNITTRGENEYTLAAQDQCLELVCESQKAADSIILKMQTLAETLPEYAVLRSMAGVGDRLGPLILAEIGDIRRFHSGKALNAYAGNDAPPYQSGTFESHNRHISKRGNAALRKYCFEVMQALKLTRPQDDPVYLFLLKKEQEGKPYNVAKMAGVNKFLRIYYARAMETLKQQ

SEQ ID NO: 432305 - protein, 338 aa, unidentified
MSRYVGVDLHRRRSQVVVLDGDGVVVSSVNVDNREPAELVAAVAVGGEGCDVVIEAAWGWYWIADLFTAAGFAVHLAHPLGVAGYRNRRVKNDEKDAILLADLLRMGSLPEAWIAPPELRELRELVRYRRKLSQLRSGLKAQIHAVLGKEGVIPQLTELWGPAGARWLDDQQLAAAYQDRIVSLRRLIGHYDREVTRLDRQIHGWLRDDVGYREIQRLDGVGPVFAAIFTAEIGDVSRFKSAKQLCSWVGVTPRHRESDETVKRGPITKQGSALVRWAAVEAVARYQGGPPIRDAYRRIAETRGNKIARVAAARRLLVLIYYGLRDGHIRCLDQEVAA

SEQ ID NO: 432306 - protein, 418 aa, unidentified
MNERAVVYSVYVGIDWADSKHDVCIRPRDVDKREFDVIRHRAEAIDTWVKDLHRRYGDPIAVAVELSKGPIVSALQKYDFIDIFPVNPGTLAKYREAFQPSRAKDDPTDAELALDMLLRHPEHFKALKPQSVEMRTLTTLVEQRRCLVNDQIRITNRLRSALKQYYPQVLEWFEHIDTPLFCAFVKRWPTLTQAKRARSNTLRRFFHEHHMYREGVLENRRQAINSARPLTLDDAVIVPYRLQTLVLVEQLELMFRAIGQFDDEIEKLATEHPDYALFQSLPGAGPALAPRLLVAFGEQRERFKSAADMQKYSGIAPVTERSGKKHWVHWRLQCPTFMRQTFVEWAGQTINKSYWAGEYYQQQREKGSTYQAAVRSLAFKWIRIVYRCWQTGEAYDESRYLKTLERRGSTLLKRHNIT

SEQ ID NO: 432307 - protein, 377 aa, unidentified
MIAAIRSELSVVEPVVYVAFELGKKSWTLAVTSGMAVTPLVRTVRAGDFAAVERVIGEARQRLPVPATARVMSCYEAGRDGFWIHRALDARGYANRVVDSASIEVNRRARRRKTDRIDARKLVTMLVRVSSGERHVWSEVHVPPTAAEAARHVSRERTALTKERTRLTNQITSWLATCGCAVSARARRRPDWWTTVRDWAGAALPATLQARLARATARLMLVTEQLATIDAAQEAARRAAAPESAQARLVQLKGVATTSAAILLEEGLEWRRFQNRRQVGGLLGFTPTPHDSGTVRREQGISRAGNSRLQSVMVQLAWGWVHWQPHSALTRWYRERFGSGPRARRIGIVALARKLCIALWRWATAGVLPTGAILKAA

SEQ ID NO: 432308 - protein, 430 aa, unidentified
MKSNTQNAKIEAITEKTLVLGIDVGSETHYARAFDYRGIEYSKKPFKFSNTEAGFVTFKEWILDLKERHEKDKVVPGMEPTGHYWFNLGKFLHDNEMKPVLVNPHHVKKSKELDDNNPTKNDRKDPKVIAGLVREGRYMIPYLPDGVYADLRTASNIRFQLQAELTRIQNRISRWFNIYFPEYKTVYGKPDAKSGILILKTAPLPEDILTLGIDGVNQIWRDAKLRAVGKARAKTLIEAAEHSVGSKEGAVSARMEIRMLLEDYESRNTRLQEVMVLIEELVRKIPMAEKLLEIKGVGIRTVSGFLAEVGDISRFNNPKELQKLAGLALVENSSGKHKGETTISRRGRKRLRYLLFEVAMSLVSKNQEFRELHNYYTTRRLNPLKKMQSLMAIAAKLIRVFYAMLTKGVDYDPKKMVSDIKRPAVYLQAA

SEQ ID NO: 432309 - protein, 335 aa, unidentified
MTTIVGIDVSSKKANYHILNIGEAQGSSGSFMMNYEGFTSLLSQTNITSDTVFIMESTGVYHLPLQNYLLQDGKKAITVNPVLVKKYAAAQTLRKTKTDKADAFMIASFGEANMKEIESKRVNMSKDTQVKAFARRRQEIAEDIARAKTQLKSDLSIAWPEILKVNVFTHSMLTFLSDYGCAEEVLATSDEELLTAFPRQKGRSTSFSIEKLKELSRNSIGVPHFADLVKDSAKKIITLNSRIGKLTEALVEHEKEFHKAEIEILTSMQGIGDVTASHFMAEIEDITRFNSYQQLIAFIGTDPAIYQSGMAFKNGRITKHGNKNLRKYCYLMAQQ

SEQ ID NO: 432310 - protein, 405 aa, unidentified
MNAVGIDVSKGKSTVTIRRPGDVVLMPPCDIPHTQSAINCLIKHIQSLDGETKACMEHTGRYYEPVATWLSDAGIFVSAVNPILIRDFGDDSLRTPKTDKADSKKIARYTLDRWAKLKQYGSMDKTRNQLKTMNRQFSFFMAQKTAMKNNLIALLDQSYPGANDLFDSPARSDGSQKWVDFVYTYWHVDCVRGKSLSAFTEHYRKWCKHKGYNFSAEKAEKVYEASCDLIAVFPKDDNTKMLIRQAVAMLNTASETVENLRIKMDETASALPEYPVVMAMNGVGSTLGPQLMAEIGDVTRFTHREALTAFAGVDPGKNDSGKHVQKSVRTSKKGSPHLRRTLFQIMDGLIKRSPIDDPVYVFMDKKRAQGKPYYVYMTAGANKFLRIYYGRVREYFASLPETGEN

SEQ ID NO: 432311 - protein, 343 aa, unidentified
MEYYVGLDVSLKQTSICVVNQMGSIVQECVVDSDPEAIASFVRSKAPGTVRIGIETGPTTTWLWTELSRLGLPVICIDARHAKAVLKMQINKSDRNDAAGIARIMQTGWFKEVRVKDLDSHAVKALLASRALLVKIKRDLENQVRGLLKNLGLVIGRAKFNVFAVRAEALIENRPELVAAVRPLLEARKAIEQQVDDLDRKVHKLARRDVQVRRFMTVPGVGPITALCFKATIDDPTRFKRSRSVGAYIGLTTRRHASGEMDWSGRISKCGDAMLRMYLFEAAGVLLTRVPKWSGLKAWGAKLTKRTGLRKAKVAVARKLAVILHRMWIDGTEFNWSTKKAVA

SEQ ID NO: 432312 - protein, 475 aa, unidentified
MNVKGTKKKNQVVTANIFEQQELWKKAEVIKENLTASTWRELETNGKFDKNEKLSFISDDMLILGCDVGSETHYMRAIDTRGRELSKSAFPFSNDSEGFQSAKEWAVKIAAEHNKSQIVLGLEPTGHYWFCLATWMISNGISVVQVNPYAVKQTKEVEDNSQLKDDRKDPKLIANLVKDGNFGMPYLPEKLYAELRRLSMFRDQLNEDRIRTINRMHREMKIYFPEYKDALGKVDGTFSLELLKQAPFPDDLIALGEDGIRKIWHEAKLRGRGYSRAGEILQYAKASVGIKDGAIAGKTAVKWFVQKVLELDDELVVIENQINQKCQEIPHACNILEISGIGENTLSGILAEMGDISRFDDVKEIQKLSGLGLVACSSGKHKGETKISHRGRKRLRYWLFQAAKSAVAHAEEFKELHMYYTTRANNPLKKMQSLIVIACKLLRIIYTILKKGTAYDPKKMLMDIRRPEKKEAIAA

SEQ ID NO: 432313 - protein, 418 aa, unidentified
MSEDEYTRVSKRYVALDIHKHYCVIAGVDRDGRVLLHAVRVEHADLEGWLKKNLLSTDQVVIESTTNAWQVYDLLAPVVERVVVANPIQVKQIANARVKTDIRDALILARLLAANLVPEVWVPPAQVRELRQLLSQRRQFVETHTQILNRMHSVAHRHHLKHERGKRFNEKNTLWQKDKQLSKLEQFQLELEMENRVYIEKQIGRMGKEVAKMSHQNPWAQSMTYLMQLPGFGVITGMTVLAAIGEIQRFESARHLASYSGLTPGLEQSGTKYREKGITKEGRKELRWALVEVAQRAVKSDPLWKHRFEELQKRMHRNQAIVAVARRLLELVWYVLTRRQPYRHFSQERIAYKYLTWAWQMDEAARDGLTRQQFARYYLMRLGIGHDLTRIALDPKHPRKIASEAELLALRPELNHIE

SEQ ID NO: 432314 - protein, 412 aa, unidentified
MDTLYPCCAGLDIHKETVVACVRKVSGGQAHKEVRTFRTETSGLLALADWLTDAGVTHAAMESTGVYWKPVWNILEGVVELLLVNAEHIKQVPGRKTDVKDSEWIAQLLQCGLLKASFVPDRPVRDLRDLTRQRVQLVRQKVQVANRIQKTLEDANIKLASVASDVLGASGRDMLRAIIGGEGDPVVLAELARQRLRAKIPQLQEALLGEVTEHHRFLLKMLLEQVEFLEGQVARLSQRITEVLPVPFAEAIARLETIPGIDRRAAQNIVAEVGADLKPFKSAGHLASWVGICPGNRESAGKRRSGRTTKGNAWLRVTLVQCAWAASHTKDTYLSAQYRRLAGRRGKKRALVAVGHTLLGIVYAVLKKRGTYRELGADYLDRQDKEKLASRLLKRLAKLGVQVTVEPAVALV

SEQ ID NO: 432315 - protein, 361 aa, unidentified
MNATTVAVDLAKNVFQLAVADGSGKVVESHRLSRTQFERWFANRDVSVVIMEACGSAHHWGRRLTAQGVEVKLLPAAYVRAYVRRNKTDAADALALLEAARSSDIIPVRVKSVDQQALQGLHRIRSAWMGTRTARINTLRGLCREFGLSVPPGARTGVEALSRLLADPRAPVPEMLRASMQRLTEEIRLLEARIADLEQELSTLAKQSPACATLLSIPGIGLLTATALVAATGGNVDHFKSARHFASWFGLTPREFSSGGTRVLGRLSKRGDRYLRMLLTHGGRAVLRAAHVAQRTGRPLDGLRHWAVQVESRTNHNKATCALANKLARICYATLRDATPYGQPAARQARKLTPSSFVVVH

SEQ ID NO: 432316 - protein, 460 aa, unidentified
MNPKRSKSRNGGKMPMVHPNAAAIDVGATMHMAAVRADRAPEPVRSFGTFTTDLHRLVDWFTECGVETVVMESTSVYWIPIFELLDARGFTVFLVNARDAKHVPGRKTDVSDAQWLQRLHSFGLLRASFRPKGQIAELRAYVRQRERLLEYAASHIQHMQKALTEMNLQLHHVVADITGATGLRIIRAILAGERDPEALACLRHYSCHSSAETIAKALTGSYRAEHLFALEQALALYDAYQEKAFACDARIEAVLKKLSIHRGHGHGSAPRASRRRNRTDQANALAFDVREALFALLGKDITTIDGLGPYLSLKLIAECGDDLSSWPSAKHFTSWLGLAPSNKVSGGKMLSSRTRRSGGRAAALLRLAAVTVGRTDTALGAFYRRLSARIGKAKAVTATARKIAVLFYNAVRYGMDYVDPGASSYETRYRTRVINNLHRRAKAFGFVLQPLEPKVGAAVS

SEQ ID NO: 432317 - protein, 360 aa, unidentified
MIVQGTSVGLDVHALSVVAHAIDEETGKIARARLCPDHGEVLGWLHQLRGPVRVTYEAGPTGVGLARAINTSAGMECLVAAPSKLQRPAGDRIKTDARDAAHLARLLRLGEITAVTVPAPEIEAVRDLVRARDDARADLMRVRHRLSKLLLRQGIVYSGGTPWTCVHEAWLRKQRFADHHLRAAFDHSFDAVLAATAARNRLDEQILDVAASARFADPVNRLGCLRGISALTGLALTVEIGDWSRFSGSSIGAYVGLVPSEFSSGSSRVQGSITKAGNTHVRRLLIEAAWHHRKSYSTSGPSLRARWAKVDPALRARGHAGNRRLYSRWRGFTERKKNPLVANVAVARELSGWCWSLATM

SEQ ID NO: 432318 - protein, 316 aa, unidentified
MNGQIYCGIDVAKRHFVVGLSGRKQTKTFTHHPKGIQQAVEYLQKSANVDLIVLESTSGLEIPLAKALYRADFRVVIANPHQAHLFSLSKSLAKTDAKDAKMPASYAQMLVLYGEVDTRLYTPPTPEQAQLEALVLRRTQLVVAIRVAEKNRLTIIHASQKASVEQLIAHFDRLIAEPENAIAQATLAFDDKAKKFKDIKGIGPITTATLVSMLPELGQLKYKQIASLVGVAPHPKESGNTKWKSRCSGGRKAVRNVLYQAANVARKHEPKFNAFYERLRAKGKPFKVALNACMRKLLTVINAIIRDGSQWQPLAV

SEQ ID NO: 432319 - protein, 411 aa, unidentified
MTRLFCGVDWAEHHHDIAIVDDTGTRVAKARITNDAAGLRTLLTLLAEAGDCPDAPIPIAIEKPHGLLVASLRATGRQVFAINPYAVARYRGRHSASGKKSDEQDALTLAGILRTDMAAHRPLPADSDLARAITVLARAQQDAVWDHIQLGQRIRALLHDYYAAALEAFAHLPGGSLTKAESRVLLTLAPTPTRAATLTRGQIRAALKRAGRARHIEQDVERLHQIFRAEHMRQPELIEQAMGHQLTALLGQLQAACTAEQDLATAAEEAFAQHPDAQIITSFPGVGPLVGARVLAELGDDRTRFTDARGLKAYAGSAPVTRASGRSRQIMNRKVKNDRLAAAGYVWAFACLRPSPGARAHYDRRRTTGDTHTAALRHLFNRLIGCLFHCLQTRRTYDETIAFPPRMLAAA

SEQ ID NO: 432320 - protein, 337 aa, unidentified
MEYFAGLDVSMAETQVCVMGRNGAVIHKAKVPSTPADIAAELAQLPTCRRIVFETGRMAPMLYHGLRQLGLPVICVESRQAYQALKLLATHKTDHNDARGLAHLARTGFFKPVHVKSLPAHAVRSLIIARKKLVGQRVTLENQIRGLAVVFGVRLPRALSSTFIRQALQASEGIPGLSAAMQGLVAARTAVLAAIVAIDGDIRRMVRASDACRRLMSIPGVGQLTALAFTAAVDDPKRFRRSRDIGAYLGLVPRRHQSGEIDYSGSISKCGDRRLRTLLYEAANVMLTRYKGALKLKEWAFAVAKRSTMRKARIALARRLAIIMHAMLRHGTEFKAA

SEQ ID NO: 432321 - protein, 391 aa, unidentified
MTKPKVKTVNDLSRCLDPLDMDATVIAVIEMSQSSWLVAGIVPGVERQPLKKLAIDEHALLKLLSRWRAEAEQKGHRITRIAVAFEAGHDGFWLARWLAAQGIESHVIHASSVAVTREHRRAKSDRLDTELLKRGFLGWLRGERGHCKMVAVPTLAEEDAKRPSRDRETLVGEASRIITRVKAAFVRLGIRSFNPKLKAAAARLGPLRTPEGEPIPPNTLAALKRDLERHRIVKQQIREIEQARLALLEKAPAKGPNAMVLLLARVVGIGIETADMLVQEVLSRNMRDRRAVARYGGLTGSPNESGAKRRERGLARSGNARVRHGMIQLAWRFLLFQKDSALAQWYRQRTADAPSTRKTLIVALARKLLIALWRLARDGVVPEGVRLRPAA

SEQ ID NO: 432322 - protein, 381 aa, unidentified
MRTLGIDVGKDSFTIAALSQEGEVISKHSCNLNCGGIESLKNSISPSDKIAVEASGPYSSIITAHIQNMGITPYLVNPLLALRFKQANSLRKTKTDSIDAVSIARLSQTSSLQPAQGYLEEGIRLLERQIEATSKQIACLKNSILQSLHFLFPELERNFNPFSKGILNLLSKFPSAQAIAHASTEEIASCFPSKGRKIDLKKLLKLARDSIGISDPSREAVLKALITQLLCLLDITEQLKHKLEEEVEKLYQQELELISSIPGFGTLTSPSFIAEVGDISRFSSAKKLTAYAGLDPSVYQSGRFVGKSHISKRGNKHLRRILFISAQHAVRSSPTFRSYFLRLRKRGKSYRQAMVATSGKLLRVAYAVLSSGMPFREKSIS

SEQ ID NO: 432323 - protein, 396 aa, unidentified
MQIKPAAGLTACKGGHFMYRILKIGMDVHTTNFTLCALESKFGEEDVVLANITVGPDHKNVLDFVRRIKEKMDPKGKDKIDVECGYEAGCLGYSLYQLLTACKLKCTILAPTTMHSEKGPRIKTDRRDAKLIAQCLSNGGYHAVHIPTAEDNAVKEYVRMRDDHKIALKKLKQQTNALCIRFGFYYDGTKWTGMHLKWLRALTLPELIRETLNEYLATYEELTTKIARFDQRIQEIAGQERYREKVMKLECFLGIKTHTALSLVVETGDFIRFRKGNVYAAYLGLAPGEHSSAESGGRLGITKAGNSHLRCLLIEAAGGICKGQIGKKSKDLIARQTGNSAEVIAYADKANTRLRSKYYRLTRHGKKRNVAVAAVARELACFVWGMMTDNIHGNAA

SEQ ID NO: 432324 - protein, 351 aa, unidentified
MNSIDYIGFDIHKKTISFCAKAQDGRILDEGTIPARRTDLNAWAERRSRPWWGAMEATLFTGWVYDHLKPLAQELKVAHPAMLKAITASKKKNDKVDARKIADLLRCDLLPECYMAPCAMRDLRRVLRYRNLVVRQATRMKNRIAGLLMETGTLYNKERLHGKAYFSELLGSLRETPASVIDLLKLSRAQLELFVTIQQRLVKGLRADAGLRERVERLQSIRSVGEILALTWALEIGEVSRFASIADAVSYCGLTSAQHNSAGKEQRGPISKQRNKHLQTILIEAAKLAPRFNPQLAAVHGRELQRGHRNRATLAVARKLVAYLMAVDKSGKPFQVRASAGEANQDEQPVG

SEQ ID NO: 432325 - protein, 468 aa, unidentified
METAKKLWQNRKEKKEWARRLQSEDPGLEVVHPQAAGIDVGNGAHYVAVRPDRDPQPVRRFECFTADLYRLADWLKSCGVNTVALQSTGVYWIPLYDILEERGFEVYLVNARHTKNLPGRKSDVQESQWLLKLHTYGLLNNSFHPASAIRTLRTYWRQRADHVKGAATCILRMQKALTQMNLQLANVISDLSGVTGQKIVRAIVAGERDPHELAKLRDARIQASHEEIAKSLEGNWRPELVFVLQQEVNLYDTYQQRIAECDQQIQKHLATFADNRNPVQPPSPKGEIKKKKKKPTQNAPAFDLSHELKRISGVDLTHIDGIEVMVAQTVLSEVGLDMSRWKTEAHFSSWLGLCPDNRISGDRVLRRGTRRVINRAATALRMAATTLLRSQSYLGAQYRRLRTKLGAPKAITAMAHRLARLVYRMLKYGQQYVDKGAEYYEQRNRQQQIEFVRKKAAQLGLQLIAAHA

SEQ ID NO: 432326 - protein, 414 aa, unidentified
MALVRWVGRAIGLDVHRDFCVVAICEDGKVRSAGRVPSTPDGLGALAESLLGTDRVALEVTGSCWEVARILEPHVQRVVVVSPDDTGISSARAKTDKLDARALATLLWRGELEAVWMPDERCRVLRRRLARRQQLVWSRTRAKNEIHAVLQRRLQGKPPCSDLFGVKGRDWLASLELPLEERESVDAGIRQIEFLNSEIAGVERLIAGQALSWPEIRRLMTVPGVNLICAASFIAAIGQPSRFLSSRKLVAYLGLDPKVRQSGEGPARSGRISKRGSASARWALVEAAWSVVLQPGPLHAFYERTKARRGYGKAIVATARKLAVLFWCMLTRGEDYAHQQPSLTKKKLRRLEITAGAPKNSGRAAGVWATNEMMRDAERQLAQQAEASYRRMVTDQQAGAPARKVGASATPERA

SEQ ID NO: 432327 - protein, 328 aa, unidentified
MCKAIFYVGVDVGQEELWAAIEKSKLCSFKHTVAGVKALWNWVRRSNSEGTLHFCMEATGVYSQNLAAILSTYTDTQVSIVNPAQIASFSKAQLRRSKTDRVDARVILAFAQSQHPRTWKPQPEALQQLHHLVVQADALKATKRQWSNRAHTQAYIHNLPKVVCKTNSALQKSIEKQLTHIEEAIQKLCQTDPSLKTQIQLLCTIPGVKERSASRLLAYGKTALNSYSARALVAHAGLAPSHKQSGTSLRAKSHLTKQGDKRLRHTLYMPALVGIIHNPILRKYYQRLLAKGKPKMLALVACMRKLLIIVRAILTQQIPFNPAIQSLT

SEQ ID NO: 432328 - protein, 430 aa, unidentified
MKSNTQNAKIEAITEKTLVLGIDVGSEMHYARAFDYRGIEYSKKPFKFSNTEAGFVTFKEWILNLKERHEKDKVVPGMEPTGHYWFNLGKFLQDNEMKPVLVNPHHVKKSKELDDNNPTKNDRKDPKVIAGLVREGRYMIPYLPDGVYADLRTASNIRFQLQAELTRIQNRISRWFNIYFPEYKTVYGKPDAKSGMLILKAAPLPEDILTLGIDGVNQIWRDEKLRAVGKARAKTLIEAAEHSVGSKEGAVSGKMEIRMLLEDYESRNTRLQEVMVLIEELIRKIPMAEKLLEIKGVGIRTVSGFLAEVGDISRFNNPKELQKLAGLALVENSSGKHKGETTISRRGRKRLRYLLFEVAMSLVSKNQEFRELHNYYITRRLNPLKKMQSLMAIAAKLIRVFYAMLTKGVDYDPKKMVSDIKRPAVYLQAA

SEQ ID NO: 432329 - protein, 424 aa, unidentified
MQNIAARKRNQVPEGYLIIGIDPHKKRHAAVAITQDFTTQAKFKFDNTREGLEMMLDRARVEMLKSGCRGVMFAIETGGHYWRNIAYYLDERGIPFRFINQYTLKRRREGKDINRRKNDYRDSEVAAQLLCTGEFVESVIPQGVYAELRTSNNAYQRLVKERTRITNLVKGLLDALFPEFTQVFKDPGGLTALSVLSTCPIPRTIAGMTEDAFVATIEARHKGRRLMRKKLKALHYSAKTSIGIDAGARSLSYEIAFLVDKLELIRQQIRIMEGTLVKLVDETEEGKYLLSIRGLNYIAVAGLLAELGCFKLYRSAKQMIKMAGSNPTESESAGKKRSKTPMSKQGRPLLRYCAWTSVIPMLRFNPDFRAWAKQRRERPAHANPLSGREVVGAALNRLLRLAFALVKNQTYYQNVKPVLIPVAV

SEQ ID NO: 432330 - protein, 337 aa, unidentified
MQYTHIFGIDIAKKTIDVALCQNKANDPIITHKFTNNTKGYQTLLAWIKKHGAQIDQLLICLENTGIYHRNLVKFLQKHQAFVWVENAATIKWSGGLQRGKTDKKDAQRICLYAFRNQDKARTFSAKDEELEQIADLKTQREGLIQARVSLEAPIKEKREAGLEKEASMLEEVSKRTLASIEEDIKGIEAKIKTIIEEQEPLLITYQIIRSVPGVGFVTAVNLLVYTNNFKQFNNAKQLASYAGVAPFEYSSGSSIRGKTKVHSMANKTLKTSLHMCALSSIRNNATMKEYYQRKVKQGKNKMCVINAIRNKLLITVFACVRDGKVYEYNHVYKQVA

SEQ ID NO: 432331 - protein, 401 aa, unidentified
MDHCTAGLDWASEAHAICIVEAHGSVRESFEVSHDARGLGELVRRLRRYPGLRLAIERPDGLLVDTLVDAGIAVVPIHPNKLKAARERYTSSGAKSDPGDAYVLADFLRTDGHRFRPLAPLSDQTRTLRALVRTRDDLVKAKVALTNQLAAQLAVFWPGAGAVFYRLDSAIALAFLERYPVPEAAASLGERRLATFLRRNAYCGRKPVGDLLERLRGAPRGLVGPAESEARGECVKALVRALQVILPQISELEGAIAVALGEHPDGALFKSFPRAGEVNAAQLLAEIGDVRERFQSDDVLAMEAGVVPVTKKSGKATSVGFRWACNKRLRRALTGWANNTRRASAWARALYERARARGADHPHAIRILARAWLRVLWRCWQDRVLYDDVRHLAAANARFAA

SEQ ID NO: 432332 - protein, 410 aa, unidentified
MHLVSAELPAKTLVVAIDPGKATHRVLLADGEQGLIGEPVSLPTLREGIERLCALIEQTAAPETVIAIEATGSLHLPWVAELERRLPGSTRLFAPSETQAARTQLGSRRFKDDDRDCAALVSLARQGRGRPVQGGTLEALLDAVRHRRRLIAARTVARQHLHHQLNTLCPGLSAPAGHGRSLGLETPTGRAVLACAVDFAGRAPGPRSLIARAPGRLSRATAELWSERWRSCLAPPADAALRAERLGRDVKRWRALEADVLAVEAQVSMLLIETPGQILTTLPGVAAMRAAAFAVHALPIERFPSAERLYSYTGLAPARYESSTIRKVRAISRQAPGERRDALMGIAWGLSQHCGPFKERDRELRARGMRPIEARVALARHACRLVHRMLQTQQPFDEERYAQTRHRRGR

SEQ ID NO: 432333 - protein, 312 aa, unidentified
MMASQDVFVGIDVSKDRLDVHMRPLGVGFAVGNEAAGYGALIARLRPLRVKRIVLEATGGYERALWLALSEAGLVAAVVNPRQVREFARAAGRLAKTDRLDAAVIAHFAETFVPRIGKPDAVADRLGEHVLYRRSLQDELVALEHQRRRLETPALRERADRRHAALRAEVKEIEREMRAIVDSDPAKKALFACLTALKGVGLVLACTLIANMRELGSLSRHQAAALIGVAPLNHDSGTRRGYRAIAGGRRRVRNVLYVATLSAVRSNPAIKAFYRRLAAGGKPPKVALVACMRKMLVMLNGRVRDELAAAVP

SEQ ID NO: 432334 - protein, 430 aa, unidentified
MKSNTQNAKIEAITEKTLVLGIDVGSEMHYARAFDYRGIEYSKKPFKFSNTEAGFVTFKEWILDLKERYEKDKVVPGMEPTGHYWFNLGKFLQDNEMKPVLVNPHHVKKSKELDDNNPTKNDRKDPKVIAGLVREGRYMIPYLPDGVYADLRTASNIRFQLQAELTRIQNRISRWFNIYFPEYKTVYGKPDAKSGMLILKAAPLPEDILTLGIDGVNQIWRDAKLRAVGKARAKTLIEAAEHSVGSKEGAVSARMEIRMLLEDYESRNTRLQEVMVLIEELVRKIPMAEKLLEIKGVGIRTVSGFLAEVGDISRFNNPKELQKLAGLALVENSSGKHKGETTISRRGRKRLRYLLFEVAMSLVAKNPEFRELHNYYTTRRLNPLKKMQSLMAIAAKLIRVFYAMLTKGVDYDPKKMVSDIRRPAAYLQAA

SEQ ID NO: 432335 - protein, 358 aa, unidentified
MTIVAHSRSFVIGVDTHARTHTLAILKTPTGELVESEQFPTTDAGLHRAIAWAGRRTGGEADALWVIYGARLTALVADSGYQVAEAPRMNARANRGLGKSDPLDAKRIAAAVLPVHQTRLRVLRAGDGARSALRVLLAARRHMSTERNSWANALTAHLRTYDLGIDARRALAGHQITEVATWRTRKEELSLSVARAEAARLAKRITTPDGELRENKNGLEALVVKSLAATLLPITGIGPVNAAVIYAAWSHAGRVRSEAAFAHLAGTAPIPASSGDTVRHGLNRGGDRQLNSALYMAVIVRMGQDPETRKYVEKRRAEGRTSKEIQRCLRRYLARKVYRTLNAAHANPPAWPDISKSL

SEQ ID NO: 432336 - protein, 356 aa, unidentified
MATTRVASIEGFVKGFETWPFSIGIDVHKRSYHVAIRRVDGEAVTWVCPADPQGFVEQIDRLSIRVSAVAYEAGPTGFGLARTLRSAGIETLMAAPSRIPRAVSGGAKTDRLDCLRLADYAAKGMIRSIAIPTPQQEAQRSLERRRHQIVDSLRRSKQRIKGFLLFLGLPEPKEAEHWRRGVVEAVLALPLDPHARLTLESHLRELTFYQNELSEVEGQLRQMARQHRHVLTCLQSVPGVGEVVAMSYMLELFDPERFHRAEEVTSYLGLAPMVRHSGDKTPPGKLRPVGQSRLRSLLIEAAWMWRQYDPYARDLYNRFLSRMGIAQKAIAAVARKLAVILWRLYVERRHYRPAVG

SEQ ID NO: 432337 - protein, 411 aa, unidentified
MKTLHKRCAGLDVHKTEVVACLRVVNRGKANYELRRFPTTSRGLIELGDWLEQAACTHVAMEATGVYWKPVWYILEDRFQQILANAAHIKAVPGRKSDTHDATWISDLLAHGLIRASFVPPQPIQVVRDLTRPRKQLTREIVQHSQRIQAVLEEANIKLTSVITDILGTSGRRILKAIVAGETDPLKLAELGGPRLAATKSQLADALLGRVRPHHRFLIQQHLKTIEQLEETITAFDGRIEAALEPFRDAIERLKEVPGLSETSVQILLAEIGTDMSRFPTAGHLLSWAGLIPRLDESAGKRRSTRVKKGAPWLKPVLVQCAHAAAKKKNSYFQAQYLRLKARRGPKKAVIAVAASILKTAYHMLADGTCYQDLGADYFARRDPRRVVAKLASRIRSLGYHVEVKVAEVAA

SEQ ID NO: 432338 - protein, 346 aa, unidentified
MEHYVGLDVSLKLTAICIVDRSGKIEREGVVTSDPETIAAFVKSHAPHVARIGLEAGATSTWLWTELNKMGLPVICIDARHAKAALKMQINKSDRNDAVGIARIMQCGWYKEVRVKDLDSHAIKALLVSRALLVKIKRDIENQIRGLLKNLGLVIGRAKMNVFAVRAAELDDARPAVAAAVEPLLKARDAVGRQIADLDRKVLRLARNNAQVRRFITVPGVGPITALCFLATIDDPTRFKRSRSVGAYAGLTTRRYASGEIDWTGRISKCGDKMLRTYLYEAANVLLTRIEKWSALKAWGIRLAKRSGLRKAKVAVARKLAVILHRMWIERTEFKWSSKEAANQPA

SEQ ID NO: 432339 - protein, 356 aa, unidentified
MASNEGTEHMIVIGADPHKRQHTVAAVDAATGELRGSETVKATSAGHGDLLAWGRALSPERVWAIEDCRHVSDRLERFLVARSERVVRVAPKLMAGQRRSSRQAGKSDPIDATAVARAALREGLGTLPAAELDERALEIKLLLDHREDLVRERTAIQGRLRWHLHDLWGEDGVPVGGLDRAKWLDRLARRLARCEQTVRVRICREEVARLRMLARRSKELEREIALLVRAHAPRLLELPGCGALTAAKLVAETAGIERFATDARFARHAGIAPIPASSGRSDRFRLHRGGNPLRDPPHRGHPRSVHPPARDYLARKQAEGKTRIEALRALKRHLARTVWRTMIANANAPAPTLVLT

SEQ ID NO: 432340 - protein, 348 aa, unidentified
MAHFVGLDVSVKETSVCVVDDTGKVILEQKVPTEPADIIALLSSLGATYGRIGIEAGPLSQWLVNGLTAAELPVICVETRHMKALLTAQQINKTDRNDARGIAQMMRVGLFKPVHVKTLVAQEQRMLLTSRKLLQRKLLDVESDLRGTLRNFGLKVGVVSRSRYEVRIRELVAGFPRLAAIVEPLLAVRRVMRQQLAVLHKMLLDTVRGDPVCRRLMTAPGVGAVVALTYRATVDQPQRFIHSRAVGAHVGLTPKRYQSGEVDYDGGVSKCGDALLRTMLYEAAHSLLTHSGKWSWLKAWGIRVAQRRGIRRAIVAVARRLAVVLHRMWVDGSEFHWGKNSAAVPAVA

SEQ ID NO: 432341 - protein, 352 aa, unidentified
MERYVGLDSHARSCTLGIMSAGGQRLKSLVVETNGRALVEAVRGIGGRVHVCLEEGTQSAWLYELLKPHVAEVVVAMAPERKGPKSDRRDAWARANELRIGAIETRVFKAPEHLAGLRNAVRAYGFAVTDVVRAKNRLKSVFLSRGISTEASVYDPAKRVEWLKKLSPPHRELAEWLGRQLDHLEPLREEAERLLLAEAKKHPIIRTLSTAPGMGPIRTAQVVAIVATPERFRTRRQLWSYSGLGIVTRSSADWVQDRTGKWVHAQRAQTRGLSRKRHPRLKAVFKGAATTVIAQLPDDPLHADYERMLKSGIKPTLAKLTLARKIAATVLSMWKHQEVYDPKRHRPTSEQK

SEQ ID NO: 432342 - protein, 475 aa, unidentified
MTNEQSRRAHLTPLSGLGAESLYVGIDIGKTKHVAGFLSPTLLERYQRFEACPALAFENSREGFRSLVERLRSFVALEQVYVLMEYTGHYHKLLEQYLQELDIAVYIVHVHKRATGMLKTDKRDALNLANALYSQLELGVQVANKLLLVRRALRPTGAASQLRGLIRHRYELMPESTQRKNKLTAICDELFPELTRVQKDPNLPTALAIREHFPTPHALATASFITLQGIRGTNRSLSDAKLGELQRLASQSIGLKNVDRQRSLIIEQGQLIKELRLLQEHIEVLEAEICQIVEQSREGQILISIPGFGPLAAATVMAAIGNIANFESAAAFKSYLGWAPKRAQSGTSFDRSSLAATGVRPTKQVLYLVVCSALRKKDCEWARLYERLLPRMCTYDEAAQTYKGKKRVIGRIAGQIAAMVYALLKTDHELLSQLAPGEDPPAPLFYDPEVHKRHREGGYQPLKPRRHRQELWQTS

SEQ ID NO: 432343 - protein, 351 aa, unidentified
MIIIGVDYHPSDQYIALVDTETGECGERQLNHSDGEAEKFYRELKLRGIRVRVGMEATGYARWFERLLAELGYELWIGDPAQIKTQRVRKQKTDRQDAQLLLKLLVEDRFPRVWVPSPENRDLRQLLWHRHRMVQMRTRIMNQLQAVAMNEGKKWKKRLWSERGRDQLAQFVLAPWATRRRQDLSELLDRLNPTIEELTAAIEQEAKQRPEVLRLMTHPGVGPITALAFVLIIGTPERFHCGKQIGSYVGLIPCEDSSAGRQRLGHISKQGNTLLRFLLVEAAQAAVRGDPDWRRRFLHLAMRRERRIAKVAMARKLAVRLYWMWRKGWDYQQTLEFGSHAGQLVYVHGVK

SEQ ID NO: 432344 - protein, 340 aa, unidentified
MNETTTIRLDLAKHVFQVHGVDAAGATVLRKQLRRAQVLAFFSRLPRCLVGMEACATAHYWARELRALGHEVRLMPAQYVKAYVKRNKNDAADAEAICEAVVRPTMRFVPVKTSDQQAAVLLHRGRERLVRERTALVNALRAHLAEFGIVAPQGLRNVGKLIAIVRDEKDARLPSLAHQVLAVLATQIEQIETAVAALEKQLMAWHKSNPVSQRLATIPGIGPIIATAIASMVAEPSGFRSGREFAAWLGLVPRQNSTGGKTRLGGISKRGNQYLRRLLINGASANLLRSKATNADPWVIGLRRRRPSMVVAVALANKTARIAWAVMHRQENYQRMALAA

SEQ ID NO: 432345 - protein, 338 aa, unidentified
MFYSGIDQHKRFSYITTVNDDGIIIKQAEIKNNDFDILNYFSSFSKEHLATVETTGGWYWLNDLLSSNGISLKLAHAKYVKAIAYAKVKTDKVDSHILAQLLRMNFIPEAYKISDSVRPLRDTLRARLRLSQKRTSCLNFMNRMLEKFNINDSASLSDFYKLQYQQFDNQVHLLKEQMLILEKSLYPSLIPNEDIQRLLWIPGIGKMNAFTLLLEVGDINRFESEKNFLSYCRLVPSARNSAGKTKQRSSKDGNKYLKLVFSDAAVHALQYYPVIKKYHDSKLRKKKKQVAHAIIAKEIARIAFYVLKYKSDFNNHFKGVYLENKKSFQWPRITSPDV

SEQ ID NO: 432346 - protein, 348 aa, unidentified
MDQVSRIGMDTSKHIFQLHGVSADEVPVLRKKLRRKDMVTFFAKLAPTVIAIEACGASHHWARLLQSLGHSVKLIAPQLVKPYVKRGKNDAADAEALCEAMGRPTMRFVPVKTAEQQAGLMMVGVRDRLIRNRTQLANAIRGHAAEFGLTAAKGMAHLVPLLDRIEADESLPALARELFAIQAKEYTQLQTQIDEVDTKLMAWHRADECSQRLVKIPGVGPIGAALLRMKTPEPELFRSGRQFAAWIGLTPKDHSTAGKVRLGVITRAGDEALRSVMVVGATAVIQHVRRGGRAPHWLAELLKRKSPKLAAVALANKTARIAWKMMVTGETYTAKSVAATSAGAVSHA

SEQ ID NO: 432347 - protein, 472 aa, unidentified
MELRHRSRLLWAKSPSTKLVRGSLIAPPSVEPKSETTHSKMIRAENHAVIHLSVRREMERVYDICCGIDVHKKVLVACLRVGRKQEIRQTGATTRELLELADWLKSNGCQMTAMESTGSYWKPLYNILEMNELPAMVVNASHMKAVPGRKTDVTDAEWIADLVQHGLLRASYIPSKDQRELRELVRYRKSLVEDRTRELNRLQKMLEGANIKLSGTVRNINGMSARNILNYIVEGNQIDETKYDEMYRQKQISHGLKATKEQIIDDLNGVMTPLQRRVMKELLAHLDELNEHIRNLDDEIDNFMKPEEKRAAEKIQEIPGIGHTSAEAIISVIGTDMSRFPTDKHISAWAGVCPGNNESAQKRRSGKARKGNALLRTTLTVCAQAAVKVKASYFHAQYVRLCAHRGKKRAILAVAHSMLIAIYHVLKEGVDYCELGADYYNQFNRDSKINAYLKKLNALGWTIPAATATLPA

SEQ ID NO: 432348 - protein, 306 aa, unidentified
MKAVGIDVGKTALDVAVHGDSAVRRFANTTVGIRKLLKALIGFGELRIVVEATGGYEEAVLNACTEHGLWIARVNPHQARSFAKALGQLAKTDALDAHVLAEMAHALHGRMRAYTAQATWQVELRGWLRRRHQITEAIQRTRQQCAMTLPVIRALMQKTLAALRREQALIDRALRELLQSHATPAKRSAKGLGPQFQASMLALLPELGQLTRRQIAKLVGIAPLNRDSGQSHGVRRIHGGRAEVRVALYMATLSAVRWEPMMKAHYQQLRTRGKVAKVALVACMRKLLTIVNARRRDEILIASTTT

SEQ ID NO: 432349 - protein, 341 aa, unidentified
MKNKSFIGIDISKNVIDVSIFCEETPIKDFSHDVFNNSRKGFGEMCTWLKKNHVVLSNSLFGMEFTGSYSMELEKFLYARNYQFCMLSTHVVKHYPMGSKDKSDKIDSAKIADFLYRYNGTECVKPYKMPDKTMQRLKTLMNERKFLVEQRTCFMNRRQLCSTKEDAQLYDGYIRKLGHDIENIELEEQKLLATDDSLLTTYKNLLTIPGIGFVNAINAIVITRNFTAFETARQYASYVGVAPHSHTSGTSVRWRPRPSARCDGQAKADLSMAATVAVQYDAELQSFYNRKLGGKQDSDTKRKALNAVKFKLVLRMFAIGKQNRKWEPLDSKSSNEKLAIS

SEQ ID NO: 432350 - protein, 322 aa, unidentified
MDAQPHASPSAIGIDVAKGHCDVKFPDQTRTVAFQFNDAGFKGLLEQLVRFPNAMIVLESTGGYERRLVAELVAVGHRVAVVNPRRVRDFAKALGQLAKTDSIDAHVLALFGDRMQPRESEKSSEKQQELQQLVVRRRQLVVLRTAESNRFEQTTSQFALKGIRQVLALLDKQRAKLDAEIARLIEADDDWKAKDEILQSVPGIGPGTSATLLAELPELGRINRQRVAALVGLAPFNSESSTIKGRRTIKGGRRSVRCALYMAAITARRCNPVFQTFAKRLEQSGKRFKVVITACMRKLLVTLNTMIQKKTAWNQQITPASP

SEQ ID NO: 432351 - protein, 410 aa, unidentified
MSTSNGSVTRFIGLDVHKRSVMVAAVDAHQQVVLRPHRLSWDEFELWRQQHLHPTDAVVLEATTNAWHLYDQLVPCVASVVVANPLLLRWISAATIKTDGHDALKLARLLAAGLIPAVWVPPEPVRQLRALVSHRHRLIRQRTQARNRLHSVLQRHNLTPPAGEPFTAAHRAWWEQLSLEPLEKLLVTQNLQLLDALEPLLAQVEQQLYLASVQEPWVRQVPYLVQQTGIGVLTAMVLLAAIGDITRFPHARQLVGYAGLGARVYDSAETHHGGGITKQGRRDLRAALIEAAWVAVLHNAYWKARFEKLCRRLGKEKAIVAMARQMLVVVWHLWHDHELDRHMDTVTLARKLMTWAEAGGRAMRQGLTAPQFVRLQLDYLGVGQELTELHYGSHVYRLPPPGSVKIADAR

SEQ ID NO: 432352 - protein, 427 aa, unidentified
MSVTQNDKIRQVTDTTMVIGVDIASEFHWARAFDWRGLELGKTVKFENSAEGFNFFLRWVSELTVEQKKDSVMVGLEPTGHYWFTLAAHLQGGDFKLVLVNPYHVKRSKELDDGHPSKSDKKDPKTIAKLVLEGRYVYPYIPQGLYAELRVAMNCRWRIRKELASLQNQIQRWLKIYFPEHSKVFGRFTGAGSMALLHSAPFPSDLISLGVEGISGIWKQMKLRGIGRKRAQRIYEAAQTSVGCTTGMEAARMELQILLEDYDAKLQQYERVMQVVENLCSQIPAVAELLKIQGLGLVTVAGLFAEIGDIRRFESPRQIQKLAGLAITENSSGKHKGPTEISRRGRSRLRAILFRAAIPLLAKNREFQLLHRYYTTRQNNPLQKIQSVIAICCKLLRVFYALATKDCAYSPEKVLADIQRNQPLKAA

SEQ ID NO: 432353 - protein, 400 aa, unidentified
MLSIGIDVSKGKSTVCGMKPGGEIVYAPFEVQHTREGMSELVSLLHNSGEEVRVVLESTGSYHCPVVAALLENGIFVSVVNSLRMKRFCSQSIRKVKTDRIDAMQIALYGLAYWQELQPTRLPENTYRELQLLARQYYQMTSMLIKAKVDFNALCDQVLPGMQELMNDHAGRHKLSDFVLRYRHTTHILEMGETRFRKDYCKWAEKKGYRNRERMAALIFATAQNGIPVLPNAPSTQIVITEAIRVLHTVEASRDAILTQMQALAKTLPEYSLVREMPCIGDTLAPRLIAEIGDVRRFHSKRALIAYAGIDAPPYQSGKFCANNRHISKRGNRYLRKTGYEVMQSYVMHKPANDPIFTFIEKKRGEGKSGKLAMVAGLNKFLRVYYGKVTELYRSLSAIE

SEQ ID NO: 432354 - protein, 337 aa, unidentified
MRFCGIDLHSNNSVVVVTDETDKVLLSRRCPNDLPKILALLAPHRAELVGVVVESTYNWYWLVDGLMAEGYDVRLANTVAMKRYDGLKHSDDETDAAHLAHLLRLGILPTGYIHPPTERALRDLARKRIQLVRDRTRHVLAAQNILARQTGGCVSSNAVKRWIAADVDALGLAADVCLAVQSNVAIIAALNLEIGRIEARLLEGAKLRPDYARLKSIPGIGEVLAIVIMLEAGDVSRFAQVGNFASYARCVDSARYSNGKKKGEGNTKNGNAYLVWAFIEAANFARRFNEEARRFFDRKKARTNGVVATKALAHKLARASYHVLKTKQPFDVKRCFV

SEQ ID NO: 432355 - protein, 341 aa, unidentified
METICTIGLDIAKHAFQVHAATASGHVVLQKKLRRQQVLSFFSAIPRCTVAMEACAGSHYWGREFERIGHQVKLIAPAYVRPFVKRQKNDAADAEAICEAAQRPTMRFVGVKTEDAQAAAILFRARDLLVRQRTQIINALRGHLMEFGIIVAKGRQNVVKLIKLINESDDTLPPGARPVLALLVEQLRAIDMQVARLDREMIERAKENGITRRLMTIPGVGAVTAAAITALAPAAATFRRGRDFAAWIGLTPLQRSTGGKERLGRISRMGDRTIRRLLIIGASAVARWAVRNGTPAGSWLAQMIARKPPMLLRVALANKMARTVWALLAHGGIYRAPVAAV

SEQ ID NO: 432356 - protein, 411 aa, unidentified
MMLQATLERSALVVAIDPGKVMNRVWVSDGEGLVTEPRSMPVSRAGIGDLERAVDGHACGHSQLVIAIEATGSLHRAWAAELERLHPGSVRLFAPSETKAARTQLGSGRFKTDDRDCAALTYLARQGAGRGQLEEFAVDTLRAAVRHRHGLVEDRKKAQQRFHDQLNTLCPGLSAPAGHGRSLPVGSPTGQAVLACAVAFAGRPPTSRSLSARTRGRLTKATAEYWISRWRGCLSPPPDAEQRARRLGRDLDRYRALQADITALEEEIEVLLAGTEGQILTSLPGVAVNRAAAFAAHSLPIARFPDAEHLYSATGLAPAMYQSATLRRRGSISRQGLAERRDALMGIAWGLSVYSPAFAQRDAEYRARGMAPIQARVAVARHACRLIYRLLVTQQPFDEQAYRRGRLNPGR

SEQ ID NO: 432357 - protein, 423 aa, unidentified
MKLTYPICCGVDVHKTFLVATIITSEYVMPHYYQKRFSTFYNGLVAFKKWLLEYDCKDVCMESTGKYWVPVWNVLEDSCHVVIANPKWVSAVKGNKDDKKDSKWIGDLFRMDLVPSSYIPSKDIRILREFTRSRSKLVSMRSSEKNRFQNAFTVCNLTLDAVVSDMLGKSATDIENYLLDTDTVDPEHCVSLLHRSLKKKASDVVEAVSGFNMTPEQKERGRIVQEHFADIDHRIAQLDEIIGDLVAEYEGQISLLCTIPGIDRRTAITILSEIGTDMSQFGSSKRLCNWAGLAPASNQSAGKKKSVRISRAGVYLKPALVEAAHAAVKSTEKQPYYRIKFERLMKRRGKKRATIAIARMILTAIYAMLSTGEVFNPSDLKKFDMPEDLKRKQTLSSAKEAVKLLVSLGLVTAGSISLDALAG

SEQ ID NO: 432358 - protein, 390 aa, unidentified
MSQSFDASRSLTAFEQDSTLVAVIEMSQSKWLVAGTIPGVARQPLKKIDADAEALLKLLQRWRDEARKAGRTIERIVCAYEAGRDGFWLARWLQARAIETYVIHAASIAVSREHRRAKTDRIDTELLMRSFLGWLRGEKRHCSMVAIPTVAEEDARRPSREREGLVGEQTRIVNRIKAVLALFGIGGFNPRLRKAAQKLETLSTVEGAPLPENTHAELRRDLERLHLVREQIRNIESDRLRRLAQAPAATTGRDAMVRLIARVFGIGIETADMLANEALARNLRDRRAVARYAGLTGAPDESGKRRREKGLARAGNSRVRRGMIQLAWRFLIFQKDSRLVRWFRARTADGRSTTRKTMIVALARKLLIALWRLVTTGEMTEDIKLRPAAA

SEQ ID NO: 432359 - protein, 346 aa, unidentified
MGTQITGGVDTHLDVHVAAVLDDHGGLLATASFDTTPAGYAHLADWFVSFGEIVVVGVEGTGSYGAGLTRPLHSRGVRVVEVDRPNRQRRRRAGKSDTHDAVSAARAAFAGDALGAPKTRDGNVEAIRVLRLARTSARRDRTRALNQMRALVTTAPDELRSQLRALTIPKLVRAAAGFRPAGRTDVGSANRLALKTLARRVLELDDEVATLDDVLVPLVAETAPEMIERVGVGTDTAGALLVAAGENTSRIHNERSFARLCGAAPLDASSGKQQRHRLSRSGDRQANSALWRIVITRLSYDPATRRYLQRRCAEGKTKAEAIRCLKRYVARELYACLPQETLLDGT

SEQ ID NO: 432360 - protein, 317 aa, unidentified
MLLDDSVNCSVGIDVSKARLDVHLRPEGRSFQVPNTPDGHALLLTNLPAPGTCRIVLEATGDYERRVVAELVDAGHTVSVVNPRQIRDYAKALGLLAKTDRLDAKVIARFGADVKPRPFVKLPEKQVELDELVTRRRQLVQLRVAEENRFRDGVAKLVLKSVRRSITAINQDLARIDRAILNLVQSDDDWKQRFELLKTVPGVGDTTAAALVAELPELGQLNRQQICALVGVAPFCDDSGQRTGQRHIRGGRKELRSALYMAALSGMRHNPILKAFAQRLKERGKQGKVYLTACMRKLLVILNTMVKTNTPWKMIPA

SEQ ID NO: 432361 - protein, 347 aa, unidentified
MDYFAGLDVSLETVSICIVNATGDILVEKKVEAEPSAIITVLKHFARPLKRVGLEAGPTSSWLYSELRGNGYPAICLECRHVKAGLSAMRNKTDRNDARGIAQLVGLGWFRQVYVKSEEAQRIRMLLVNRQQLLTKALDLENSVRGSLKVFGLRVGTVTRRTFESRVLELVAVDRVLTAITEPMLRVRRALIEEFERLDRLCRRLARGDIVCRRLMTVPGVGTVVALTYRTGIDAPERFSRSRDVGAHFGLTPRRYSSGQTDYDGRISCCGDAMVRTALYQAANVLLHHGRWSSLRSWAMRIAKRSSVKAAKVALARRLAVVMHRMWVDGSDFRWSSAATAVPTSRQ

SEQ ID NO: 432362 - protein, 337 aa, unidentified
MIAVGVDTHKDTHVVSALDQLGQLLGELTIEASAVGYGELVAWTRALGDDIVIGIEGAGSYGAGLCEHLKHKGLRVFEVERPRRRERRAGKSDRIDALAAAKRVLAAEGLSTPRAGGIRRGLGALLAVQRACVGERTRLLNQLQALCVTAPPALRERIGRGGGEQLQRRIARMRARPAADAEERVVFELLRDLARRSRTLGELARRYERELAQLVRSLDATLLDEPGVGPISAAKLLVADPVRFKHEGAFARCNGTAPLPASSGKTIRHRLNRGGDRQLNNAIHTIALSRSLHHPETQAYLKRRMTEGKTKREAMRSLKRHLSRRLYKRLITVPLTP

SEQ ID NO: 432363 - protein, 311 aa, unidentified
MTEHATVGIDIAKDTFDVYIDPTRQLLHLDNTPEGHQQLLSSLSAITVKLVVMEATGRYHSLLAATLELAGLPVAVVNPRQVKNFARALGPLYKTDPNDARIICEFGRRMEPEARPTPDEQTQRLAGMVTRRRQLVDNRTMEINRYKSCDDVVVSAGIKRHIDWLTAEIRDADDDIDKQIKVMPLWREKATLLEEVKGIGPTTMAVLLAMLPELGRLNRHKISALVGVCPYAHDSGKMKGKRSIWGGRSAVRSALYMATLSAVRYNPTIREFYERLTGRGKPFKVAVTACVRKLLTILNAMLRDNKSWVTN

SEQ ID NO: 432364 - protein, 365 aa, unidentified
MFTERTSAGLDVHARSVAAAAIDGVTGELFQARLTPSYDHITAWLRERPGPVAVAYEAGPTGFGLYRHLMSAGIRCEVAAPSKIQKPSGDRVKTDAKDAVHLARLLRLDDITPVAVPSVEQESARDLVRAREDCRGDLMRARHRLSKLLLRNGIVYYGGDAWTGKHEVWLRREALPLLGSRTGRATTLTFDNDYEAVMATLARRKRLDALIEEMAADSQFTAMVRRLGCLRGIGTLTGFALAVEIGDWHRFTGNSIGSFVGLVPTEHSSGESRSQGSITKTGNGHVRRLLIEAAWHHKPRYVVGKTMRDRWDLAPAAARIRGDEGNRRLHDRWVRFIARKKKTTIADVAVARELAGWCWSLAVLE

SEQ ID NO: 432365 - protein, 403 aa, unidentified
MNSVGIDISKGRSTIAVMRPFGEVVISPFEVRHTCSELSKLARQLKSLDCETRVVMEATGNYHASVAKLLHDAGLYVSVVYAKLVHDYGNNELRRVKTDRKDAVKLANYGLDRWLTLPRYIPEEDTRLLLRNCYRQYRQYSKVQTVLKNNLISLLDTVFPNANRLFSSPIRGDGSEKWVDFVAEFWHCRCVSEKSERAFTSKYLRWCRKHGYNFSEAKAHTIYAEASGHIGVMPKSETTKLLVEQAVAQLRATSTALAALKLEMQTLASQLPEYPVVMDLFGVGPTLGPQLIAEIGDVRRFYSKKALVAYAGLDAPPNDSGDVTGRHKSMSKIGASSLRRTLFLVMSVYLQNAPLDEPVYQFMDRKRAEGKPYRVYMMASANKFLRIYYATVKAYLESLEHTA

SEQ ID NO: 432366 - protein, 414 aa, unidentified
MLSPEIRCVVGIDVAKQAHVVCALEAPSGTIRHKPSRIEATAEGYALLLAWLETWSAREMILIGLEATGPLWEPLYDTLTQHGYAVVLLNPRQTASWAASLGLRAKTDGLDAHTLARGLLAGWARASTLPSESIQALRTLTRARRDLIQSRTAARQRRHDELVVLFPEFVRFLPSLPGRTDLGTPAVLQLLSTYSSAQALAHAAVDDLTTTLEHVSGGRWGPDQAVSLQELARRSTASSRAVSARSLVARTLALHVLELDAHIAELEAASADLLKDDADGQRVQQIPGIGPQGAATIRAELGDVTRFGCVDQVVAYAGLDPRTRQSGAFIGQKRLSKRGPGALRHALYLAAFVAARCAPEWRIRYARLLDRGRAKKEAFTILARALLRVIYHLLRTGEAYDPALLKQPSAPTAA

SEQ ID NO: 432367 - protein, 384 aa, unidentified
MIYVGIDVAKDKHDCFIVNSDGTVLFKVFTIANNLDGFNNLYQKIESVMKDITKVKVGLEATGHYSYNLLGYLIDKGLTTFVINPLHTNLYRKSLSLRQTKTDKVDARTIASMLMSDVNLKSYSNISYHNEELKSLTRYRFNKVEERSKLKSSVSRLVCILFPELEKLVPKLHMASVYAMLSEFPGAKHVADAHLTRLTGLLSGSSMGRYGKEKAITFREAARISIGSNMPAKSLELKHTIKLIQELTTEIDEIEKEIKIIMDKINPSILSIPGINYRMGAMIIAEIGDFSRFDSPDKILAYSGFSPSTYQSGQLDGACSHMEKRGSRYLRYALYNAAKYVCHWDPTFAEYLAKKRAEGKHYNVAISHAVKKLVRVIYHLEKTK

SEQ ID NO: 432368 - protein, 354 aa, unidentified
MNSTQVFEKRKIAVAIGIDLAKDHCDVVAYNADNKICFTKSNWAYPHLMEWLANAQPAVVLMESCKGCHVRARDIADLGHDTRLVKGADVKALRNVCQKNDIRDADFIARLLYVPGTKFVFVKNQRQQSLQFLQNEYKSFQELRIQVGNQIHAGLEEFGCPAPKSQKFVQTRMMAHLEKNAELIPEAVMASFHRRREMWLNLFEQEEEAKKRMEEIAKTDDDAKRIMTVPGVGAQTAVGMLVHIGGDIGRFKNSGQFAASIGLVPKQNSTGGNTTLNGITKCGPKRLRANLVQCGQVILMHADKLKGNFGDWVRKLRDSGKKRGVIACAIAAKIAKIIYRLMKDKVDYTPVPSR

SEQ ID NO: 432369 - protein, 452 aa, unidentified
MSRKLKAKRSKPADRLEGIPVLNPDAAGMDIGATEIFVAVPADRDTETVRSFPTFTEDLHTLADWLQQCRVDTVAMESTGVYWIPLFQILEARGIEVHLVNAQHVHHVPGRKSDVLDCQWLQYLHSVGLLRASFRPEQAICEIRSLMRHRESLVQMACVHVQHMQKSLDQMNLQIHHVISDITGVTGLAIVDAIVAGNTNPEELAKLRDYRIKASVETVTKSLVGDYRAEHIFTLKQSLKAYRYYQQLIADCDQEVQQRIESFETKDGGTGNTGDGDSPNTTMGTFDLRAHFQRIFGVDLIAIPGFDVLRVQTIFSELGADLSDFPTPASFSSWLNLCPKDGISAGRKIRGPKLKTKNRVSQVFRMAGQSLHNNRSFLGDYYRRQRARFGPLQAVKNAGHKLSRIFYHVVTTRQPYDETVFAKLEARHQQHRLRKLQNLAKQMGYSVVPTPA

SEQ ID NO: 432370 - protein, 342 aa, unidentified
MGRAIGVDSHKNCFTVCFLKSETDYETKTYGVNAKGLSDFKKHLNPEDEVAVESTGNTAYFVREIEGKVKRVRIVNPVQFKVIANSVKKTDKIDAFTIATFLSKDLIPEVRMKTQEQAQTSSLIGTRDKFVKLRTALKNKIHNILNANGIVSRPEMFSSEKGLERILKLPLEDSYRFEIDLLVGEIRHLNASVEKMNEEIKTRGQKLPGHKNLVSIKGISDTGAAIFLNAIGNVNDFKDEKALASYFGIVPRVYISNQTVQHGRITKMGNKIARTALVQSTLVAVKYSPYLKAFYERIKTKKGAGKAIIATSRKMLGIIYNTLKNNWIFEDFTKFKLAPQCA

SEQ ID NO: 432371 - protein, 364 aa, unidentified
MVRKAYYIGMDVHKDSVQIAVFEETGNEPIYERRLANDTGLLVKEVMRFSKQGKTEAAYEAGCLGYVIQRAMEKAGVVCYVLPANKVAKRRDDRIKTDKRDARLIGRELRSKTIRPISVPDEADEAARDLLRCREDVNEDLRRAKQRILKFLVRHGHIYDDGKSHWTLKHWRWMDRLEFEQEHERTVYEEYRSQIRALEERLTRLEQQVRETAESPRYKAAVTKLRAFKGVDYIIALSVVCEIGDFRRFANAKAFMSYLGFVPSENSSGGKRNQGGITKAGNGHLRTLLVEGAWHYTRNARAGKRLEQRRQGCPVWVIDVADRALHRLHKKYFRLLMNSKHKNVAVTAVARELAGFIWAVQVSA

SEQ ID NO: 432372 - protein, 344 aa, unidentified
MKILALDLGMNKSVACVLDTDSHAYAFETFRTEPRKLRELMLAVQPNQVVFEVCSISGWVRDLCEELGCRYDVANPSHEAWRWRHVKRKSDRIDALKLARLAAMNQLPTVHVPTREVRQWRALVVYRHTLVRRRTRVKNHIRSLLLTHGLRLPPGQGGWTKAALAEIHDHVASEEPGALWKVTLRVELDQFEAVSRAIERVEQELDAIAIRRPRVALVQTIPGVGPRLAELIVSVIDDPHRFRTGRQVGSYAGLTPRQYQSGESNRRGRISRQGNPLLRAMLVEVSWVSLRYNPVIRAVYERTCRGSRARRKIAIVAVARRLLVWAWAMLRDNTPWRPPQPALT

SEQ ID NO: 432373 - protein, 392 aa, unidentified
MKEKAWAGVDVGKGFHWAHVVGASGEALLSRRVENDEADLLALIEEALRLAGDVVWATDQPGGSAALMLALLWERGQQVTYVPGLSVDRARDGYRGESKTDRKDARVIADQARMRGDLGRLEPGEESLAELQLLLARRRDLVADRTRALTRLRETLLALFPALERVLRFNTTGPLVLVARYQTAGAVRRAGRKRVTAYLKKRGVAKADALAEKALDAAGRQKSRLPAEDVAARIVADLAGEVLALKERVEELDEEIGRRFRERPEAPILLSFPGMGPILGAEFLVAVGDASAFGSADRLAAYAGLVPAARDSGKRVGNHRKGRGGNRVLKRVLYQSAFASLRAVPESRAFYDRKRSEGKRHTQAVIALARRRVNVLWAMLRDGSTFEARTAA

SEQ ID NO: 432374 - protein, 375 aa, unidentified
MKNFSTFIGMDVHKETIAVAIAEKHGTPRYYGEIANTSEAITRLIKTVVPNGGRAAFCYEAGPCGYGVYRQITDMGYRCDVVAPSLIPKKAGDRVKTDRRDAVTLTRLYRAEELTAVWVPDQEQEAIRDLTRIREDMKSMERHARQRLSGFLLRNKKIYTGKNKWTQAHFRWLEKIRFESPIQQIVFQEYVDTVKQLQGRVASLEEEMWKALSGWSLGIVVEALMSLRGVNLVTAMTIVAEIGDMSRFESPRQLMAYLGLVPSENSSGKRQRRGEITKTGNSHVRRVLVEASWSYRLPARKTAHLQRKAEKTTEAVQAIAWKAQKRLCRRYWHLTFKGKLKVQACTAVARELAGFIWAIAREIMGKNNGPVVIAA

SEQ ID NO: 432375 - protein, 412 aa, unidentified
MKLFAGIDVSSEDLKVCAMNIDGDTLDAFTVLNNYDGATHLRDKLLFLAEKMKTKEIHIGLEATSVYSWHPAMFLHEDNSLQKRGTKVFTINPKLISKFREAYSDLDKTDYMDAWIIADRLRFGRLPMTMVMQEQSIALQRLTRMRFHLVHNLTREKQYFLQHMFFKCSAFTSEVESNVFGHAITELLLERYSLDEIGSMELADLADYLKKKGKNRFPDPEKVAKCIQKAARSSYRLSKCVEDTIDILLATSIESIRTIKQQIKQIDQAIERLLDGIPNTLETIPGIGRVYCAGILAEIGDIHRFNDQAAIAKYAGLTWRKHQSGKFEAEDTKRIKSGNRFLRYYLVEAANSVKRYDQEFRDYYQKKFAEVPKHQHKRALVLTARKLVRLVDVLLRNDQIYTPRRRVNTANE

SEQ ID NO: 432376 - protein, 360 aa, unidentified
MNTVKQVRGQDKLTVTAGERLYVGVDVHKHTFHVAVWSQERGVVKTWAQPGDGRILMEALTPVRGHITEVVYEAGPTGFGLARALTAEGYSVRVIAPSKIPALPGRQAKTDRLDCIKPAPHAAGPRAHRGVCIPTEQEEADRQLTRLREQISRKVRRVKVQIKSFLLMHGIAEPPGLANWSVAAVKGLRELALREELRFALDLLLEDLDAMNALLRKAGARVKTLAESGRYQAHVKLLRTEPGTGLLTAMIYLTQLYQPGRFEEGIEVACFTGLAPGVSKSGLTERGGPLLKTGNARLRTVMVEASWRSIRLDPALRQRYQRLLRNTGNVKKAISGVARWRSICMWRMLTRNEPYRLHAA

SEQ ID NO: 432377 - protein, 408 aa, unidentified
MNTLYVGIDVSSKSNVVYLMLPNGDKHSNFSVANSHEGSTQLVKRILSALASHSLDTVLIGLEATSVYGDNLVYFLREDATLAPFNRKIHVLNPKQVKKFHDAYNDLPKNDYVDSFVIADCLRFGRINKEVYMGDYRYKALQNLTRARFFAVQNLVKEKQRFMNVLFKKYSTMTQEKVFSDTFSTTALAVYDEFESAEALANMDLHELTDFIMKKGKNRFPDPDAVAKAIQKAARSSYRLPKTVNDSVNQVLSISITSMKALESQIKEFDKAIKAQMELLPNVLISIPGIGPVYSAGIMAEIGDINRFNSQAALAKYAGLAWKQHQSGGFESEVTRLIPSGNRFLKYYLCEAAFSLVRCDKEYSDFYHLKYKEVNRCQHKRALALTARKFVRLVFRLLKDNRLYCPAK

SEQ ID NO: 432378 - protein, 359 aa, unidentified
MTMLAEPNEKIEDPTVLDAVVGGDTHRDTHQLEMLTGAGVMISTISIDNDADGYAAAIAWIVEHAPGPRVLVGLEGTRSYGVGLCRAVQAAGLQVVEVEQPKKGQRRGRGKSDPIDAHLAALTVLRMPADRKALPRSDGDREAMRILLVARNEISTTRTAQINRLRALLLLGDDEDRALSRGAMSKAHLDRIGRRRGRRDETREQAVRRGEARRLAIAIRAADLELTANHKQLKTLVQAFAPGLLDRKGVGPFSGAQAIVSFSHVGRCRDDAAFAALAGASPLPASSGRTDRHRLNRGGDRQLNRALHTIMLTRWRDCTRTNAYIQKRRNEGLSDRDIRRCLKRYIARELFRALTAVGG

SEQ ID NO: 432379 - protein, 341 aa, unidentified
MDTVSLVGIDLGKHCFHLHAQDASGRMVFRKKLTRSQMFALLGNFPSCTVVMEACAGAHWIARRLQALGHEAKLISPHFVKPFRQGNKNDFADAQAICEAASRPSMRFVSPRNEAQQVVSALHRVREALVRERTGTINQIHAFLLEFGISLPRGMAVIRRLPAVLETQALPPRLVAVLERLQAHFKYLDEQIGQLEHELLTQLHEDERSERLLEIPGIGPITASMLMSELGDAHQYGSARQFAASIGLVPRQYSTGGKPTLLGISKRGDKELRRLLVQCARVIMLGIERRTDSLGTWVRSLLARRHSNVVACALANKLARIAWAILAKGTHYRSAPAALAA

SEQ ID NO: 432380 - protein, 354 aa, unidentified
MIIIGADYHPGFQQIAFVDTDTGEFQERRLEHREEAEKFYRDLKARGTSVRVGMEASGHARWFERLLSELQFELRIGDAAEIRTKRVRKQKTDRQDARLILRLLMEDRFPRIWVPSWENRDLRQLLWHRHRMVQARTRIMNQLQAVALNEGLRCKKRLWRDKGREQLESFRLAPWASRRRRDLLELLDRLTSTIAELTQAVEQEAEKCPEAQRLRTHPGVGALTALAFVLIIGRAERFQCGKQIASYLGLVPLEESSGQRRRLGHITKQGNSLLRFLLVEAAQVTVRSDPEWRSKYFHLAMRRGRKIAKVAMARRLAVRMYWMWRKGWDYEQLNKFGSHAGQPGNRDGVKLNTE

SEQ ID NO: 432381 - protein, 422 aa, unidentified
MAVYCGIDWAEGHHDIALVGDHGKLIAKRRINESVDGVAELTGMLAAAGDNEHDPIPVAIETPRGLLVAVLRASGRPIYPINPLAVARYRQRTSVSGKKSDHVDAMALANILRTDRHLHRMLPEDSALARSITVLARGYQDAVWRRTKLVQELRAKLREYYPGFLAAFAAGSGSGRGLSTTQLASGDARAVLAIAPSPAEAATVSKARIETALRRGGRQRRITTLAASVFAVLRVPRLRQDPAVEQAMRTQTLALLGVLNAVCDSVDQLAAALTAAFAQHPDYEIITSFPGLADISGAIMLAEIGDDRERFTDDRALQAFAGSAPVTRASGKSRTVTRRRTKNNRLAGIGYSWAFTAAARPSPAREHYLRRRERGDGHPAALRHLFNRMLGQLHHCLQTGQTYDPARAFPHATPANAEPVAA

SEQ ID NO: 432382 - protein, 369 aa, unidentified
MTYRIAGIDVHKRMLAVVIADVAVEGEYQFERRKVGTSPSDWCRLADWLVAEQVEEVVMESTAQYWRPVWATLEQWWRPKLRESAGARSGQLHLAQAQSNRGAAGRKKDFPDAERLVKRLVAQELKLSFVPDVEQRLWRTVMRRKHQLTRNRVQFQNRLECLLEEAHIKLSSLVSDLLGKSARYMLQAVAEGETNPETIVALADHRLRATAPQLRDALGACRDLHPVYRQLLKMALEELKLMEEQIDKLEQEMASLLSAQQDVVQRLAEVPGLGVDSAQQIIAEVGPEATAFPSAKHLASWVGVCPGEEESAGVNYSHRSPKGNRQMKGLLNQASNAAVKTKGSIFEFIYRLGSAMFRPLELLHTVCVD

SEQ ID NO: 432383 - protein, 374 aa, unidentified
MAKRVKESGTSPRREGPSVDTLGPARATPSRRKKEAPVERQYVGIDLHRRRSVIVRKNAAGEVLGKVRIENSAMALAEAVAAAGPEPEVVLEATFGWYWAADVLEEMGARVHLAHPLGNNWGHRRVKNDERDANDLIDLLRLGRLAEAWIAPPEIRELREIVRYRLKLVRLRAGLKAQVHAVMGKHGVLPTHTDMFCIGGNAELDKLEFPDAYMIRLDSLRDLIDIYDREIAELDRRIPKFLVNHQGYRAIQAIPGVGTLLGAVFVAEIGDVTRFPSPDRLASWAGMTPKHRQSDTKVQRHGISKQGSRHVRWAAIEAVSRHHGGGKIKADYRRIAERRGRNVARVAAARKVLTLVYYGLRDGEIRCLAESREG

SEQ ID NO: 432384 - protein, 427 aa, unidentified
MPHRIAGIEVHKRMLAVVVSDVEVADEYQCERRQLGSNPAQLRALAEWLLEQQVQEVVMESTAQYWQPVWGALEQYWKPPCQKSEGARPRSGSLPLAQAQSNRARRGRKRDFLDAERLVRRFVANELVLSFVPDPEQRLWRTLMRRKYQMTRNRVQLQNQLEALLEEAHLKLSSLVSDLLGASARRMLRALADGETNAVALAALADYRLQATPAQLQDALGACAGLDPTYRRLLSMALEELQLLEKQIGQLEQEMADRLRPHQDAVQRLAEVPGLGADSAQQILAEVGATAATFPSEGDLASWVGACPGDEESAGRSYSHRSPKGNRQMRRLLNPAANAAVKLKGSIFALLYRRYVTRLGHNVTIGIIAHRLCRLIWKILHQGIRYEERGPAASEQSKRQRARRMIRELRSLGYRVELPNPQPAVPA

SEQ ID NO: 432385 - protein, 317 aa, unidentified
MLQDFFYLFFYLLKLSNTISELNKFFKKFLKEYNQSAFLVCCEFTGHYTYPLCFVCEDLGIDLWLASPYQIKHSCGLVRGKTDKIDSRRIADYAFRFQDKCRLYSLPDKKLASLKVLVSERDLYVSHKIALQGQLTDQKNFMSAMDYSRKSKRLKGLLKGLDKNISTIDKEIEKFINNDATLSNQHKLLTSVDGVGTITAAKMIAVTNAFKNFDDARSFCCYAGVAPFEYTSGSSVHSKRKVSHKADKSIKSILHMAAMSVLRMKNSELKKYFDRKVAEGKNKMLVLNAIRGKLILRMFAVIKQNRTFDKNYQHAVA

SEQ ID NO: 432386 - protein, 319 aa, unidentified
MDVHKDSVVACILKTCTTSESSHSNADVEKEIRIFGTFPDELAKLREWLESENCTNVAMESTGIYWHPIYEAIEDACGDEMDILVTNARHMRNVPGKKTDMKDAEWIAGLLRAGLLAGSFIPPQDVRELRQLTRYRKNVVQDINTQKNRIEKTLQQAGFKLSSFLSDVFGVSGRNLISVLIKNGKLLPHDVDNETRRISKEKKADIKRAINGKLTEKQRHFLQLQITLLDGLLTHLETIEESISELSAKWNGDIERLSTIPGIGLTSATAIIGEIGSDMSKFPTAEHFCSWAGVVPGDNTSAGKKKVQESLSATPISKG

SEQ ID NO: 432387 - protein, 434 aa, unidentified
MVLQVKCTSNKQKPQEGQSSSVSLPVLFPDTAGIDIGSKSHFVAVPSERDSNPVREFSTFTADLHKMVNWLKECKIKTIIMESTGVFWIPAFELLESNGFDVKLVNARHVKNVSAHKTDVLDCQWLQQLGTFGLIKGAFRPEDSILPLRAYLRQRDMLIKNASTHIVAGVTDPKVLASLRHERCHNPEEVIEASLVGNYRQEHLFSLKQALELYDYYMQKISECDQQIAQQTKKLETGCDPKKLHLLKKNSVSRLKKPKKAKKHEYPFDLTSELIRITGVDLTRIPSIRASTALTIVSEIGLDMSRWRSAKSFASWLGLCPGNKVSGGKRLSGKTKPCANRVAIALRNAANTLYRSECAFGAFLRRMKMRLGSPKAITALAHKLAKLIYIMLKYGHEYIEKGVEFYEEMYQKRREASLRKKAAEMGYDLTPKVA

SEQ ID NO: 432388 - protein, 390 aa, unidentified
MQKPYDDSKACLTAFVQDSTIVAVIEMSLANWLVAGMIPGVNREPLKKIAPDPEVLLRLLYRWRDEAIKAGKEIARIAVAYETGRDSFWLARWLRDRGIDAHVIHATSVAVSREHRRAKTDRIDTAMLRRGFLGWLRGERGHCSMAVVPTIEEEDAKRPHRERESLVKERTSTINRMKSILTQFGVRNFKPVLRRATEKIDAVRTPEGGPLPPNAAAALRRHIERFRLINEQIKAIEKTRLQRLQQYPEDKFNAMVFLLVRIIGLGVETAEQLVHEILSRNLRDRKAVSRYAGLTGSPDESGASRREKGLSRSGNGRVRKILIQLSWRMLQFQPDSSLVRWFKNRTANARRSRKPMIVALARKLIIALWRYVKTGVMPEGFKLRPSEINQ

SEQ ID NO: 432389 - protein, 346 aa, unidentified
MEQVVTVGLDIAKNIFHAHGVSQDGKVIFSRKLRRAKLEAFFSTLEPCLIGIEACSTSHHWARVFTAMGHTVKLIPPAYVKPYVKSQKNDAADAEAICEAVTRPTMRFAEVKSIAQQSVLGLHRVRAQLVSHRTRIGNTIRGHLAEFGIVAPVGREGLYRLIGIIEDSADTSITDLTRVSLRHLADQYRLLQAQVLDLDRQIMKAHRANALSQRLATIPGIGPLAASALAASIGDASAFKSGRSLAAFLGLVPRQSSSGGKERLGRISKRGDGYLRWLLVAGAMAVMRYARRHGTSRPWLVQLLARRPAKTAIVALARRLLVIAYQLLKHETEYDVGRLRRKRRAA

SEQ ID NO: 432390 - protein, 341 aa, unidentified
MGEVSTIGLDLAKTVFQAHGADGSGGVVFRKRLRRDHLLAFFAGQPRCLVAMEACASAHYWAREIAALGHETRLIPPAYVKPFVKRQKNDMADAEAICEAAQRPTMRFVRPKSAEAQGAAVVFRTRDLLVRQRTQLINALRGHLAEFGFIVRQGPGHVSKLIELVAAPSSELPAEARPVLSVIADSLQATQAKILVLDREIAARAKADPVAKRLMTIPGVGPVVATALVALAPEASTFRRGRDFAAWLGLTPRQHSSGGKERLGRTSKMGERSLRRLLILGASSAARNAGRDGSRASPWLVGMLARKPRMLVTVALANKMARIVWALMAHGGTYRAPVAAV

SEQ ID NO: 432391 - protein, 318 aa, unidentified
MSHGYDKYVGIDVAKESLDVSGLTAGSPSQFENTAAGRAKLLSLLPPAGACLLIAEATGGYERDLIAEVVAAGHHIAVVNPRQVRDFAKAIGLLAKTDRIDAGVIARFGEATHPTPQGFSEQQEQLRELIVRRRQLVDHRTAEKNRCEQAHSTLVRNSVRKSIEGIDKDLKRIDRAIIQLVESNDDWRGRYERLKSVPGVGAQTAATLMAELPELGRLNRQQVAALVGVAPFNRDSGQFRGRRTIWGGRATVRSGLYMAALSAKKHNPVIRAFAARLLAKGKPPKVVLTACMRKLLVILNAMLRSDEMWGPRLATLTQ

SEQ ID NO: 432392 - protein, 356 aa, unidentified
MTFVGLDLHKRYITACALDASGTVLAEVRQMTVSLETLAAFLSALPTPITVGLEACLYWQWLHDQLEARGHTVRVADARQVKVIWQARSKTDPIDARKLAELVRVNLLPTIWIPDADTRRRRQLLHGRAFLVRQRTQVKNRIHGRLTAENLLFPRSDLYGRAGRAWLATAPMSPMLRSHADRLLRIHDALTAEIEQLDDEVKALRRDHPMIERLHTIPGVGLFGALFLVAEIGAIERFSSSHRLTAYAGLVPTTRSSGGKTSHGGTGHASNRWLKWILVEIVQTLKRAPGPVGDQYRRLLRAKGKPKATTAAARKLCCYIYWMWRDGLSYEEWLANRYEGPSRSEVCPSQPLGAVA

SEQ ID NO: 432393 - protein, 341 aa, unidentified
MQITTIGLDIAKNVFQVHGIDGDEKVVVRKQLRRSQVIRFFQALAPCLVGLEACATAHYWARELMKLGHKVRLMPAKDVKAYVKRNKNDAADAAAICEAVSRPTMRFVPAKSAEQQAELMQHRARDLLMRQRTQLINAIRAHMAELGISAPQGREGIKQLLAITAADEDTRLPADARASLIVLAAQLQAIQTTIGSLERRIVARHRSNQDSKRLQTIPGIGVIGATAIAATVTDPTVFRSGRDFAAWVGLVPRGDSTGGKHKLGPISKQGDRYLRRILVGGAVSILRRAKLNPQRYPWVTRLLARRPFKVVAIALANKMARVAWALVAKGGIYRIPRLAAA

SEQ ID NO: 432394 - protein, 346 aa, unidentified
MKKIFIGIDFSKEKFDATVIKAEGVEERAERKHEVFDNEVSGFRRLIRWVKSVQDELDTSLWLFCGENTGGYSRALCNYLYGSGYDMWLENALSIKHSSVLRRTKSDKADSGVIAEYAMRNYDQMRLYKPLGKNLERLREVFLYRHNLVKLKASMTTRKGEKKLTQDKSDISRFMAMSSKHLISEFNKKIEECDMRIQKIISEDEELRRNFEIITSVPGVGTQNAVCLMVYTDNFGRFDYDSRKIACYYGVAPFGRQSGTSVNTPPRVSPFANKLIKALLTQAALASVNFCPQMATYYHRLVEAGKKKPVALNNIKNKLLHVITAMVRRGEKYNPDHDYYAALKAA

SEQ ID NO: 432395 - protein, 394 aa, unidentified
MEQPTPFAALIGLDWSDRKHDLCLIDATTGRRELFVIAHTPEALDDWARALRARFNGAKVALCLEQSRGSLIYALLKYDFLVLYPINPQMLSRFREAFTPSRAKDDPSDAEYLVELLVHHRERLKAWTPDDEQTRTLPLLVEHRRRLVGDQTRSSNRLTALLKGYFPHVLQWFPNIRTKMVCDFLLRWSSLDALKCVRPTTLEKFFREHHSQRTETIEKRLTAIKAAVGLTTDRAVINSSVVMVKALAAQMKTTLEVVHEFDRQIEELCQAHEDFELFIALPGAGKVYASRLLVALGSNRERWASEDELLCFSGVAPVIERSGKSSWTRWRYCCPKFIRQAFVEYAGESIRHSEWAKAFYVSQKAKGKSHQAAVRALTYKWIRIIWKCWQTREI

SEQ ID NO: 432396 - protein, 345 aa, unidentified
MRHYAGLDVSLEETAICIVDDTGKVIRELRAASDPDALVETLTATGLSFERVGLEACSLSSWLHQGLTRAGLPALCIETRAAKAAMGAMPNKTDRNDARGLAQIIRTGWYRVVHVKSMPCRSARALLGARRTMLNKQRDIENAVRAVLREVGLKLGTPPRKLFAGLVRELASVDPAISDIIEPLLAVLDVMVRQIEHLTKRVLEAVRVEPICRRLMTVPGVGPLTALTFRATVDLPERFRRSRDVGAHLGLTPRRYQSGETDVQGRISRCGDELARTALYEAAHTLLTRCQKWSTLKAWGMRLAQRRGMAKARVAVARKLAVILHRMWSDEAEFRWGKSPTFTAA

SEQ ID NO: 432397 - protein, 350 aa, unidentified
MLIIGCDYHPSFQQIALVDIETGEVQERRLKHREEAEQFYRTWAKAGNKVRVGMEASGHAGWFERLSAELNFELWMGDAAKIAAKRVRKQKTDRLDAQHILKLMLKDDFPKIWVPSWENRDVRQLLWHRHRMVQTRTRIMNQLQAAALNEGLRYKKTLWREAGRQQLESLSLAPWASRRRHDLLEVLDRINPTIAELTRAIEQQAEKCPEAQRLMTHPGVGALTALAFVLILGETERFGCGKQIASYLGLVPEEDSSGERRRLGHISKQGNSLLRFLLVEAAQVTVRSDQRERNRFFHLAQRRGRKIAKVAMARRLGIRLYWMWRRGWNYEQLESFGSHAGQPENRHGVQ

SEQ ID NO: 432398 - protein, 337 aa, unidentified
MSKVTTVGIDLAKSVFQFHGIDASGEVMLRRQVRRAQMPQMLSQLAPCVVVMEACGGAHYWARLSRELGHTVKLLAPRYVKAFVRGAKNDRNDARAICEAGCQPGMPTVAVKSETQQGCLALHRVRALAKKQRTMVANQVRGLLAEQGIVLAKRIGTIRRELPGVLPRLEPHLRRALELQWQQLQALDRQIAVLDQELKELASGSATCQRLMRERGVGPVIATAITAEVPEPRVFRNGRHFAAFLGLVPGQDSTGGRAKLLGVTKRGDAYLRTQLVHGARSALRRAAHHDDELSRWAQAVAQRRGFNRAVVALANKLARRLWAILRYGEAFRATAAA

SEQ ID NO: 432399 - protein, 461 aa, unidentified
MRKKKPTGPQKGSAREKVDWKALDIVHPEAAGIDVGGSEHWVAVSPDRDPEPVRRFGCFTVDLRAMARWLIDKGVQSVAMQSTGVYWMPVFEVLEQNGLEVYLVNARHTKNLPGRKSDVQECQWLLKLHAFGLLSNSFQPTNEIRIARTLWRQRGNLVAEAGSAIQRMQKVLTEMNIQLGNVLSDLSGVSGMKIIGAILEGERDPWELAALARPEVKATAEDIAKSLEGNWREELLFVLKQEVELYRFYQEKIVDCDLQLRKHLESFGSTVDIQAQPMGPKPKGKKGSRNAPQFDLRTELYRITGIDWVQINGIDVLTAQTVIAEAGADLSAFPSEKQFASWLGLCPTNEQSGGKILNRRTRKVVNRATVAFRNAAATLLRSQSYLGAQYRRLRTRLGAPKAITAMARKLACLFYRLIKHGQQYVDKGTEYYEARYREQQILSLAKRAQKLGLQLVIPKTA

SEQ ID NO: 432400 - protein, 337 aa, unidentified
MKYSGIDLHSNNSVIIVSDEEDRVVFGKRLPNDLGQIGAALEPHRDELAGVVVESTYNWYWLVDGLMDAGHRLHLAHPSAIKKYEGLKYSGDFADARYLAQLLRLGLLAKGYIYPREERGARDLARKRLQLTRYRTAQILSIENIMMRQTGTTLRGEAVKRLTAGQVDEFAFAPDVALALQANRAVSEALGQQIEAIEKRLKESVGLRPEYHLLKTAPGIGRILATTIMLETGCIGRFAQVGNFSSYCRCVDSLRESNGKKKGEGNVRNGNKYLAWAFVEAANFAIRYCPEARSFYERKKRKANRVLAIKALAHKLARACFHMLREQKPFDVGRCFG

SEQ ID NO: 432401 - protein, 358 aa, unidentified
MDQQHQPEQHYAGLDVSLDATAICVLDAKGAVVWRGKCASTPEAIRDALGQHAPALVRAGLETGQLSNWLTHGLRRLGVPVVCLDARHAKAALKLQLNKTDANDALGLAQIVRTGWYREVAVKGMDAHTLRLLLVARAQLVSQRQALANTVRGLLKTFGRRVARGSGGLFAPRVREAAEGNDALLAIVEPMLLAWQALREQAAVLDRRILARAKADATARRLMTVPGVGVVVALAYMAVIDDPARFKRSSSVGAYVGLTPKRHQSGAEDWTGHISRCGDGLLRAYLFEAAAVLLHRHPRACALRSWGLALAKRVGMRRAKVAVARKIAVLLHTLWRRGEDFRWPEPAAAPPAPTAAAA

SEQ ID NO: 432402 - protein, 341 aa, unidentified
MQITTIGLDIAKNVFQVHGIDAAEKVVVRKQLRRGQVIAFFAALPPCLIGMEACATAHYWARELTKLGHEVRLMPAKDVKAYVKRNKSDAADAEAICEAVRRPTMRFVRAKSAEQQGRLMQHRARDLLLRQRTQTINALRAHLAELGIAAAQGREGLKQLLTIIADEGDERVPIDARASLIVLAAQLQALQTMIGSIEKRLVVQHRANEASKRLESVPGIGLIGASAIAATVTDPKAFRSGRDFAAWIGLVPRQDSTGGKQKLGPISKQGDRYLRRILVVGAHSVLRRAKQSPEKYPWLTQLLARRPFKVVAIALANKMARIAWALLASGGRYRAPRLAAA

SEQ ID NO: 432403 - protein, 397 aa, unidentified
MYIVGIDIAKRKHEAAVIDGEGAVIIKPFSFTNNCSGYNRLLAMLTKAKLPLDEVSFAMEATGHYWLALFTRLQKEGFRVQVINPVQTNSIRSFYIRQAKTDPRDALLIAEVIRFGHFSESTLHPENIYELRELCRGRHAIVSMQADIKRKVVALLDQVFPEYETAFTNLFGDTSMAILQTCPTPKELSEMPLEELCHLIEVSSHKRFRMAKAQELQVLARNSFGFAMAGDVFSTMIRLYAKHLDFLKQQVREMDRKIAEIMETLDTPITTITGIGPTLGAYILSEIGDISRFSSAAKLAAYAGIDPTMRQSGEYNGVRNRMSKRGSPYLRHAIWLAASSAVLHDPALKLYFQKKRDEGKPYMASVGHACRKMVSIIYAVMRDNKAYVPCIPSEISA

SEQ ID NO: 432404 - protein, 425 aa, unidentified
MTACNLQYLGCDRSDTHLDLTLLNADLPPESLRLPARAASVETWLGQWRRRFPGHQLCVCFEQPAANLIVLFSRFAFVRLYPVNPATLKSYREAFVLSRAKDDPSDGYWLADLVRTHRDQLPSWQPHSPAVRQLAALVEGRRDLVDQRTAWSNKLTSLLKSYFPEALELIGEHAASALAVALLRRWPTLQTLQAAGWPAVERFYRQQHCVRGTALAHRREIIVQARPLTDDPAILDPATLRLEAILGQIEPLLAAVARYDQQIAAVFAAHPDRAIIASLPGVGPILAPRLLAALGDDRARFPDARALQCFSGIAPVLIRSGQSTVVSRRYACPRFLRQSFHEHASESIRHSRWARAYYQQQKDRGKKHHTITRALAFKWQRILIRCWHDHIPYDEMTYLRSLKDRNPSLYQLALTTKLPREQLAA

SEQ ID NO: 432405 - protein, 353 aa, unidentified
MNQVKYVGMDVHKAITVIVVLNALGQVESRTQVRTKSETICDFFRGMSGKVEVVFEEGTHSSWLHKLLKPLVASVTVCDPRHNKLLGDGSKSDDEDAEKLAHLLRMGSVKSVYQGDDEQQRLKELCRADENLLEDSTRNQNRLKAIYRSRGIDCSGHAIYRADGRAEWLAKLSDEAARFRAESLLDQLESLSELRKKAKQRMIDQARRHADYALLLKLPGFGPVRVAQLIAIVGTPHRFRTKRQFWPYCGYAVVTRSSADYGIVEGKIVKPQKKVSTRGLNRNHNPRLKQIFKGAAMSALRHPAPKAYYQRLVDEGARPEIARVSLARKLAAIALVIWQRREEYDAKKTFAQA

SEQ ID NO: 432406 - protein, 352 aa, unidentified
MPRTAAVHAVTTIGMDMGKNTLHMVGLDSRGAIVLREKVSRGRIVLRLANLPPCLIGIEAGMATHYVARELAALGHDVKQVPPAYAKPFRQGHKNDFRDAQAVAEAVQRPTTRFVPAKTDEQLDLQALHRVRSRLVSERTAVINQIRGFLLERGIIVRQGLRFLRQALPDILAKRTDVLSPRMVRIVADLASDWRQLDERIEPVTNEIETLAKNDDGCRRVMTVPGIGPIISSAMVAAIGNGAAFARGRDFSAWIGLVPKQMSTGDRTILGRITKRGNGYLRTLFVQAARVILLRPASWPKHSFGVWLARAAQRLHRNVLAAALANKLARIAWTVLAQERSYEARVTKAAAL

SEQ ID NO: 432407 - protein, 357 aa, unidentified
MTTQEKQRCMFVGIDVHKDTHTAVGVSPYGEKLFEVTVGNYKNDFEILKKKVEEHKGILSPYIGLEDVKGYGERITEYLYEKYPVYHVPSILVDRARQNATHPEKSDSLDAFGVAKVMMNSIDSLLAYTISEESVKAKQLKEISVDREDLVLEQTRLKNQVHTLLYRIYNTEYIKMYKDPFSIKALNFWLKSKKKCDMFLLKTLKRKIKRLLDIHYEVVDLEKDMQTLLDAGKYTIQTASGCGLVIASTIIGEIGDINRFTSPGALAKYAGCAPKERSSGKKTRHVKSRSGNRRLNCAFHRMALSQISRMGNEKAKEYFKRKVSEGKSKSQALVCLRRQMVNIIWMMLKHKTIYRNA

SEQ ID NO: 432408 - protein, 344 aa, unidentified
MLYVGLDLSRKRLDFDARFAGGELCERGAVPPDANGLRQLVRQLGDADILAVIESMNGARFVHDRLELAGWDVRIADAVKAKGLAPLACKTDKIDAWVLAELARRELVPEIWLPDPAIRAERERARFRLHLVKHRSALKNRVHSILIAHGIPTPTSDLFGVAGRRLLERLSLPEPWSSTTLASLALIDVLDAQIDACERELRTLGAEHRYVPLLLTCPGIAWILAFTIASEIGDIARFPSPRKLVGYSGLCPRVEQSGEQDRRGPLRKNGPNYLRWALVEAAHTAARHPAYLPVLERKRVQLGSRRGTKIAAIEVGRKLAEAIWHMLTRDQPFTPAGATRPLAA

SEQ ID NO: 432409 - protein, 418 aa, unidentified
MIPAVVTHCAGIDVGKKILAVCVMAGAADAEPSVEQREFGTSNAQLRLLRAWLAERGCTHAVMESTGAYWKPVYEVLEESLQVILAHAGQVKARRGHKTDWSDARWLAHLLRHGLVRASFIPPRGIRYLRDLTRRRKQLLSDSTSERNRVQKLLETANVKLGNVLSDVFGVSGQRVLDALLEGRASPSEMAALMDARIRSKIPAVIESLEGHRMDAHHRWMIRQCLDHLVFIETQIRAIDEQIRTHIRECGYEASFALLETVPGVQADTAAVILAEIGPDMGQFPSAAHLSSYGGVCPGNHKSAGKSYSGHARGGDRWLRSALVQSAWAVAARKQGVLRDKFWRQASRGGRKKALIALAHGLLIAVYDTLSSGQPYIERDAPPMSEAQRQRLIRHHTRRLGKLGVATRSCSVKAHTNQ

SEQ ID NO: 432410 - protein, 441 aa, unidentified
MAMRTQDEEIVFPNAAGIDIGGSSHWVAVPRRSTDEPVREFGPMTDDLNAMADWLIACGVDTVALESTGVYWIPVYEVLEQRGLSVWLVDARQMKYVPGRKSDVQDCQWLQKLMTFGLLRAAWRPKGDVCTVRAVARLRDVLLAEQASWVQRMQKALVEMNIQLTEVLTDVMGLSGQAIIRAIVAGERDPKALARHRNARVKASAVEITKALTGNWRAEHLFVLGQALAMYDDIARHLVECDARLQVLLSELGHSEVDLGKAPRAGSKVRQEFDARQTLANWAGVDLTRINGLGLAAVMKILSEIGPDVSRFETVKHFCSWLGLSPGTKISGGKVLSAKTKRSANRVRQVLKLAAMSLSRSDSALGAFYRRLCGRMDKPRANTAVAHKLARMVYYMLTRGEAFVDKGQQHDEEQQRQRSVAALKRRAAALGFVITSTAAPA

SEQ ID NO: 432411 - protein, 424 aa, unidentified
MLVPVDAGYSTGVEPIRMEAAINQTTKCEDKHMNTDKYVGLDVHKVDTQVVIADDGRTGEVRHYGKISSDLHAMERLVGKLGGPGVTLHFVYEAGPTGFVLYRWFQRHGIDCIVVAPTKIPQAKGVRQKTNRRDAEQLARSLRAGELEPIHVPNEIDEAFRDLTRARSHASRDVKRAKQRLKSFLLRQGYHYSGNANWTEAHRRYLRELVMPTPVLKAVLEEYLLAITAAEERLQRMEELIATEAPQWRLYPAVRALMCLRGFDLIAASLLVAEINDVRRFAHPRGLMAYLGLVPHEFSTGDDRRLGAITKAGNAQARWILVEAVQHASLPPKVSEHLARRQEGQPEVYRKISWSMQNRLYQRHWHLTHRRLMPAKVKVALARELCGFVWDLLRQVPLPKIKTPVSRSATRRPTRTSKADVVSC

SEQ ID NO: 432412 - protein, 323 aa, unidentified
MTRIICGVDIASKSLEARIGLQGAAGSFANDAEGINALGDFCRTHQAELVAMEATGGYEQQAFALLSGQGLAVAILNPRAVRQFAQSMGSLEKTDRIDAGMIAWYAEVKKSPPVCLAPDNQQHLRALVTRLRQLTEVRSAQLNQQRLVTDRKVQASFKKLLTLLARQIGELEQSIAALLEKDPLWRQLDQAFRTIKGVADRTVARLMAEMPEIGTLSNKTISKLAGVAPLANDSGKHQGKRAVRGGRAAVREILFIVASVVGRHEPDFIAFRERLRAAGKPPKVVRIALAHKLLVRLNAKARQVRQAMAALEYGTVAVQIERA

SEQ ID NO: 432413 - protein, 317 aa, unidentified
MSNPESFVGIDAAKGWLDVAWLTGETLRIDHAEKAIAVLVERLRSQPPALVVMEATGGLETGVASALAAAGLAVAVVNPRQVRDYAKACGRLAKTDRIDALILAAFAAAIRPQVRELPDEHTRALGDLLARRRQLVEMRVQEKLRLQRASNVQRASLREHIVWLDERIGRLDIDLTHALRSSPAWRDKDDLLKPIPGVGSLTRATMLALLPELGTLSRRQIAALVGVAPFNRDSGQHQGGRVIWGGRAQVRRTLYMAAVAAMRCNPVIRSFYQHLRSQGKPAKVALTACMRKLLVTMNAMLKHHSAWSNRLDTQHSC

SEQ ID NO: 432414 - protein, 399 aa, unidentified
MTTSGYMVFCGLDVGKEAHHACALDPDGRRLFDAALPQDEARLRDLLTRLGEHGRVLVVVDQPNTIGALPIAVARAMGVGVAYLPGLAMRRIADLHPGSAKTDARDAYVIADAARVMPHTLRRVDVGEEALAELKVLVGFDDDLAAEATRLTNRLRGLLTQVHPALERVLGPRIHTKAVIALINRYGGPAGLRKAGRGRLLVTARKANPRGAADLIEDLLTALAEQTVVVPGTTAAETVLPQLAASLRETPDQRATIAAQVEQVLDAHPLAAVLTSMPGVGVQTAARILLEVGDATSFPTAGHLAAYAGLAPVTRRSGTSIRGEHPPRSGNKNLKRALFFSAFAALRADPVSRAYYDRKRAEGKRHTAALICLARRRTNVLYAMIKTRSPYGLRLPAAA

SEQ ID NO: 432415 - protein, 362 aa, unidentified
MMIIGVDYHPSFQAIAFFVEETGECGEQELNHSDGQAEKFYRELKQRGICVRVGMEATGYSRWFERLLAELGFEVWMGDPAEIKAKRIKKQKTDRKDAQLLLRLMMENNFPQIWVPGPENRDLRQLLWHRHRLVQMRTRIMNQLQALAMNEGYRWKKKLFSEQGRAQLENLTLAPWASRRRQELLELLDRMNPTIEELTAAAEQEVKKRPEALRLMTHPGVGPLTALAYVLIIGKPERFHCGKQIGTYVGMIPSEDSSARKQRLGHISKQGNSLLRFLLVEAAQAAARCNPEWRRRYIHLAMRRHKSIAKVAMGRKLGVRLYWMWRNGCEYSPSLEFGSYAGQLDQNFDHDYLFKLPFQGAG

SEQ ID NO: 432416 - protein, 411 aa, unidentified
MDKVYDKCCGIDLHKKLIVACFKQGNRQEIRDFGATTRELLEMADWLKEGGCEMVAMESTASYWKPLYNILETCELKAMVVNAQHMKAVPGRKTDVKDAEWIADLLQHGLLTASYIPDKDQRELRELVRYRKSLVGERARELNRLQKMLEGANIKISGTIRDINGKSARNILEHLLSGKQIDSAEYDILYEKKVIAHNLKATKEQIIDDLNGVMSALQKKMMRILLNHLDELNAHIRELDDDIDNFMKPEEKEAAKVIQDIPGIGNTSAQAIISVIGADMSRFPTDAHIASWAGLCPGNNKSANKRKSGKTRKGNGLLRDTLIVCAHSAVKNKSSYFHAQFARISAHRGSKRAYVAVAHSMLVAIYHILKEGVVFKDLGADYYNQFNRERKINAYLKKLKALGWEVPVVAA

SEQ ID NO: 432417 - protein, 389 aa, unidentified
MWFCGIDVAKHKHVALVVDEKGVVVKSAFAFTNDRDGFDALLAVLASLGGSVSIAMEATGHYWLALYDELTRQAYPVSVLNPLQIAAYRRSGIRKVKSDTVDAFWIADYARIATPAATAQDIPTLLQLRELSRFRFGLTEQIGDLKRQILTILDRVFPEYEALFSTVFLKSSRELLKEAVTADEIASFDLEELSQLLQTSSRGRFGTEKAMALQAAAQRSVGVSFLADAIRIKMRCLLEQIELLEQHRMQLDAELAALMVQLPQHITSIPGIGPVTGAAILAEIGDVQRFERVEQLVAYAGIDPSVYQSGQFQATQAHMSKRGSPYLRHALWLAAGMAIQHDAELRAYYQTKRAAGKAHGIVLGAICRKLLARVYIVLKEQRPYVIREC

SEQ ID NO: 432418 - protein, 351 aa, unidentified
MNVTKYIGMDVHRAMTVSAVLSATGKVVAEAIIETKGSVILDFIQSQRGTLWVTFEEGTQAAWLYDLIQPHVAKVVVCDPRKISTQGNKADRPDAKRLAELLRTNALTAVYHGERSTRALKELARSYSAIVGDSTRIKNRLKAVFRARGIDNSGAGIYTTEERECWTSKLEAGAVRLRVQRLWRELDTLDVLRAEAEKDMVVEARKHPSTRILQTVPGIGPVRAALILAFALTPHRFRSKRQFWGYSGLAVVTRTTAEYELVKGRIRRTKKRPALRGLNPNCNRVLKDVFKGAAGTAANGPWRAYFESKVASGNKPELVLLTIARKIAAITLALWKKGERYDETKLTMHAV

SEQ ID NO: 432419 - protein, 454 aa, unidentified
MAQTAKAARPKEKESVSKRRSTPVTAESKAAKPKGKVKRGDRRRRTQKGEAIENRPVFEPNAAGVDSGAREVYGAVPPDRDKQPVRICETFTADLQELANWLTACGITTVAMESTGVYWIPVYEILEAHGIRACVGNARHIKNVPGRRTDWHACQWIQFLHAVGLLRAAFRPEPEVCALRAVIRHRGELVQMAAKHVQHMHKALTQMNLQIQHVITDLTGLTGWAIVDAILKGERNPSRLAQLRDPRVKASPETIEKSLVGHWQPEHLFTLKQSRRLYAEYQREIGECDAEIERLVGTFQPRVDPEVKPLPPDQKKRNRNYAKSRKRRARPQSSTREFDLRTEVYKLYGVDVTQIPGLEFLALQLFSELGRDMSRWASAACFVSWLALCPDNDISGGRVLWRTKRRVHNRAGQLFRMAAYALDRSPTPLGAYLRRMKAKLDRRPHTPPQLTKLR

SEQ ID NO: 432420 - protein, 401 aa, unidentified
MAVMVGVDWGGAAHAVCVIDARGQVLDQFAVGHDRAGLAILVARLQQRGAAAEIAIAIERPSGLLVDALVEAGFRVVPIHPNLLKACRPRYRAVAAKSDPGDAFILADILRTDGHRLRPLAPQSDAIKALRGLVRGRDDLVRARVALANQLSGVLESFWPGAARIFSALASPIALAFVARYPTPEAAARLGPQRLAGFLAQHRYCGRRAPEALLERLRSAPDGCAGEAESEAKGELVRALARALEALVAELAKLTSRIEHLVADLPDGRVVMSFPRAGRVCAAQILAELGDVRARFPTEQQFAAEAGVVPVTYQSGKVRGVGWRWACNKRLRAALTRMADNSRHHSAWAADVYRRARARGCDHPHAVRILARAWARVLWRAWTEGVPYDPARHRGAQALAA

SEQ ID NO: 432421 - protein, 346 aa, unidentified
MNITTIGLDLAKNIFQVHGIDDAGTVVVRRALRRGQLLSFFSKLDPCLVGMEACGTSHYWARELVALGHVVRLMPPIYVKPYVKRGKTDAGDAEAICEAVTRPTMRFVAVKSADQQSVVMLHRTRELLVRQRTQLVNMMRGQLAEFGVTLAKGIQHASQFTRRLLEGDAPDIPQLAITIVTTLAEQMRQVQARIGELEKELKHWFREDQIAQGLASIPGIGPITATALASTVTDPHQFSSGRQFAAWLGLTPRANSSGGKERQGRISKMGDQHIRRLLVSGMTSQLQSVRRRPDADPWVTAMLARKPAKLVAVAMANKAARIAWVIMTRGELYTKPHHSTQEVATN

SEQ ID NO: 432422 - protein, 340 aa, unidentified
MSEYDGHQYVGIDLHRRRSVIVRQTDHGEQLSAVRIVNDPVALGLQIEQAGTRPDVVLEATYGWYWAADVLQAAGAQVHLAHPLGVKGFAYRRVKNDVRDAADLADLLRMGRLPESWIAPAETRELRELVRYRAKLVALRSGLKAQVHAVLAKVGVLIAVSDLFGVDGRAQLEQTALSGAYAQRVASLLKLIDILDAEEDLFNRRIAERLRGHAGCGAIQWLPGIGPVLAAVLVAEIGDVHRFPSADRLCSWSGLTPRHYESDTVARRGHVTKQGSKLVRWAVVEAIQRKTTPKIKEDRARIEARRGKNIAKIAAARKLLTLVYYGLRDGHIRALARQAA

SEQ ID NO: 432423 - protein, 344 aa, unidentified
MKNSNVIGIDLAKNVLQVCKVSKHGELTVNKAISPRKLKELLATSPPSIVAMEGSGSCHYWGRLAKAFGHEVRVINPKKVKAFLQGQKTDANDALAIVMAATQFGVRFSLIKNEEQQTLQTLETSRKFLDKELTALNNHIRAYVYEYGITINRGRKSLRETITLVLDDLDTRLPRCLKNTLRLLWERYQLTLAQLKETKKVKAALVKQIEPCKRLLALESVGEVCAAMLYANIGDGKEFKNGRDASACMGVTPKQHSSGGKTHMMGINKKGGNKELRAALYQGALSVITHLPAEPQTVKQAWLIELVKRVGVKRACIALANKTVRTAWALLATGESYQPVLLSK

SEQ ID NO: 432424 - protein, 392 aa, unidentified
MISVGIDVSKDKHDCFIVNSEGEVLADVFTIHNTMDGFNFLLQRIRECTMPQDKIKVGLEATGHYSYNLIGFLLDNGLATYVLNPLRTNLYRKSLSLRKTKTDRVDARTIAHMLLSDAGLKPYTDTAYHNEELKSLTRYRFDKVKERTKLKSSISRLVCILFPELEKLVPTLHMASIYALLEEFPDAKQIAAAHLTRLKALLETASKGHYKRDMALRIRDAARNSIGAFMPAKSLELQHTIRLIRELDAEIAEIEERIQSIMNDLHSPITTIPGMGVRMAAMILAEVGDFTRFVSPDKLLAYAGMSPSTYQSGQLKNCYPHMEKRGSRYLRYALYNATKCVCHWNPNFAAYLAKKRAEGKHYNVALSHATKKLVRLIFAMEKSKQPYSQLAA

SEQ ID NO: 432425 - protein, 354 aa, unidentified
MIIVGCDYHPGFQQIAYVDTETGEVKEQRLEHRELAEKFYRELASQGETIRLGMEASGHARWFERLLAELNIELWIGDAAKIRAKRVRKHKTDRQDAQHILQLLGEDRFPQIWVASWENRDLRQLLWHRHRMVQARTRIMNQLQAVALNEGLRCKKKLWREQGRKQLEAYRLAPWASRRREDLLKLLDELNPTIAELTQAIDQEVEKSAEAGRLMTHPGVGPLTALAFVLIIGRAERFQCGKQIAAYLGLVPLEDSSGERRRLGHITKQGSSMLRFLLVESAQVAARSIPHWRNQYFHLAMRRGRKIAKVAMARKLAVRLFWMMRQGWDYEQVNKFGSHAGQPEHRHGVQSNTE

SEQ ID NO: 432426 - protein, 312 aa, unidentified
MESGVYVGIDVSKDRLDVYVRPSGEGFSVGQSGRELEALAKRLKGLSAQVIALEATGGYESSAVAALSLAGLPVVVLNPAQVRSFARALGRQAKTDTLDAQVIAHFAEATKPPIRSLPDESTVALADLVARRRQLVDMITAENQRLHHAPELIQKSIKRVIKALERELDDVNGGMDSMIRASPLWRYKENLLVSAPGVGKVVARTLLAELPELGTLDRRQIAALAGVAPYTQQSGQWRGRSFIAGGRANVRKMLFISAMSAVKCSATLKAFYENLLKAGKPKMVALIAVARKLLTMVNAMVRDNATWQEQKA

SEQ ID NO: 432427 - protein, 354 aa, unidentified
MIIIGCDYHPAFQQIAFVDTETGELQERRLQHREEAEKFYRDLAAQEMRVRVGMEASGHARWFERLLAELQFELWIGDAAEIRTKRVRKQKTDRQDAQLILKLMLKDDFPRIWVPSWENRDLRQLLWHRHRMVQARTRMMNQLQAVALNEGLRCKKRLWREQGRVQLESFRLAPWASRRRHDLLELLDRLNPTIAELSQAVEQEAEKCPEAQRLMTHPGVGPLTALAFVLIIGRAERFQCGKQIASYLGLVPLEDSSGNRRRLGHITKQGNSLLRFLLVEAAQVTVRSLPEWRSKYFHLAMRRGRKIAKVAMARRLAVRMYWMMRKGWNYEQLKKFGSHAGQPGHRDGVRLNTE

SEQ ID NO: 432428 - protein, 414 aa, unidentified
MAEEETISWFAGVDWGSERHHVCLLDARGTTVGEREFPHSGEGLAELGDWLLSMARAASMVAVAIEVPHGPVVDALIDRGFVVYAINPKQLDRLRDRFSVAGAKDDRRDAYVQADGLRTDRRLFRHLQVADPRLIELRAWSRLAEELQAERVRLSNRVRHQLWRYYPQMQKLTNDLAAPWFLELWTIASTPAKAGRLRKSTVERLLKQYRIRRIDAETVLRILREPAIKVAEGVAEAASIHMRSLIARLRIVNRELREAERKLDELCTAVSEIEQTSGESLQRRDVAILRSMPGIGRINLATLLSEASGPLSRRDYEGLRTLSGAAPVTKRSGKSLIVVRRYAAHVRLRDTVYHWARVATQRDPKCRARYTALRKRGHSHGRALRSVADRLLALACVLLQRQTLFDPHFGRPTT

SEQ ID NO: 432429 - protein, 311 aa, unidentified
MTQIVCGVDVSKRRLDAHVAPSGDFESFSNDAAGIAALAAFCRRHGVQLVAMEATGGYERTAFLLLWEAGIACGLTNPRSVRRYAEAMGILEKTDRLDAGVIAGFAIAKDLKPTSPPTPGQQRLQALVARLRQITDDLVVQKQRRSSAMSEEMVTSIDEVIALLKRQAKTLEGEIGSLIDDDPLWARLDAALRIKGIADRTVARLLAELPEIGIYSNKAVVKLAGLAPLAHDSGARAGKRHIRGGRAGIRSILFLVADIVRRFDQSLAAFHRKLTEAGKPKMVVRIALARKLLVRLNAKARETREQYALAT

SEQ ID NO: 432430 - protein, 349 aa, unidentified
MKKIVKQVLGIDVAQKELVVCLGRMHEDWTPELYSHGTFVNNKKGFDAMVKWVKKLTIEATAVRYVMEATGVYHESLAYYLEGKGYEVSIVLPNKISNYVRTLEVNTITDKTASEAIARFGLERKLDTWKRPKQIFKNLKQLTRERNQIVETRTLAKNQLHAEMAEAFPNPSSLHRIKALIKFLDKQVAEILKELTELAKQDGQVHESIELICSIPGVGRLTAATVLAETNGFELIRNKRQLTSYAGLDVREKQSGTSIKGKPRISKKGNRHLRKAMHLPALTAIRHDKKFKAVFVRLVSKHGIKMKAAVAVQRKLLEMIYTVYSKNTAYDKNYLNQNEAELDKQPSLA

SEQ ID NO: 432431 - protein, 445 aa, unidentified
MGTSKPRAGRPKLEVMHPDAAGIDVGGSRHYVAVPNHAAEESVRDFGCYTRELEELAGWLQECGVKIVAMESTGVYWIPLYELLERRGFEVMLVDPRHVRGVHARKSDVLDCQWLQQLLSYGLLKPAFRPHDQFCVLRELNRLRARTLRDQGRSVQHMQKAMTLMNIQLGQAISDVVGVTGQKIVRAIVAGVRDPLELAAYRDRRVKASEEEIAASLQGTWRAEHLFALKQALATFDFCAAQLLECEREIEQVMQQLHAFSGSPAKSAKKRGRAKNAPQFDVREHLFKICGVDLTRIDGIDVSTAMTIVSETGTDLSRFASEKHFASWLGLCPGTRISGGKTLGSGTKHSVNRATQAFKQAAAGLRTSQSALGAYFRRLCARMDKAKAVTAAAHKLARLFYALLTRGHEYVDQGQQYYEERYRQRVIYNLQRKASKLGMSLVPSA

SEQ ID NO: 432432 - protein, 369 aa, unidentified
MKKDTIFVGLDVHKNSIAIALAEEGREGEVRRYGTIPGDLDSLDKVVRKLVSKGSILHFVYEAGPCGYEIYRHLTVQGFDCMVVAPSMIPKKSGNRIKTDRRDAAELSRLYRAGELTPVYVPRLEDEAMRDLTRSREDAKSAERKARQRLSALLLRHGFRYTGRTNWSLAHFRWISDIKMPHPAQQFALQEYVNAIVECQERVKRLTAQIRTLLPQWRLFPVIKAFQALRGVSVIVAATTVAELGDLTRFESPRQLMAYLGLVPSEHSSGEKTRRGGITKTGNGHVRRVLIEAAWAYRFPARISRILRDRQQGLPQKVCHISWDAQLRLCNRYRQLLARGKSKQVIVTAIARELAAFMWAMAREVPAEM

SEQ ID NO: 432433 - protein, 366 aa, unidentified
MKKDSIRIRNGKGDWEGKKLTIGMDLGDRTSRYCVLGEGGEVLLEASVATTQKGLSEAFSALPPSRIAIETGQHSPWVSRHLSGLGHEVIVAHARNVRLIGESTRKDDRLDAKTLARLARIDPALLSPVRHRSAEAQAHLTRIRARAVLVGARTALVNAIRGLSKAYGERLRKCHPEQIRKELAVELSPELRTALEPLFQEVQSLTERIQHYDHEIEKIAKQHYPEVAQLQQVNGVGTLIALTYVLTVDDPHRFGRSRELGCYIGLRPGRRNSGNSQPQLHISKEGNRYLRTMMVQGAHYILGPFGKDSDLRRWGLKLAQRGGRNAKKRAVVAVARKLAVLLHKLWVSGEVYEPLRNHREEKRAAA

SEQ ID NO: 432434 - protein, 450 aa, unidentified
MSDEKQKKSKSVKLPKHLQHINVHAAGIDVGSRSHFVAVPEGTSELPVREFESFTDDLQRMADWLIACQVSTVVMESTGIYWIPVFEILESKGFEVKLVNARHVKNVPGRKSDVLDCQWLQRLHTYGLLEGAFRPPEQICTLRGYVRQRMNLVRYAASHIQHMQKALAQMNLQLTNVVSDITGKTGMLIIKAILGGERNPLALAALRDQRCKNSEETIARSLHGNFRPEHLFSLKQAVDLYGFYQKQIAECDQAILAQLATFDVASDSDNGSKPPTTIEEALQRMSGVDLTKIDGIDSNSALKIIAEIGIDMNRWKSPKHFASWLGLCPGTKVSGGKILSGKSKQVANRAAATLRMAAFTLFNSKSALGAYLRRQRSRLGAPKAITATAHKLARLVYAMLKHGSAYVDAGQDYYEERYRNRVVQNLKRKAQELGYQLIEISGIQQKTATT

SEQ ID NO: 432435 - protein, 344 aa, unidentified
MGINEEKEVIMLYLGIDYHKRWSYFTCEDEGGRVKWSKKVRNDREEIEGLLNLGERYKAVLECGRNWGVMYDTLEDIGCIEKLVLANPFKTKAIAYAKIKTDKIDSKVLCDLLRANLIPSVWVPPKDIRWKKYIARNRAFLVSLKTMIKNRIHVIIDRNHLNSPSVSDIFGRYGRQWLYSISLPEEERRLLDNHLKMLEFLEEEIKGVERWLKDLFRGDRYVELLNTIPCIGKIFGVMIALEIGDINRFPDAKHLHSYAGLVPSTYASGNKVYHGRLIKYANKWLRWAFVEATLTAIRVSPFFRSYYERRLENKSTQASIISTARMLASVTYHVLKENREYREW

SEQ ID NO: 432436 - protein, 383 aa, unidentified
MKAVCGLDVHKDSIYLCILHPDGELFEQVFGVLTFQLHEMCKLLKKHHVSEVSMESTSIYWIPIWRVLSPHFTLRLVNPYFIKQLPGHKSDVKDAQWIAECTMKELVNGSFVPPEIIQQLRQYDRRIFDLNEEIVRKESKVDAVLQRCNIRLSNYVSNIECKSYRTVVRRLSEGVTDPQELIKEIHGRIINKHGRETILASMEGVVSQAEIDVLRQLREEIDIAESHKKECQDKMSEICQKYFPEELRRLQTIPGIKERAATSLIAEIGTDMSKFETANHLAAWSGLRPRNDESNKKVKSRKTTYGNSYLRRTIIQCAWAASRQKDCFFSWFSYHQTVVRRKNKMKVIVAVARKMLVAVWHVLHDNVEYIDFKHDCEESANNG

SEQ ID NO: 432437 - protein, 352 aa, unidentified
MNKHNTKYVGIDLGDKASMIHVIDEDGEFVEEKRIPTTAAGLKREFGQREPLRIAIEVGFHSRWVSRLLRSYGHEVVVADARKLRLIYQNPRKSDRMDAEYLARLLRLDTSLLSPILHRGEKAQQHLAILRSRDSLVQARTKLVNHVRGMVKSFGFRLPSCSTRCFARKARPALPESLRPALEPILDSIQEISEHIKSYDREIERLCQQEYPETANMRQIKGVGALTALAYVLTLEDARRFRKSREVGPYLGLIPRRNQSGDADPQGRITKTGDKYLRRLLVGCAQYILGPFGEESHLRTWGLRMSENGGERAKKRAVVAVARKLAVLLHKLWISREDYHPFYPDKAKAILA

SEQ ID NO: 432438 - protein, 415 aa, unidentified
MRAAELRPGADDIIVGVDLAAREHLAVIVDADGRRLTRFRVPHSRDGIAELLRRSRAKSWQAGGRVFAFEATGHVWEALAAHLEESGERYAIVNPLAVFRLREARRMDRTKTDLTDAEQIAELARTGMVTSTRPLHGPYLGLRKAWGEYTRVRFEAARLKILLRQQLFGLFPELLEVWSRVDTPGLLAVVRLGLTPAQIAALSQSEFLTRVCAERGGRRLWRAKVRAAHEKAARSVAPGERLEAAAAEARRIVARYDLLTTQLAEVQAEVEVLLGEIEEARWLATIPGLGFASVAGIIAHTGPISRYRHGRQLIKLAGTNPTRSESGERQGGRQAMSHRGRSGLRQVAYMATISCLAHNVRMRAHYDRLVSRPERPLAKMTALGACMNKLLLWAFAVMSKRRAFELDHEWKECAA

SEQ ID NO: 432439 - protein, 388 aa, unidentified
MHTVGIDVGKRHHVAVMLDASGQQVGKALRFANDQAGFQQLQERLAALGEVALIGLEATAHYWLALYTMLSAARYELVVLNPLQIHAYRQSGIRKRKNDRFDAYWIADYIRISQQPPSSQPQPELLQLRELTRFRASLTDQVGDCKRKVISVLDRVFPEYETLFSSVFIQTSRRLLAEALTPDEFADFDLSELAQLLAATSRGRHGQAKAEEIQTLARQSVGIGFLGNALRLQMTCLLQQLALLDAQRQQLEVEIAALMNQLPQYITSIPGIGPVTGAIILAEIGDVQRFAAPEKLVAYAGIDPTVYQSGQFTASQTRMSKRGSPYLRHALWQAAFMATQHDPQLRDFYQRKRAEGKAHGTAVGAVCRKLLHRIYVVLKEQRPYVIRD

SEQ ID NO: 432440 - protein, 402 aa, unidentified
MNSVGIDVSKGKSMIAVMRPFGEVVCSPFEVPHTSSELSALAKRLKSLDGETRVVMEATGNYHLPIAMVLHEAGIYVSVVNAMLVHDYGNNSLRRAKTDKKDAVKLANYGLDRWLNLPEFSPEEEIRMQLKTCYRQYQQYSKVQTMLNNNLISLLDTVFPGVNRLFSSPVRADGSEKWVDFVESFWHCECVSGLSQKAFVKKYQKWCQKHGYYFREAKALEIYIAASGCIGVLPKTETTHLLITQAVLQLRATSTALAELKKEMLRLAELLPEFPVVQKIYGTGPTLGPQLMAEIGDVRRFHSKKALVAFAGIDAPPNDSGQIAGNHKAMSKIGSSALRRTLFLVMGVYLQNAPADEPVYQFMDKKRAEGKPYRVYMMASANKFLRIYYATVKAYLDALEAT

SEQ ID NO: 432441 - protein, 359 aa, unidentified
MPTLSNKIDFNGQHVYVGFDVHLKSWKVTIMTEELLHKTFCQPPKPEILHQYLVKNFPGGTYHSAYEAGFCGYWIHNKLKELGIDSMVVNPADIPTTGKEKIQKDDNRDSNKIARSLRNGDLIPIHVPASSTLEDRALLRTRTNLVQDLIRCKNRIKSFLYLRGIEFPESFRSPGTHWSNRFMLWLEKIELAEPSSKATLNVHLSQSRYLRTAILETTRTIRELSENERYKSRQELLRTIPGIGYITAMTLLTELETINRFSNFDRLCGFVGLVPSTNSSGESESIGDLTPRGHSVLRSVLIESAWVAARIDPALTKSYHEYCRRMESNKAIIRIARKLLSRIMYVLKNNKPYVCSIVK

SEQ ID NO: 432442 - protein, 416 aa, unidentified
MDTMYERCCGLDIHKKTIEACFRSGKKKTHMSFGTTSAELRKLTMWLVENDCQSVAMESTGSYWKPIFNILELSGTDMKIIVVNARHMKNVPGRKTDVNDAEWIAELLQYGLLRPSFIPDREQRELRELSRYRKSLVGERAREINRLQKMLEGGNIKLTSVVSEVTGYSSRRLLDRLLRNDEPMTEDVISGLVHTSLAGKSKELETALDGLLSELQKELLIKVLDHIDDMSRRIADLDDFCRKQMKKYEDALDKLDEIPGIARRTAETILIETGLDMSRFPTAKHFARWAGLAPGNNESAGKRSSGRTTKGNPTLKSTLIQSAKVAARKKDSFFKARYQKIAAKRGANRASVAVAHSMLIAIYHILKSGERFKDLGEDYYNQFNREKKKNYYLKKLTKLGVNLKEATLSISIQTAT

SEQ ID NO: 432443 - protein, 363 aa, unidentified
MDTFAGLDVSVQETALCVVDGEGNVLLETTVTTDPQRIAKALAPYRARMRRVGHEAGALSPWLHPALQVLGLPVTCLEARRVRAALSAQRNKTDAADARGIAHILRTGWYGTAHIKQGSTYRLRLLLTQRRNLKRKFLDLENTIRHSLKAFGVQLHKVGRGGFDEAVRKAVADDALTRELMDSMLTARAALWKEYLRLHNLVVRYVAQNPVCRQFMAIPGVGPVTALSFMTAVEDPARFKRSRVVAAYFGLTSKRWQSGTSIDIQGRISKAGDPDVRRSLYEAATVMLKRYRGQDKVREWGLQLARKSCHHKAAVAVARKLAVVMHAMWRDGTTYVGNAADDEATRAARQRDKDVRLLGAALA

SEQ ID NO: 432444 - protein, 412 aa, unidentified
MEVVYLCCCGLDVHKKSITACVLWAEAKGKSRKEKKRFGTFTHDLLQLGDWLEQCGVTHVAMESTGVYWKPVWNILAEQFEVLLVNAQHIKAVPGRKTDQKDSEWIADLLQHGLLRGSFVPPQPLRELRDLTRYRVSLVQEINRIANRIQKVLEDANIKLASVATDALGASGRAILQAMLAGEQDAARLAEMSKGLLRNKIPERRLALEGRMTEHHRFLLRQLFEHLRFTESKLSEIEQEIDKRMRPFEDKVTRLCTIPGVDRVTAWGMLAEMGMNMNQFPSSGHLASWACLCPGSFESAGKRLRGKMRKGNVSLRRCLAQAAWAISMMKNNYLSALYRRIAARRGAKRAVMAVAHALLEIAYHMLKRKEDYRELGADHFDRIDVNRIRRSLVSRLERLGHQVTLEPLAQTA

SEQ ID NO: 432445 - protein, 377 aa, unidentified
MILIQVYKPNLGSPTMIYSIGCDIAKDEFTACLLQYELRSQRSEIHSRRTFKNNLSGAKAFVKWVSRHAADPSGEIRCTMEATGVYYETLALHVFDHPGDIRLSVVLPSKAKSYLASRGLRSKTDKIDAYGLALMGCERKLARWKGIDPYWRELRQMTRTRANLQHQITELSNQLHAQVHSGIQVRPVQTTLRKLIKTLRSEKDRLGRLIEERLASRADLCDRIEMLQSIPGIGRATIAVILAETLGFENFTKISQLMSFSGYDVVANQSGKRVGKEKISKQGSPYIRAAMFMPASTIIRTKPKPIYALYTRLLAKHGIKMKAHVAVQKKLLCYMYTLWKKQEYFDSGKIINQQNSHQKRIAPPKDEATVDTSLAVA

SEQ ID NO: 432446 - protein, 426 aa, unidentified
MGMGKFTKTLCISERKEYSIMEGPIITVDVSKGSCHYQPFIENGHPMRKPKQLSATIDGFQKLGQTIKDLEAKTEREDIPVIFEATGVYHRPLQKYLEDHKIRYYIISPLLSATYRKTSLHSNKTDALDCAHIAKAYYCEKELRQYQAQPQEYKRLYQLSRIYESELVHLRKRKVSLRSMLDIIYPRIDKSFKGNQNLYDPIPMEILKRYPHPSLLLGHREDTIVKTVGHRTGHFKGYTERIVHKIYEKAKECYSGCDIDDIEVVKLPSLIENVQEQKKKCDSLLKEMIEIARTCPYFASVVSIVGIGENLAARIIAELGDVSRFDNRAAIVAYAGLNPKIQQSGDIDGLHLKISKKGNKHLRCLLYLGAQCNYRLRKEDPLYEFTKKKRQQTQCPLSSKAAYTASAHKLLVIIYSLCKNGTLYHS

SEQ ID NO: 432447 - protein, 393 aa, unidentified
MEIRYFCGIDVSKNSFSVAVKNGQFLIKNKSFSMDKEGFRGFEELILSYKDNLIAGMEATGIYHQNLFNFLKKRRYNSCVVDPYRVSKFFKFRSNKPTKTDRKDSKTISEFLEEEVKNNPSLLQEKQDERFNLRYLVREKERITHQIVKTKTEIRRIVSLVFPELEAKTSIFSKEILDILYEFGSADRIRKLTFKEFINRAQVYIPNGKGRKVSMRKEEIYKLAKDSISFSYPAYEKLLKIKIKRLKNLMEERKEIEEIIKKEADKLFRREIEILTSIPGIAKESAIYFMAEVVDIKRFPNKAKLIGFCGLDPVIKQSGNYKGDFKISKRGNSHTRRIAFIMAGCVKRSCPQFREYYLKKRKEGKSYKEAVIATSTKLLRTIYSLLKENRLFK

SEQ ID NO: 432448 - protein, 427 aa, unidentified
MPYRIAGIDVHKKMLAVVVSDVEVDGEYEFERRLFGSKPEQLRWLAEWLLEQEVEEAVMESTAQYWKPVWGALERFWKPVCQKREGAGPMSGALHLAQAQSNRGPQGRKKDFPDAERLVKRLVARELTLSFVPDAEQRLWRTVMRRKYQLTRNRVQLQNRLEGLLEEAHMKLSSFVSNLLGVSARRMLKALAEGETNPASLAAMADRRLRATPEQLCDALGACTDLNPVYRRLLKRMLEELRLIEEHIDQLDQEMADLLRPYQDQVKRLAEVPGLGVDSAQQILAEVGALAAAFPSAKHLSSWVGACPGDNQSAGVSYRHRSPKGNRAMRRILNPSANAAVKAKGTIFEVVYRRSVSRLGHKPTIGAIAHRQCRLIWKILHDGVHYEERGPAVSKGSSQRRAWRMIRELRSLGYRVELENPQQPNPA

SEQ ID NO: 432449 - protein, 345 aa, unidentified
MTTMNYIGLDVHKKTISYCVKDVSGRIQQEGKIGSTRRELDCWMKTLPQPWTVAMEATIFSGWIYDHLLPHATQIKVAHPLMLRAIAAAKKKNDQIDASKLADCLRCDFLPECHMMPRAIRDRRRTLRYRHLLVRQMVQMKNRVSGLLMETGVEYNKQRLHKVSYFRELLSANAEVPPSIRPLLKLSRETIERCQKTEYALVSSLQRDPVLADRIKRLRTVPGVGPITALTWALEIGDVSRFGSIKKAISYCGLCGDERSSADKAMRMPLSKQRNKHIQRALVEAAKLAPRQSHEMAVIYDQERQKGNSNRATLAVARKMVAYLLAVDRQQRDFVPAEERRTTAA

SEQ ID NO: 432450 - protein, 345 aa, unidentified
MSEYDGKQFVGIDLHRHRSVIVRQTDTGEQLSVTRIDNDPMTLAQEIGKAGECPEVVLEATYGWYWAADVLAEAGAHVHLAHPLGIKGFTYRRVKNDVRDAADLADLLRMGRLPEAWIAPPPTRELRELVRHRAKLVALRSGVKASVHAVLAKQGLHLPVTDLFGVRGRVLLQQAPLDGPYRARVNSLCRVLEALNFEIDLAARLVAGRLAHHPGYHAIQAIPGIGPTLAAIFVAEIGDVGRFTSARHLCSWAGLTPRHRESDTTVHRGPITKQGSTLVRWAAVEAAQKTPAWAGWLSRARAGIAQRRGRNIATVAVARKLLILVYYGLRDGHIRALCQAGTDVA

SEQ ID NO: 432451 - protein, 319 aa, unidentified
MDDKIIGFDVSKKFFDFAYLKSNKKWFNQQLDYDKNGLSKLVKIIPDKSICVMEATGPYYLKLANFLYSKGFKVCVVNPLVIRRYSQMLLKRTKTDKADAQLIAMYGKNQSPDFWKPNNENIQRIRQMNSVLESLIKERTSWLNRIEAAKQDDNFDKSSLKIMKQMIILINRRVQKLEVELDKIIEADFEQENSILRSIPGIGRKTSIVMLAITGGFTKFESYKQFSSYVGLCPRIFQSGTSVRGKARICKVGTSRVRQLLYLCALTASKVNKACKELYNRLIEKGKPKKLALIAVANKLIRQAFGCIKSMTYYNAELC

SEQ ID NO: 432452 - protein, 355 aa, unidentified
MSQEKYIGMDVHQATVSVAIMDSGGKLIMECILETKAATILKFIQGVRGTLSVTFEEGTCAAWLHDLLQPHVSRLVVCDPRKNALLKDGSKSDRIDARKLAELLRGNQLSPVYHGDHGVRTLKELGRSYLTITKDLTRVMSRIKALYRSWAIPCSGTAVYAARHRSEWLAKIPQPGVRLRAERFYQQLDLLQPLHQQARCDFVRESHKHPAVKLLRQIPSIGPIRAALLVALLQTPHRFRTKRQLWAYSGFAVETHDSGEYRYVRGKLLRNRERISVRGLSDNYNRDLKNLFKSTAISASTRPGPLRDFYVALLARGMRPTMARLTLARKIAAITLTIWKKGVDFDAKRLDQQAA

SEQ ID NO: 432453 - protein, 373 aa, unidentified
MPKYSTAFGMDVHLRSTTVCALDADTGEAVTRRFPGNPWGEIAGWMDGFPGPSLAAYESGYLGFAPQRELAGLGVECVVAAVSKIPRSAADSASKNDRNDAARMAKAILAHDISPVWAPSPEVEGIRDLAGAYDGATARLATAKQRLLAFLAKRGFVYGGTTPAGNPRKYWTYDFLRWLDKVRPEDDGGVRALAALRNEVEAAAEARADLLSEYRAAVDASPIAAEVAALQSIKGCAFALAAAFSAEVGDFTRFRSGRQVTAYFGLAPSQRSSGDSVRLGGISGAGNALVRKLAVEGSWCYAAARHQPKLMPRDTGVPLEIRVHGRKGSERLLRRREGMLARGMPAAKANAATAAELVRWLWALGMMCREAGE

SEQ ID NO: 432454 - protein, 356 aa, unidentified
MSRDIKYIGMDVHKEAIVIAVLNGSGKLVMETIVETQASSIVQFLQGLRGELHVTWEEGTWAAWLYDLLQPQVEQVLVCDPRRNALLKEGSKSDKVDARKLAELLRTGMLRAVYHGENGLRTLRELGRSYQTLSKDLTRVMNRLKALYRGWGIPCAGTQVYAPRYREEWLSKITQAGVRRRAELLYQQLDGLQGLRRTLRPELLAESRKHKATKLLRQIPCIGPIRAARLIALMQTPHRFRSKRQLWTYSGLGIETHDSAQYRFVRGQLQRSKKPQQLRGLNQNHNHEMKEIFKGAATRASCGRGPFHDFYAALLAKGMKPEMARLTLARKIAAITLTLWKRGEGFDAEQLKTQAA

SEQ ID NO: 432455 - protein, 479 aa, unidentified
MENSVVMRKPAEILDADHELVIERVCAIDVAKASGMLCTRLPQGAAAGRRVSRVWEVAATTRAITELADHLVAVGIEQVTVESTSDYWRIWFYLLEARGLDVQLVNARDVKNLPGRPKTDKLDAVWLAKLTEKGLLRPSFVPPAGIRQLRDYTRLRVDLTRERTRHWQRLEKLLEDALIKVSSVASKLDTRSVRDMLEALIAGDRDPRRLAELARGRMKTKRGALVEALSGQFDKHHAEIARILLDQIDGLSAAIDQLTTRAELLLQALLATRAGDQRAGGAVHAPGSGDPRQAPTEAPTEASVPAGGTIAHRGGNGLSASQRLDEIAGIGPLAAQVIIAEIGLEMSRFPTAGHLVSWAKLCPRTIQSGATRRSGVAGKGNPYLKGVLGEAAAAAAKTNTFLGERYRRLVKRRGKLKALVAVARSILVIVWHLLSDPTARFYDLGPDYHTRRIDTTRKIRNHVSGLTALGFRVTLEPTA

SEQ ID NO: 432456 - protein, 370 aa, unidentified
MKKHSSSEKSPKRGKAALERDPVTIGIDLGDKTSWYCALTGSSDKGVEGSVATTRKAMAQKFGAMPACRVAIEVGGHSRWVSQLLASFGHEVIVANAREVKAITASSRKNDQMDARMLARLARVDPALLRPIRHRGEQAQAHLMRIRVRAALVETRTSLINTARGLAKSAGERLPGCDADQMGMARTEDLPEWLAGQLEPLLVQVEQLTVQIKKCDRELEQIARTEYPETKLLEQVWGVGTLIALTFVLTIEEPNRFRRSRDVGCYLGLRPRSSQSGEREPELPITKEGDGYLRVLLVQAAHRILSRPGPDTDLKRWGWKLAPGGSKSKKAKKRAIVAVARKLAVLLHRLWVTGEVYEPLRNSGAVAAAA

SEQ ID NO: 432457 - protein, 346 aa, unidentified
MMIVGCDFHPSWQEVAWLDDETGETTEQKLVNGNGEAERWYGQLPVPSLIGLEATGNAQWLVEMLQQLGHEVWIGDAAQIRASYVRKQKTDKRDARHLLRLLYEGRFPRLWVPSSEQRDLRQLLIHRDKLVQIRSRVKNGLQHLAMNRGVQKKHRLWSVAGQKALRELPLLGWSACRRADLLRLLAQMDALIAPLDQAVKQAAEQDRQARLLLTQPGVGPITALAFVLTIGEVARFRRGKQVASYLGLIPQERSSGGRQRLGAISKQGNRFMRMLLVEAAHSVVRLDEGFRKQYAHRCHGKPKGVAKVAAARRLAVRLYWMLRTQTPYPEIVRIESSPRVPLVGGS

SEQ ID NO: 432458 - protein, 343 aa, unidentified
MKLVKDIANWVIRYIGMDVHKDSTTAVVLDAQGHLVMQVTVRTEGSVLVDFLRGLSGTLHLTFEEGTYSAWLYTLLSPCVEKLIVCNPRQNALLKQGNKSDPVDARKLAELLRLGSLTAVYHGSPAMRTLKELAASYDTLVSDGTRVMNRLKSLYRGRGIRCGGTQVYSPRHRARWLQQLLEPGAHQRAKLLYQELDLLLELRRPARRALLSESRKHPAQKILRTIPGLGAIRVARLLALMQTPHRFHNKRKLWGYGGLGLLTRGSAQYRLQQGELVVSPKGVTVRGLNPAHNARLKDIFKGAALAACQRPALSARPTNAVCERAWKSTWRASPSRARSPPWF

SEQ ID NO: 432459 - protein, 341 aa, unidentified
MQITTLGLDIAKNVFQVHGIDAAEKVVLRKQLRRGQVMKFFAALPRCLVGMEACASAHHWARELTKFGHEVRLMPAKDVKAYVKRNKNDAADAEAICEAVRRPTMRFVGAKSAEQQGRLMQHRARDLLMRQRTQVINALRAHLAELGIVAAQGREGLKQLLAIIADEKDDRLPIDARASLIVLAAQLQALQTMIGSIERRLLMQHRANEASKRLESVPGIGTIGASAIAATVTDPNAFRSGRDFAAWVGLVPRQDSTGGKQKLGPISKQGDRYLRRILVVGAHSVLWLAKKNPQKHPWLTQLLARRPFKVVAIALANKMARVAWALLARGGTYRVPVLAAA

SEQ ID NO: 432460 - protein, 469 aa, unidentified
MAYSVFNHIQGKKGSRWAEFVRETGSENLMMVAVDAAKFTQKALICTFYGDILVKPFEFDASLTGFEYLKRIIQSEKDKHKFKEVVVGIETTGHYYEDLVRRCQSYGYHVRTLNAATTAQERQALLNWSKTDNLDLMAIVQSMIHGRGTSNELSSGDVLTLQKLTRARRELVGEQTTTQNLIRVHMDHIFREFQGKSIWKNGTREHVKPFSKLFGKAPLYLMRYFPHPSDILKLGKEGLRELSIRENLKLRDSTIQTLLEFAQNSISQPKDFLEGDIFLLTQKLDRLELLSKQISVLERKIEDLFVEMEGAVILSVSGIGVVTGAELYAEMGDISDFDHAGQLIKLAGTNPIVKQSGGKKPSYYCISKQGRRTFRNITYQVGKSLAVNNPEMKQRYLDFKERGKLSNQAYIALGNRMIRLAFSMIRNQTLYRSSQENYVLLNEISKKLRASNVKRFYEIHVSSKLCRSA

SEQ ID NO: 432461 - protein, 356 aa, unidentified
MSQKLNSAIAVIGIDIGKNSFHVVGQNKRGAIVLRQKWSRGQVEARLANMQPCLIGMEACVGAHHLSRKLQALGHDARLMPAKYVRPYSKGQKNDFRDAEAIAEAVQRPTMRFVATKTVDQLDLQALHRVRERLVGQRTAIINQIRAFLLERGVAVRQGLHFLRAELPGILAKRTDVLSPRMLHTVEGLLDDWRRLDARIEALSNEIGAVACKDPGCDRLMSVPGIGPIIASAMVAAIGTGDAFAKGRDFGAWLGLVPKQISTGDRTILGSISRRGNRYLRALFVQAAWGVLARIGPKGWERYGLKSWIEAAQERLHRNVLAIALANKLARIAWAVLNKGRAFECVKTHASSSQPA

SEQ ID NO: 432462 - protein, 453 aa, unidentified
MKGEPAMELSSLQLKRGMIDGMIIVGIDPAKAKHQAMVIDPIGSQLGKTFSFDVSHEGYTNTLWHKLRQIVHNCNPQSVVFAVETSCNLWLTLCAYLDREGYRVLLVSPLTTHHARPMLNHDFSRTDPKDALIVASNAQHGYFDLYTTHPPLQAAMHRLSITYDKLRKGCSQNRARLRALVEQVFPEFLTILEPDTHSAMYLLKRYLFPQDFLSLNVAKEAEAIETISRNQYGLNTLLQLQRAAHHSIGVPKTNEECIAERISLTCWIALIETLSSQLDLVLAELCRCAEQLPEYHTLVSLKGISCTTAALFLAELQDIHRFSHFKQIEKKAGLNLRLSQSGQFVGTRHISHLGDNRLRWLLYSMTEETAKWIPEVRIKYLHRQLKSRKHRKSIIASVPQLLKLIMALVRENRLYESRPDSLAEMKALEQQYTELKEKQKKAKRQILSPGRAA

SEQ ID NO: 432463 - protein, 407 aa, unidentified
MSEKEANPARFVGLDVHKHYLVAVAVDTDKNEIMPPRRVPLAHLDDWVRKNLTLQDAVVLEMTTNTFQIYDDLLPHVHSITVVHPPHVALITRAQVMTDKIAARILARLHAAGLLPSVWVPPAEVRDHRALVAQRAKMMSLATQARNRLHAVLHRHHISPPGGDLFTPNKHPWWLALDISALEQARVQSDLATLLFAWGQVDILEEAMAVLASQDERSVLLLQLPGIGLITAVTLLAAIGDVSRFPTASHLVGYAGLGGRVHDSGLTHHSGRITKAGRRDIRAAMVEAAHTACRTHPHWQAELARLEPRLGKNKAIVAIARKLLVAVWHVLTKGEVDRYATAERTARKLLRHAYRLGHENRQGQSPTQYVREQLDRLGVGADLAAVPWGKTRLLALPPSSLKEAAES

SEQ ID NO: 432464 - protein, 381 aa, unidentified
MTTTATHNEYGTTTERSLFMAFELSENTWKLGFTTGPGQKPRERAVAARNQARLLQEIAQAKRRFGLSASAPVVSCYEAGRDGFWLHRFLHAQGITNHVVDSSAIEVNRRKRRAKRDGLDVRKLLSMLMRYEQGEREVWRVVHVPSVEAEDQRHLHRDLETLKQERASTTTRIKGLLSSQGVKLASLTKLPEQLDALRLWDGSPIPSGLRRRLLRVYAHHQFLSEQIAALEAERRALLQTSQEASIEKIRQLMHLKGIGINGAWLLVMEFFGWRALKNRREVGGLAGLTPTPYQSGASAREQGITKSGNRHVRWMTTELAWSWVRYQPESALSCWFRERFGGGGKRLRRIGIVAVARKLLIALWRFLETGLLPQGAELKEA

SEQ ID NO: 432465 - protein, 367 aa, unidentified
MSHIIYCGVDFHARQQTICCLKTETGEFTSHELKHDHKEELRKFYSELGGPVVVGLEASGYTPWFEQLLEELGHEVWLGDATEIRRRARRRQKNDRRDAELILELMYHAEFPRIHRPLPQSREILRMLRYRHKLVKLRTIVKNSLQALSIQAGLSLQTRLFTRQGTQQLEALTLSPVMRHQRQQWLELLQELNQRITETEGWLKQQALSDPRIQLLRTHPGLGLLSSLGIVHTLIPVSRFPNTRKVAAYGGFDPMERSSADKKRYLGISKAGSRLLRFLLIEATQTAVKTDPELKRFYHRLVQRRGKPKAKVAVARKLLIRSFIMLRDEINYAEFQQRAIAARLAREFARPNVPVPLIGQPASPAKG

SEQ ID NO: 432466 - protein, 426 aa, unidentified
MKEHIDYLSTLFVGIDIASRIHVISALDFNQDFFIKMKPFENTKEGAGIVEKMIADVLADNHQFKYVVIGMESTGFYGVHLANYLSTSELLAPFSVHVYCLNPKEVKNYKKSFNDIGKNDGIDSFVIADFARVGRIAIKPWRGSQYLALQRLTRHRMHITECITREKTYMLNNIYLKFSEYALLRNGEHPFSNKYGATAEAILTEFTTNEDIVNSSIEELVEFINSKSKGRIADPEETAKIVQAAARNSYRLDKCLYEPLTISIASSFNCISSFEKELKAIDKAILQTVQGLNPEEYTVLNSIPGIGKVYSAGILAEIGSIKAFQNANQLAKYCGIVWNDNDSGDFESEDSRMSKAGNRYLRYYIIEATGSVISHCPEYKAFYQKKYAETRNHQHKRALALTSRKFIRLLFGLLDKGQLYSPEKGR

SEQ ID NO: 432467 - protein, 369 aa, unidentified
MGKHSEVFVAFDVAKKKHAVAIAESGRTGEVRFLGDVENAPLPIERTIKRLANRYGRLHVCFEAGPTGYGLHRQVQALGHDCMVVAPALIPKRSGERVKTNRRDAVTLARLHRAGELTGVWAPDAAHEAVRDLVRAREAAADDLRRKHQQLLSFLLRHSRIYRGGGHWTLAHRRWLAGQKFEHAAQQIVFQEGIDTIEDALQRLRRLEKQLAVIVPEWSMAPVVEAYQAMRGASFLVAVTFAAEIGDVRRFDTPRQLMSFLGLVPAESSTGDTIRRKGLTLAGNRRARRALVEAAWTYRYPARVSETLRARLEGLPKPVRDIAWKAQVRLCARYRRLSAMGKKLPIVVAAIAREMAAFLWAIGREVAPV

SEQ ID NO: 432468 - protein, 406 aa, unidentified
MEAMFGRVCGLDIHKALVRACVRLRQADGSATEETRCFATTTRNLPALGDWLRQCGVRHVAMEATGVYWKPIWNLLEGEFERVLVNARRVKNAPGRKTDVKDCQWLAHLLACGLLRGSFVPRRPQRELRELTRHRAQLVGERARAANRIEKTLEDANIQLGAVVSHLLGVSSRDMLRRLARGETDARSLAELARSKLRGKIPQPRQALEGRLTERHRFMLERLPDHLECVEGQIDRFEALSRPFEQSPAALAQIPGVAERAAQNIASEIGIDMSPFPTERRLASWVGLSPGNNESAGKRKSGRTTKGNRRLRGTLVQCAWAATRRKGSYFQAPYRRLAPRRGKKRALVAVAHSLLTVIWHILKHGVERQDLGADCFDRQKGEQLLRHHVKRIADLGHDATLHQRAA

SEQ ID NO: 432469 - protein, 314 aa, unidentified
MTNIPSDACFVGIDVAKAHLDLHVLPDGRHWRVACTAAALAELVEDLQHRAPALIVMEASGGYERLSADLLAAAGLPVAVVNPRQTRRFAGSLGRLAKTDRIDAAVLARYAQRLQPTRRHQPDPARAHLGALVARRRQLKAMAAMEKQRCDSSLADPAIAAGIEQHLCFLKAAIDDIDGQIKRRIASHAVWARLASALQEVKSIGPATSMTLITHMPELGTISRREAAALAGLAPINNDTGKTRGRRFVQGGRSAVKTALYLAALSASRYHPSLSVAYKELRGRGKTAKVALIAIARKLIVILNAIAKQTLQTA

SEQ ID NO: 432470 - protein, 330 aa, unidentified
MHVGVDVGKDSLDICYPDGTKEHIKNTRCCRTKLIKKAKAIGAIVSFEATGPYEEHLADECLASGVPAVRLDAWKTRRYAESQGMIEKTDAIDCEVIRDFAASLRPEQLRFVKPTTEGYRRLKRASSVRRNLIKAKTLVANQLESILDKDTKASVARLVDALDRQIEKMDALCAEAIRSDEKMSSLAARFEKVVGIGPVLINTMLSSCPDIGSFTAKGIAKMAGVAPIENKSCTIKKKSRTRRGRRELRSALYMAAVSACHSNHRLQPIYERFVARGMPRRVALIALARHIAVLMNYIAKYPDFNPDVDPKKAAMLALPKRRPGRPRKNP

SEQ ID NO: 432471 - protein, 354 aa, unidentified
MPSKVTKPDTSAQPKLMSIGIDIGKDVFHIVGFDHNGKVVLRRKFRRLELDAVFEKLPRCVVGMEACLSAHFVSRRLRALGFEPRIIPAIYVKPFLKGQKNDYNDAEAIAEAALRPNLKLVKEKTQEQLDLQACHRVRSRLVSRRTATINQIRAFLIEHGIAIRTGANSLRRSLPEILLQRADELSPRMRVLIEELHGDWLRLDARIEALNEEIEEISRQEKSCQNLMTIPGVGPLISTATVAAIGNGEAFERGRDFGAWLGLVPRQYSTGGRPILGRISKRGSKYLRTLFIQAANVILMRPQNWPRYSFGAWLVTAATRLHRNKLATALANKLARIAWSVLRYNERFDDAQTV

SEQ ID NO: 432472 - protein, 361 aa, unidentified
MFCIALDVHKESTYGVVLDDASGHTVWEGNFASTFRAAKEVLEPYFIKGSKVAIEATSCFYPLYDGLKTVSDISVHVVNTVKLEKPAVKTDRRDAQRIAHLLRRNELPLAYIPPKELRLQRELCTLRVRLVHSCTQCKNRISAILHKEGKRPIGVKDAFSKKGLAQLSALKGAISRGEELAEEMDLLAILQKKQKRVEKSIEDAIGKDPALKRRVDLIDSIPGFALTLSFVCATELGPISRFCSAEAVAAYAGMYPCVASSGGKTRHGGIRRVGRKLFRWALIEGAHAASRTDNPIARYYRKKARQKRSNHAAAVATANKMARIMFHLLSKEQPYDPRLEQRVQSSNPHASTKAFVQSGRH

SEQ ID NO: 432473 - protein, 341 aa, unidentified
MYNFIGIDVSKATLQVYIPIKDENINISNTKKSINSLYSKLKKYYKKESSNLVFIFEPTGPYSSLLKHFCADKGILAYMVNPRQSANFSKALDNRSKSDIIDAKMLYLFHVMAKEGDLVVPMVNELQETLGEMLSYFKLLIKQRNSFSNHLESLESKDGIGYIIKQLKKEIKQLKLQEENILAEMLQLIKSDTYLYERFENIKSFKGIGDRAGIALIHLFITYPEANRQELTALSGLDAIEITSGTSIQRKSRISKKGSAIYRSMLFMPVLSAVRSNKYMQAVYDRLKENSKHSTVAQIAVMRKMLLITHSLFKNNIAFDNELYEKRVSWKEPESNSEKVA

SEQ ID NO: 432474 - protein, 324 aa, unidentified
MVTTALGIDVSKDRLDAEIAACGKPRSKYFANSPDGWRQLLAWLKELKIKRVHACLEATGRYSLGIALALWEARHIVSIVNPAQIRDFARTKLGRNKTDAVDAGHIRGYAEIFKPQPWTPPSPAMRRLGELQTIRAGIVSSLTEWKNRCGSGLADDTALALVKTTITHFAAQLAEVDKAIAQTIDNDRDLSAKRDLLLSISGVGKVLAGLVLSELPGTDILRSGTQAVAYVGLNPRSHRSGSSIDRPTRISKIGNATLRNALYMPALSAMQHNPVVAALAKRLKAKGRLKGKQIAVAAMRKLLVLCFGVLKSGKPFDPALAMPN

SEQ ID NO: 432475 - protein, 467 aa, unidentified
MKRNPNPASKKNRRNRRNRVAKFLEKIHLNAAGIDIGSASHWVAVPEDRDDEPVREFKSFTPDLHALADWLDVCGIETIAMESTGVYWIPLFEILQERGFEVLLVNARHVKGVPGRKSDVSDCQWLQQLHTFGLLRGSFRPDAEITAIRTLMRHRGTIVQEAASHIQRMQKAMTLMNLQLHNVITDVTGVTGMAILRDIVAGHTDPAVLARHRDYRCKASEAEFVASLTGHYRDELVFVLRQLIELYDVYQDKIRACDEQTEALIRALEAQCPAPNRELPTRPRTNKPRKNEPHFDIRSPLFSLSGGVDLTEVPGIGPYAALQLISEIGLDMSRWPSPDHFASWLTLAPHNKISGGKLLGSATQPSNSRAAKTLRLAVMSFTKSDHALGAFYRRLAGRTGKAKAITATARKLAIIIYCMLRDCTPYREQSAAVYDERHRKRVLNGLRKRAQSLGFDLVQTDTGLVLE

SEQ ID NO: 432476 - protein, 316 aa, unidentified
MAMRVSKSIVGVDVAKAELVIYLADPDLLTSITNEKPAIKRWLKTLPGPTAIAVEATNIYHVDLVELAHESGHDVYIIDGFQLSNYRKGVGGRSKTDASDARLLARFLKNEGEDLRPWTPPPAVYGKLQSLLRRRASLIQAKTSLTQSWANDASLKAVFTTFVKSIDRLDLLVQKKLKEILREAGLLEEVARCQAIEGIGFLTATALVMAYNRGDFTSGDSYIAFLGMDLRVSDSGQKNGRRYLTKRGCSEVRRLLHNAAMSACRSNAWKAFYSHHLNCGKATTQVLVMLSRKLARIAFALMKNQSEYQSKGAVIA

SEQ ID NO: 432477 - protein, 373 aa, unidentified
MPDVTASIAPADVRLWVSLDVHKLSIVAATLPPSGGRPAVQRLETTEKAIRRFIDRLGGPEGLAVCYEAGPGGFALWRLLSGMGVACDVIAPSLVPVRAGDRVKTDRRDAKKLVRLFRAGELTRVQAPTPETEGLRDLLRCRDDLRCARTAARHRVMKQLLRHGHVFREGKKAWTKVHRAWVARQRLEDPLSQLALEQMLIHLEGIERQLDALDTQLQQIATGERWAGQVDILVRFRGISTLTALGLIAEIGDFARFSHPRELASWLGITPSEYSSGEQQHRGRITKAGNRHARRLLVETSWHYRHAPRRPVSGPQPDERAWQAQVRLHHRYRHLTEHGKRPTVVNIAIARELTGFLWAAMTNQPDRKEELAA

SEQ ID NO: 432478 - protein, 455 aa, unidentified
MSIRIIGIDLAVNAKHKAMILDPAGNKFIGKPITFRSRHDDLERLLKRARAGAPEEVQLVAIMEATGMAWYPVGVYLHRQGVIVYRVNGQKTKDLRKVLWKHAGSDLIDSQILAHLYQLAPSRLERWWPADGDQLALQRACRAYARWRELDVAEQNRLQSYDQWAWGGLHKLVPAVARDWMRLHWYNPWRVFEAGVDRLSDAWQAAAPKAAGSDWIAPWVDRARQMTLLYGSEEMVGYDDLQAITREGLRLRNHYAQEQACLTNQLIRPLYRQLYPDCFLESIRGIGLQSAATYMAFIQDIARFPTIEKFRLWCGIVPASKQSGGAEAKGLRITQAGPNLVKATLFLNAEVARQWDAQIAAIYHQQMVNYGKHHNQAVCACASHLASRIYAILKQQRPYQLRDLQGKPVSAAQSRALCKKLRVPEEVRKRNTKRFRRAQAVVQKEAGFNSQRLLK

SEQ ID NO: 432479 - protein, 360 aa, unidentified
MNLQRTSVGLDVHARSVVACGLDRQTGEVFERRLCPDHREILEWIGGLPHPVAVTYEAGPTGFGLARALEAAEICCVVAAPSKLVRPAGDRVKTDARDARHLARLLHLDQIVAVTVPSMQQEAARDLVRAREDCRADLMRTRHRLSKLLLRQGIVYYGGEAWNAVHERWLRRQHFDAAGLQMAYQEAFDAMLVTRDRRDRLDAAITAMAVDSEFTTVVTRLGCLRGVSTLTAFALAVEIGDGHRFTGRSIGAYLGLVPTEFSSGATRVQGGLTKTGNGHARRLLVEAAWHHRKPYRLAIALRRRQDAASPAARARGNAANRRLHTRWQRFDARKKRPVVANAAIARELAGWCWSLATLDE

SEQ ID NO: 432480 - protein, 350 aa, unidentified
MIIVGVDAHKRTHTLVAIDQSGGKLKEKTVAATTAGHHEALNWAISRFSDDLLWAVEDSRVNTRLLEHDLLGAQQRVVRVPTVLMAKVRRSARTWGKSDPIDALSVARAALREPNLPVAEHDTETWELKLLMDRRDDLVGQRVAVMNRLSSRLHLIDPQVPAWNLTRSPGRQALQQWLTASADTLISELALEELADIDRFSRNIDALYNRISKRVALLGSTLTGIAGCGDLTAARLICGTANVTRFRDEAAFARYVGVAPVPAWSGSTRGRMVLTRSGNRAMNSALQTIAVVQIRLDTPGRRYYLRRLEGGDTKAGARRCLKRKICRSVFTRLLADHRRRQHADPRDSVV

SEQ ID NO: 432481 - protein, 341 aa, unidentified
MKKFIRIGVDLAKNYFQVHALESENGRAVTRKLKRSKMHEFFSKIEPCLIGMEACGSAHYWARELKAMGHEVLLMPPAYTKPYVKRGKNDAVDADAICEAMSRPGMRFVPIKSAEQQATLMLHKTRELLVKQRTMSVNALRSHLSEFGIIAAKGIGRVDELLELAESDATLPAAAKAGVKVLAQALEGLDKAIDDLEKEISSAHAQNEMSRLLDKVPGIGKLIASVIAASVPDPSVFKSGRDFAAWLGLTPRQNSSGGKQTLGGITKQGNRYIRKMLVLGATSLLNVVGKRKGALRDWIVGLLAKKPARLVTVALANKLARILWAMMKTGECFRTETFAKA

SEQ ID NO: 432482 - protein, 388 aa, unidentified
MPTMTHPDRVEQAPVELICSTVTGGVDTHKDTHTAAALDQTGRLLGHRQFPTTSAGYAALLGWLRSFGLLIVVGMEGTGVYGAGLAQFLQGAGVKLVEVDRPDRKARRWQGKSDPVDAEAAARAAQAGRATGTPKTRGGQVDALRALRTARRSAVAARADAQRRVKALIVTAPDTLRTTLRGLGDRELIAHCATRCPDRATAGDPVTATVLALRALARRHQHLTVEITELDTLIGPLVTAINPALLELTGVGVDVAGQLLVTAGDNPARLRSEAAFAMLCGAAPLPASSGRTVRHRLNRGGDRQANAALYRIVLCRLRWDPRTRAYAARRTAQGMSKPEIIRCLKRYIAREVYTALLNPDPSSVLASPCAVPEESTCSARSASEDERR

SEQ ID NO: 432483 - protein, 354 aa, unidentified
MKKIMAGIDLHSNNVVIGLMDADGKRVASRKLPCELKEVVKFLAPYKKRLQQVAVESTFNWYWLVDGLQGLKYPVVLANPAGMEQYSGIKHADDTNDAFFLAELLRLKILPTGHIYDAQLRPVRDLLRRRVMLVHQRTALMLSFKSLYTRTTGQEMALSRLKAMKIKEAQELYEHPADQLIAGMQIKHIEQLSQSINTIEKGVLASAQEVPSYAKLTTLPGVGRILGMTMTMEVGDIKRFADAGNFASYCRTVEAKRTSNDKRKGDNNSKCGNKYLAWSFVEAANFARRFDPRCRQWFDRKAAKTSRVIATKALACKLAKAAWYLMAEGTNYDPQRMFGQPAKSAGKEEKKRTE

SEQ ID NO: 432484 - protein, 364 aa, unidentified
MKQLSKKQPRSIAGSKPERIAGLDLGDRYSHYCVLTQDAELVEEGRLQSTEAGLRKQFANEPRMRIALEAGTHSPWVSRLLEGFGHEVLIANPRKIRAITSSESKNDRNDAEKLARFAACDPKLLSPIQHRSPERQQDLNLIHARSSLVRARTGLVNALRGLVKSAGGRLAACSTRSFPDKAAASIPHALQPVCTPLVEQIAHLNLAIAAMDRQVEALGDKHPEIRLLRTVPGVGPIVAACYVLTLDSPDLIEDNRQAGAFLGLRPRQSQSGDKNPQHGISKTGNTCLRSLLVQAAHYILGRFGPDSALRRWGLGLAARGGNRGKKRAVVAVARKLAVLLHSMWRNRTPFVAFPQPSTQASVAA

SEQ ID NO: 432485 - protein, 410 aa, unidentified
MEVLYPHCAGLDVHKDTVVACVRHIVNGSVRRAVRSFKTTTKELLALSDWLTGEGCSHVAMEATGVYWKPVWHVLSDSDFTLVLANAAHVKNVPGRKTDVNDATWLADLLAHGLIRSSFVPDEQTQEMRTLLRTRKQLVRECSRHVQRLQKTLEDANIKLDSVISDIVGLSGRRMIEALIAGETEPGALAAMAHRRIKATPDELEAALRGRVTRHHRFLLQLHLQQIDAVNAAIDQIDQEVDAYVEPFRATVRLLTTIPGIDELSACVILAEIGRDMSRFPTAGHLISWAGLCPKNDESAGKRRSTRMRKGAPWLKTTLVQCAAAAARKKASYLQAQFHRLRARRGAKKALGALAASILTSVYHMLISGELYRDLGPHHFDQRAKAVNTRRLVTRLQNLGYAVQITPLAA

SEQ ID NO: 432486 - protein, 270 aa, unidentified
MRFYTKQHKFYCGIDLHARTMYLCILHQDGEILMHRNMPAGPDAFLKAIAPYREDLVVCVECIFTWYWLADLCAREGLPFVLGHALSMKAIHGGKAKNDKIDAQKIAVLLRGGMLPQAYVYPAEMRATRDLLRRRMHLVRKRAELLTHVQQTNWQYHLPDIGKKIAYKANRGGVAERFPDPAVQKSIEVDLALIDYYDQLLRDLELAIVTTAKKHDANTLYLLQTVPGIGTILSLVLLSEMHDIARFPRVQDFVSSCRLVTCARESAGKR

SEQ ID NO: 432487 - protein, 516 aa, unidentified
MLRNERCVDYAHAWTEAACFLEAYVPVKKPGPGEAADPAVVAPCVTPFRKVIRSESPSGVFNLREMSMSSRRGSATGLPVIHDRAAGIDVGSRFHVVAVGADLSEEPVQTFQAFTGDLDRMADWLVSLGIKTVAMESTGVYWVPVFEILENRGIEVIVANAREARAVPGRKTDVNDAQWLQRLHACGLLRASFRPGRDIAALRVYLRLRERHLDYAAAHIQHMQKALTFMNLQLHHVVSDVTGVTGMKIIRAIVNGQRDSKVLAEMRDVRCKASIETVRAALVGNYQAEHVFALGQALELYDFYQARVDECDAKIEEVLAVLAAKKSTPSTPMPTARHRTAAGNAVNFDVRPVLYQLAGVDLTQIHGLGPYLALRLIGECGTDLSRWKTAKHFTSWLTLSPGSKISGGKVLSAHTRKTTNRVVAHLRLAAVTVGRTNTALGAFYRRLAARIGKAKAVTATARKIAILFYNAMRFGQDYRDPGATQYEQKYRERVIKQLHRRAAEFGFTLQEAASVS

SEQ ID NO: 432488 - protein, 442 aa, unidentified
MKVLYERVAGIDVHKDMIKVAIRSPGEKPWARATEIFEFRTFYGVLQEVGRLLRRRGVTHVVMEASGIYTDPVYYALAEQDFTEVVVVNPAHARALKGHKTDAKDCARLAELFECGLLRGSYIPPAELREVRDLTRYRMKTVQARTSEIQRLGKALESAGIKLGSVASGITGVSATAMIGALIDGERRGQVLADLAVGRMRTAGKLADLSMALSGRFTGHHALLCRLHQDRIAVFDEAVEGLDGRIAGMVTRWQREAGLLTSVPGFGDVVTSAWLAEIGPAPHQWFASHEKLASWVTLCPGNNISAGKRKHGRTGDAGTYIKPVLIQAAWAAIRTRGRLQARYNRLVRRFGGEKNPAAKKKAITAIAHTLLKIAYQVLKSGQPYTEPGADFYTRRESPEQRQAYLERQLQKLHPGRTITITIGPPDAAAGAGPPEAALPPTG

SEQ ID NO: 432489 - protein, 308 aa, unidentified
MSSYVGIDVSKRHLDVAVAGGDVFQVAYDEPGLRALGERLGALAPELIVLEATGGLQVRAAGELAAAGWPIAVVNPRQVRDFARATGQLAKTDRLDARIIAAFAAAVRPEPRPLDDETSQILKALVARRRDLIAMRTAEKNRLAQATALKVRASIAEVIAALDAQIVSLEEDLDRAVKTSSLWRQSESLLRSVPGVGPILARTLLAELPQLGRLTRRQIAALVGVAPLARDSGFMRGRRTIWGGRASVRAVLYMATLAAVRVNPALAAVHQRLRAAGKPPKVAIVACMRKLLTTLNAILRDQKPYKPA

SEQ ID NO: 432490 - protein, 342 aa, unidentified
MYYIGLDVHKKTISYCVKDVSGQIQREGTIPATRTELDSWMKTLPKPWTAAMEASIFTGWVYDHLLPHAAQVKVAHPVMLRAIAAAKKKNDRIDAGKIADCLRCDFLPECHMVSTEIRDRRRTLRYRHLLVRQMVQMKNRVSGLLLETGVSHNKQRLHKVKYFRELLATNKEIDESIRPLLKLSRESIERLQKTDYALVSSLERDPLLAQRLRNLRTVPGVGPVTALTWALEIGDVSRFRSVKQAISYCGLCGDEKSSADKVLRTPLSKQRNKHIQHVLVEAAKLAPRNSHELSLVYEKAKQKGNANRATIAVARKMVTYLLAVDRGQRPFVPIENFSAAVA

SEQ ID NO: 432491 - protein, 427 aa, unidentified
MNYTQNHKISQITSATLIVGIDVAKDKHVARAQDDRGIEFGKRLIFENRIHGFQKLVDWMEQLRKDNQKSHVILGVEPTGHYWFSLAYFLVAKGYDFVVVNPMHVKKSKELDDNSPTKNDTKDARVIGQLIKDGRYSVPNLLDGVYAELREGVKLRDQLIKQLMTTEGRIQNHIQRYFPEFFDVFKDWEGKAAFCTLRLFPFPSQIRELSPEEVLMKWKPFVQRGVGIKKATKLVEAAKKSVGIHIAIQFAKRELDCLLDQYELYKQQLEQLDEELESLVETLPGAKQMMNISGLGPITIALFFSEVGDITKYSHPQQLVNLAGLSLREHSSGKFKGQTRITKRGRSRLRRALYLAIRPLVAHNPTFKALHQYYTTRSDRPLKKQQSLIALCCKLLRVLFVIGQKQCEFDNSKLLRGLPQAQASQAA

SEQ ID NO: 432492 - protein, 424 aa, unidentified
MKVTYQTCCGVDVHKSFLVATIVKTTGGIEPSYQKKRFSTFNNSILEFKQWLLDNHCHDVCMESTGKYWVPVFNLLEDKINVVIANPKWVKAVKGNKDDTKDSKWIGDLFRLGLVKGSYIPCKIVRILREYTRYRYKLVSCRSSEKNRYQNALTVCNVALDSIVSDIFGKSSTSIIDYLLEQSGTSINHEEIASKLLRSLKSKEDAVIESVEGYQMTDAQKYRMRLVRAHMDYITAEINDVDKMIENMISSNPDFENAVQFLCTIPGVKRDSAITIISETGTDMSQFSSSKRLCCWAGLTPGSNESAGKKKSVRITRAGVYLKPALVQCAHAAVKSDKSPYYKKKYESLVKRRGKKRAIIAIARMILTAIYQMLSTGEQWNPSDLYKIDMPVALVEKQKAKAIKQAKKLLQREGLLPPDEPLAS

SEQ ID NO: 432493 - protein, 286 aa, unidentified
MDEKYVAMDVHKASVVIGVRDGTGKMIARAMVETKAQTLKDYVRGLSGTIHLTFEEGTQSAWLYDLLRPLVAECIVCDPRRNKLLEDGNKSDEIDVTKLSELLYLGRLRPVYHGAAGTRALKELAHNYEALVKDQTRVKNRLKAIFRGRGISYEGDEIYDCQEAEQWLAKLSERGVRERARQLYQQLAQLAEWVGGARRQMLAESRHQKAKKILQLIPTLGEISVAQLIATVDTPFRFRSKRQFWTYCGLAVVRHTSADYHFEQGELRRRLKPGPTRGLNRNYNRA

SEQ ID NO: 432494 - protein, 314 aa, unidentified
MQAEAVVGIDIAKAHLDVYVGATGQLERYSNTSADRERLVAVLHEQHPTLIVLEATGGLERLLTAELTAAALPVVVVNPRQVRDFAKATGLLAKTDALDAKVLAAFGVAVKPALRPLPDAASLELAELLTRRRQLVDMLAAEKMRLPQATGKPLRRDLKAHIEWLEKRVRNSDDGLRQAIEDSPVWQAKYDLLGEMKGIGPVTRVTLLALLPELGQLGRKGVAALVGVAPFNCDSGTLRGRRRIWGGRAEVRRVLYMATLGAIRGKNPPILAMYRRLKAAGKPSKVAIVACMRKLLVILNAMLRDQTHFHVESA

SEQ ID NO: 432495 - protein, 398 aa, unidentified
MISVGIDISKGKSTVCIMKPYGEVISMPFDVNHVENELSKLVDMIKKLHGEVKIIMEATGKYHLPILGYFLEHKFFISVINPLIMKKYASTALRKGKTDKLDAIKIAYYGIDNWFRLEEYQIKEETYEELRLLGRQYAHYIKLLVDSKLSLTTLLDQAMPGIKNLLKNHSNSNGNNKLRDFIAQYWHFDNITKKSQKQFINSYISWAKKKGYHPSEAKAIKIYALAKEGIPTIKSNSPSTKMLLSESVRVLKEIEKTLLIILSRMQEISKTLKEYNIVREMHGVGDVLAPRLIAEIGDARRFYSGKALVAYAGIDAPPYESGQFVGTKRRISKRGSSTLRKTGYEIMTVLKSHKPKGDAVYNFIIKKEQEGKPKKVAKIAGLNKFLRIYYARVKEVYQ

SEQ ID NO: 432496 - protein, 391 aa, unidentified
MSMYFIGIDISKYKHDCCIISAANQKVVSKVTIENNKSGFEELLTIINSLSNPADIKIGFESTAHYALNLELFLENSLLTFMEVNPVLISEYKKSKTLRRTKTDSVDCESIARWLMTVEYKPHSKGFYHAYSLKSLTRLRDKLIRQRSFYLVKITNVLDHTFPEFKPFFSERFSKTALYLLENYGSAEKMARMNSVSYEKLRSLSRGKFSPQQFLQLKELAANTVGVNNSIFDVELNSLLTLYKSLNKEIDILEKEIIKLIEEIHPHYMSIPGIGPLSAAVIYSEYGDISNFSNSGQMLAFAGIEPGINESGTESHGGKMVKRGSSQLRYTLINCCLPLIRFDMTFATYYAKKRGEGKPHRVAITHVAKKLIRVIYALERQDIDFNVQKLH

SEQ ID NO: 432497 - protein, 352 aa, unidentified
MEMVIGLDLHRSQITFRTVDLRTGEVQRGRIYPGAREAVREWLDRFEPGTDAHFALEGTTGWRFVAEEIQRRDFTAHLADPAELSTLRGPKRRAKTDHADCELMVNLLLEGRLPQSWIPPAHILEMRTLVRLRKTLVDQRIEWQQRLQAQLYHQGVVPGLRLCRPEDRRRLGEAQMSPAGRQMTGTGLTMLDDFDAQLGPLSAQLVRLAKSQAGCRALERELYGVGWLTSAAILAELGDCRRFHSADQAVRASGLDVTVYESNGRRPGGHLARQGPQVLRWALFEAAQCAARKSSPDHDYYVTVRDRIDHNRACLSVSRKLCRRACHILRDLGDAAMAAPELPSASHETKAA

SEQ ID NO: 432498 - protein, 361 aa, unidentified
MSDATTSEGTKVTVGLDLGDRHIQVCVLDEAGEVIEEARLATKPQALRRRFCGAERLRIVLEAGTHSPWVSRLLAELGHEVIVANPRKLRLIYQNDSKSDRVDAEYLARVGRLDPALLAPLSHRGAETQADLALLRSRNALVRARTSLISHARGTTKSLGARLPACSTESFVAKAGACVPDELRLALDPVLVVIAGLCAQIRALDERIEEMARQRYPETALLTQVPGVGTLTATVYVLTLEDPERFPRSRSVGSYLGLRPRQRDSGSLQPQLRITKAGDEHLRWLLVGAAHYILGPFGPDTDLRRWGLKLAAQGGRSGKKRAAVAVARKLSVLLLRLWVTGEVYEPLRNARLRDELLPSPT

SEQ ID NO: 432499 - protein, 354 aa, unidentified
MAKTIQAEQSGFATIGIDIGKDVLHLVGFDHDGRITLRRKIKRLALVSTFEALSPCIVGMEACLSAHFVSRTLRKLGFEPRIIPAKYTKPFIKGQKNDYNDAEAIAEAALRPNLNLVAEKTQAQLDLQALHRVRSRLVSRRTATINQIRAFLIEQGIAVRTGSRALRNSLFAILKNRADEISPRMSAIIIDLHDDWSALDDRIARISTEIEEMSQQEENCRRLMSVPGIGPIISTAMVAAIGTGEAFDRGRDFGAWLGLVPRQFSTGGSTILGRISKRGSRYLRTLFVQAAHIIMMRPKNWERFSFGPWLAEATKRMHKNKAAAALANKLARIAWSILRHGKGFDAHRIEGFAV

SEQ ID NO: 432500 - protein, 336 aa, unidentified
MKYSGIDLHSNNSVVTVTDEEDRVMAEKRLPNDLATILGFLLPWRDELVGVVVESTYNWYWLVDGLQEAGYRVHLAHCSAIKKYEGLKHSGDEADARHLAHLLRLGILPTATILPREQRALRDLGRKRMQLVRSRTQHILAVENITARERGARISSNQVKRLSVETVDQMPVPEDVALAVKANVAVIHTLSVQIDLLEKRLQKAVPRTEYDLVTTIPGIGRILATTILLETGPIDRFASPGNFASYARCVDSQHTSNGKKKGKGNTKNGNKYLSWAFIEAAHFAMRYCAEAKRFYERKKSRTNNVVAIKALAHKLARACFHMLKERKPFDVTRCFA

SEQ ID NO: 432501 - protein, 387 aa, unidentified
MTVPAQVFGLIPRHYDIFGGLDVAKKNMAVTFTDHEALMRSLRLPYSSAHLLHYVRKHFPDQRVAFVYEAGPTGFGLRDELVSAGYRCLVVAPSMVPTAPGDKVKTNRLDSRKLSVQLRGGELRSIHVPAPRYRELRHLVQLRDTQVGQLKATKCRIKSLLLCEGLAFPPAPESSQWSARVLSELLELPCSPAVRFELDQLIGTLHFHFNSAAAAQKQVRYYCQNDPELRQSIRLLASLPGIGVIVATHLVARLGDWREISNVRQIAAFLGIVSSEHSTGEKANRGRITRAGDSRLRNKLIQSAWTAIRKDAELRAFYWRIYHRHPKKIAARKAIVAVARKLTTRIYAVLKEQRPYVLRPENFAAPLTAEETVGPRERLDNPQNEQP

SEQ ID NO: 432502 - protein, 333 aa, unidentified
MTYIGIDVSKATFVVAYSSAKDSKTKTFANTASGIHKFIQTLPPEAHCVMEATGNYSMLLLYLLDKANIMVSMENPLKIKNFARVMLSVVKTDEIDAKLIALYGERMQPKPFKMRSDSLMLLKQKRTVLRQLKKQLVANTNLQESMEALPFVDSISKKVLEKTIKFLQKQIKQMEEELASLANIEYKKQMSLLTSIKGIGVTLAAALIVATGGFTYFDNAKQLTRYLGLSPTYQQSGTSVNVKGRINHNGDSYLRSQLYVAAFSSLRCNKECKACFDRLRSNGKPGKVAVVAVANKLVRQAFAVVTKNKPYIDGYKSVKPENTPAEGAPAARG

SEQ ID NO: 432503 - protein, 328 aa, unidentified
MTDQYIGIDLHKAFFQACAVSPTGERRWEGRFPRTPAGLAALAARCTPSTALAVEASTPTWHFADHLCPAVGSLCIVDPLKTKLRAGYAAKTDRLDAQRLADALRRDSIVSIYYPPLAIRELREVCRTRHALVQVRTALINRLRALLLRQGLSEARRLAKTADDRWLTALALPPRAAASVTALRTVLAVVRTETERAEQEVRRLSDADPITIALQELRGVGPILAQTIRAEIGDIRRFPTGAQLASYAGLVPRVDMSAGHYRYGRITKRGSPWLRWALIEAAMHGPKRTDRIGRWGRGLAVRKGALKARVALARVLCEEVHRRWSRIP

SEQ ID NO: 432504 - protein, 337 aa, unidentified
MNQITTAGIDLAKHVFSAHGVDSAGRMVLRKTVRRGELEATAAQLVPCLIGMEACSGAHEWARRFARHGHRIKLMAPKFVAPYRTGGKNDGNDAAAICEAASRPQVRSIPVKSAEQQAVLCLHRARQGFVEERTATINRIRGLLSEFGIVLAQRSQTVRTQLEAAIEELPVLARRVLRDLRAHLRLLDERIAGYERQLEQLAAKDERCLRLMQLRGVGPITALAIVATVGNASDFKNGRQFAAWLGLVPRQHSSGGKTRLGRITRRGDAYLRTLLVMGARSVLNTAARHHDRMARFATAIQSRRGYFKALVAVAAKHARIVWAMLAKNQPLNAAAMR

SEQ ID NO: 432505 - protein, 350 aa, unidentified
MKNIAQRFIGIDLHKTVVQICVLDGLGHLRLERRFPLGDTVSNRKVISYLARWREKGRFAVEAIGLNRWFVNACFDESLDLIVVDPAKLNLKMLGKKTDRNDAYEIARRLYLGDIDRNALTYYPTDEEYGVRKLLRTRHKLVSIRQQVCNQIRSLLNAYQLRIPGNLYLLCNLSRLGRLQLASEEMTQVLRALTKVLAGTQIEVQALSKRIEAIARQDLQIAPLLAQPSVGPLTAVTLVYELGDLGRFARSREVASYAGLVPRLDDSGERVRHGRLTKRGNRELRWILGQWAVRLLASNEQAQAWAAGRLRRRHTQKNKLRTALARRLVVGLYAAYKRDEAFTLEKCLAA

SEQ ID NO: 432506 - protein, 418 aa, unidentified
MAMKIIRFNCCGMDVHKDLVVATIGITDRQSNITEYFQQSFSTLNSDLYRLKDWLNSYHCCDICMESTGKYWIPIFNILEGEINVHLTHPKYVKAIKGKKTDKKDSKWICDLFKHDLIKFSFIPPKEIRELREIARYRYKLVCMRSSERNRYQNCMTVSNIGLASVVSNPFGKTASNIMKEVMKPNVIDDDKILKLIHKNCKNKDKILDSLHGYHIEADQRFKMEKSLNHMEYLDQLINSCEAELVKRVYPLRESFQHITQIKGISSLSAILIISEIGIDMSQFESDKQLVSWAGLSPANNESAGKKKSVRISKAGQYLKPLLVQCALSTIKDKTSYFGRKYSNIKKRRGHKKAIITIARMMLVSIYHMILTAEVFQPTDYESFMNPRSDTKQSLTVEEALNFLKQSGIDISSIQINL

SEQ ID NO: 432507 - protein, 427 aa, unidentified
MPHRIAGIDVHKKMLAVVVADIEVDGDYQFERQKVGTSPADLRQLADWLVEHEVEEVVMESTARYWRPVWETLERYWRPRRRAREGAPCLSGTLHLAQAQSNRGPGGRKRDFPDAERLVKRLVAQELTLSFVPDAEQRLWRTVMRRKYQITRNRVQLHNRLEALLEEAHVKVSSIVSDLLGVSARRMLQALADGETDPTVLAALAAPRLRATPAQLCDAFEACRSLHPVYRRLLKLTLEELRVIEDHLGQLDQQMADLLAAHHDAVHRLAEIPGLGVDSAQQIIAEVGATAATFPSPKHLASWMGACPGNEESAGVNYSHRCPKGNRQMRRVLNQAANAAVKAKGTIFAIVYRRLVPRLGHAQAIGAITHRLCRLIWKILHQRVRYEERGPAVSEEAKKVRARKMIRELRSLGYRVEPLQAPSINPA

SEQ ID NO: 432508 - protein, 404 aa, unidentified
MKGPIVSIDVSKGKSDYQAFKNLNVKYTGSRSIKHTKEGFDEIVNLVKEMEKKLETEVCVVYEATGVYHRVLKKVLEDNNIKQFIINPLLSAKTRKNDSLRSPKTDKLDPKSIAKTYYSHSLHNSHKPETIYHELRELSRYYEDILVHIRKDKVAFIAQLDIVFPGYDALYDDLYGPVALAVIEKYPHPEMLQKKKINTVSKVIQSKTCHRQAASDTMADKAIEYSKTIYSGCDKDDIEVLILQRLIKKLKEDMAEAERTIGEMIKLAQELPDFSIIKSIPGIGDNLAARIIAELGDMTRFKKKNELVAFAGLDPRISESGKNDGDHMHITKKGNKRLRCLLYLAVTCSIRLKRDDNSIKDFYIKKKQQSNPMCSKAAKTACASKLVRIIYSMCKTGELYQYNK

SEQ ID NO: 432509 - protein, 337 aa, unidentified
MVEIIRIGIDTSKHVFVVHGVDAAEQPVLRKTLRRGQMERFFALLPPTLIGLEACGAAHHWARVLQGLGHEVRLLPPQYVKPYVKRGKNDAADAEAICEAMSRPSMRFVPVRTTDNQADLMLLTARDLLLKQKTMLINAIRGHAAEFGVTGRKGANSIGALRALIATDAAVPELAREIFARLFVQLESLDRHACELERKLVAWHRGNERSRRLATIPGVGPIGAAALTMKVPDPSVFKSARHFAAWLGLTPKDHSTAGRQRLGVITRAGDETLRRLLVNGAMATIKYAKPGRASPWLLGLLARKPKKLAAVAIANKNARIAWALMTRSEVYRHSLPA

SEQ ID NO: 432510 - protein, 478 aa, unidentified
MQDRRLVGVDLGITSAHTVRVLDADGTTMCRRKAVPTLESLGQVERAALAGAAPGTRLEVVIEPTGPAWLPIAVFFSARGHTVYRVSSAKAHDLRRVLSRHAKSNSIDADTLARLPLVDPAGLHPLQLPSAERAALDRRVRATDRLTQAAATHKRRIKDLVRQLLPTSPLTGDLGVADLAVLERYADPHALQAAGRARLTRRIARASNGHQGAERADQWLAAAQAALELYADHPAVAFADLAAEVTSEVRLLGATQAELARHAPQRQARYHQVDPLQLARSLPGLATVGGPALVATMGPANRFATAAKFRSFTGLAPKASETGQTDRKGQPITKAGNRLLRTTLVRAADTARRQDPQLARIYWTQMVQRGKDHLGALCVVAAHLGERAWTVMDRGLPYVICDTDHTPVTLEQAKAIIAQHWTVPEQVRRRRRHKKGKAPQQVLTGHVHGAQGATRRPSPSPSSLGRPTTRVKPPQPRT

SEQ ID NO: 432511 - protein, 349 aa, unidentified
MRFYTKHHQFYCGIDLHARTMYVCIMDHEGTILTHRNMPATAETLADVLQPYREDLALAVECIFTWYWVADLCNRIGVEFVLGHALYMKAIHGGKVKNDKIDSQKIAALLRSGMFPVAYVYPQPMRSTRDLLRRRLYLARQNAQLQTHIQNTNTQYNLPSFEKRIDRQSNRSGIGDRFTDPMVRTSVEVDVALMDALHEQILAIERQINAQVPEHDPVAVHLLRSIPGVGKILALVIFYEIHDINRFPKVGNFISYARLVKCAHESAGKRRTGKNSKIGNVHLKWAFSEAACLFLRRNERAKHYHRRLVSKYGNAKALSIIAQKLGRTVYTMLKRRTPFDAKRFFETVG

SEQ ID NO: 432512 - protein, 450 aa, unidentified
MAKAKKRKHRKLDRSLPVMRQNAAGIDIGATEVFVAVPADRDTESVRSFPTFTQDLYELVDWLQRCRVDSVAMESTSVYWIPLFQILEARGIEVHLVNAQHVHHVPGRKSDVLDCQWLQYLHSVGLLRASFRPEQAVCEIRSLMRHRENLVQMACVHVQHMHKSLDQMNLQIHHVISDITGITGLAIVDAIVAGETDPETLVKLRDHRIKASIDTVGKSLVGDYRPEHIFTLKQSQTAYRYYQQLIADCDREIQQRIETFHDPADPSAPAESSAESAANGNSPFDLRAHLERIFGVDLTGVPGFDILRIQTIFGELGADLSGKFSTEDAFSSWLNLSPKDGTSAGRRIRSPRIKTKNRVTQTLRMAAQSLHNSQSYLGDYYRSQRARFGAPKAIKNTAHKLARILYHLITTRQPYDETVFAKLEARNQQRRFRKLQSLAKQMGYSLVQTA

SEQ ID NO: 432513 - protein, 484 aa, unidentified
MKTKRVKASRSIRKSLRPQTGPIRPAASLPTVNAHAGGIDIGASEHYVCVPEDAVPKGEANVRSFGAFTGELDKLVEWLQRCGVITVAMESTGVYWIALAQKLETAKIEVVLVNARHLKHVPGRKTDMKDCQWLQQLHAYGLLNGSFRPAEDICVLRSLMRHRENLTQSCGREVQHMQQALQLMNIHLHHAVSDLVGETGLRILDAILAGERDPKKLVELRDAQCHKTTAQELAEALKGDWRQEHLFVLRQALETYRHLLQQMSVCDQEVEKALAAVVLPVREEPEDPAPKNPVAKEPAPKKKRFHHRKTGTCLKRDLSEELKRVCGVDLTQVVGLNVLSVLIILSEIGLDMNRWRSVKAFCSWLGLCPGNKISGGRVLDSRTAHVINRAAILLRTVGPSVGKTDTWLGIFHRRMRARLGPAGANTATARKLACMIYHLLKYKEDYIEVDHLIFLEKMRKTRVSRLRKQAEELGLEVVEKQMAA

SEQ ID NO: 432514 - protein, 379 aa, unidentified
MSKDTLYVGLDTDKKHIAVALAEALPGGEVRSWGKIANEAISVGRLVKRLQAGGRSLEMCYEAGPCGYGLYRLLNSKPGVQCRVVAPSLTPRRSGDRVKTNRRDAMMLARLLRAEELTAVWVPDATHEAMRDLVRARGAAVADVVRCRQRIAGFLLRQDIRYAGKPWSKKHRAWLGQLVASLPLPAHRLVLGEALQALDEATARRDRLTDHIAELVPAWSLAWLVEALQALRGFALINAVTLAAEIGDPRRFAKPSQLMAYLGLVPSEHSTSDKVRRFGLTKTGNGHTRKALIEAAWTYSRPARAPRDTSPHAPAVAAIATKACHRLSRRYRRLTAGGKRPVIAVAAIARELSGFVWAIAQAAGPAATPQRSSERSSGR

SEQ ID NO: 432515 - protein, 342 aa, unidentified
MDHFAGLDVSVKDTSVCIVDDAGKIVREVKVASEPEALLAVLKNHAYHFKRIGLEAGPLSQWLYSALAEAELPAVCVETRHMQAVLKAQINKTDRNDARGIAQMMRVGLYRPVHVKTLRSQKLRMLLTHRKLLQSKAIAIENDLRGTLRNFGLKVGTAGKVKFEARIKELIESLPDLAELVEPLLIVRRALREQIVVLHRRLLAIVRDDEVCRRLMTTPGVGPVVALTYRATVDVPARFRKSKAVGAVFGLTSCKNQSGEIDRSGRISRCGDAMMRVMLYEAAQSMLHSKKWSWLKAWAMQIARRRGIKKAIVALARRLAVIMHRIWVDGTEFRWTRQVATA

SEQ ID NO: 432516 - protein, 416 aa, unidentified
MKKGQNTRGYQRYMALDIHREYILVGAWNEEKEWVLTPRRVSIEKFPEWAKKNIRPGDIVVLETTTNVWAVYDIVAPLASRVLVANAAEVGEIAGARVKTDKEDIKRLLKLLVGGIVPEVWVPPMEVRELRAFVSYRSRLVKTSTMIRNRLQSLLHKHNLLLPEDGLLNEAWWEAQPSISSLEKKQIRQEVALLAEVEKQKAAVDEELGRQSTSKERGSQAVRLMQIPGVGVIVAMTVLAAIGDISRFENAKQLVGYAGIGAGVHDSGKTHKEKKITKKGRRELRWAMVEAAWRAVRMSPFWKEEFEKHRKRMRKPNQAIVVIARKLLIAIWHVLSKAETDIHASEEDLAYKMLLLSWSLSEDVRLGLTYKQFAKYALMKLGVETDITRFVRKNVPRRLAPREEVLARMTELSLSA

SEQ ID NO: 432517 - protein, 354 aa, unidentified
MQQFVGIDWATRRARWCAVTPAGLVIDEGWIPADEDGLALLVGRLGPEALACIEMMSGAAWVRERLQAAGWIVQIADARKAKAVGSLAAKTDKLDARVLAELARRDLVPQVHVPTFADRELKERLGRRMHLVRLRTSAMNRAHGVMSQFGVKLAFNRLRQPDRDDLLTGLGVPEVWRRSIAEAVAVVSALDARLIPLEQELRPIARADPRVQLLVTIPGIGDLLGLTIASEIGDISRFPSARKLVGYSGLTPRVYQSGEKSRTGKLSKTGSTMLRWAAIEAAQQAWRPNNPWHQLYGDVKERCGGKGNPAKAAVARKVLIASWHVLALQQPFNPSRPRGAAAPVPANSSCVLAA

SEQ ID NO: 432518 - protein, 427 aa, unidentified
MNYTQNRKIMQVTETTLVVGVDIGSQWHYARAFDWRGIELTRKVFRFSNDLDGYIAFEEWVQNVSEKSAKMDILIGCEPTGHYWFTFAKYVKERGMKLAFVNPYHVKQSKEMDDNSPRKTDQKDPKTIAKLVTEGRYSFPYIPEGIYAELREAISVRDQIVKALNATSNRIQRWLKIYFPEYLEVYKVFDSVSGLAVLKKAPLPKDVIELGVDGIVNLWREKKLRAVGKKRALTLVAAAKRSIGLTGGNCARLDLQLLLEDYSEKKEQLDRITAALQEETLKVPNVEKLLAVKGVGIITVAGFLAEVGDIGRFTSPKQIQKLAGLEPKENSSGKHKGRSSISKRGRRKLRRLLFQVVLPLIRSNEDFREVYTYYTTRKDNPLKGMQAMIAVSCKVIRIFYALLTHGMDYSSTRFRADITRPEPAKAA

SEQ ID NO: 432519 - protein, 386 aa, unidentified
MHRATTLPVSEQTCSPEHCATLFVSLELSRSTWVATTLAPGSTKMSKHTLVGGDGRKLLDLLARLKTRAEQRISAPVKVVAIHEVGLDGFWIHRLLEANGVESHVVDPASIAVPRRHRRAKTDAIDGETLLRTLMAWQRGEPRVCAMTVPPSPSEEDRRRMTRERAKLLQERIRHTNRIRGLLFGQGITNYNPLHKNRRKGLEELRTGDGRSVPAHLKSEILREIDRLELVLRQIGEVEAERDEMLQLAQASSPAALLMRLKGIGPEFATVLYLEGLFRQFGNRRQLAAYAGLAPSPWKSGSIDQEQGISKAGNPRLRTTMVELAWMWLRYQPASALSCWFRQRVGSKRGRVRRISIVALARKLLIALSRYVSHGEIPAGAIVKAG

SEQ ID NO: 432520 - protein, 377 aa, unidentified
MADYSEAFVGIDTSKLHNSVAIADAGRGGEVRFLGEIENTGAATAKLVRKLAGKYERLTFCYEAGPTGYGLYRQIKGLGFECAVAAPSLIPKRRGDKVKTNRRDALSLAKLLRADELTAVWVPDGPHEAMRDLTRARETAMLDLRTKRQHVSAFLLRLGRPYPQNKKTWTKTHVSWITSQKIEHPQQRLVLEEMMLAIRQAQERLARLEQAVAAAVPEWSLAPLVTALMAMRGIDMISATTLLAEIGDLSRFRAPTELMGYLGLVPSEDSTGDTVKRGSITKAGNRRARRMLVECSWNYQHPPRVGQAKQPKVDAAPPAVREIAWKAQCRLYRRYRMLIGKGKLKTVAIVAIARELAGFIWAVARAISTMRGAAAAT

SEQ ID NO: 432521 - protein, 419 aa, unidentified
MANNSTSRKIRQVQPGTLHVGVDLALEKNMATIIDERAEKLDCFSFPQDRGGYEYFFRRVESVQQKQAASAIVVAMEPTNYFWKLLAREAEERHIPYHLVNAYTVKKHREGDQLDVSKDDPRDADQIAELSRTGHYTETRLQKGTYEELRQYATLHDQLVQAIRREEQVLSALAGQSFPEISQVFKDLEGRTSRAILVSCGCAAAIRQMCEEQFLAEVRAAFTGKRLMISRVRRVYQLATSSIGLTEGLQALQMALRLHFSQLEVLQTQQKQVAAAMAACLVALPEAPYLLSMTSMKAPTVALFLAEVGDPKRFRTAAQWVKLAGIQPVPNTSGRKQRSKTPMSHHGRARLRTLLYFTCLRLIRQDRHFAQLYSDLQRRSKNPLTRMQAIGVLMNKLLHILWALANHQTFYNPSFAQSI

SEQ ID NO: 432522 - protein, 342 aa, unidentified
MEITTVGIDLAKSIFQVHAVDAAGHVVVRKALRRAQVVPFFAKLPRCLVGMEACGTSHHWARELTKLGHEVRLMPPAYVKPYVKRGKTDANDAAAICEAVTRPSMRFVPVKSTEQQAALALHRTRDLLVKQRTQLVNMIRGLLAEFGIEMARGLRHALELAARLSAGDAAEVPPLAQRVVTGLADQIGAVQIHLTRLEKELLAWHRDSDLSQRLATIPGVGIVSATALAASVSEPERFRSGRQFAASLGLTPLQNCSGGKERMGRISRMGDRYLRRLLVVGMTSLVRRAKAAPTSVDPRLPALLQRKPVRVVTVAAANRTARVAWAIMTRGGTYRAPAATAA

SEQ ID NO: 432523 - protein, 347 aa, unidentified
MTTFTRSVTGGVDTHLDVHVAAALDEKGTLLGVESFETTRSGYKKLLTWFEGFGPVALVGVEGTSSYGAGLTRHLHAEGIAVVEVDRPNRQRRRRKGKSDPEDAIAAARAAFSGDACGAAKTQDGNVEAIRVIRVARVSARRARTQALNQMRSLISTAPDPIRDELRGLNVYHLVSRASAYRPGARQGVVSLTKWTLRSLARRAIELEEEISGYDAILKDLVHETAPELVGTLGIGTDSAAALLVAAGDNPHRLRSEAAFAHLCGVSPIDASSGKQERHRLNRSGDRQANSALWHIALTRSVYDPRTTEYLDRRMKEGLTKKEAYRCLKRYIAREVYGLLPIEQLTA

SEQ ID NO: 432524 - protein, 400 aa, unidentified
MNPVIGLDISKGKSDGQVFLDKGNPMGHPFCFQHNQVGLSQLLDVVSTVQDTAGKAPVVILESTGHYHQAVIQFLEEHGILFLVVNPLISHQAKKSSLRKVKTDAVDAYRLCELYYKEEFEDHMQRGVQLLNLRHLTRQFDSLTQMYVQVKLQFQAVLDQVFPDYRGIFGDLYSKVSLLLLKQFMTPGAFQTAGVSTVTHTITCLCPSRSDHWASDKASCIMVAAANNPFPKVSYSSHLISLALFIDLLLQYQEHLSHLQSQIDALAEEVESYQIIQSIPGIGSKIAATILSEIGEIHRFNHAKKLVAFAGIDPSVYSSGKFTATTNRITKRGSKKLRHALYLAVLCGLKKTGSKRLREYYDKKREAGKPYRVALIACVNKLLHWIYALLVKEERFVDLD

SEQ ID NO: 432525 - protein, 347 aa, unidentified
MNYIGVDCHISSLDFAVVNERGTTTKKAKVDTGVKEFIGFVKSVPKPREIYIEEGELAGWMFETSLKFGEKLIITDPKINKWIGKAGQKNDTVDAEKLAQLARGKYIKAIYHPGDKRRRFKELVFAYHDTVKSQARVKNKIKANFRKNGVRCSGDTVYSDKHRAKWRGKLSKNKITHLIVEELWAQLDQVRESKERLKRNIKIESKQYPEIKRFMQIPGIGLIHAATISAIIDTPHRFANKKKVWMYAGVGIMERSSGEKVYSRKLTREYNRPLKNAIKQAVEASIFANDNQFRRQYLRLTLEKGIASHKAKLTVARSMLAVMYGMWKKGEEYDPDIDIKRRIGVKN

SEQ ID NO: 432526 - protein, 367 aa, unidentified
MSEASTFVGLDVHKSSIVVALLRPGQDAPLEWKIANEPVAVQRLLRRLEREAEGGLQCCYEAGPTGYVLKRQMDAAGIPCRVIAPSLIPVKPGSAIKTDRRDARKLAELLRAGMLTEVQPPNQDEEAVRDLTRSRDDAQRDLTRARNRLAKFLLRRGCVYAVGRKPTWSQKYRAWLRALKLELPADQLIFEDYLLAVEQVEGRLQALTDHIEAFAEKAPWRERVQALRCFHGISTVTALALVAEIHDPRRFAHPRRLMSYLGLVPREMSSGMRQRRGGITGAGNRHVRRLLVEAAWHYRHKPVVGRALRLRRREQDPKAVAFADRALRRLSLRQRRMLYQGKHPNLVNIAIARELAGFVWNVLQTQG

SEQ ID NO: 432527 - protein, 410 aa, unidentified
MDTLIERCGGLDVHKDTVVACVRVPARGGGREQSIQTFGTTTAQLLALRDWLVAQGVTRVGMESTGVYWKPVYYVLEDALECWLLNARHLRNVPGRKTDVADAAWICQLVEHGLVRPSFVPPKPIRELRNLTRYRKAQIEERTREAQRLDKVLQDAGIKLSSVASDVLGVSGRAMLRALIAGTRDPETLAELARGTLRRKIPALRQALHGRFGPHHALLVGTILAKLEFLDEALGHLSAEIEQVIAPFAAEAALLRTIPGVDRRTAEAVVAEIGVDMSRFGAAGRLASWAGWCPGNNESAGRHGSGKTRKGSKWLHTYLTEAAKAAARTKGTYLGAQYARLRGRRGPARATVAVGHSILVAAYHILDRHEPYRELGPDYFRRRHSREHQTRRLVRQIEALGYHVRLEEVA

SEQ ID NO: 432528 - protein, 354 aa, unidentified
MISVGVDVSKEKSMICMLKPYGEVVASPYEISHTEQDLSKLIETIKAINEEIVVVMEATGGYHLPVLKKLIEADIFVSVINPLVMKKYSQVALRKGKSDKLDSVMIASYGLDNWFKLQEYISPDEVYSELKLLGRQYDYYMKLKVQGKVSLTNMLDKTMPGIKALIRSRQAIRPTKDKLNDFVKKYWHYDNITKMSENKFIKHYCTWAKKKGYHAQTDKAKDIYALANQGIPTLSSKTASTKMLVLESVRVLSEVNKTLEIIITRMQELASILPEYDVVINMQGVGDILAPRLIAEIGDARRFHSSKALIAYAGIDSPPYQSGNFYSTRWLCLGSYNQGPLLHRSRRTTACRPP

SEQ ID NO: 432529 - protein, 338 aa, unidentified
MVLIGIDPHKATHTAVAVDDGERTLGELTVKADRHQVERLLKWAIDYPDRRWAIESANGLGFLLAQQLVAAGEDVVDVPPTLSARVRLLGSGKAQKNDENDALATAIAALRAKRLRRVVAEDHGAILRLLADHHHDLGSLRTQAICRLHALVRCLTPGGTGIRLSADRASAVVRTLRPTNAVEAERKRLAQGLVVDVRRLDAEIAASKARIVLAVAASGTSVTELFGVGPVVAAFLIGHSGDMARFANRDHYASYNATAPVEASSGPKSRHRLNPRGNRQLNHAIHMIAIVQVRHPGPGRQYFDRKVAEGKTNKEALLALKRQIANAVYRLLLIDSSR

SEQ ID NO: 432530 - protein, 356 aa, unidentified
MSDRTAVDVIIGVDTHKDIHAAVAITALGARIDMMTIPVGGKGYQALELWARSLGSVKAFGVEGTGSYGAALSRFLCERGHTVIEVNRPNRQLRHQQGKSDPLDAEAAARAVLSGQAVGLPKSGSGIAEMIRHVKVARDTAIKARTQAMHTLKSLSVTAPLALRERLEALSGKMTLIRYVAALRPGPLVSTTASAKAGLRALARRWLALDEEIKAHDVHLEQLTKRAAPELVEVPGIGIGTAAEMLLLVGDNPERIRSEAAFAKLCGACPIPASSGKTSRHRLNRGGNRHANAALYRVVITRLRGHQPTLDYLKRRTAEGKSKPEIIRCLKRYVAREIFGHLCVTLIPAKLAPNTA

SEQ ID NO: 432531 - protein, 344 aa, unidentified
MKKVLIGIDFSKEKFDVAIIVKSTSTQEHALFDNKVSGYRKMIKWVNSVVEDIPCSSWLFCGETTGGYSRMMSDWLYAQGYDVWIENALVIKRTFPLKRLKNDTVDAFMIAEYALRFEDRVQLYEPLSQALIELREIFLYRHHLVRHRCSFEVRRIEKRFTQQKSANKNVISQSARHIITEINKEIAKCDEKIKEYIESDDQLSSIFAIVTSMPGVGTINAVSLMVYTNNFTKFAYNPRKIACYYGIAPFGRDSGTSVHTDPRVGFIANKMLKSLLTQAALAAVRTCPQIAKYYQRLIERGKKPMVALNNVKNKMIAIITAMVRTGCMYQPDNICLATKSVNVK

SEQ ID NO: 432532 - protein, 367 aa, unidentified
MARIARVGVDTSKSVFQLHGVDEAEQVVLRRKLRRQDVLKFFAKLEPTRIGMEACGGAHYWARELRKLGHTVVLVPPQYVKSYVARGKNDAADAEAICEAMSRPRVQRCFVSVKTADQAAAQMLVGTRDTLIRRRTQLSNTIRGYAAEFGLIAPKGLARIKPLLARIAADDSLPALAKDLFAALGEELAELGQRIAMIEAKLMAWHRGNELSRRLAEVPTIGPIGACLLPIKITDPRAFRSGRMCAAWIGLTAKDHSTAGKQKLGGITRAGDETLRSVLVAGATAYLQQVRRGRTTPSPWLADLLKRKPPKLAAVALANKTARIAWKIMVSGERYHPVTTAAAREGRGAARREGSAPRPSLQPGVEW

SEQ ID NO: 432533 - protein, 339 aa, unidentified
MKYTPVGVDIAKYLMQIHFVDEYTGEIIDKQLRRRDFLTFFSNRDPCLIGMEACGGAHYWARELKKLGHEVHLLQAKFVKAFRIGNKNDVMDARAIWMAVQQPGKPVAIKNEEQQTLLSVHRMRTQLVKFRTAQINALHGLLLEFGETVHKGRASLDKAIPEVLERLRITLSPFLISLIEEQYYRLSELDKEIDGLEKQLTEWANQHADCQRIMKIPGVGVLIATAAIATMGDPTAFRSGREFSAYLGLVPRQTGTGGRVKLLGISKRGDAYLRTLFIHGARVVTLCTKTPPQWVSELKKRRPVSVAIVGMANKLARTVWALIAHQREYEKDYVSVRPY

SEQ ID NO: 432534 - protein, 410 aa, unidentified
MDLLKTVFGIDVSSRKSNVCIMVNGQKVNDYAISNDMVGFNRLLGDLKQVTKPQIIFEATGVYSRRLQAFLDMHELRYVMMNPLEAKRKTKDDLHQNKTDKLDALYLAKLQSEHPQRLAYVQNKEYQELMANNRIYEQASHDLITNKNRLHKAVQLTFPEIEHLLANPRGKNYWSIALRFPHPDIVLETKEADIIDFLKGLSGIGKKRANDITQNLIRLAKVACPAVKKNSAHIRGLKMAINNILSAEEECQTALQALQEMAKLAPKRDLEILTSIPGIGENTALRIISELGDIRRFNNPSQLNAFVGVDPQVYESGNLTAHLSISKRGTAIGRKVLYLAINQIQSAKKAGKPCHIADYYEKRKRSSETASHKKAAIASIHKLLRTIFALIKNDQLYSYDVAKHNQRLLS

SEQ ID NO: 432535 - protein, 416 aa, unidentified
MDTTYAKVAGLDVHHKSIQCAIRCHSPSGKLLTQSRSCGTMTRQLRALADYLASQGVTHVALESTGVLWKPVWNVLEGRFTLLLVNPRHLKKVPGRKTDVSDAEWIAQLLQHGLLRGSFVPPRAVRNLRDLTRQRAQLAAEMTRVANRLHKLLEDTNVKLGAVASDILGKSGRAMLQALLRGETDVDRMADLAQGRLRGKLPQLRLALEGHVTDHHRFLLGHLLTHLEFLENHVGSLSLEIAIRHAQLLAPDDVERLDAIPGVNITTIQNVVAEIGPDMSVFPDEHHLSSWTGICPGNEESAGRRLSSATRHGNRWLRRALSEAAWAASHTKDSYLAAQYRRLAARRGKKRALLAVGHSILVIIYHLLKHHLEYRDLGRDYFDRLEPERLQRYLVKRLEALAHEVILRPRKPNEAA

SEQ ID NO: 432536 - protein, 371 aa, unidentified
MNHVTSIGLDVHARSVTAVALDSITGEVRSQKFGYSPAEIAGWILQLDSPKAVYESGVTGFHLVRELREMGVDCIVGAVSKMHKPASDRRKKNDRNDAEFLARQLMAHSIVEVFVPDVETEGARNLSRALEDVRDDLTRAKHRLTHLLIRWGYVWNEFNEDGKRRGSWTHAHWEWIRGIELPDAAARESLDYYISEVRHIESQKKAIEKRVARCASRPRWRDRVEALRCMKGIETVTAFALTVEAGVFSRFDSARAFASWLGLVPSEHSSGERASRGGITKAGNSHLRKLLVEASWHYTRATKERKRPLCDEGVPASISNHAAVGAKRLVERRRHLSCELRKRPVVANVATARELACWIWALGRMSEGALA

SEQ ID NO: 432537 - protein, 405 aa, unidentified
MDIQPIFRCAVGIDIHLALICVCIIIAEPGLEPAVHRREFGGFQRDRRAMADWIASFQPDVVVMESTGIYWKSPYAALEKVGIQAQVVNAQQVKKVPGRKTDTSDAEWLAMLARAGLLRGSFIPPERLRTLRQVSRHHQKLTAMRTMEKNRLVKVLSDAGIRISAVVSDPHGVAASAIIDCLLDGGTPEQALTLAGRLQAPRETLLAALQGELSADHRFVAHTIRQHLRSLDEQLADLERYLVEALHPHEAALQLLMTIPGIDQLAAAKLLVEIGVDMAAFGNAGRLCKWAGVCPGNDESAGKRRRGDTAPGNRYVRALLCQIAWAAVRTTSQFKSRFQSLVGRRGTKRAIVAIGHKVLKTVFVLLSRQVPYQDSTVDYEALAVQRHAPRWIRQLRKFGYLPKMA

SEQ ID NO: 432538 - protein, 367 aa, unidentified
MKKVSTVAAQRSTKISRQKLTVGLDLGDRSSWYCVLDETGQTVLEQKLSTTPKAMQEVFGAMPHSRIALETGMHSPWISRLLTELGHEVIVAHARNVRLIGESRKKDDRMDAQTLARLARIDPQLLSPVKHRSAKAQADLTVIRARAGLVRARTALVNTARGLAKSYGERLRGCNVRNMNPEKAKGLSPELQRALEPLLAALESLSERIREYNERIETLAQQSYPQTALLKQIKGVGTLIAVTYMLTLEDPHRFGKSRDVGCYLGLQPGRRNSGQSQPQMHISKEGDPYLRTLLVQGAQHILGPFGVDCDLRRWGLKLAERGGKSGKKRAIIATARKLAVLLHHLWVSGEAYEPLHNSRSRPLAIAA

SEQ ID NO: 432539 - protein, 338 aa, unidentified
MNRPEYFIGVDIASATFTATVLSSPTQVVVLGEELPNTPDGFAGFVTDLQARQISPDNCIVVMEATGVYGERLCYFLHSKGYAVAVEPPREVKKAFHSKRKNDAVDSQQIAEYGYRFFDTLRFWGPKADVLQQIAALLTSREQFTKQLTADKNALRALKRKAVQTPLANRLFEKNIRRLHKDIQAIDQAIEELIRQDPTLRKNAGLVNSVPGVGLLLTANLMVITSGFNNHLKPRSLAAYLGICPYEHESGSSVHTKPRSDRYGNGKARKLLHLAARSTATHKHNFRAYYLRKLAEGKPKRVALNNIANRLLRIICAVLRDGAPYCETHRSVHPALVA

SEQ ID NO: 432540 - protein, 387 aa, unidentified
MQRPHDDSKVCRAAFVQDSTLVVVIEMSLTGWLVAGMIPGVSREPLKKIDPKPEELLQLLFRWRDEAIKAGKEITRIAVAYETGRDSFWLARWLRSRGIDAHVIHATSVAISREHRRAKTDRIDTAMLRRGFLGWLRGEPGHCSMAIVPTVAEEDAKRPHRERESLVQERTSTVNRMKSILIQFGVRNFNPVLRKASEKLDAVRTPEGIPLPPNAAAALQRHMERFRVIKEQIKAIERTRLQRLQRDPTDKMNAMVFLLVRIIGLGVETAEQLVHEILSRNLRDRKAVARYAGLTGAPDESGSKRREKGLSRSGNGRVRVILIQLSWRLLKLQPGSELVLWYKKRTADAKGSRKPMIVAFARKLIIALWRYVNTGLLPEGFELKAAA

SEQ ID NO: 432541 - protein, 308 aa, unidentified
MGIDVAKAQLDIAVRPSGARWAVPNDAGGVVTRVERLQALHPTLLVLEATGGLERLATAALATAGLPVVIVNPRQARDFARATGQLAKTDALDARALAHFADVIRPTPRPLPDAQTQALRALLGRRQHLIGMRTAEQNRLAGTSERLTQDIEAHIAWLNTRIATLDADLETMLRASPLWRANDDLLQSVPGIGPVCARTLLLELPELGTLTRQHIAALVGVAPLNGDSGTLRGRRTIWGGRAHVRTVLSMGTLVATRFNPQLKAFYQRLLAAGKLKKVALTACMHKLVTMLNAMLKHRTSWHAQEVQN

SEQ ID NO: 432542 - protein, 421 aa, unidentified
MSKRRYKSEKFKQVNWGLVTERIQGERIVLSVDVAKEDFVASIMNDRQESVLIFNWRHPVQTAEVLEQIRHLWRICELEVALEPSGTYGDVLVWQLHQLEIPVYRVSPKRVHDAAEVFDGVPSLHDAKAACLIGRLHLQGASQPWQVFSESRRTAKVLESRLSLSKRHEQATCNRLEALLSRHWPELLFVLPLGTVTLASLISAYGTPASVASDPEGAAELMRRAGGPGLKQEKIQAVLECARNSLGVPALDVERAQLQWLGAMALEAHREVRRTEQEITQLVAQDAVLTALAGVVGKVSAAVLMAALGSPLDYPEASSYLKAYGLNLKERSSGKHKGQLKITKRGSPVGRFYLYYAALRLIARDPVVKQWYELKNHRPGAVKNKYVIALMRKLAKALWHTARGKHFDANKLFNLKAVAAA

SEQ ID NO: 432543 - protein, 343 aa, unidentified
MNRYYYIGLDIHKRIIAYCVKTIDGRLIDQGKIVADKQSLAAWVKGLPGPWIGAMEATMFTGWVYDFLKPHAIALKVAHPAMLKAITAAKKKNDRADAEKIADLLRVNLLPECHMLSEEIRELRRILRYRNHIVRTAVKMQNKMSGLLMEVGVTYSKRRLHGKKYFHELLERVDEIPPSVRELLQLSRSSYEMFRSFQKRLVETLRTNQLIRDRVHRLMTIPGVGEITALTWVVEIGDPERFTSIRKAISYCGLCSAQKESAGKEQRGPISKKRNKHLQTILIEAAHLAPHWNEQLAIVYERELKKGNKNRATLAVARKLVAYMLAVDRKEVDFTLPSEIRAA

SEQ ID NO: 432544 - protein, 384 aa, unidentified
MSISSHAAVSTQLNAIFVSLELSRSTWLVTSLSPGRGERISRHQVKGSDVPALLERFVQLQAKARERTGEQYPLVVIQEAGLDGFWIHRCLVREGIESHVVDAASIAASRRSRRAKTDKLDGEALVRTLLAYKRGEPRVCAMVTVPSAEDEDRRRVCRERRSLVVERIRHVNRIKGLLFAQGVGDYEPLRTNRRVRLEELVTGDGRPLPSHVKREIERELDRLELVMRQIKEVERERDAMLEAATDEPPEPASARLLQLRGIGPEFAGVLHAEAFFRSFSNRRQVACYAGLAPSPWQSGNMDREQGVSKAGNKRLRTTMIQVAWLWLRHQPHSELTRWYAERVQANGGRIRRVMIVALARKLLIALWQFSSAGVVPKGALLKAA

SEQ ID NO: 432545 - protein, 373 aa, unidentified
MGKHKLGFVAFDSAKEKHAVAIADDGRDGEVRYLGEIDNSPDAVRKLVAKLSRQYERLHFCYEAGPTGYGLHRQLTDLGHVCDVIAPTMIPKRSGDRVKTNRRDSVTLVKLLRAGELRAIWVPDTVHETVRDLTRAREVAMLDLKKKRQQLLSFLLRHDRNFPGGKNWTKTHERWLAKQTFNHPAQQIVFQDHVEVINAAQVRLAALEQQLREIVPTWTMAPVVAAYQALRGVSFLVAVTFAAEVGDVRRFAAPQQLMAFLGLVPSERTTGDRVRRGSITKTGNNRARRVLIEGAWTYRFSARVSETLQGRLKDLPLSIRNIAWKAQVRLCARYRRLIANGKKTPVATTAIAREVAAFLWAIGQQVAPQKPAT

SEQ ID NO: 432546 - protein, 430 aa, unidentified
MEQIPQQPIVKAQLEPEFAAFVAIDWADQKHYWSLKVAGQQALQRGSLDNTPEAVEVWIMELHLRFAGRPLAVALEQRRGALAVMLSKYAHVHLYPVHPTTLAKFREAWYPSRSKSDPVDADLLLEILTAHRSRLRRLDPDTVEMRLMQTLVENRRKLVDERTALSNRLTDLLKLYFPQILGWFDEVISVVVSDLLEQWPSLQELQHAKPAKLEKFLRNHHCLEIPERLNQIRQAIPATYDRALMDSAPVLVTAWVRQIAVLRDSIRQLEKRIAELAAHQEDWPIFQSLPGAGAALAPRLMAALGTQRDRYASASELHCFSGIAPVKEASGNTQWVHFRWACPKFLRQTFHEWAACSIAQCEWAKAYYQQQKARGKKHHAAVRALAFKWMRILYRCWKDRQPYREEIYLASLAKRRTALVAALAQAVQMS

SEQ ID NO: 432547 - protein, 364 aa, unidentified
MLARRDTLAAVMKNKIPSITIGLDLGDKKHAICVLNKAGEIVEERSITNHRESLRRLSQKYPKSRIAMEVGQHSPWTSRFLEDLGHEVLVANPRKLSAIYTSTRKSDQSDAYMIARLARVDPTLLHPIKHSTEEAQRDLLQVKLRDNLVRQRVDIISSIRFTLKSMGVMIASPNTNCFAKRCRKNLSAVDPKLLAMCEASLRVVDELTKSIRELERKIEELCVESYPETEYLQQIAGVGPITALTFVLTIGDPARFESMRDVAPYLGLVPKRDQSGETDKQLGISKAGNAYLRRLLVSAAHYILGPFGPDCDLKRHGLQLAGKRGCGAKKKAVVAVARKLSVLMLTLWYNEDIYEPLRNDSLAA

SEQ ID NO: 432548 - protein, 348 aa, unidentified
MIIIGVDYHPEFQQIASVDTDTGEFLEKRLAHPEEAEKFYRALAGKKVRVGMEASGHARWFERLLAELQFELWIGDAAVIRTKRVRKQKTDRQDAQLILRLLLEDRFPQIWVPSGENRDLRQLLWHRHRMVQARTRIMNQLQAVALNEGLRCKKRLWRERGRQQLESFRLAPWASRRRRDLLELMDRLNPTIAELSQAIEQEVEKSPAAQRLMTHPGVGALTALAFVLILGEANRFHCGKQVASYLGLVPLEDSSGNRRRLGHITKQGSSILRFLLVEAAQVTVRSVPEWRSKYFHLTLRRGRKIANVAMARKLAVCLYWMWRNGWNYEQVRKFGSHAGQPGNRHGVQ

SEQ ID NO: 432549 - protein, 320 aa, unidentified
MGRQSNYAGIDVSQATLDMAEHATGQQWSFGNDDAGIAETVAVLANLKPALVVLEATGGIEVPVVTELVAANLPVVVVNPRQVRDFAKATGRLAKTDALDAQVIAHFAAAVQPELRPLPDTQAQEFSAIMARRRQLQDMLTMEKNRLRAARRLVRGRIKAHIGWLENELTHTNADLERSIRESPVWREKDDLLRSVPGIGPVTSCTLIAGLPELGMLGRKQIATLVGVAPLNRDSGTLRGKRTIWGGRAQVRAVLYMAALASTRHNPVIKSLYRRLCAAGKVKKVALVACMHKLLLILNSMVKHNIRWHYTTAELIGPCS

SEQ ID NO: 432550 - protein, 351 aa, unidentified
MEEYIAFDSHKRYTWVEHQEANTAKTRAYRLEHGTGAIRQALAGCAPGTAVAIEATANWYWIIDEIEQAGCFARLVHPRKAKLMMGLINKTDRLDAHGFNTLQRNGTLPTVWIPPGVLRELRELTRTRLVLVAQRTRWKNRITATLAKWGLPPSEYSDPYGKKARAELERQLERLPEQTRWATRQMLAQLDSLSEQAQQFEKRLEELVEVTPMMQWLMTLPGVGVILGATIALEIGEIERFANAERLASYSGTTPRVHSSGDRTRHGRTRSDVNRYLKWAFAEAANSVAVNHRRNPERHVSRLYTRLRASKGHARAVGAVARHLAEAAFHVLQRKEVYRDPSLNPRPEKGV

SEQ ID NO: 432551 - protein, 316 aa, unidentified
MRADEVWIGIDVAKAWLDVADTGGAVVRRFGNDGDGIAALLAAVAELAPRLVVLEATGGHETLVTAALAGAGIPVAVVNPRQVRDFAKATGQLAQTDALDAQLLARFAQRVQPPVRPLPEATAQELAALLARRRQFLEMRTAEQNRRPGLAPRFLPAWETHVAWLTAQVAALDDELDRTLRDSPVWREKETLLRSIPGIGPVVARTLLGELPELGTLDRQHLAALAGVAPLNCDSGARSGSRHIWGGRAPVRAALYMAAISATRFNPAIRALYARLRARGKPVKVALVACMRKLLIIANAVVRDGVPWRADLVHGA

SEQ ID NO: 432552 - protein, 342 aa, unidentified
MTKISIIGIDLAKRAFQAHGAAADGSVVFRKKLSRAQVLEFLARQPVCTVAMEACATAHYWGREIEKLGHVVRLIPPIYVKPFVKRQKNDTADAEAIAEAAARPTMRFVAVKTEEQQAGAMIFRVRDLLVRQRTQLINALRGHLAEYGVVAAQGVVHIKRLEEALDDRALDLPPMVRELGQMYLEQIALCSDKIAALERSIRSAAVRAETTLRLQTMPGIGPVGALAIAAFAPPMDSFRRGRDFSAWLGLVPRQKSTGGKQVLGKTSKIGQRDIRRLLIIGAMSRVRWAVRKGAPAGSWLARMLTRKPRLVVAIALANKMARSIWAMLTKNEDYRHPVAAAA

SEQ ID NO: 432553 - protein, 410 aa, unidentified
MEVLHPRCAGIDVHKDSVSVCLRTVEKGKIHQEVKTFSTMTKGLLELLDWLEKAGCTHVAMESTGVYWKPVWHVLEGHFQLLLANATHIRNVPGRKSDVSDAMWIADLLAHGLIHASFIPPKPIQELRDLTRTRKQLTREIVQHTLRIQRVLEDSNVKLSSVITDILGVSGRKILKALITGETNLEVLASLGNPRLHCTREELTEALRGRITNHHRFLLRHHLTLIEALERTVADFDSQIGRVLEPFRPEVELLTSIPGVSEIAAQVIIAEIGVDMKVFPTDTHLVSWAGLCPGMNESGGKRLSTRLRKGAPWLKTLLVQCAWAAARAKGTYLQAQFLRLRARRGPKKAAVAVAASILTGVWHILDAKVPWKELGPEHFAGRERAVMARRLVRRIKELGYDVQIQDQEAA

SEQ ID NO: 432554 - protein, 366 aa, unidentified
MDSFARPDGLIYVGMDTSKDKIAVAVLWPGVEKPTTDVIANDEASIRHYIGRCGEPARLRICYEAGPTGFGLCRLLQSMKIACVVAAPALIPKAPGDRIKTDKRDSIRLARLHQSGQLVAIHVPTPAEEAVRDLCRARADLVDDRTRTQHRLSKFLLRHDRVWHDSPWTQKHEQWMLRQHFEEPALRSTFSHYRAMLAARDAELVAIQTELKYWFTHGPFADAVSRLAAYRGIAHVGALTIASEVGDWRRFPTARTFMGFTGLVPSEYSSGASVHRGHITKTGNAHLRTQLVESAWAYQHRPGLGLTLRRRQEGVDPATAARAWTAQQRLCGRFRRLAARKNSRNIVTVAVARELAGFLWAEMTAA

SEQ ID NO: 432555 - protein, 352 aa, unidentified
MEQFIGCDAHKQFSVFVAVNEKGIAGEALRVAHDRQVYRDFLSRLPPRSAIAVEASGHYSWLVDEMERSSHCPKLADALEAKRRMGLTKKTDKLDARGLAILLRNGTLPEVWIPPSELRDQRELLRMRIFLVRLKTRVKNRIHGTLARYNVVVPGADLFGVEARLRLASRLPELPLHSREAVERELATLDFLETQVESAERQLEAIMKVSVEADLLKTLPCVGKILSMVLMLEIGRVDRFPTAAHLASYAGLVPRVHSSGGHTRMGQVCGNVNRNLKWAFVETGNLVVVNQRRLAGTHVVRLYQRIKRAKNHQKAVVAVARHLAEAAWLVLTKQEVYREPRNVRQALSSTHG

SEQ ID NO: 432556 - protein, 349 aa, unidentified
MTKPLLAVGIDPAKRVHRAIGVLYPDTVVLDVEFPNQIETCRNLDARLVALADQHGADLVYGLEDHRQYGRTIAQVLSGLNRQIRVVNPLWTNRQRAFYGQDKDDAVDARCVAAVVLRRSDARSAGELAAAIREAEQGLQHLAEQRTASLNRLHQHLCDVYTATYEDFFGKLKSPLSLRFFKRFPVPQELNGHNTDMLAGIMLDLASGRVGPHKGARRIEILQQKAVFILTATEAARALAKTVALELKAELIRQLCDELLDNHDRKLRLERLLRDQLLPASGQTITGIPGIGTIIAATIIGETADISRFTSRDAFAKYNALHPPPTAPAANSGTQPAVPATIVSSAHSG

SEQ ID NO: 432557 - protein, 326 aa, unidentified
MTSLPNPTRDTRVTVGVDVAKATLEVAISGQASTLAIANDEAGYAALLAELSGLDVGLVLFEATGGFELACATVLQLAGLAVAVINPRQARDFARAMGHLAKTDRIDARVLADMASTLVQRGDLSKLVKPLPDTQQLELQGLVTRRRQLMAMKLAEDHRMKMPGVRQRRSLNTIIKALDREIARVDKDLQAFVGANHAALAALLDSVKGVGKATISTLLAEVPELGKLSGREVSALVGVAPINRDSGTMRGKRAIFGGRPAVRKVLFMAALVASRHNPVIKVFYQRLLAAGKPKKVALVACMRKLLTILNAMVKSGKPWNEALHLG

SEQ ID NO: 432558 - protein, 343 aa, unidentified
MQTITTIGFDIAKSVFQVHGVDAGGQVLIRRQLKRRQVLAFFQKLPSCLVGIEACASSHHWSRELQALGHTVRLMPPAYVKPYVKRHKNDMADAEAICEAVTRANMRFVPTKTPQQQSCLMLHRTRHLFIRQQTAMINSIRAHLAEFGIVAPVGRKGVTELLHVVADPSDKRVPEVARACLAALGDQLLSVKQQILEFDRMIIAWHRSNQTSKRLDCIPGVGPMLATALVASVADPGTFRSGRNFSAWIGLVPKQHSSGGKDRLGSISKQGDRYLRSLFVAGALAVIRYTKIHGTKHRPWLTALLARRPTKVAAIALANKIARMAWAIMAKGERYKEPAALAA

SEQ ID NO: 432559 - protein, 368 aa, unidentified
MGKSSKLYVGMDVHKESIDVATGDETRGEVRHYGRVGGDLESVKRLCRKLEATAKELVFVYEAGPSGFWIYRFLRARGHACWVVSPGLTPRSNADRVKTDRRDALKLCRLARAGELSSIHVPDETDEAMRDLVRTREDAVSMLRQTRQRLGALLLRNNIRYNKKTAWTAAHRRWIAELKLPHRSQHIAFEEYVSAIQDADGRIERLEGSIRDELAQWRWKPVVEALQAFRGIRAIHAVRLVAELGDMSRFANARHLMGYLGLVPSEDSTGPRRRQGAITKTGNSSARRALVEAAWAYHFGARVSVGIARRQTGLSKAITDLAWNAQLRLCARYRKLSARGLPRNKIIVAIARELSGFVWALGQQVKPT

SEQ ID NO: 432560 - protein, 386 aa, unidentified
MVTPIRTRIEQETPPQSTLFLAFELGQNTWKLGFTIGVAQQPRERTIPAGALETLQQEITRAKQRFGLPEDACVVSCYEAGRDGFWLHRHLVAHGIQNHVIDSASIEVNRRQRRAKTDRLDVRKLLTMLLRHSAGETKVWSVVRVPSVDEEDRRQLHRELTTAKQDRTRVINRIQGLLAGHGVQLTLQGDVDAQLDQGQQWDGSPLPSALRTRLKRAWQQVCFLTAHIQTLEAERRALLRRHEDPVIAQVRQLFTLRGIGVNSAWLYVMEFFAWRDFQTPKQVGALAGLTPTPYQSGQARREQGIAKAGNRHIRAMAIEIAWAWRRFQPASALAQWYERRFGHGSARLRKLGIVALARKLLIALWRFLKTGVLPEGAVLKAETLSR

SEQ ID NO: 432561 - protein, 392 aa, unidentified
MYIVGIDIGKNHHEASIVSPEGKQIGRSLRFATTHKGADSLMSFIFKNIGNSPCVFGMEATGHYWYPIYSFLKAKGYTICVINPIQSDSLRKMYIRQTKNDSIDSFLIAEVIRFGQFGTTSMADENILAMRQLCRYRDSVISSRTEIKLRIGTIMEQIFPEYEKQFSSLWVSTSMGILEKYFTPENIENAPIDELFEIIKDKSHNRLTKAKAISIKEAAADTFGIKIAQDAFSFQLKQLIDRMNFLDKQIEALDIEIMKYYEQFDCYLHTIPGIGMIAAAAILAEIGDINRFKSSSALVAFAGIDPTVRQSGEFNSTHNHMSKRGSPYLRHAIFLAATTCSFHNSPLNAYYKKKRDQGKHHLTATGAVARKLTTVIYAVLRDSKPYEPKKFC

SEQ ID NO: 432562 - protein, 345 aa, unidentified
MIMLADDVEVVIGVDTHKQAHTAAVVDRLGGVAETFEFAADPAGYRRMLGRVASRPEARIWGVEGTGSYGAGLTEFLHAAGERVVEVERPARPSRRNGAKSDAIDAVRAAREVLAAKDLIEPRRRGEREATRVLLATRNGAVVARTKALNHLQALVVTAPQRLRSRLGGLTTTELARRAARLRLAADRPIEDQATVRAMRACARRALACEQEAAELEAELKRILTQEVPHLLSEPGVGPISAAAIYLAWSHHGRIRNDAAFAALAGVAPLPASSGQTTRHRLNRGGDRQLNRALHTITLSRLSCHTETKAYAERRLAEGKTTREIRRCLKRHIARRIYKLLEHTP

SEQ ID NO: 432563 - protein, 359 aa, unidentified
MDIRDPAKRHVVGGVDTHKDLHVAAVVDERDRVLGSRSFTTTRQGYRQMLAWMGSFGEVQRIGIKSTGSYGAGLLRFVQTAGIEVLEVTTPDRHDRRRRGKNDDFDAQNAAHAAFAGQRTVTPRSRDGMVESLRVLSACRKTAVAARRVALQLIQNTIVCAPDGLREVLRSMTRMQLIRTLAAWRPDLTAYRDVEAAYRITFKSLTRRYLELHDEIADLDVMIGAIVDELAPDLVARNSIGHVGAAQLLLTAGDNPDRLRSEASFAALCGTSPVPASSGKTIRHRLNRGGDRHANSALHIIAIGRLRTDPKTKKYVAKRIAEGHSKLEAIRALKRYIAREVFTLIMRRHKTINQTQIAA

SEQ ID NO: 432564 - protein, 316 aa, unidentified
MSHAVYVGIDVAKDSFDVASDPAGLVLSLPNDPPGRQRLLDALQDRPVALIVLEATGGYERALAADLIGAGHKVVVANPRQVRDFARGIGQLAKTDRIDARVLAQFASMVKPQPRQKASEEAVNLAELVTRRRQLSDLMTQESNRLPHARHPEVRRSLKKSLRALEKQIDDLDKLIRRNIDSDDGLRRMDEIVQSFKGVGPGTSAMLLSHLPELGRINRQQIAALAGLAPWDFQSGQWAGQSRIWGGRMPVRNMLYMAALSAIRSNPIIRKFYQRLESQGKKFKVAITACMRKILVILNTLVRNDCLWSPPLPKNA

SEQ ID NO: 432565 - protein, 402 aa, unidentified
MEKFAGIDWASEEHALCVVDEAGMRLCERLVAHDEAGIAALCRELVGLGIERAAIERPDGILVDRLLEAGITVIAVHPNQAKAARDRYSVARGKSDRFDAFVLAELARTDAHRLRAIRPDTDATKALRALTRTREDLVQTRVEVANQLRAQLQAFWPGALIFRDIDSPISLAFLRRCPGPADAKGLGPKRLGSWLARQGYSGGKTPEELLERMRSAPAGRAGEAEAEARRAAVLGLVAALEPIVAQIRELTSQIRAALAAHPDAEIFRPLFRDPSTTICPATLIAELGDARERYPTEGALAADAGTSPVAVESGKHRVAAFRRACDKRLRDSWAVLADSTRHWHPWARKVYADAIARGQDHPHALRTLGRAWARVLWRCWQDRAPYDPALHGNLRRLETAGG

SEQ ID NO: 432566 - protein, 405 aa, unidentified
MQYIGIDIAKNTHVVASRMADGAPHGKAFQFANDERGFRSLLERFAELEAGPDDCIVAMESTGHYWLALWSFLDDHGYPVAVVNPVMTDAFRKADSVRKTKTDAIDAFLIAEYARFKNLGPTPIAPEVADGAKVLTRYRAHLVSERTALKNRATAAADRVFPELARCFSTKHTAASRAILSEFGTPARVASTDIRTLTRVIREASRGHHGREKAEEVKAAAKTSVGSAWASEALAFELAHITALIDHMDEEIAALDTKIAEVVEGPMAGFLQTIPGIGPVNAAVILAEVGDPSRFEEPSKLYAYAGIDASKSQSGKFDGTEQRMSKRGSSYLRHALMYAADKARMRDPYFGDYYDSLRARGKHHYVAVSGVARKLCGVILAVMKEQRPYESRPSIQSQQKEPTAG

SEQ ID NO: 432567 - protein, 320 aa, unidentified
MTKVEKIIGIDISKENFDVAFSASGKMKTQKYSFSASDIKKFISLLDVESHCVMESTGVYHLRLAHALHEAGIPVSVVNPLSVKRFIQSKMHRTKTDKSDAMMLVEYGSMMEPALWKPDEAHYTQAQQLLNIQEQLIKNRTSVTNQMEAISLSVNQSKTALGLLKKQLLFIENQLIQIEQELEELIGRHDDEDVHNLQTIPGIGYKTAVALMVYTKGMTGFDDHRQVSSYFGICPRIVQSGTSIKGRGKICKMGMGHIRMLLYMCARSAKKYNRACRELYERLLAKGKAKKLALIAVANKLLKQAFAIVKNKSAYVENYV

SEQ ID NO: 432568 - protein, 343 aa, unidentified
MQTITTIGLDIAKSVFQVHGVDAAGEVVIRRQLKRRSVLAFFQKLPRCLVGIEACASSHYWSRELQTLGHTVRLMPPAYVKPYVKRQKNDAADAEAICEAVTRANMRFVPTKTPEQQSCLTLHRTRHLFIRQQTAVINSIRAHLAEFGIVAPVGRKGVTELLHVVADPSDKRVPEVARACLAALGTQLLRLKQQILEFDRMIMAWHRSNQTSQRLHYIPGVGPMLATALVASVADPRTFRSGRNFSAWIGLVPKQYSSGGKDRLGSISKQGDRYLRSLFVAGALAVIRYAKIHGTGHRPWLTALLGRRPTKVAAIALANKIARMAWAMMAKGERYKQPVALAA

SEQ ID NO: 432569 - protein, 376 aa, unidentified
MERGSLMLNTTTFVGLDVHARSIKAVALDAMTGEVRSATFGYDAAEVAGWVSSVDPSAKCVYESGVTGFDLQKRLSSMGIDCVVGAVSKMIKPSADRRRKNDRNDAEFLARMLSVGNVVEVWVPDDECEAARDLTRALDDAREDLKRCKQRLSKFLLRHGYVFSETTPTGRRKGSWTAAHWAWIKSISFPEKADNDVLAYYVDAVRQAMEDKARLERLVEAEASKPRWKRRIDSIRCLKGIDVTSAADLVFEAGEFSRFKSARSFAAWLGLTPSEHSSGESVRQGGITKAGNKHLRRVLVESAWHYLGCSPHSKDLAKGQVPDPAARRHAAKGVRRLVERRRAMLERGVHKNKANVATARELACWCWAVGRMVENG

SEQ ID NO: 432570 - protein, 415 aa, unidentified
MELLHERCAALDIGKKDLKACVRAPSPSGKRSRRQEIRTFATTTNALLELRDWLVAQKVTLVVMEATGDYWRGAFYLLEDCLNVILVNAAHAKGLPGRKTDVSDAAWLCQMGECGLLRASFVPPEPIRQLRDLTRYRATLAAERTREASRLEKELEDAGIKLSSVATDILGVSGRAMLTALIEGERDVHVLAEMAKARMRPKIPQLVQALTGNFAEHHAFLCRLHLERIDQLSAAILELSRRIENEMRPFARQLEQLATIPGVGQATAEVIIAETGGDMSRFRTAGHLASWAGVCPGHHESAGKRKSGKTRHGNRWLGAALGTAAMAASRTKDKTYLGARYQRLVPRLGKKKAIVAVEHSILTAVWHMLTHDVDYHDLGGDYFTRRDPQRAMQRIIRQANALGFTVRFDPIQPAA

SEQ ID NO: 432571 - protein, 366 aa, unidentified
MKKTSTVRVNGNMIFKGHKVTIGLDLGDRWSNYCVLDEAGEILLEQKVATTPEAMKQIFEKIPRGLIAMETGTHSPWVSRLLREPGHEVLVAHAQKVELISKSKRKDDRHDARTLARLARIDPELLGPVRHRSAKAQIHLTVIRARAELVSARTALVNAARGLAKSYGERLHKCGTEQVSRKLAAELSAELREVLEPLLKEIESLNERIKEYDARMERIARESYPQVELLKQVKGVGTQIALTYLLTLDDPHRFPKSREVGCFLGLRPGRRDSGQSQPQMHISKEGDPYLRTMLVQGAHYILGPFGEDSDLRRWGRRLAERGGKNAKKRAVVAVARKLAVLLHRLWVSGEVYEPLRNSHQAMRAVA

SEQ ID NO: 432572 - protein, 359 aa, unidentified
MDKKVVLNQSLGVDIAKDSFSYCFCFLNADLSKDFEFGEDLQNNKQGFNTLLRKIKKSGMSKEDLTIVMEATGVYHEAIAYYLHYKGYKVCIMQSGRVKKYAQSLDQRSKTDALDSKMLSMLGCERKLTAWEPPSATMEELRFLSRERATIIKERSIEKNRNHAMTAGRFEHKKAIRRFDKRMKLLNIQIEEIEKELHELVSKNVVLKQKLAYLMSIPGVSFVSSITVIAETFGFSLISNSKQLVSYCGYDVVLRESGNYQGKTRISKKGNKHIRAILHMPSMTAVRVNPTLKPFYERLKPKKAKPIVALVAVQRKMLILMYSLWKSNSYYDGKFEIKKAARKQILTAQDSHKNELVTS

SEQ ID NO: 432573 - protein, 365 aa, unidentified
MNQDTLHVGLDTDKRHIDVAVAEPLPGGEVRYWGKLANEASALDRVLKRLQRGGRRLVVCYEAGPCGYGIYRQLSGKPGVSCQVVAPSMTPRRAGVRVKTNRRDCLTLAKLLRAEELTAVWVPDRAHEAMRDLVRARGAAVEDLLRCRQRIGGFLLRQEIRYAGKPWTKKHRAWLGGLELLEPAHRLMMGELIEALDQAQARRDRLRDHILEQVPLWSLAWLVEALQVLRGFALINAVTVVAELGDPRRFDSPRQLMAYLGMVPSEHSTGNTVHRGAITKTGNARARRALAEAAWTYTRPAKLSKPADQPAALRAIADKARHRLSGRYRRLIARGKRSPVAVIAIARELAGFLWAIAHAAAKHPH

SEQ ID NO: 432574 - protein, 345 aa, unidentified
MFYVGVDLHKSFTQVYGFNDATGEVVERRVSNDKGSIREVMSQFGENAKVVLEATRNWYWFVDLLQEMGIDVVLSNPLQTKAIAYAKVKTDKVDARMLSHLLRADLIPFAWIPSMEERGIREMLRTRLTLVRIRARFKNLVRSILAKLNIVLSHGDIWRGKGRKELEQLNLPSPYNEILPHYLSIIDNLDKYIEEWNRKIERIAKETPEAFLLKSVPGIGTISALTILYETGPIDRFPSAKRYSSYAGLVPRVKGSGGKFKTGHLSRQANMYLKWIYVEIATGIVRIGKGYLYEYYKKQMYKKGKNVAKIALARKISRMVYHLLKQHITYDTFVERNVNKMRRTG

SEQ ID NO: 432575 - protein, 348 aa, unidentified
MKILSLDLGKYKTVGCEYERATGAHRFKTVFSTRAALQQLVQEVRPDRVVIEVCGISGWVCDLLREMGVVVQVANTSDEAWRWRKVKQKNDRRDALKAARLSAVNQIREVHLPRIEVRQWRALIAFRQRLLGRRVKVKNHIRDLLVREGELLPRGGKCWTRIGLARLEELAQPLAETDLGELWRGELAMELRQLQAVQQEIDLIEQKLDAIGAADPRVQLLRTIPGVGPRLSEAIVALLDQPERFRKANQVSAYIGMVPKAFDSGETLRSGKITRHGNRIVRGLLVEVAWAGLRHNQWVRETYQRISGGKKSRRKIAIVAVGRKLLVRCWAMLRDHIGWEWESQAAES

SEQ ID NO: 432576 - protein, 320 aa, unidentified
MANLEKKVIGVDVSSNILVMSFLDDEKEQIITIGNNKVHIEKCLKKWDTSQFKIVVEATGSYSSKILYYSYYMGFEVYQVSGLSIKKFSEVKNHISKTDQQDARLIRNFGETMTMNPYEPKKENIEFLEQELNLWQDLEQEKARYSLKLKSLSQKPIVNTVVIKHYKTIIKRINKDIKDLEKRLPHLEDKELKENKDLLSSISGIGEKTALLLLVATNNFKNFKHSKALCKYFGVVPKMYHSGNKKISIGKCRTSKGFVRSTLYVCSWSAMRFNTQCKALYERILEKKKCKKVALIAVCNKLLRQAFGILKNKIQYQHNY

SEQ ID NO: 432577 - protein, 422 aa, unidentified
MSCLPALAGVCPTEHQVRRDTIILTESMLIVAGADTHADTIHVAAISMTGAPIGDREFPTTRAGYAAAIKFLTSSGQIERIGVEGTASYGAGFTRALTAAGIEVVEVTRAVKSTRRLKGKSDPLDAYSAARTALAGDGLATPKDDATAGLRALQIARRSAVKHRTAVINQLKAMLVSAPDTVREKYRGLTTLKLIEAIARCRPEALADPWAQSVLLAARMLAQRVQFLETQANTLETQIDTSVTEANPGLRAAYGVGADTAAQLLITAGANPHRLRSEAAFAALCGAAPVPASSGKTSRHRLSRGGDRAANNALFRIALVRMSNHQPTKNYVQRQQALGHTRMEILRKLKRAIAREIFKLLTRQIAVPDYADLRPTRQSKNITVTAAANHFGVWPTVISRIERGLQRDDTFADTYRNWLKAA

SEQ ID NO: 432578 - protein, 347 aa, unidentified
MDHVGMDLGKRESQLAILTEDGELINMRIRTERHRLVEMFGRRPKARILMEASTESEWVARGLEDLGHEVIVADPNYAPMYAQRTRRVKTDRRDAHALAHACRAGTYRPAHRTSTERCELRARLAVREAVVRTRAAWITRIQSLVRREGCRLRTGAPETFLTRVEELALPPALTTVIAPLLELLDPINKQIEALDEELERIVAADEVPRHLTTVPGVGPVTATAFVATVDDVTRFRGAHQVEAYLGLIPCEWSSSEVQRRGHITKAGNGRMRWLLVQAAWCILRRRKRPETAALRDWAERIAGRRGRCIAAVALARRLAGILFAIWRDGTVYDATKVRGPLPARRAA

SEQ ID NO: 432579 - protein, 322 aa, unidentified
MSKPSIVCAGIDTGKYKLDVALNGSRQQLQIDNTTDGHAALSSWLKRHKVERVGIEASGGYERNVVTRLRGDKFVVVVFQPAQVRAYAGFLLQRAKNDKIDAALIAACTAATKKIHAPPDPRLAPLAERMTLIDQLTDQIARFKNYREGSRDLRMRQLWKEQIAHFNKLLRAELKELVAAIRQHRDLAERLDLIESVDGVGLKTAVAILVRMPEIGSVTREQAASLVGLAPFDDDSGMHAGIRHIAGGRERLRGSLYKASLSAAFHWNPQLVALYQRLIAAGKLHKVALIACARKLLIFVNTVVERGTPWVSSRSPAVRAAA

SEQ ID NO: 432580 - protein, 360 aa, unidentified
MLLFYAVEAASGGSVEYIGIDVHKRESQICILTEGSELIEKRIRTSRDRFSFELGSRPRARILIEASTESEWVARCLEGLGHEVVVADPNFAPMYASRTRKVKTDRRDARALLEACRLGAYRPAHRLSEAQRHVRAHLAVRDALVRTRARYISLLRALLRREGLRIRAGSAKTFLVRLQELDLPSSLAEEIAPAVAMMTPLNDQIRGADKAIARITQGDDGVSRLCTVPGVGLVTAAAFVATIDQASRFAGAHQVEAYLGLVPREMSSGERQHKGRITKSGNGRARSLLVEAAWSILRYDKPETAALRIWAERIAARRGKSRAVVALARRLAGILFALMRDGTVYQSEVLQRSGPRTEAA

SEQ ID NO: 432581 - protein, 334 aa, unidentified
MKKRYFMGIDVAKATFDFCLLSSTESCLWRGQFSNDAHGIARFLAQLPAPRRKPAQIHFALEATGVYGKALVAALHQAGLAVSVLNPAQVKYFAFSVLRRTKNDTVDAEIIARFCRERKPLATRPLRPIEEQLKVLVHERESRVGEQTRERNRAKKDPFQIALPTLISRQRRQRLQQLDKEIAQLDAAIDSLIASDESLSNQSQLLCSIPGIAAVTAAKLLSELAGKEFQSARQLAAYAGLTPAEFRSGYFLYGKTHLSKIGNAFLRKALYLPAAVARRWCKPLKPWIAILESRKLHDLAIRGAIMRKLLHIAFGVLKHQKPFNPLLVFIPKTL

SEQ ID NO: 432582 - protein, 391 aa, unidentified
MILVGIDVAKDKHDCYIMTSEGEVLFKSFTIANSMEGFNQLYEKILSVTDNLDKVKIGLEATGHYSYNILGYLLDKGLTPFVINPLHTNLYRKSLSLRKTKTDKVDSRTIASMLMSDVSLKPYSDTLYHNEELKSLTRYRFDKVQQRARLKTSISRLVTILFPELEKLVSTLHMKSVYSLLYEFPSAKAIAKAHLTRLTNLLYANSKGHYGKEKAISIREAAINSIGSYMSVKSLELKHTIKLLEELTLEIDEIEKEIKSIIDKLNSPILTIPGIGYSLGAQIIAEIGDFKNFDSPDKILAFAGMSPSTYQSGKLYSSNAKMEKRGSKYLRSAFFTAAVCVCRIEPTFALYLAKKRAEGKHYYVAISHVVKKLVRLIFHLEKTGEHYIALT

SEQ ID NO: 432583 - protein, 346 aa, unidentified
MTVYIGVDFHPHQQTVCYCDTANGIIQWKTMQHDKRAELREFYRQFGGEVIIGLDAGGPSQWFEELIEELSYKLLYGDSSEIRKRARSRHKNDKRDAELLLDLLVRQEFPSLWRRSAENEQVLCQIRFRDRLVRQRTRVCNQLQALGHRAGLPRQRMQTSIARKRLCEVEMYEPQSIQRKHWFEILDDLTGRIAEVERWLSRKVVECPQARLLITQPGVGVLTALSIAHTLGDVSRFSGSRKVVAYVGLDPLEDSSGDRKRFGRISKAGSRMLRFLLGQAGQASLKRDSEMKEFYQQLSQRRGKSSAKVAVARKVLVRSFIMMRDRIDYEEFLRRRRRSQFVRGAQ

SEQ ID NO: 432584 - protein, 362 aa, unidentified
MNNGTNETVVLENAVFLGIDEHENSIAVARGKGKEKSVDRTFGTTERDYAKFREWVEQFAQPGTPVYAAYEASQTGPRLARRLQAWGWTCYVIAPHDLPRSPKARRRKCDPEDARRILGALRGHVLAGNELAVCWLPDDQTMDDREIVRERLSLGEKIAAAKNAIHSLCKRYSQKRPQTVGAWTCAHREWLRQLIKAETLKVGARLRLQSLLNQLTVLEQERTTFDKAIVELARQQRHRARCTALRQFRGVGFLVAMTYLVEIGDPRRFQNRRQIGAYWGLIPSSFESGESGERKGHITHQGSPRVRKVLSQAAWVLVRDKAHPLSEWYHRTAALRGSKRAIVGVMRRLAIQMWHRALELTG

SEQ ID NO: 432585 - protein, 419 aa, unidentified
MSFKIFKFNCCGLDVHKTWIYACIGITDSNNRTEYKQARFSSFSKGLHQLCVWLAKYNCNDVCMESTGKYWIPVFNILEQHKIRVTLSHPKYTKPMKGNKTDRKDAKWIGDLYMCGMVKPSFIPPADIRELRDLVRYRFKLTCMITGEKNRAQNCLTVSNLKLDDVFSDVFGKSSRSITEQILQHPGEKFDVSPFVDSRCKTPIEEIQAAVDGNISKEQAVKLRQCLDHIDELQKHISEVEQEILRFSDKYEAALNLIRTVPGFDKNPMTAIQVLSEIGGDMPVFPTAKHLVSCAGCCSRNDKSDRKIKSTRISCAGSYFKPVLVQIANALIKSKKHFEFTTRYKRIKTRRGHKKAIIARCRMILTAIWHILTDLKPYTPEGFLDSRPVNKEKVLTTSQALNLLKQRGYFIKDDPLSVS

SEQ ID NO: 432586 - protein, 380 aa, unidentified
MQKDIRHLGLDVDSERIAVAVAEGRAEVRSLGMIPNREDSVRRLVKKLGPANRLRICYEAGPHGYSLYWQLSKLGVHCDVVAPTLIPVKSGDRVKTNRRDAERLARCYRSGDLTPVWVPDASHEALRDLVRAREAAKKDELRARHRLGKFLLRRGLRAAAGVKSWTAKHLLWVRTLHFDHPAQEATFLDYLHEVEHSAARVTRLELAIDQAVASAPAEMQALIAGLQALRGIKIVSAATIVAEVGPLTRFARPKQLMGYSGMVSSENSTGNSVRRGAITKTGNAHLRRIGGEAAWAYRHRPSMSPALRKRQEGLSAEVKEIAWKAQHRLSSRYRRLLAKGKSPQKVATAIGRELLGFVWAIGMQVAKEQPRHTHGHHRVA

SEQ ID NO: 432587 - protein, 368 aa, unidentified
MINYKLKAAPTAVSKQQKSQKELKAKRIVIGVDVHLKSYEAARKIDNDSVGVVQRLRSKEEFLLYVEKQREQAEQVVVLYESGPLGYTLYWDLKARGIECLVCAPQSKEQKRKRRKNNAIDARTLSSNLFNYLNGNEHALQRVRVPTKAQEQARIESRQHDALVEERKRIAAMGNSLLLSQDYGSWRNWWRPKSFERLSQLVAPWVLKQLQRWVKILGELDQQIQQAKVQLSQQCQGPRPKGMGAPSLAQLNAEVLDWNLYSSGRKIGCLAGMVPSEWSTGEGQRLGAITKVGVPAIRRIITEMVWRMILFQPEYKAVQKWREVLEGSNRGLKKKAVVAIGRRLIVDIWRLQTGRISAQELGLIMIEA

SEQ ID NO: 432588 - protein, 369 aa, unidentified
MGKHSEVFVAFDVAKRKHAVAIAETGRTGEVRFLGDVENSPQPIERIIRKLAERYDRLHVCFEAGPTGYGLYRQVRALGHECIVVAPALIPKRAGERIKTNRRDAVTLARLHRAGELTGVWTPDPAHEAVRDLARAREAAADDLRRRRQQLLSFLLRHSRIYSGGGHWTLAHRRWLAAQKFDHAAQQIVFQEGVDGIEDCLQRLRRHEKQLALLVPEWSMAPVVEAYQAMRGASFLVAVTFAAEIGDVRRFDTPRQLASFLGLVPAESSTGDTTRRKGLTLAGNRRARRALVEAAWTYRYPARVSETLRTRLEGLPKPVRDIAWKAQVRLCGRYRRLSAAGKKTPVVVAAIAREMAAFLWAIGREVAPA

SEQ ID NO: 432589 - protein, 436 aa, unidentified
MEEVTDEPLYRDRVCGIDIGKAGLVATIRVPAEKDPARRAAETRSFGTTKREVLALADWLRCWQVPAVVMEATGDYWKGPLYRLEAEGFECVLADAKQVRHLPGRPKRDPADSRWLAACFERGAVTPCFVATEEFRVIRLHTRYRRDLTEERTREKQRAEKLLESAAIKVSSVLTDLHGVTGRDIMGHLIAGDRDPKVLAQLARTAARRKISQLEEALEGAEFFTPAHAALLTVMLARIDRLNADIDQLTEVIERLLAPHEEQLQQAESMPGWGRRAAQDSLAETGPDMTRFPTGAHLASWAGRTPLDHQSGKRQGRSKAKKGNRYLGAVTGETAVAAGRTQTREGARYRRLARRRGKPKAQVAVGNTQLKVYHKLLSNPGMRYADLGPDYYERQRGIRRQIAHHVGKLGDLGFEVTLVRLPSPDPEPGGTHNPAA

SEQ ID NO: 432590 - protein, 467 aa, unidentified
MYLPNSQTLDIAPLSRIFSNTSAAYKFFWFLCLLEVFQKGQTEIAYSDIVARMIAKAWYPRLMTWNPLSSQVGKYGCNQITTEDSMSIERILVNKLDANQSWDVIGLDLAKHDLSCVGIATNGEISRIDRISYESFLEWASTIEPTVFAMEPCCEANYLCNQLESFGHSCRVISGKAVQQYIDVYFSGQKNDINDAEAIAFLGKNSRLKNIRTKTPDEMRLQTLMTTREHFVDEYRKTLTTLKGLAQFWGLKLAKSLSSEPKLIELIENASLPPDITILFKQLVKTYKELQKVANALTRQLMTLAKSDELCQKLMDIPGIGPICSTRLKVTIGPIDRFDSPRKLPAYFGLVPRNKTTGHSQKMGQITKRGDKMTRSYLVQAACSLMMLDAKGKFRDCQLRRWIHKKREKLPYGKLVVALAAKLLRIVWAVLAKGDRFDYRKAGVAKCSLPKQETTIVNKAINGHCNT

SEQ ID NO: 432591 - protein, 469 aa, unidentified
MDLLKLPIYTFYCEFLDMEERFMKKVFIGIDVGKFKNSISIIDSEGNPIIKKGISIENDYYGFAKLEEKIDLIMNNYGFTYEDCIAGVESTGHYWFNLRDYLKDIGIETVMIKTDSVKHRRALEEGQKGKNDTLDARVIASCLRNGNYVYIRDNERELRALQKLTRMRNDISDEVVALKNKIHRCIDICNPVFFKIFENLNSKTGVALIKLYPSPQDIINVELDNIKKELGEIVDKPNMRMVSLYKEECEIWSGLIKEPSYAEKVEMIAYIDKFLLQNESKEHLDKQIKEIAKNIIPLYSEFEEIKGIPLIQLISVLSEIGDIRNFKNTRSILAFLGLSLKGNASGKYIGERKINKAGSRIVRKHLFNIMDTLVKHNEYFRIAYCYYKSYNHKNPTKKRSMQIAVMCKFVRVMYGMLKYKTPFDYKEMLKGYYFGDCNIKVFKEEFEGEKRSKKIENYKLVYSIFINYS

SEQ ID NO: 432592 - protein, 339 aa, unidentified
MELLKQNVGVDISKDSFVATFATLLQGQIIKNKRTRNFNNTVKGIKEFIEWVSKLEDPSFDLHVTMEATGVYYEELAYTLYQGDRIIVHVLLPNIAKKYFESLNIKIKTDKVDSKILAQMGLERMLKPWVLSSKIYRKLKTLSREKGQMIKERTMIKNQLHAETHTAEPLRRTITRYKNRIKYLDKQIKSVEKDIEKTVEKDDFVSAKINKIKTIPGIKIATIVGVVAETGGFVNIQSIKQLTSYSGFDVRIQESGKWKGKPTISKKGNSHIRRLMYMPTLSSIQYANTYKTIYNRIKDRKEHNMVAVVAIQRKLLGLIYTLWKNDSAYIENYQKTETV

SEQ ID NO: 432593 - protein, 370 aa, unidentified
MGNRSMFVGLDVHKETIDVAIADGERHGEVRHYGVIASDLEPLDKVVRALRTPDRRLHFVYEAGPCGFGIYRHLTSRGEDCVVVSPSMIPKRSGDRVKTDRRDSQMLARLHRAGELRPIYVPDDADEAMRDLVRAREDAVGVGTQAKYRLKAFLLRQGRRYPGREGWTLPYRRWLTDLSFPSAAQHIALQEYRDAIGETEQRIDRLTEQLRQLAPTWRWAPVVAALQALRGVSFLTAVALVAELGDLTRFRHPRELMAYLGLVPSEHSSGPRVRRGAITKAGNPHVRRLLAESAWAYQGIPRIGRQHAYRQEALPKVVCDIAWKAQLRLTTRFRRLVARGKAKPKVATAIARELSGFIWAIAREVSPTPR

SEQ ID NO: 432594 - protein, 350 aa, unidentified
MAMLADQVDLVIGVDTHKHTHTAAVVAAASGGVLAQQTVPADSAGYQALISLAQQHPGRRVWALEGSGAYGVGLARRLAQQEEWVVEVDCPKRPARRHGAKSDVLDAARAAREALARPRLAQPRASGSRAALAALLPARRSAVQAAGDAQRQLHALLTTAPELLRTRFRGRSSSQMVAGCAALRLRVAWGVETCTVAVTARTLARRIRALEREAAEHQQAITRVVTAWRPDLLEQPGVGPIVAATVLCVWSHPGRVHSEAAFAMLAGTAPIPASSGQTVRYRLNRSGDRQLNRALHTVALVRLHYDPATHAYAARRRAEGKTSQEIRRCLKRYIARQLYHLLETPPLDTR

SEQ ID NO: 432595 - protein, 342 aa, unidentified
MVTTIGIDPHKATHTAVAINETETVLGELTVPADRSQTKTLLDWAQNLDGGGRVWAVEAAGGLGYLLSQQLVANGEHVVDVPPVLASRVRLLGSGRSDKNDPNDARSVAIAALRQPGLAVVRPEDHTQVLRMLAKRHLELTGLRTQAACRLHSVLVLLRPGGLQPRLSATKARRMLQGMRSLDPIGEQRRTMARTHLGDIRRLDREIKANKVLISKAVATSGTTVTDVYGVGPVVAAFLIGYTGDIGRFASANHYAAYNGTAPIEVSSGGKKRHRLSMRGNRMLNHAIHMAAVTQIRHSDTPGRNYYDKKQAEGKTKKEALRALKRRISDTVYQQLITDHQG

SEQ ID NO: 432596 - protein, 428 aa, unidentified
MNYTQNQKISQISSHTLIIGVDIAKFKHVARAQDFRGVDLGKPLTFENNKEGFDGFTQWCQQIMLNNGCSEFIVGMEPTGQYWLNLAHYLKDHDIPFGVVNPLHVKKSKELDDNSPTKNDVKDAKVIAQLVKDGRYAVPNIPQGVYAELREAMKIRDLLTTDLQAVQGRVHNWLDRYFPEFLTVFKDWEGKSALHILRLNLLPHELLEVSDEDLLTYLRIAAKRGVGLSRIRSLKEAASCSVGIRQGIDMAKLEIVILLDQYEMIKNKFEELDSKIDALLQQVPSVSRMLAIRGVGKDTVAGFLAEVGDLNNYTHPKQIIKLAGLNLRENTSGKHKGQTKITKRGRKKLRALLFRVIMPLVAKNTAFKAMHEYYTKRPENPLKKMQSLIALCNKLIRVLFAIGKKGCQFNEEKMLSDIPHFTSLKMVA

SEQ ID NO: 432597 - protein, 414 aa, unidentified
MEVVYPRCTGLDVHKKTVVAAIIVTEPNGELRKETQTFGTMTADLLALSDWLTTHGVTQVAMESTGEYWKPVFNILETSFEVWLVNAQHIKAVPGRKTDVNDAEWIAELLRHGLLRASFVPPLGQRELRELTRHRSNFVRERSNLINRVHKALESANIKLASVATDVMGVSGRAMLAALIEGHATPSEMAELSKGRMRDKRDQLAKALEGRVKPHHRFVLTELLCQIDSLDESITRFDKQIEDYCAPFEEAVALLDTIPGVARQTAEIIVSEIGTDMSRFPSADHLAAWAGVAPGNNESAGKRRSGKTRKGNRPLCAALNQAANAASHTKATYLSAQYHRLAGRRGKKKAIVAVEHSILVIAYHVINRQEPYRELGGDYFDRRRPEATARHLVKRLEQLGYEVTIQQPSASVAA

SEQ ID NO: 432598 - protein, 405 aa, unidentified
MKKHSKSSQRSEPTMKRTKARGPVQRDAKEVLAEVLEKLTGKWDAPAVSTSAKENRRGNTVGPNRDRLTVGVDLGDRWSQYCILGLEGETLAEGQLRTTQEDVREFFQTLTAMRVVIEVGTHSAWVQDVITEWGHEVLVANPRLMEGSKRRKRKSDRIDANKLARLGRVDPQSLHPIRHRSREVRQDLVVLRARDALVSVRTELINTARGLVKSMGTRLPRCSSPSFADKVKDAIPDEVREALLPLVQLVETVNDCIAKYDQEIEELGRNKYGHTTLLRQVKGVGPITSLAYVLTLEDPQRFSSSREVGPYLGLVPKQEDSGDSQPQLGISKTGDRMLRRLLVGSSQYMLGAFGPDSDLRRYGLRLCERGGKNAKKRAVVAVARKLAVCGTLLDPAYAAAGAVLM

SEQ ID NO: 432599 - protein, 324 aa, unidentified
MPHYAALDVSNEETAIHVVDETGATVWRGKRASDPEVLATALRRHAPELVRVGLETGPLTPWLYHSCKALGLRSSAWTRVMPEPRQLCNATRPDARDAETLAQLVRTGWYREARVKSCAAHAVRHLVGARAQLMGVSIDLSNQIRSTLQTFGLMAGKGMGRTFEARVHDLIEARPAVAAIVEPLLAAWRAVRTQIGILDRRLITLAKSDATCRLLMTCPGVGVIVATSYAAAIEAPEHFRHSRSVGAYLGLTPVRHQSGQADHSGGISRRGYRLMRTYLFEAAASLLVRVRQDSALKAWGRDLAQRMGFMLISAEKCPWVSTEK

SEQ ID NO: 432600 - protein, 312 aa, unidentified
MPCFGGIAGAKAQLDIALRPSGERWTVPNDPNGVTTLVERMQTLQPPRIVLEATGGLERAVTSALAAAGLPVVVVNPRQVRDCARATGQLAQTDALDARALAHCADVIRPTPRPLPDAQTQELRALLGRRQQLIGIRTAEQNRLAGTSTRLAKDMTEHITWINARLATLDNDLETVLRASPLWRDNDDLLQRAPGIGPVCSRTLLLELPELGTLTRQQIAALVGVAPLNGDSGTLRGRRTMWGGRAHVRTVLYMGTLVATRFNPQIKVFYERLLAAGKVKKVALTACMHQLLTILNAMLKHRTPWQPQEVQN

SEQ ID NO: 432601 - protein, 338 aa, unidentified
MKITTIGIDIAKSVFHLFAVNKMGRFVKKKQLKRKQLLAYIAKLEPCLIFMEACGGANYWAREFISLGHQVKLIAPQYVKPFVKGNKNDYNDAEAIAEAGQRPNMRFVPIKTIEQQDIQNFHRQRERIKKDRNALVNQVRGLLAEYGVVINKGFTAVRQDLPDILEDADNGLTVLARELFSGHLEELRVMDKQFKHCEQQIKASNKDNDICRRLDEILGIGPIIASATYAAAGDGKDFVNGRHFSAWLGLVPGQHSSGGKSVLLGISKRGNSYLRTLFIHGARAVLRYSVNKPDRFSRWAQGVLQRRGHNKACVAVANKMARMAWVIMSKGESYRPAL

SEQ ID NO: 432602 - protein, 476 aa, unidentified
MVIPNEEPKGPGKPRPPRKPGKPRQSSVPVPIPTSTAPLNIINPDAAGIDVHSNMHMVCVPADRDADPVRQFGANTVDLHELVAWLKGCRIKTVAMESTGVYWIALFELLEAEGFEVALVEPGQLSRCGARPKTDVLDAQWIQRLHSYGLLRASFRPPDSVLALRAYGRLRQTQIRYAASHVEHMQKALEQMNVKLTEVVSSITGLTGMSIILAILDGERDPQRLAQRRHPQCHRSREEIALALNGTWRVEHLFELRQAYDLYQFHQRQITDCDRQIEAELARFPDRAGDKPHAAKPRKRGRKSNDVRFEATGLLFKALGVDLTLIEGIDVATALVVLAEIGVDVSRFPTEKHFASWLRLCPPQNESNQTKRRHRNRKGTNRLTLALRMAAQAVGRTNTPLGLFYRRIRSRIGGLGAVKATAHKLACLIYRMLRYGEDYVVQSMEEYEAKMRSNALVALERKAAAMGMQLSPLPTP

SEQ ID NO: 432603 - protein, 341 aa, unidentified
MGQVSTVGLDLAKSIFQAHGADASGEVVFRKKLGRGRLLAFFAGLAPCVVAMEACAGAHHWGRELTRQGHTVRLIPPIYVKPFVKRQKNDMADAEAICEAAQRPSMRFVPLKQEEQQASSVVFRARDLLVRQRTQTINALRGHLAEYGWIVPKGVPHVDRLITRVEDPAEALPPAARTILLVLVSTLRTLDQQIAVLDAEIASRAKHDPVARRLMTIPGIGPITATALIALAPSHEAFKSGRHFAAWLGLTPRQRSTGGQQKLGAITKMGERTLRRLLTIGASAVIKQASIRGAPAGSWLDQMLARKPKMLVIVALANKNARIVWALLAKGDVYRAPGVPA

SEQ ID NO: 432604 - protein, 355 aa, unidentified
MTITKYIGMDVHKESISIAVMNSAGKFVMECVIETKGSMLLQFIDGLRGDVRITFEEGTWAAWLYDLLKPHVSEVVVCNPRKNALLKDGSKSDRIDARKLAELLRGNHLKPVYHGEQGLRTLKELARSYLNISKDVTRVMNRLKALYRSWGIACVGTKVYARRHRSEWLGRISEAGVRRRAEHCYQQLDALRLLHQQVRRDLLLESKKHQAWRLLGLIPGIGPIRAALLIALIQTPHRFRTKRQLWTSSGLGLETHDSAQYRVVEGQLQRSKKPVTLRGLNQDHNHDLKDIFKGAAARVSSSSGPFHDFYEHLLAQGRKPTMARLTLARKIAAITLIVWKKEVRFDASYLKSQAA

SEQ ID NO: 432605 - protein, 364 aa, unidentified
MNKCHLNTELSSLEGTRSEFNWSKASIKLGIDVHQDFYVVVKQEEGSNPKPAQRFRKEAFVHWAAKLKRQGGEIHAVYEACGFGFGLQRQLSALGIQCHVVCPQKLDERNKRVKTDGLDAKALCLKLDRFVLGNREALALVRVPSEEEEQLRAIHRKREQLVKARKVLEAQGRSLMVNHGIEPVQQWWKRRAFAQLSVPEWMKELLSQSQPILLLLEEKIRALTAQLQGAAEPKQPRGFGGLTSVVIDREVGNWYRFSNRRRVSSYTGLCPGEYSSGNTRVQSCVTKHGNPRLRAALVEAAWRLVRFQPDYRAVKKWRHLLAKGALATGAARKKAIVAVARQLAVDLWRIRTGRVSAAQLGLII

SEQ ID NO: 432606 - protein, 321 aa, unidentified
MTAKLFIGIDICKARLDIADDAEALAWSVAHDDAGITSLVARLQPLHPTLIVMEATGGLETFLYAALTTAGLPAVVINPRQVRDFAKALGTLAKTDALDARILARFGAAIQPTVRPMKDATTQELTALVTRRRQLLTMLTAEKTRLQQAAKWIRPDITAHIASLEKRLKKIEGHIAKLIHTTPGWKETDSLLRGVPGVGIVLSINLLSSLTELGTLNRRAIATLVGVAPLNRDSGTWRGRRRIWGGRAQIRAALYMAALSASRHNPVIKPFYQRLIAKGKKPKVALTACMRKLLVILNTMVKTQTAWNPGHFSPLDFNHGC

SEQ ID NO: 432607 - protein, 390 aa, unidentified
MNNSFDASIQNVGVDISKDHFHVVLSLANAEQHIKVKASRKFSNDGTGFWQFEKWIASKRVKGVNLRILMEATGIYFEQLAWFLHQKGFSLSVILPTKAKRYLQAIGNKSKNDKIDAKGLAQMGLEQRLPEWKPLSPNIYRLRLLTRQLEDFHKQRTAFLNQLHALQYSAYKVSEVEKSLKKMIKELERGISQLEKAISNCVEQDAMLKSKVEKITSIKGVGMKTVAVVISETNGFANFENQAQLVSYAGYDVVENQSGQKSGKTRISKKGNAHIRRALHLPAFGVVKNGVIPFKAQHQRLLDRNKTKMQAYVAVQRKLLILIWALWRKDEPYDPDYNQHVKKTSSNEEPKLLFSLGSEGDRYKVAPDKTRATLDGLPCNESPGALFSLE

SEQ ID NO: 432608 - protein, 447 aa, unidentified
MKSNTQNAKIEAITEKTLVLGIDVGSETHYARAFDYRGVEYSKKPFKFSNTEAGFVTFKAWVLDIKEKHGKDKVIPGMEPTGHYWFNLGKFLQDNEMKPVLVNPHHVKKSKELDDNHPTKNDRKDPKVIAGLVREGRYMIPYLPDGVYADLRTASNIRFQLQAELTRIQNRINRWFNIYFPEYKTVYGKPDAKSGILILKEAPLPEDILTLGIDGVNQIWRDAKLRAVGKARAKTLIEAAEHSVGSKEGAVSARMEIRMLLEDYESRNIRLQEVMGLIEGLVNQIPMAEKLLEIKGVGIKTVSGFLAEVGDIRRFNDPKELQKLAGLALVENSSGKHKGKTTISRRGRKRLRYLLFEVAMSLVAKNPEFRELHNYYTTRRLNPLKKMQSLMAIAAKLLRVFYAILTKGVGYDPKKMVNDIRRPAAYAQATEEKQVTIVEAVIWAATE

SEQ ID NO: 432609 - protein, 436 aa, unidentified
MRILYQRCAGLDVHQASVVACALVVRDGNRVEEEVRRFGTMTEDLKALAVWLKSHEVERVAMESTGVYWKPVWNILEAAGLDQLLANAQQVKALPGRKTDQKDSQWLADLLMHGLLKNSFVPSRVIRDLRDLTRSRARLAQWHGTISNRIQKVLEDANIKLSSVASDVLGASGRLMLQAIMQGKTDTSELADLSKGRLRAKIPELRKALEGHVTGHHRLLLSRHWEQFQFLGKQIAKTDAEIARRMKYTPEELAQVKAALPPGVPIPPCPRQAALEYWMELPGISVISGSSIVAEIGADMKQYPSAAHLASWATLCPGHDESAGKRRSGRTRKGNKWLRRTMSEAAWAASHSKDTYFAAQFRRIASRRGKKRANIAVAHSLLVTGYTMLTHGSHYQEVGACFFDSLNRDKVKKSAVKKLEALGYEVTLKATEPAAH

SEQ ID NO: 432610 - protein, 359 aa, unidentified
MIVVGIDPHKKTHTAVALDAATAAVRGEICVGSDRAGQGRLLAWVRALDTEHLFALEDCRHVSGSLERFLISRSERVVRVPPKLTARARRSSRCRGKSDPIDARAVAEAALREPNLPEAHLSGPEHDVRLLIDHRDDLVGERTRIQTRLRWHLHDLELGSDVPTGALDRFVWLDRLAAEIAAVPTGVQTSIAADLIERCRSLTVEIRRLEREVTAVMRTIAPELLAHPGCGAIIAARLVAETAGASRFRSEAAFAMHAGVAPLQASSGQTSRHRLNRSGNRRLNSALHMMALTQARSYEPARRFMERKRAEGKSNREAMRCLKRHIARSVFGTLKRIERSAAGQLIEVAFRTEGVAIAV

SEQ ID NO: 432611 - protein, 343 aa, unidentified
MKHYAGLDVSVEETSVCILDETGRICREVKVTSHPEDLRRILQDPIWHFERIGLEAGQLSQWLFDALADAGLPVVCIETRHAKAFLKAQVNKSDRNDARGIAQMMRVNLFRPVHVKTLTSQKRRVLLTARKLLQEKAIAIENDIRGLLLNFGLKVGVVGAAKFEERIHELIRDMPDLAEIVERLLDARRRLREHFAALHRKLLALARGDAVCRRLMTIPGVGPVVSLAFVATIDTPARFRKSKAVGPVLGLTPVRSQSGNTDRVGRISLCGDGMMRTLLFEAAQTMLRQTTRWSWLKAWAMRVAQRRGSRKAVVALARRLAVIMHRMWCDGTEFRWTREAPVA

SEQ ID NO: 432612 - protein, 387 aa, unidentified
MNKSNRVIGLDVHPDSFAGAVLLKGKDAASARVVSTSRRVELPELEKWVARHTGEQDVLVLEASGNAFAVAERLRVLQRQVVILDSHRAGKVGKAYCANDRVDAIKVARIYLTALSPVVWQPDAKTRERREVFSAYQAVVKEATRLKQQLRSMLNEHCVRLESGFRLSHPSAINRLLKLREWTPVRAMLLEQLHRGLVSAQARRTRLRRYMAQEVLDEPELLRLTRLCGISLITLYGLSASIGDIKRFSNSRKLSAYFGLNPSVEQTGNWEGEGALKRHGRGALRALLVQSAKKLLRVNNPLQKWGLAVATRRGRNKAAVAVARKLCVAVWHVMQGHVIGAIERMTTLHTKLHKLATELGLNTIKSQGYETKEAFVQKKLFVLRSYA

SEQ ID NO: 432613 - protein, 449 aa, unidentified
MSVQKLASEKDKNIYTRRSSTMNYNQNDKIAQITSHTLIVGVDIAKFKHVARAQDFRGIEFGSACHFENTKDHFELFLDWIKNLLEKHGMDNVIIGMEPTGHYWLNLAHFLREEEIKFVVVNPMHVKKSKELDDNSPTKNDVKDAKVIAQLVKDGRYAEPNIPQGVYAELRVARKIRDLLSVDLQAVQGQIHNWLDRYFPEFLTVFKDWEGKSALQLLKLNLLPHELEKVTEQEILVHLRKAVKRAVGLSKIQELKRVAKDSIGILEGSRMAKLELRTLLDKYELINEKFEELESNIDELLERIPGVQQMLAITGIGKDTVAGFFSEVGNLSYYSHPRQIIKLAGLSLKENTSGKHKGQTKITKRGRKKLRALLFRVAMPLVAKNTAFKALHAYFTTRKNNPLKKMQSLIAICNKLIRILFAIGTKQCEFSEERMLKDIPHLAPLQNAA

SEQ ID NO: 432614 - protein, 341 aa, unidentified
MKNKSFIGIDISKNVIDASIFCKGAPIKDFPHAVFNNSRKGFSEMCTWLKKNHVVLLNSLFGMEFTGSYSMELEKFLNARNYQFCMLSTHVVKHYPMGPKDKSDKIDSAKIADFLYRYDGTECVKPYKMPDKTMQRLKALTKERKFLVEQRTCFMNRRQLCTTKEAAQLYDGYIKEFSHDIENIELKMQNLLEADDSLSTTYKNLLTIPGIGFVNAMNVIVITRNFTAFETARQYASYIGVAPHFHTSGTSVKWRPRPSARCDGQAKADLSMAASVAVQCDAELQSFYNRKLGGKQDSDTKRKALNAVKFKLVLRMFAIGKQNREWEPLDSKSSNEKLAIS

SEQ ID NO: 432615 - protein, 396 aa, unidentified
MPEIWAGVDIGKTHHHCVVINADGRRLLSRRVANDESELLALIGDVLEVSADVLWAVDLNHGGAALLIGLLVSHGQQVAYLTGLAVHRASATYRGEGKTDAKDAFVIADQARVRRDLGLLRPGDEIAVDLRTLTTRRLDTVFDRTRQINRLRAQLLEIFPALERALEMTNRGPVMLLTGFQTPAAIRRAGASRIETWLKNRKVRGAAALAKTAVEAAQAQLTALPGEKLAAAMVVRLAKGVMALDEEIAELDALIEARFREHPHAEVIRSMPGMGTKLAAEFIAATGGDMDAFGSPDRLAGFAGLAPRPRDSGRVSGNLRRPRRYHRGLLRTMYLSAMVSLQCCPVSKAFYDRKRSEGKGHKQALLALARRRLNVLWAMIRDGECFHASPPVTGAA

SEQ ID NO: 432616 - protein, 339 aa, unidentified
MHVTTIGLDLAKNVFQVHGIDESGEVAFNRALRRVQVLAFFERLDPCLIGIEACGTSHHWARELIKLGHNVKLIPPAYVKPYVKRGKSDAVDAAAICEAVTRPTMRFVEVKTPEQQAILSVHRSRDLIVRQRTQTINMLRAQLAEFGVVLPQGVYHALTFAKTSVNGEPLQLPQDAQEVVFDLCEQLLFLHAKILRHTRHMTQIAKREKRVALLRTIPGVGPITASAIVATVGSGEQFNNGREFAAWLGLTPLNRSSGGKERLGHISKMGDQYIRRLLVLGMTSRIRSIRLEPEKFDPWFADILSRKPSRVAAVAMANKTARMIWAVLTRNEPYKVRTV

SEQ ID NO: 432617 - protein, 397 aa, unidentified
MYIVGIDIAKRKHEAAVIDGEGTVIIKPFSFTNNCSGYNRLLAMLAKAKLPLDEVSFAMEATGHYWLALFTRLQKEGFRVQVINPVQTNSIRSFYIRQAKTDPRDALLIAEVIRFGHFSESTLHPENIYELRELCRGRHAIVSMQADVKRKVVALLDQVFPEYETAFTNMFSDTSMAILQTCPTPKELSEMPLEELCHLIEVSSHKRFRMAKAQELQALARNSFGFAMAGDVFSTMIRLYAKHLDFLKQQVREMDRKIAEIMDTLDTPITTITGIGPTLGAYILSEIGDISRFSSAAKLAAYAGIDPTMRQSGEYNGVRNRMSKRGSPYLRHAIWLAASSAVLHDPALKLYFQKKRDEGKPYMASVGHACRKMVSIIYAVMRDNKAYTPCIPNEISA

SEQ ID NO: 432618 - protein, 387 aa, unidentified
MPASGSRPGQVAVEVSLAAIFVSLELSRSTWLITSLVPGGREKMSKHSVRGGDIAGLLNHLTKLRDKAHARAGASFPIITIQEAGLDGFWIHRVLDRAGIESHLVDAASILTSRRRRRAKTDRIDGEALLRTLLAYKRGEPRVCTIVRVPSPEEEDRRRLCRERKTLVAERVAHVNRIKGVLFAQGISDYEPLRGDRRQRLEAQRTGDGHPLSPHLKAQIGRELDRLELLLEQLKAVEAERNALLEPANDAAPVAVQALAGLRGIGPEFTAVLWSECLFRSFRNRRQVAAYAGLAPTPWQSGSVRHEQGVSKSGNPRLRSTMVQLAWLWLRHQPTSGLSLWFRERVKRDSGRSKKTTIVALARKLLVALWKFSSSGVVIEGAMMKTA

SEQ ID NO: 432619 - protein, 360 aa, unidentified
MNTTLTAPSATTVAIDLAKDVFELAYVDADGRIVARQRLGRSAFAKVFDNRAPLRIVMEACGSAHYWGRRFRRLGHGVELLPAHDVRPYVHRTKTDRADAAGLWEAARCAAIRPVPVKTVEQQGIQGLHRAREFHKAQRTAAINLLRGLLREFGVVIPAGAAKVRPAVLAALEDADNELPMALRETLLAVLDTIATAQRAMAAIETSLQEYLDRDLRSQRLLRAGGVGVLTATALSASVGEFERFPSARHFASCLGLTPREHSSGSRRRLGRVTKRGDVYLRTLLIHGARAVLRSAKVAHGKSRPLDRTQAWALALAARIGHNKAAVALANKTARRLWAAEHHRTSFDPDHVSAMPATAH

SEQ ID NO: 432620 - protein, 319 aa, unidentified
MSRRPRAVYVGIDVARDQLVGHIRPLDQSFVFANDAAGHRELSKMLKGLRPHRIVLEPTGGYERLLLKALHHAALPAFLVNPHKLRAFAQSTRGLAKTDPLDAAALAHYAEIWEPPTPIARDPMAERLAEHLSWRALLVERRTALLNRSAQLLDPALRRRARIALAQLNAEITLAETTMRRIVAEHPDLAALWRRLKTAPGVGDLSAFALIAKLPELGRLDGKRIASLVGVAPHPWDSGRLSGRRIIQGGRFELRRTLYMAVLAAVRRPGSLRTFFLRLHANGKPTKVPLMAVLRKLLCRLTAMIRDQRDWEEPHIVPA

SEQ ID NO: 432621 - protein, 316 aa, unidentified
MSKKKTFIGIDVSKAVLEVAVHNHDPRFAVANKESAFPELIAELVSLRPKRIVLEATGGLEIPVVSALYAAGLPVVVINPRQIRDFAKATGQLAKTDRLDATVLAHFAAAIQPELRRVKNAAELELDALVTRRRQVVEMLAAEKTRLSSTATAAMRTEVRTHIEWLEQRLDDIDEQLRTRITDSPVWRVKDDLLQGVPGIGPVTSLALVAEVPELGQLNRHQVAKLVGVAPLNRDSGKLRGQRHIFGGRQAVRNTLYMAIQSAVRHNPVIKEFYQRLLANHKPKKVALVACMRKLLTIVNVMIKTNTKWQLAQKSA

SEQ ID NO: 432622 - protein, 343 aa, unidentified
MQTVTTIGFDIAKSVFQVHGVDAVGQVVIRRQLKRRHVLGFFEKLPPCLVGIEACASSHHWSRELQALGHTVRLMPPAYVKPYVKRQKNDMADAEAICEAVTRANMRFVPTKTPEQQSCLMLHRTRHLFIRQQTALINSIRAHLAEFGIVAPVGRRGVTELLHIVADPKDKRVPEVARACLAALGAQLLSLKEQILEFDRMILAWHRSNQTSKRLHYIPGVGPMLATALVASVVDPRTFRSGRDFSAWIGLVPKQHSSGGKERLGSISKQGDRYLRSLFVAGALAVIRYAKIHGTGHRPWLTALLGRRPTKVAAIALANKIARMAWAMMAKGERYRNPVALAR

SEQ ID NO: 432623 - protein, 428 aa, unidentified
MDFEVKHLICAGLDVHKKTIVAAVCMTDPVTLEAAYKMKSFSTNNSQIAAMRDWLLSYNCHDVCMESTGKYWIPVFNILETHMHVVLTHPKYVKAIKGKKTDKRDAKWIANLFRFDIVKASFIPPADIRALRELSRYRLRLSYMRSAEKNRFQNSMTISRIRIDCVLTDPFGKTASSIMDYLLSDVPFYETECAKLIHGRVKASNEEIFDSIRGFEILSEQRFKMSHAKQHMELLSSYMDDIETELFRLSRSYDEVIKRISGIVGFTERSALFVISEIGADMGVFESAKHLCSWAGLTPANNESANKKKSTRCSKAGQYLKPLLIQCALAAVKSKKNPYYAIKYKRLAKRRGRKKAVIAIARMMLTSIYHMILNNEEWKPDDYEDIIHPSKPVKVALTLDNVIQFLGEQGADPETLKLLQQQCAVTPG

SEQ ID NO: 432624 - protein, 379 aa, unidentified
MTWSAAITTDEHTLYAALELSKNSWLLAIQMPGRDNPSLHPIKGGDADGLIAKLDAARDRVAKVTGQVPKVTLCYEAGYDGFWLARLLEQRGITCRVMDPASLQVNRRARRVKTDRIDVENLLHTIVAWHRGERHVCSMVVIPSIEEEDLRRSHRERERLVRERTAHINRIKALLFGQGIRGINVKARYKTLVPAKLITAEGHPLPERLGREIVREIDRLALVQEQIAEIERERDLAPTPCAATERKRHQLLCLNGIGQATAPILAREVYYRRFANRGQVASYLGVTPSPYDSGGSRRSQGISKAGNRRVRTVMIQLAWLWLKHQPQSALSQWFNRRTQGQSKRMRRIMIVALARKLAIALWRYLEQGLIPDGAIVKPR

SEQ ID NO: 432625 - protein, 330 aa, unidentified
MKNYKEVVGIDVSKKTIDAYCYQAQVHKEFKNDIVGYKSLLNWVLKVSKGVLVFYCFENTGYYSLKLALYLNSQKVVYVEESPLKIKRSSGIVKEKTDRLDASLIARYGWIYREELSPSTVKSTAHLELGRLLALRDQLVRNNAGLKGTLKEMKVFLTSSTTDAGCISLKRSIDYLSKQVKAIEIRIEALIFDDVLMQKNYELLSSLKGVGFVVACQLIYHTGNFTRFDTWRSFSSYCGTAPFAHESGTSIKRRKQCHYLGDRKMKSLLSMASISAIQHDSELRIYYKRKLAEGKDKMLAINNVRNKLIARAFAVVKRGTPYVVLQNYAA

SEQ ID NO: 432626 - protein, 494 aa, unidentified
MSTASQQEQGKKGSDAPRSASKRKARDSQSPQGKGHRRRSKETRSELTITNPDAAGIDVGARTHYAAVPVGRAEVSVRSFGSYTAQLDELVKWLKDCAITTVAMESTGVYWVSLYQKLEEAGFEVLLVDAHQAKHVPGRKSDVQDCRWLQQLHSYGLLRAAFRPEDSICRLRTFKRHRKSLVQYAGMWIQHIQKALNEMNLHLHHVLSDISGQSGLAILDAILAGERDPAKLASLADYRVKKSQAQIEAALTGDYRPELLFVLNQALQNYRQIQQQIAQCDLGIEKQLAQIADCPNPSQVSEPTPLLSNSTSAKPRKTMPKDALELSLAGHLKRILGVDLTAIPGLNVLAVLTLLSEIGTNMAKWRNEKAFVSWLGLSPNNKISGQRVLSSRTRKVVNRAATILRLAAMVLGHSNTPLGSFYRRKRAQLGAPKAITATARKLGCLIYRLIKNGQGYQETDLHIYELKYKDQILNSLRKRANSFGFDLVEVPQAA

SEQ ID NO: 432627 - protein, 355 aa, unidentified
MKHQATHYLGLDVHQATIAATCRNESGAIVLKATVPTEGKAIVGLVRGLGPRVQVAFEEGTQAQWLHDLLQPLAERVVVCNVRGKRELVNKNDDIDSDLLSERLRLGSLKGVYHGATSVLQLKEMVRNYGALVEDTTRVMQRIKAMFRGRAILTPGTGVYSARQRESWMAKIKETGARQRAQSLFTQLDGLLPLRRKAKAAMIAEARRHRAFKILRSIPFLGPVRVAQIIAIVGTPFRFRGKRRFWPYVGLAVVTHSSADKEIVAGTIRRRRRAPLTRGLNQNHNPVLKNVFKGAATAAAHKDGPLKDLYEKSLARGVAPDMALLTLARKISSVALRLWKTGELWDPKKLTTQVK

SEQ ID NO: 432628 - protein, 443 aa, unidentified
MARNQSRQRFELVHPHCAGIDIGSREHWVAVDRDHEQPVRSFSTFTDDLIKLADWLETLKIEVVAMEATGVYWIPLFELLDARGFKVYLVNSRATRQISGRKSDVLDCQWIWQLMSHGLLRGAFRPDDAICSMRALIRQRASKVRNQAQTLNRMQKALSQMNIQLANVISDISGVTGMKILRAIIAGERDPAVLAELTDRRIKASKETIARSLHGNWRLEHLHALGQEVECYDFFEQQIGACDKAITDALSQLPEREEAPQPSRKILRSPHRCAADQAALHQSLWRVMGVDLTAIPTIGVDTALIIAGEIGPDLSRFPTMEHFCSWLGVAPPTRISGGRQLSGKSQKTLNNAAQALKQAASNARNDKSFIGASHRARLARMDTSCAIKATAHQLARLIYAMLTKGQPYVEQGIEAFEERSKEKQYRALLRKARKLGLDLVRAS

SEQ ID NO: 432629 - protein, 377 aa, unidentified
MKNCTRYLGLDVHAETITAAIAEGRDRIRNLGKFPNRPEAVRKLLEKLGGGRNLKVCYEAGPTGYALYWQLTKLGIDCEVIAPSLIPKKPGDKVKTDRRDAEKLARSYQNGDLTPVWVPTPDHEALRDLVRQRAAAKHDESCAKHRLITLLLRHASREPNGSRAWTHPWWRWVQALKFDHEARQVVLADCIAEVLHMGERLARLDQAIDRMVESAPPHMRAVIAALQALRGVAKLTAVTVVTEVGTFQRFHRPTQMMGYTGLVPCEHSSGSRQAQGGITHTGNAHLRSVLVEAAWHARHRPWLNRRLKQLLPTLPADVAAVAWKAQERLHRKFGKMIYSRKHAGVVAAAVARELVGFIWAIGTMVEAKQTNTVARAA

SEQ ID NO: 432630 - protein, 309 aa, unidentified
MEIVVGIDVSKERLDVAILPQEEVFAVGNDHAGIDELVERLKGIGVDAIALEATGGFEMLAVAGLSAAGLTVLVVNPAQVRAYAHAIGRRAKTDPIDAAVIAAFVLATKPEIRPLRDAETQALSELVARRRQIVQMVVAEENRLRMALAKQAQESIKRLLKALRRELESLDADLDSHIRKSPVWRVREALLTSVPGVGATTARTLLAELPELGSLDRRQIASLAGLAPWTRQSGKWKGKSFIGGGRGKVRAVLFMAALVASRYNPDLKAFRDRLVAAGKPKIVAIVATMRKLLTILNAIIRDGRPWQTA

SEQ ID NO: 432631 - protein, 315 aa, unidentified
MDTQVFVGIDVGKDVLFVAIRPFGDNLEIANREDGIVDLVKRLRFLRPTLVVMEATAGYETPVAVAIYRAGIPVVISNPRLVRSFARATGHLAKTDKIDAGVIAHFAELIRPEPRRLEDPDEERLGRLVKRRKQLLRMIVMEKNRVAKGVPEVRKEIQKHLDWLAKDLERIDQALNDFIQSSPIWSAKNDLLQSVPGIGKVGAQAIISDLPELGTLNRKQIASLVGVAPLNRDSGNFKGRRSIWGGRAHIRTVLYMVAVVASRCNPVIKEFYERLCKAGKPKKVALTACIRRLLAILNAMMRNGTRWGEFKPAIT

SEQ ID NO: 432632 - protein, 333 aa, unidentified
MNQLTRYYGLDVSKDTLHISYQTGTDASGQPQWAYQTLPNELDALEQWSTQLPPNSHLIFEYTGTYSARLAWVLALHNRPFSILTPSQSKGFATTLKSISKTDRSDAALLARYGQVFQPQPSQLAEESLHQLRQQHKHLNDLRISQQAVANQLHALSFDPRASQKVKASLGILQQSYLTQISLFEDDLDQMSQQELQAISERMQRVKGIGPAWAQALCTATNGLAGFESAKAVAKFVGLAPSQTQSGSSVHRRGRMARTGLGYVRGLLYMAARSARKYNLGCKALYERLRAKGKCHKVAMVAVMNKLVHQVFAVVKNNVDFVNGFGLPKQNLA

SEQ ID NO: 432633 - protein, 353 aa, unidentified
MAKRSQPRPVLKAVPMFKNESVYIGVDIGKRKHVAGFLSRSLLLRHERFEACPAHSFENSREGFRSFINCIREFSALEHVYVLMERTGHYHRPLQQYLQELDLPVYVMHVQTRQEGMLKTDKRDALTLANTLYSQLELGVQVPNKVQLVRRVVPPTETVDQLKGLIRHRYELIRESTQRKNKLTAICDELFPELVQILKNPNGTVALAIRERYPTPQILAVASLTTLREIRGGARILSDAKLVELQRLAAQSIGVKEVARQRGLVLEQGQLIKELQLLQTHVEQLDREIQQIMEHAREGQILLSFPGIGPIAAATIIAAIGSIHNFPSASALKSYFGWAPVVAQSGSSWIIRD

SEQ ID NO: 432634 - protein, 319 aa, unidentified
MGKSNIEFEQVIDRGCGLDVHRDTVVATVMGKGIKTETRTFGTTTSSLNELGVWLESLKVTDGAMESTGIYWKPVLHILSTYPLNLMVVNARHIKNVPGRKTDKADSQWICKLLLSGLLKGSFIPPENIQELRDLHRYKKKLIGTVASEKNRIIRVLEDANIKLSSVVSDTMGITASYLIKGLIEGRKDLEKLIAECYHRKLKASPEQIKEAITGRLTAHHAFILKSMQKHIASVEEQIAEIDVEIEKYIKDFEKEIELLQTIPGVGKEGAIGIVAEIGVDMDVFPSEHHLASHSGMCPGNNESAGKKKVQEHDRGTNI

SEQ ID NO: 432635 - protein, 343 aa, unidentified
MKLSRVGVDLAKNVYQLHGVDRHGKAVWKRRLRRAQWLQALLDNTDPSCEIGMEACTGSHHWARELQSRGYTVRLIAPQFVKPYVKSNKNDANDAEAICEAMSRPHMRFVTVKSVEQQDIQATHRVRTELKDHRNAKANQIRGLVAEYGLVAPQTLLALRRAIPEWLEDADNGLTDYFRSVLHGLWDDLLSLEDRFIELDKQIEKLARSNEVTQRLQQLRGVGPIVATALVATVGNGEQFSNGRQMAASLGLTPRQSSSGDKRRLLGISKRGDVYMRTQLIHGARAVVSQAKHRDDPLSCWATDIAKRRHPNVAAVALANKTARMAWAMLHNDTDYDPSLAVG

SEQ ID NO: 432636 - protein, 334 aa, unidentified
MEKVTTLGIDLAKSVFSLHGVDGAGQVVLRRTVRRDQLVKVVAGIAPCLIGMEACSGAHEWGRRFQEHGHTVRLMAPKFVAPYRKSGKNDGNDAEAICEAVTRPSMRFVPVKSVEQQALLAIHRVRQGFVVERTAIINRLRGLLCEFGVVLPLRSVTVRRQAAQAAENLPDLARCAIGDLLDELRSLDERIGGYDREIEAQAKLCEPAQRLMKIRGIGPTTALAIVATVGNAREFKNGRQFAAWIGLTPSQYSTGGKARLGHISKRGDAYLRNLLVQGARSVLNSAGRHQDRMSRWILELQPRRGYYRTLVAIANKNARIAWALLAKNETMRSV

SEQ ID NO: 432637 - protein, 422 aa, unidentified
MLEETQDEQEIIARVAALDIGKAELVCCVRVPDPKGGSRRVQEVTTYSTMTRSLQVMADRLLDLGVTRVVMEATSSYWKPPFYLLEAHGFQTWLVNARDVKNLPGRPKTDRLDAVWLCKVAERQMLRPSFVPPVPIRRLRDLTRYRIALVSDQGREKNRVEKLLEDAQIKLSVVASDIFGISGRDMMAALIKGERNPQVLAQMARSRMRTKIPQLEEAFVGYFTDHHRFLLAKMLARIDALDADIADVETQIEAQIAPFADAVARLDEIPGVGATAAAVIIAEVGVDMTRFPTPAHLSSWARFAPGVKESAGRKKGTGSTGHGDRYLARALGEAAVSAAKTDTFLGERYRRIARRRGKKKAIVAVGRSILVITWYLLSDPEAGFHDLGSGYYDSRINPERKKRNHIRELEALGYKVTLQPAA

SEQ ID NO: 432638 - protein, 347 aa, unidentified
MSITRIGLDTAKAVFQVHGVDEAGKATTKRKLQRSEMIPFFEKLEPCTIYMEACGAGHYWARVLIGLGHDVKLIAPEAVKPFVKKGKKNDPADAAALCEAGGRPNIKFVSVKTVEQQAILAVHSVRALLVKQQTMLSNAMRGLAAEFGLIVPKGIDKLVELMAFVDADASVPKQARQAGKELLDQREAVGERIETLEAEIIAHARQDKAARRLATIPGVGPITASLIAATVADFGVFKRARDFAAWLGLVPRQHSTGGKTRLGRITKTGNREIRKCLVLGAQSMTFRARQWKSAAGVWTDSLLQRRPVRLVTVALANKIARIAWALMTRNEVYHAKGRVVAAAKAVA

SEQ ID NO: 432639 - protein, 356 aa, unidentified
MMKTQVKKIDFSNQNIYCGVDVHKKRWQVTICTEHMVQKSLSFERPFVDKLKHYLDKHYPGGNYYVAYEAGFSGFWPQKALKAAGMEAIVVNPADIPTTDKERKHKNDKRDSRKLALSLRSGELRGIYIPDDTALQHRSMVRERWSIANSERRVKNQIKCHLMFHGMEIPQEMDRSYWSRRFIGWLEQIQKEHSDEALAFKINRLLILRQLQVQATRSLRELAGHERYVKTYRILRSVPGVGLLTAMLLLVEIIDIKRFPRFAELCSYVGFIPTSKSSGEQERYGEMTNRKNNRITSGLVQSSWSAIKSDPELLMKYEHYRKKMGAQKAIVRIAKILLRRIRMVWLTQTPYQKSEF

SEQ ID NO: 432640 - protein, 442 aa, unidentified
MNAISIGIDVSKGWSMVAAIRAPRETVWKPRKVMHTAAALETLAYEIKGLGYDGGAEVRVVMEATGRYYESMANELHEVGNFVSVVNPKLIKDYGHNTLRKVKTDKADARKIARYGLEYWDDLREYTPVEAARRKLKQFSRQYNLYNKMKVQLTNNFIALLDQVFPGANELFDSPPKADGRQKWVDFVTTFWHCECIADMSETAFIERYRKWCKRLRYNFSQTKAADVYICSLGHITTLPKNANTKLLITEAAKQLTSISRMVEIFRAEMLRLAQMMPEYEVVMGLYGVGPTIGPQLMGEIGDVRDFASRKALVAFAGVDPGDNSSGKHESKSNPSSKRGSALLRKVLFLAVETYVMKQPSDEPVYQFYKKKRAEGKEYYVCTTACANKFLRIYYARVKEYLDKTLPEEDRFPCQGQGGDFLPLQDSNGKKYDPTLTTLHKA

SEQ ID NO: 432641 - protein, 331 aa, unidentified
MYFSHYIGVDISKATLDVAVYPATDKKTDFMHIENTTKGLREMMSWLKQRGIKPTEMVICAEHTGAYTNQLIDFTHKKGIALSLNSPLDIKRSMGLVRGKNDVVDAARIAEYAYTKREKLRLYEKPEESIIALQYLLTERRQYIRQRTSLLNFKSSLNEYETSAARARNKTAINSLNMLIQRTEDQMYSVVCKSPEIKRSYDLICSVKGIGLINALNTIVFTNNFKSFDSPRKYACYIGVAPFDHTSGTSVRGKTQVSKICKTQQKSELSMAARCAITYDPGLRKYYQRKMKEKGGGHEMHGVVLNAVKFKLILRMFAVVKSGVPYKVLNY

SEQ ID NO: 432642 - protein, 341 aa, unidentified
MKQEMHVLGIDIAKRVFHAIGMDNTGKLVFRKRLSRHDLMPFMAKLPPVRIGMEACGGAHYWARRFREHGHEVKLMAPQFVKPYVKSNKNDSRDAEAIAEAVTRPTMRFVPTKDVAQQDIQALHRVRERLIGERTALVNEVHGLLHEYGIVMPKGVSKFRQAVVEKLESEKDKLTALSQEMFWKLVEEFAALEKQLAYYQEKLDTLATTHPECQRLMTIPGIGPLTATALVAAVSDASAFKNGRQFAAWLGLVPRQHSTGGKERLLGISKRGDTYLRKLLVHGARATIRWVGRKTDRRSQWMRQLLERRGHNRTAVAVANKNARIVWALLTHHQDYQPATS

SEQ ID NO: 432643 - protein, 330 aa, unidentified
MAKRVFQLHWVDMETGEICRRQLKRDQVAEFFANREPALVAMEACGSAHYWGRKLKGFGHEVRLIAAQFVRPFVKTNKTDAADARAIWEAVQRPEMKFVALKSEAQQGVLSLHRMRSQLVKIRTMQTNQLRGLLYEFGADLPPGRQKGMARVAEELGRLEHSLSPMVIEVVREQLKRIEKLDEDIADIEKKLAAWKKEDKSAKKLMAIPGVGLLTATAAVATIGDAKAFKNGREFAAFVGLVPRQSGTGGRIKLLGISKRGDVYLRTLLIHGARAVITHQKEREPWLDKLLARRPFNAVAVALANKMARTIWALLAHDREYQRGYVAKAA

SEQ ID NO: 432644 - protein, 429 aa, unidentified
MKIIYPRVCGIDVHKKFIVAVICISESVEPIYLKKRFSTFHNDLIRFREWLIQNDCQNVCMESTGKYYIPVYNVLEAHISNIVVANPKWVRAVKGEKDDDKDAKWIADLFKFGIVRSSFIPQKDFRILRELTRYRYKLVNMRSSEKNRFQNALTSGNCKLDMVFTDVFGKSASNIIDLILSDNPYTDEDILSKVHKKCKASPDMILDSVNGTDLTPVQKARIELVNDHIKQLSSNIQNLDKLIDLMIEPYEDYISFLCQIPGVSRNSAIIILSEIGIDMNQFTTSRRITSWAGLTPSSNQSAGKKKSVRISRAGVYLKPCLVEVAHAAVKDKSHPYYANKFNKISKRRGKKRAYIAIARKILVAAYHMLLTGEIWNPADLSEVETPVEQRLKYVKNNLKSDIKQLLDIGLTVEELTLMIQQNANIIATQ

SEQ ID NO: 432645 - protein, 374 aa, unidentified
MAYSIHEKAVSRVSLKFTKTIKDMNTQITASPKLYIGIDIHKRSWKVHCSTDLFCGKSFSMPPEPEQLKAYVDKHFSEHKVSTAYEAGCCGYYAHRCFESYGWHSLVVNPADIHRKGKERFTKTDRIDAQLISRELKDGRLSSIHVPDIHREALRSLFRRRYDLVKDFRRVKSYIKMQLLYFGIKVPEQYDNDHWSHGFRSWLDNMIFQYPIAKASLESRMRHFRFIDEDLRLVSNQLRAYCRKHFKKDYYLLRSIPGIGGIVACGIICELGDLRRFNNLKHLAGYVGLAPGVYQSGANSKTMGITPRAHRLIRSYFIEASWQAIRTDPVMQSYYRKHSGKDSKKIIIKVARKLLCRTLAVIKTETPYEIGVVE

SEQ ID NO: 432646 - protein, 412 aa, unidentified
METVVERPAALDVHKAQVTACARVPGTGGRREQHIAEFAATVRGLLELRDWLAGHGVIQVVMEATGVYWKAPWAILEDEFDCMLVNARHVKQVPGRKTDVSDAAWLCQLAEAGLLKANFVPPKPIRQLRNLTRYRKTQIQERAREVNRLHKALEDAGIKLDTVAADIMGKSGRDMLDALVAGETDPEVLADLARRQMRKKIPALRDALAGHVDAHHRLWIGAILRHIDFLDEQIEQLTGMIAEQIRPFDPAVELLCTIPGIQHRGAQCIVGEIGTDMTRFATARHLASWAGVCPGNDKSAGKRRSGKTRDGSKWLDFALEEAAMAAIRVKGHYLEAQYRRLKPRRGHKRALGAIKHTMICAIWHMLTTGETYRDLGGDYFTNRNPERQTRRLVAQLQRLGHHVTLTEGAAAA

SEQ ID NO: 432647 - protein, 346 aa, unidentified
MMVVGVDPHKQTHTAVAVDGLGRKRGQKTVKARRDGHLTLLVWARARAADQRIWAVEDVRHVAGGLVRDLLGAGERVVFVPPKLMAGERRGGRERGKSDPIDALAIARLALREDLDLPVAQLDAQTRPVRLLTDHRDALVKHRTALVNRLRWHLHDLDPALAPAPGALSSAPARARLAAALQQLPETTTRRVALAQLGFIDTISAEIDAVEKELAPLVRALASVLLAIVGVSILTAAKILGEVGDIRRFRSLAAFARHNGTAPIPAWTGNTGVQRLNRSGNRQLNAALHRIALAQARSHHGARQLLDRRQQTTRDTKLGSLRVLKRHLSDTIYHAMITDVQQRQAT

SEQ ID NO: 432648 - protein, 358 aa, unidentified
MAGKVTETAVVGGVDTHKDLHVAAVVDQNNKVLGTQYFSATRQGYRQMLTWMASFGTLKRIGVECTGTYGSGLLRYFQNAGLEVLEVTAPDRMERRKRGKSDTIDAECAAHAAFSGIRTVTPKTRDGMIESLRVLKTCRKTAISARRVALQIIHSNIISAPDELREQLRNMTRMQLIRTLGTWRPDAREYRNVTNVYRIALKSLARRYIELHDEIAALDVMIAAIVDELAPELIKRNAIGYESASQLLITAGDNPQRLRSESGFAALCGVSPVPVSSGKTNRYRLNRGGDRAANSALHIIAIGRLRTDAKTKEYVARRVAEGHTKMEAIRCLKRYISREIYTLLRNQNRQVNSIPITA

SEQ ID NO: 432649 - protein, 340 aa, unidentified
MEITTIGIDLAKNVFQIHGVDAHGKAVLKKQIKREEMVVFFANLAPCPIGMEACGSAHYWARKLQIQGHTVKLMAPQFVKPYVKTNKHDAADAEAICEAVTRPTMRFVPVKHVEQQSVLALHRARQGMVKARTAQANQIRGLLAEFGLVVPQGITHLYQRVPLLLEQANEELPGLFRQLVQQLLEHLKILDRQVNEMEIQIQMWHRSNPLSRKLEKIPGIGPLTASAMVASVGDAKSFNNGRQLAAWLGLVPKQHSSGGKPTLLGMSKRGDCYLRTLLIHGARSVIYALKRRPPTTGWLANLLARRDKNIVAVALANKNARIIWALLAQDREFRSDYVMP

SEQ ID NO: 432650 - protein, 416 aa, unidentified
MTFKVVRFICGGMDVHKNLIVATIGTTDRQTLITEYIQQSFSTFYSDLIRLKEWFISHDCYDVCMESTGKYWIPIYNVLETELNICLTHPKYVKAIKGKKTDKRDSKWICDLYKCDLVKHSFIPKKEIREMREIARYRCKLVYMRSSERNRYQNCLTVSNISLASVVSDPFGKTATNIMKELMQSEVIEDDKILKLIHKNCKDKGKILDSLQGYRIESDQRFKMDTVMNHIEYLDKQIQACEAELIKRAYPLRDYFQHITHIKGISALSAILIVSEIGTDMNQFESDKQLVNWAGLSPANNESANKKKSVRISKAGQYLKPLLVQCALSSIKDKNSYFGIKYCRIKKRRGHKKAIIAIARMMLVCIYHMILTGEEFNPCDYESLTNPKPKKEPIMTVESALQFLKDSNFDFSSIQL

SEQ ID NO: 432651 - protein, 345 aa, unidentified
MGQVIRIGMDTSKYIFQLHGVDASEQVVLRKRLSRKAMLEFFVKLPPTVVVIEACGAAHYLARELGKLGHTVKLIAPQLVKPYVPRNKNDGRDAEGLCEAASRPRMRYVPVKTAEQQAALMLLGVRDQLVARRTQLSNTIRGHAAEFGLIEAKGLDKLISFMAAIERNERVPVLARELFAMLARQYDQVQVELKAIEAKLLAWHRGDALSRRLAQIPGIGPVTAAALVMEAPDPHAFRSGRLFAAWLGLTPKDHSTGGKTRLGKITRAGDERLRQLLVVGATSVVKQAKAKGRGPRWLLELLKRKTPKLAAVALANKMARIAWKLMTTGQSYDSARIDAHMAVAA

SEQ ID NO: 432652 - protein, 370 aa, unidentified
MKKSVLYVGLDVHKMSIDVAIAESGAAGEVRYYGQIGGDLDSLDKVIRKLKAKGAQLRFAYEAGPCGYQVYRHLTAKGYYCLVAAPALIPRRPGDRLKNDRRDALNLARLLRAGELTPVKVPEPDDEAMRDLVRAREDAKSVERRAKQRTAAFLLRHGQRYPGKTTWGRGYWRWLRQISMPRAAQQIVLQEYLDAVQEATARVQRLTAQIRELLPEWRWAPVVRGLQALRGVSLIVAATVVAEVGDLSRFHNPRELMAYLGLVPSEHSSGATVRRGPITKTGNAHARRVLVEAAWAYRLKARVSRTLWQRLTGLPQEICDLAWKAQLRLCARYRRLLARGKNKNTVVTAIARELAAFMWAIAKVLEPGPA

SEQ ID NO: 432653 - protein, 314 aa, unidentified
MSPTPQYIGIDVAKAHLDVAIRPGDEHWRVANDEQDIGTLVNRLKAFQPELVVLEATGGFERTVTAALAAAGLSVAVVNPRQVRDFAKATGKLAKTDKLDARTLAHFAEAVRPAPRPVPDEQAQELASTLERRHQLIVMLTAEKNRWHLATGSLRERIEAHIAWLETELAAIDRDLDQTIRQSEIWRERDVLLQSVPGIGPVVSFTLLAELPELGTLTRQQLAGLVGVAPLNCDSGARRGRRRVWGGRGRVRTALYMATLVASRYNPVIKEFYDRLLQAGKPKKVALTACMRKLLTILNAMLQHRTPWNPASAA

SEQ ID NO: 432654 - protein, 356 aa, unidentified
MNEGSWVGLDVHARSVVAGVIDAGSGEVRSLRVALGNEATVAWLKTLPAPVRVVYEAGPTGYRLARACAEAGIGCVIAAPSRIRPAADRVKTDRRDAERLARLLRLGEITPVRVPEPEEEAARDLVRAREDARGDLMRARHRLSKLLLRHGAVYDATAWTRAHDAWLRRQRFQSGPLAIVFDECYSRMLDAKTRRDALDQAIAELAASEPYVDVVERLVCLRGVSTLTAFALTVELGDWNRFRPESLGPFLGLTPSENSSGERRRQGGITKTGNAHARRLLIEAAWHHRRPPRLSVTLERRRTGKPLAVRAQADRSARRLHGRWQALEARGKPRTIVVVAVARELAGHCWALATME

SEQ ID NO: 432655 - protein, 343 aa, unidentified
MQTVTTIGLDIAKSVFQVHGVDVAGQVVVRRQLKRRYVLAFFQKLPPCLVGIEACASSHYWARELQALGHTVRLMPPAYVKPYVKRQKNDMADAEAICEAVTRTNMRFVPIKTPEQQSGLVLHRTRHLLIRQQTAVINAIRAHLAEFGIVAPVGRKGVEELLLVVADGNDKRVPDVVHACLGALRTQLLSLKKQILELDRMIMAWYRSNETSRRLHYIPGVGPLLATALVANVANPGAFRSGRNFSAWIGLVPKQHSSGGKDTLGSISKQGDRYLSSLFVAGALSVIRYAKAHGSKHRPWLTALLARRPAKVAAIALANKLARMAWAMMAKGERYRNPVALAA

SEQ ID NO: 432656 - protein, 341 aa, unidentified
MGTKSNFIGIDMSADDFAACCITSPNIIIFSPQKFNNSFAGMERFSKLVEEHNIVPLETIICMEATGVYTEKLSYYLVSKGFTLCIEAPHKIKNKAKDTPRKNDLIDSKDIAEYAYRYIDKLTEWKPQGEILEQIKVLLTTREHLTEQVVADQNALQALKYKYYQTPLANQIYEKSITDIRAHIKEIDKEIKKLIDKDDSFKRLISLAKSVPGVGLLLAANLLVLTQGFTEHLSYKSTAAYAGICPYEQQSGTSLNRWPKSQRTGPYKIRKLLYLAALSVRTHNQYFKKYFLRKVAEGKNKHLVLNNIENKLLKIIFAVISNRTPYIQGYCSVNPVFIKSA

SEQ ID NO: 432657 - protein, 329 aa, unidentified
MGTPTVQSEFNAKCWVGIDVSKDWIDVVVLVEENKVQQLRCDRSAEELAGLAQTLLSYRPQGIVLEATGGLEGAVIAALAGAGLRVMRMNPKRVRDFARAHGLLAKTDALDAYALALFGARMQPPMRAWPEVERQQLAAWVGRQQQLTVERASERTRLKQASEPALRKSVERVIAFLGKEIARLEKQLAAWVGASKIWTEQEALLRTAPGVGPKTALRLLAQLPELGQVNRRQIAALVGVAPFACDSGKWRGRRAIRGGRAGVRAILYLASWTTVRKAGPLQTFYFRLVAAGKPKQVALIAVMRKLLLALNEMMRTRQPWRPANAAVLA

SEQ ID NO: 432658 - protein, 366 aa, unidentified
MSKVRFVGLDVHKDSITLAVADADGSAPQVVATVPHELQALRKQLRKLGKSSQLRCCYEAGPTGYGLCRALLAEGIECVVVAPSLVPKQAGDRVKTDPRDAVKLARFLRSGDLTEVHLPDEHTEAMRDLERARDDAKRAERTARHQLSKFLLRHGFRYSGKSWSQRHLDWIREQHFEIEAQRRVLENYLHAVEQATERVLQLTRDIAELVETWSLKPLVKALQALRGVQLVSAVTIAAELGEMRRFASAPQLMAYLGLVPSEHSSGGTKKRGSITRTGNQHVRKTLVESAWSYRYKPSMSYAIRKRNEGVSAEVRDIAWKAQQRLHRRYQRLLKRGKSKQQTVTALARELAGFIWAIGRQPVLEAA

SEQ ID NO: 432659 - protein, 351 aa, unidentified
MKIAKVEKTIKPMRFVESHFYDYYIAIDWSSTVMSIARMRSSSMHPEIDKDLPANLTTIKDYVNKLRGKKILTIEETTGAQWLYVELRNYVDKIIICDPYRNSLLKEGPKNDPKDAADLCRLLRAGLIKEVYHSNDDNYKIRKLVSSYNDLIKAGVRAKNQLSSIYRAYGLNYKKDEMTLDDDPYIKHIMEEKLRAIEHYEEEKGKYIKIFRQVEKENKTIKNLTGISGIDKILAVKIYSIVIDAKRFADKYKYWSYCGLVKYKMESGGRFYGKKNTRYSRELKACYKIAIQAALRGNNDIREYYETMLKEGMAEKLARNTVCRYIATSTYAMMKNGKGYKPYSWRKESLK

SEQ ID NO: 432660 - protein, 336 aa, unidentified
MSELVTVGIDLAKSVFQIHGVGENGLVLVRRQLRRSQLLAFFQNRPRCLIGMEACAGAHDWGRRLQEMGHDVRLMPPSYVKPYVKRGKTDAADAAAICEAVTRPSMRFVAIKSEACSSVMVLHRTRDFLVRQRTQIGNAIRAHMTEFGIITSKGAQNVERLKEQVDQLPQTARMPLILLFDQLSETNKRIERLTDEIEETYSQSETSQRLATIPGVGVLSATIIAATTPDVDNFNCARDYAAWLGLTPKPHSTGGKQRVGAISKMGNRYIRRLLYLGAMAQIMLRRRLKREPGSDWLSGMLMRKKTRVVAIALAHRMARMIFAVLRDGSRYEPQAA

SEQ ID NO: 432661 - protein, 360 aa, unidentified
MGEITRVGVDLAKRVIQVHAVDESGRVIVAKQLQRDGFTAWCAQLPPSCLVAMEACSGSHHWGRRLRAMGLEVKLIAPHFVSPYRLSGKTGKNDAADAAAICEAASRPNMRFVPVKSVEQQSMMALHRLREGYKEERTACINRIRGLLAEFGLVFAQRPEVLRAVLSEVVEDAGNELGAVARMALQRAHLHWIELECHIAWCDERIALHVRNDEQAKAAAQLCGIGPVTASALVATVDDFKQFKNGRQFSAWMGLVPRQNSSGGKAVLGEITKRGDEYLRTLLIQGAKSAVFTAHRRSDRLSRWIVQLRDRVGWQKAAVALANKHARILWSILVNGQGFDPEHVPTKHLMRAPAALPAAG

SEQ ID NO: 432662 - protein, 355 aa, unidentified
MKTIGVDLHKDSLTLVVLDDQGVVIQRDKLPTKCRHRIREWFASCGPHCQVAVESVGFYQWFWDLVQPQVTKLVLADPAALKALRPPKQAKTDRKDAELLARLLFEGRLPTAFVPSRALQPVRELVRHRHSVSRALARERRQLRWLSLKMNLPGPKQLTSDAAQKWLLAQDEKLSAAQRLISRQRLDQIGALERQLADVERLIDAAVAADPSLGQRVTLLESIPGIGRCVAITILVETGDLTRFDTTDQLGAYAGLAPRVSQSADTVHHGHISKMGPPVLRWVLQQAAWVAIRCDAHARQIWLRISRKAGQKRAIVALARKLLIYAWSVCRRNQPFHWPDQPVPELTSAGWSYCI

SEQ ID NO: 432663 - protein, 344 aa, unidentified
MENYAGIDVSLELSSVCIVDAQGKVLKEAKVASEPDALVEFFETLGFAMKRIGLEAGPLSQWLYAGLKGAGFETVLLETRHVKAALSAMTVKTDRKDARGIAQLIRMGWFRPVHAKSVDAQEIRALLIARKQLLGRLIDVELSIRGILRGFGLKVGPVTRKTFEARIRELVAGQATLERIASAMLSARSALKAEYGRLHKAVLGIVRDDAVCRRLMTVPGVGPLVAITYKSAIDDPDRIVKSKAAGALFGLTPKKYQSGEKDVTGGITLAGDETVRTVLYEAANVLLSRITRFSKLKRWGMDVAKRRGSKRAKVALARKLAVILHRIWVDGTTYRWTEAGPITA

SEQ ID NO: 432664 - protein, 352 aa, unidentified
MERYIGIDAHLQSCTVAVMGPSGRRLKEQIVETNGQALKQFLASFGGEKHVCLEEGELSEWLYELLLSVVKQVVVVQPEKRRGQKSDSVDAWALAELLRTNRKATVVYKAAGTYRGLREAVQAHRALTRDVVRTKNRLRAIFRRRGIRGFGEQLYAAESREPWLDKLCAARRRRAELYGEQLEQLLLIQQQAEAWLRQEAAACGIIKILATAPGIGVVRGSQTVATVVTPNRFRSKRPFWAYCGLAVVNRSSSDWEPEQGGGFHRRRKNQTRGLNRNRNPLLKAIFKGAALTAIQSMPDDPLVQNYYRNVEEGTDPAMARLTLARQLAAVVLAMWKHKEAYDPTRYASPKTA

SEQ ID NO: 432665 - protein, 446 aa, unidentified
MSLDCCYEHAGLCPGRGPSGPAPSGDGRLTEERRDVMEVMFDRVAGLDVGKETVTVCLRTPGLRGRRHAETRTFKTTTGSLHLMRDWLVEAGVSIAAMESTSVYWKAPFYCLEEVMDVWLLNAAHMKAVPGRKSDVRDAEWIAQLLEHGLLAPSFVPPPEIRRLRMLTRYRVQLMGDRRRDIVRLELMLEDASIKLSSVASSLKTVSARAMLTAMINGETDPLRLADLAKGRMRRKIPDLAQALTGHFDANHARLARSMLRRLDVVEQALAELDAVIIEACQPWAHQIELLQTIPGVGQKVAEVLIAETGGDMSRFPTAAHLAAWAGLAPAMNESAGKQSPAGKRHGNKWLTAMLVEAAGSVGRMHGKNYLAAQHARLMKRRGMGRAQVAVAHSMLVAAYWMLKRDEPYHDLGADWHRRRSDEAHTRRLVAQLEHLGHHVIIGPAA

SEQ ID NO: 432666 - protein, 405 aa, unidentified
MPYILALDVSMGHSYSVLYKDDTCLFEDEIEHTQRGFHALLEEIQHLPERPLIVFEATGIYSRPVEKFFQDHHFSYCLLNPLEAKKQMEENTLRSWKTDKSDAHRLAQTHLKNQRQPKEVQSNFYLEMRDLARFYQEIEKKITRLRMDLHNCLQLTFPELEQFFSNRLTPYALTLIRLFPHPDFVLASTRTKIKNKLINETRKKISANRAEQKADQIIHYAQCAYPAVEKDSIHCQKTIYYAELLQDLLEQKEALATQMIKKAEGSPCFLLYQTFPGIGALTAALLLGELGDITRFKTHKQLNAFVGIDIRRYHSGKYTGQDRINKRGNPKARKIIFFTIRNMIRQQRAAPNHIVDYYYKLKKQPIPKKEKVATVACMNKLLKCMHAMVRAHTEYDYAYAVSVDH

SEQ ID NO: 432667 - protein, 309 aa, unidentified
MKEEIAFEQVIERGCGLDVHKETVVATIMGKGLTTQTRSFSTYTRSLKSLRNWLTEHGITHVAMESTGVYWKPVYNILGDHFTVLLVNARHVKNVPGKKTDQKDSQWLAKLLLAGLLKASFIPNKQIRELRSLVRYKTKLIRQVSSERNRIIRTLEEANIKLSSVLTDVFGVSGQKIIKDIIQGDYKPEELLHHVHGKVKKSRKEVKEAITGYVTPHHRFMLQAMLESIESTEEIIRKLEAEIDKQTAELGIEVELLRTIPGVDKDGAVGIISEIGADMSAFATEKHLAKWAGVCPGNNETGGKKKVAE

SEQ ID NO: 432668 - protein, 338 aa, unidentified
MLYTGIDLHKRTVVIATIDETGKVHSETSLPTSRSAVARYFHWLPEPTIATVEATSSWYWLRDLLEQQEVPLTLAHAKFVKAIAYAKVKTDAVDALTLAQLLRADLIPRAHMVSPELRPLRALLRTRLHLVEKRTSAKNSVQRLLEQYNEPEPGRLPAEATLQASLYAEQIELLSDQIHRIEQQLQPELIPNPDIQRLLWIPGVGKIVAFTLYLEIDGIERFPTVRQFFSYCRVVPGADNSAGKRRHGRRKDGNRYLKLALSHASVRAVQYFPEIKRFYQRKARQKNPAIARTLVQKEIARSAYIVLKEQVDFNHTFKGQPLSKRKASQWPRRANPDV

SEQ ID NO: 432669 - protein, 438 aa, unidentified
MNLVIVQVGQNQIKERSIAVKMIKAKKHDFVNGKTLLVTIDIGKTTNMGYCRCPDGTEVKPFEFFNHAEGFQKLWGCICKVKTANHVEKVAVGIESTGAYGEPLVHYLSQKGVRVVQVNPLHTKRLKELQGNSPGKTDRKDPKVIADIIELGHALTVVIPEGVAADLRRLTHARERTLQRRTVLYNQLQDLVFILFPEFLQVMKKIKSRTVRYILQHYPTPQDIVKCGLEALVSIVRQISCRRLKRERVETLYEAACKSVGIEQGQRSIVFEIQEILSWIETCDRFIGKLEQQMSDLLKQIPYSRSILSIKGIREVTAAGLIGEVGDFRKFRTLSEILKLAGLDLFEISSGQHQGARHISKRGRSLLRKLLYFAAINTIRQGGVMYETYQRYLQRGMIKGKALVAIARKLLRILFALVRDHSEYAVNYYEIENLKLAA

SEQ ID NO: 432670 - protein, 400 aa, unidentified
MYVGWDWAGKAHDVTVLDEQGRVVEHFEVGHHEADFEHALKRLCHHGRPEALPVAIERPSGLVVERLVEAGHPVIPIHPNAFNAARSRWGASHAKSDPGDSYRLADYLRTDGRRLRRLRPMDAVTRQLQALVRMRDDHIKARIAAANQLEALLNAHWPGALSIFADLASDIALNFLERYPTPHATAGLGATRLAAFLKRHSYCGRRSPAQLLERLRRAPTAPDRLDSEVLAELVRHQVCLLRTLLHTGKELEHAITAVLPDHAKARLLAGLPRIGDGVNLAQVLSEVGPILDASLDVDHAAAQCGASPVTKASGQSRGVQFRWAANTHARQALQIFADNSRHASPWAARLSARHVAAGKRHPHAVRILMRAWLRVIWSCWHSNIPYDPARHRSELRLAGA

SEQ ID NO: 432671 - protein, 354 aa, unidentified
MAEALKNSIAFVGIDIGKNSFHVVGLDGRGAIVLRQKWSRGQVEARFANMPPCLIGMEACVGAHHLSRGLQRLGHDARLMPARYVRPYSKGQKNDFRDAEAIAEAVQRPTMKFVATKTADQLDLQGLHRVRERLVSQRTGIINQIRAFLLERGVAVRQGLRFLRNELPSILAAPSDALSPRMVRIIEDLAGDWRRLDERVEGLSKEIEAIARRDAGCERLMSVPGIGPIISSAMTAAIGAGDVFSKGRDFAAWLGLVPKQISTGDRTILGKISKRGNRYLRVLFVQAAWVVLIKPKSWERHGLKSWIEAAKRRLHRNVLAIALANKLARIAWSVLAHGRSFEASKLAAAVTQPA

SEQ ID NO: 432672 - protein, 320 aa, unidentified
MTILTSPTVIGVDVAKAEIVVYREDLKIIQAINNDRTSVGHWLKTLPAQSSIALEATNLYHLDTAELAPGMGHRVYIVDPYRVSHYRESIGQRAKTDPCDARLLARYLTSEQHRLRVWNPPPRHYTVLKSLLNKRAQLMKVRVSIKLSWSTEPLLEDLLADGLKHFKQLDQAIQELLRKVSQEAGISENIRRCKAIEGVGELTATGLATTYMRGEFASADAFIAFLGMDLKAKDSGKKHSPRHLSKKGDGELRRLAHNAAMAACRSPVWKPFYDSYLARGLARTQALVILARKLCRVAFALMKNQSEYQPNLRLQGSPAT

SEQ ID NO: 432673 - protein, 345 aa, unidentified
MGNYCGIDLGSKRTTVCVMDKRRQVLRLVEVQTTSEGLKEALSGYRRLTCIVEAAPLAEWTATAVEALGHTITVVCPRKAKVALESQGARKKTDKRDARALAELCRSGWYEAVHRKSQEARNTRSYMTARKQLVEASNSIASSVRGILRAHGIKLPERGDGESFTDRVKEAMKPLAKSVQAAIQELLQAWELLHSQQQRMYRQLQDQLKSDPVAERLMTIPSVGPATAAAFIATIDDPNRFSDGAKVASYLGLVPSVYQSGETEFRGRITKSGDKLLRWLLVEAAHNMLTRSKTGSHLQTWGLELQQKRGVGKARVAVARRLCMLMWTLWQEGGVFHAEPINEAA

SEQ ID NO: 432674 - protein, 360 aa, unidentified
MFTERTSVGLDVHARSVAAAAIDGVTGELFQTKLTPAHDHIRSWIAELPGPVAVTYEAGPTGFGLYRSLAAAGIRCQVAAPSKLQRPAGDRVKTDAKDAVHLAKLLRLDEITAVAVPSVEQETARDLVRVREDCRGDLMRARQRLSKLLLRQGIVYYDGKAWTGRHDGWLRRQRFDRAALELAFESDYETVITTTARRDRLDAAIKAMAADSEFTAVVRRLSCLKGVSTLTAFALAVEIGDWGRFSGNSIGSFVGLVPSEHSSGSSRAQGPITKAGNTHARRLLVEAAWHHRTRYAPGKTLRDRWELAPPAARVRGDQGNPRLHARWVRFTDRKKMPVIANVAIARELAGWCWSLAVMEE

SEQ ID NO: 432675 - protein, 331 aa, unidentified
MAQNDLVVAGIDVAKGKVDVCIRSLSQRQTFPSTPDGRRALIRWLRKYKVGKAAMEASGGYEREWAKTLRKADIEALIVDPKRVRNFARSAGRLAKNDPIDAEMIAWFAETFIEARGQAYDAAREELAQMVNARQALIDLQTSLKNRREHSTPDVVEKMQGRLLKQIALEIAKLEAAIAALIKATPRFAELAEIIESVPGLGEGTSAGLIGAMPELGQIGNKVAAALLGAAPYDDDSGKRRGVRHIQGGRRKVRNLFYMACMGAATRHNPVLKTFYDRLIAKGKEPKVALTACMRKLIVILNIMIARGEKWDASRYEVSDSARLPPSACTA

SEQ ID NO: 432676 - protein, 333 aa, unidentified
MVYAALDIHKKVFQAAVLDAETGELVQERLSATREALNDWATRWEGQLETVALEATTGWRWVWRELSARGFEVRLCDPGQARALRGSKRRPKTDRLDAAWLVRLLAKEMLPTCWLPPEDIQYLRDRTRLRRALSQDRMRFAQRLHALLTHEGWPCSRGQLLSVSGQRWVRSLALPPAAHANVEAMFALIGVLDEQLAAIDAELRQRARDDSRLQALCTIFGVGPVLAAHILAEVGEAGRFRRARQLVRVAGLDPVVSESAENRRRGKLSKQGSPELRWALVEAAHHACQRRSPDHALYLTGRERSGSKRAALTVARKIARRAYHVLSELEQTA

SEQ ID NO: 432677 - protein, 377 aa, unidentified
MDGTQRRCIGLDVHRDFAQVAICQAGQVVQAGTFATTPEGVREFAAGLGPADEVALEATGNTWAIVTVLASRAGRVVVANPGKTRAIAEAKVKTDKVDAAILAQLLAADYLPAVWQPDAAIGALRRQVLRRAHIVRQRTRLKNQVHAILHRNLVPRCPAADLFGIKGRAWLAAQQLPPDERAAADALLRQLDFHAQELALIDADLGQVALARPEVLRLMTIPGVDATVALSIVAAAGDFTRFRSPDRLVSYLGLNPRVRQSGGPARQPRPDHQGRPGARPRHAGRSRLVRIEGPRSAARVLSAGAGPPRHADRCGGHRPQARRAVLAPDHQARGLRLRPALAGRPQAAQARAARRAARRPRPQGHRRPLFPQSGPRR

SEQ ID NO: 432678 - protein, 428 aa, unidentified
MSNQDTIRRKQFCQIVKEVRSSNEYLVIGIDVAKDKHHAFMGTATGKSLFRKLIFENDINGFSRLLKTADEIKWQNNLSKIVYGLESTGNYHKPLASYLIRCGSNVVLVSGEAVKNNRSLLDGRWDKHDTKCAANIADLVSRGRCLYYDSPSSGIIEIRSLLSLRRRLKREEHGLRMRIRNNLLAKYFPELDRFYSSCESESLAIVRWCLDPDTIAAMEFGEFFHLITTNHRGLAQTIRLRKIHGLAKESVGCPRGTAGEYEADLLVEKLNQVRQQIKKTGDLIEDFCLEFTEYSYLLTIPGFGPYISARVLGSIGDPFRFENRKQLIKMAGYDLCANRSGRTSDKAIPVISKKGNSELRYALYQAAKVASARVDLFRTYFTELLRGRERERGIKTKMCVKLAAKMLIIAWTLMKKKEPFDPAYLTIA

SEQ ID NO: 432679 - protein, 405 aa, unidentified
MEIIIERGCGLDVHKETVVACIMGTGIKKEIRTYTAMTNDLFRLRGWLQEAGITHVAMESTGVYWKPVFNILEDRFEVILVNARHVKNVPGRKTDVQDSEWLCRLLRSGLLKGSFIPPRGIRDLRDLTRYKRKLIQTIVAEKQRVEKVLEDANIKLSSIASDTFGVSGKRIIEELIQGKLGAEEMAELSKGRLRPKREHLKEALVGEVREHHKFMIRASLKHIRAMEKILLGIERKIREKIERDYKEEDELLQTIPGVKENASTVIAEIGVDMDVFPDEMHLSSWAGMSPGNNESAGKKKPGSTTYGNKCLKAILIEFGWVASRMKGTYLRSKYHSLVGRRGKKKTLVALGHKILIMCYHILKYRRPYKELGEDYLDKRRKDRITRSYIKRLNHLGYEVILQEVA

SEQ ID NO: 432680 - protein, 388 aa, unidentified
MNRIIKIGMDVHSTNYTLCAMEPTIGAEDRVFGEIQVAPDYKEILLFIESLKMKLGFLDDYSIECGYEAGCLGYTLYHQLTNAGIKCVILAPTTMLSTKGKRIKTDKRDAHLIAQCLCYGGYHPVYIPTKEDDAVKEYIRMRDDHKQILKSLKQQINAFVLRHGYQYSGTKWTIKHVIWLSKLDLDPMYRETLNEYMASYEEQESKIERYDKRIEEIAAEERYQKNARKLGCFLGISTHTALSLIVETGDFIRFAKGNIYAAYLGLTPGEHSSSTSVNRLGLSKAGNTHLRCLLVEAARSICKGAVGHKSKRLRARQIGQSAEVIAYADKANTRLRSKYYRMIRHGKAKNVAVAAVARELACFIWGMMSGNISTVSGADTSEPAVSQG

SEQ ID NO: 432681 - protein, 425 aa, unidentified
MSEKDYNRQVVKRERIGRDTLIMGVDVGNAWNAVGFMNKEGNVLGSCAKLYNSREGFEQFIRMTEGFKAKHGMNRVLIGMEPTGHYWRKLAYFAKDRGYEVRFVRTTALKHHRELDESSSAKSDKRDALTIANITREGKYIDTVIEDGVVRQLRTLSKVRERLLRYSVGAKNALHAALDDYFPELHEIFWSMNSRSLWAVLDRCPFPEDVVSMKRSVLKELIARSSRKKTGAAQKAKALHESAKKSIGVKQIGSADRYRVKICLEEVKRTVLMLKDIDRQMKSVLKEIPVSEYLLSIPGIGPLSAAIFLGELGDPAYFQNARQIVKYAGYDPQESDSGYRISRKFISKKGRWLLRKCLFFMSMRVVVLTNYFQEYYQRKLQTKNKFGQLPRKKEILCAVAIKLIKVIFALLRDKRRFQDTVSDAA

SEQ ID NO: 432682 - protein, 428 aa, unidentified
METARASSEVVAWIGLDWADRRHEIRLQAVGSEQVESYTVEQKPEALHAWVAELQARFPQGRVALALEQSRGAVIYALMNYPFLWLYPVPPKGLARYRQAFFTSGAKSDVTDADLLLEMVRSHRDRLRAWQPDDPLSRQLRLLVEYRRETVADRTCLTNRLGALLKTYFPQALEWAGELRSLAACEFLGQWPSLETWQGAGRSTQRKFFRAHRRLPAEALEQVLNAIAQALPLTRDRALVAASVLMTQTLIEQLRAVISALERLDAELEKLFQQHPDREIFQGLPGAGEALAPRLAAAFGTDRQRYQSAAEVQQFSGIAPVTEASGKQHWVHWRMACPKFLRQTFHEFADASRKKSLWAQAYYEQQRQKGATHHAAVRALAYKWIRILYRCWQSHTRYDEAVYLAALRRHHSPLWLAVGSRSIQEAQA

SEQ ID NO: 432683 - protein, 344 aa, unidentified
MCSVPAQRVFVGLDYHLESVQVCVLTQNGRVLLNRSCRNDWRAIVAAIRERLGSEVSVQAAIESCCGAAALADELIAKAQWSVDLAHPGYVARIKQSPDKTDYSDARLLADLERVGYLPRVWLAPEEVRELRRLVRYRQCLTKERRTLKLQIGATLREARQKAPAECHAWTKAWLAWLTSAAVLSPNARLITHCRLSRLAALTAEIRAVEHLLAEQTSQDPLVRKLMLLKGIGLVTAATLRAEIGRFDRFRSGKQLTRFCGITPRNASSGSRQADAGLIRAGNPQLRAMLVEAAHRLMRYDEKWMKFAARLSLKGKPVSVISAAVANRWMRWLFHQMQPEQLAA

SEQ ID NO: 432684 - protein, 315 aa, unidentified
MEQPATTPSFVGIDVSKDRLDVHLRPAGQAFTIARDSKALEQLVTDLRALAPALIVVEATGGFELTVAAALAGAGLPLAVVNPRQIRDFARATGRLAKTDALDAQVIALFAERIRPEPRPLADADSQTLAELVARRRQVIEMIGMESNRLHQARDLRVQRTIKATLKTLEAQLAQLDREINDTVKGSPAWRAADDLLTSVPGVGTITSFTLIADLPELGQLDRRRIAALVGVAPINRDSGQMRGRRTIAGGRTDVRNALYMAALSAIRWNPVISEHYQSLVERGRPKKVALVACMRRLLGILNAIIRTKTPWQCA

SEQ ID NO: 432685 - protein, 316 aa, unidentified
MTAAEVFVGIDVSKARLDVAVGSAGELWAVDNDARGIAELAGRLRKLGPELIVLEASGGLETALVGELAAAQMPVVVVNPRQVRDFAHARGQLAKTDALDARILALFAQRMRPPVRELPDEQTRQLQALVTRRRELVEMLSAERNRLASVPAVLHREIRAHVRWLQARLKQRDHDLDHMLRNSPLWREREDLLSSVPGVGPVLCATLIAGLPELGRLNRHQIAALVGVAPYPHDSGKLRGRRTVWGGRAHLRATLYMATLVGVRYNPALRSLYCRLLERGKAKKLALVACMRKLITTLNAMLKHRTHWSAPCPIHA

SEQ ID NO: 432686 - protein, 346 aa, unidentified
MQVSTIGLDLAKQVFQVHGVNAEGAVVLRRRLRRPEVVKFFSMLPSCLIGIEACATAHHWARELSRFGHEVKLIPPSYVKAYVKRGKTDAADAEAICEAVSRPSMRFVPLKSAEQQSALMLHRGRDLLVRQRTMLVNAVRGHFAEFGIVAPQGVRRVGELAALLIEEDATTLPPLARQALRVLLAQLQALDDQIANLEAAVIASHRDNEASRRLASIPGVGPITASAIVASVANAHQFKSARHFAAWLGLTPRSHSTGGKERLGGISKQGDPYLRRLLVTGATCVIRYARRKAPGEAGWVKALLARRPARLVSVALANKMARIVWALLVRGNTYQAPAATMTAATT

SEQ ID NO: 432687 - protein, 363 aa, unidentified
MIVIGADTHKRSHTCCAVFTGTGQLAGELSATAREPGFRELLAWAQGIEQKRIWAIEDCRHVSGSFERFLVASGERVVRVPPKLMGQSRRGERTRGKSDPIDALAVARAALREGPETLPVAHLDEDALELKLLLDHREDLIKARSEDQQRLRWHLHDLWPDLELPAGCLDRILWLERVSRRLARAEQGARVRIARELVKAIRDRTRRAAALEKEIGAVVRSRAPQLLDLPGCGVLTAAKLLAETAGADRFATDAKLARLAGVAPIPASSGNRIRHRLDRGGNRQLNCALHRIAVTQGRTHPPAREFLARKQAEGKSRMEALRCLKRHLARRVWKLLVNPEIDCSVATTDSQRETLPLQIAMAT

SEQ ID NO: 432688 - protein, 409 aa, unidentified
MDTIVTRAAGLDVHKAQVTACVRVPGQGRARVQEVAEFATTVRGLLSLRDWLKAHRATQVAMEATGVYWKPVWHILESRFELVLANAAQVRNVPGRKSDVNDATWIADLLAHGLIRASFVPPQPVQELRDLTRTRKQLTREVVQHTQRIQKTLEDANIKLTTVIADIMGVSGRRILKALVAGETRADTLAELGSQRLKCPKPDLIRALEGRVTAHHRFLIGHHLGLIEELERRIAAFDARIGEVLAPFRAAVERLMTIPGVSRTSAEVILAEIGPDMSPFPTAGHLLSWAGLVPRLDESAGKRRSTRLRYGAPWLKPVLVQCAWGAARSKGTYYQAQFHRLKARRGPKKAAIAIAASILTAAYHMLKDGTFHHDLGPDHVFKRDTARTVARLARRIKDLGYDVHYRAAA

SEQ ID NO: 432689 - protein, 381 aa, unidentified
MPRYSTAFGMDVHLRSTTVCALNAETGEAVARRFRGNPWGEVAEWMSGFPGPSLAAYESGYLGFAPQRELSALGVDCVVAAVSKVPRSAADLSSKNDRNDAARMAKAILSHDVTPVWVPSPEIEGLRDLAAAHDAATARLPGEAAAPGVPRPPGLRLRRHDAGGKPPEVLDVRLPQVARQGAARRRRRHPGAGGAEERGRGGRRDEGGPPRRVQGRRRGGGPPGPGRGGPRPAEVEALQSIKGCGFVLAAAFASEVGDFSRFRSGRQVTAYFGLAPKQRSSADSVRLGGISGAGNALVRRLAVEGSWRYAQAGHQPKLMPKGSGVPLEIRMHGRKGSERLLRRREEMLERGMPQAKANAATAAELVRWLWALGMMCREAGE

SEQ ID NO: 432690 - protein, 387 aa, unidentified
MIYYVGIDISKYKHDFCIISNTGEVIVENASFDNNKKGFQYLLEYLKPYNKSQVHIAFEATGHYSLNLELFLIDQGFSFMKMNPLVIHQFLKTRSLRRTKTDKADSLTIASYLMSVPFKPNSDLLYHIYTLKSLCRARELLIKERSKFLVLLTNELDKFFPELKSFFNNRISTTLLYILEKYKNTEHIALMRDFDSLRKISHGKFSYAKFAKLKELAKNSVGHHDNNSDLLISTYVSIINNFNDKIDPIDKQISTIIKELNPRMLSIPGLGEISAATILSEYGDISNFSSSNKMLAFAGLEPSIIQSGTIVHNGKMVKHGSGHLRYSLMNISLTILKFSPTFYDYYLKKRSEGKCHRVALSHVCKKLIRVIYSLEKYNMDFNPSLLK

SEQ ID NO: 432691 - protein, 356 aa, unidentified
MSLEIKYVGMDVHKEATVIAVVNANGNLVMESIVETKASSLLQFIHGLRGELHVTWEEGTWAAWLYDLLKPQVQQVLVCDPRRNALLKEGNKSDKVDARKLADLLRTGMLRPVYHGEHGLRTLRELGRSYQTISQDLNRVMNRLKALYRGWGIACAGTQVYAPRYREEWLQKIEHAGVRRRAELLYQQLDGLQALRRTLRPELLAESRKHKATKLLRQIPCIGPIRAARLLALMQTPHRFRSKRQLWTYCGLGIETRDSAQYRFVRGQLQRAKKPQQIRGLNRNHNHEMKEIFKGAATRASCGMGPLRDFYVALLDKGMKAEMARLTLARKIAAIALTLWKKEERFDAEQLKPQAA

SEQ ID NO: 432692 - protein, 355 aa, unidentified
MNAVGIDVSKGKSMVAIVQPFGVVVADPFEVSHNGQELSELVERVKLLPGETKVVMEYTGTYYEPIANALHDAGIFVCVVNPLLIDDYGTNRVRKVKTDKKDAFKIANYALDKWTQLREYIPAEDIRKTLKVLNRQYAQYNKILVMQKNNLITLLDSCFPNANTLFSSPRRESDGHEKWIDFVLKFPHINSVSKLCLSAFKTKYQSWCRANRYNYSEAKAAQIHAYSRTQVSSLPMTNAVMKIVEESAKLLNSTLETLAAIRAEMDKLSSTLPEYETVLSLYGVGRVMCSQLVAEIGDVRRFEHSKSLVAMAGIDPPPDQSGSTTLNLEAYLNAALRCCAKPFFRSCKCSFKNSR

SEQ ID NO: 432693 - protein, 311 aa, unidentified
MTQPLYAGIDVSKDWCDVALEAGDASARFDQTLEGRKDLARWLKAQGITHAVLEASGGYERSVLRALDDAGVQACLVPPHRVRALAKASGRSAKTDALDARVLAAFGRLLSPRVRPRRDDDAQALAALVRRRRQLVDLMTLEDNRRQQEHDAGILADIVALLDMMRSQLDALDRRIAAQIRTSTALREKHDVLVTFPGVGPVTSAVLLAEMPELGSLEAKQAASLAGLAPFNNDSGTSEKLRSIQGGRAGVRCALFMAALTAIRHHPDIKAFYKRLREQGKPQKVAHVAAARKIVVILNAKLRDAIPKHHP

SEQ ID NO: 432694 - protein, 400 aa, unidentified
MQTQLHVAIDVGSQQHRVAIGWAEGDPIEEFDCPHTPAGLNDFFSRIRKHEDSHHAEVCVAMEGYGGYARPLDSQILAQGWRLYAINNLKFARFKEIFPAPAKTDAIDAKRMLQLMQLREHIPMASAVLQEVAPVDPLHQQIKALTRRRKQLVAERMKISQRMQAELQGVVPGLLAITGQADNLWFLNFLTCRTDLGMLKTVRRATLLKLKGIGVGYATKIATWQKTAIFAPAIAWAGPMIYADAMRILSLREAIIQLELQIAELTAQSGIAQRLLSMPGMGSVCASELAGEIGNIERFKDEASLAVYLGVAPLDRSSGSFELFLHVHKPPHASQSFFGFSSPLINPIGRFFCGSGGVINSRMALNTCLSWARVLRAKVSCCIASASVFSSSALSCLARS

SEQ ID NO: 432695 - protein, 346 aa, unidentified
MEYFIGIDVSLEASAVCVMDQGGAVVKEAKILSEPDALIAFVRGLGHEVSCIGMEAGPLSQWLYKHLIAADLATVLMETRQVKGALKAMPIKTDRRDALGIAQLLRMGWFRPVHCKSVSSQEIRALLAARKTLQGGAIAIELSMRGLLRGFGLKIGLVSKRLLDARARELAEGNSTLMALVTSMLRSRAALRAELLRIDKRLRDIARTDGVCRLMMSVPGVGPLVALTVKAGIDDPGRFRSSKMVGPHFGLTPRRDQSGERDVVGGISRAGDAGVRTALYQAATSMLYRSAKNSWLRAWGMRVAQRRGMKRAVVAVARRLGVVLHRMWTDETQFRFSQADAPVKGA

SEQ ID NO: 432696 - protein, 358 aa, unidentified
MKYVGIDVHKKMCQAAILDEDGTLLDEIRFANTPEEIEEFSGKLTTFHDEVKAVVESTGNLWIQIHDRLEEHGFDVALSNPSKTRLIAEAKVKTDKVDARTLAALLRADMLPTCYVPGEELRSRRELLRHRLNLVKIRTGVKNRVHGLLDKHGLRMPGTTPFSRENLAWLREQSFGFMDDAIVRSDLAVLEAVDGQVTLIEEKIAALAAEDRHVRLLMTMTGVGYFTAMLVVSEVGDFSRFRGDKEFASWMGLVPSVHQSGKKTRIGGVSGPGNKRLRWALVESAQTAVRHDARLGGMYERLSRRRGSGCAIVAVAHEMARIMYFMLSRNEPYRDADGGLVERKLKNMGKRALDGLRS

SEQ ID NO: 432697 - protein, 356 aa, unidentified
MIYVGIDVHKRKCQSALMTEKGTILDELSFENNNQGLTILIEKLQNLGQAEAVLESTGNFWIKTYEALEAAGIKTTLSNPLKTRAIAEARIKTDKIDARTLAHLLRADLVAASYVPDKETRARRALLRHRAGLVKNRTEIKNRIHNLLDKYDLHSDYSDIFGKHGLEWLRNLQLPPIDKTILNSDLQLLDALDQQIMSMNVEIAKIACNQEDVKLLMTMPGIDYYAAMIISSEIGDVKRFSEAEKLASWAGLTPSTRQSGTRIKRGHITKQGSRTLRWILVQAAQNSHRSDQRFQHLYQRIAARRGENKAIIAVAREMLTVAYYMLTRREEYRGMNMDRYKEKLKNLERTANHGLH

SEQ ID NO: 432698 - protein, 423 aa, unidentified
MKVTFLTCCGVDVHKSFLVATIIKTTGGMEPSYQKKRFSTFNNSILEFRQWLLDNDCHDVCMESTGKYWIPVFNLLEDEINVTIANPKWVKAVKGNKDDTRDSKWIGDLFRLGLVKGSYVPCKAIRILREYTRYRYKLVSCRSSEKNRYQNALTVCNVALDSVVSDIFGKSSTSIIDYLLEQPGTSVNHEEIASKLLKSLKSKEDAVIESIEGYQMTDSQKYRMRLIRTHMDYITAEINDIDSSIEKMISSNPDYENAVRLLCTIPGVKRDSAIAIISEIGTDMTQFCNSKRLCCWAGLTPGCNETGGKKKSVRIMRAGVYLKPALVQCAHAAVKSSKSPYYKKKYESLVKRRGKKRAIIAIARMILTAIYQMLSTGEEWNPCDLYKVDMPAPLIEKQKTKAIKQAKKLLLREGIISESQLVS

SEQ ID NO: 432699 - protein, 362 aa, unidentified
MAKSTTIIAFDQHAATTVAAVLLPGQRTPALHQLTSDIPTILRFVERIRRAGPVQCCYEAGPCGFELHRGLVAHRIPCDVIAPALIPRRPGDRVKTDRRDAGQLAILSRAGALTAIHIPTEQEEAARDLLRCREDIRADLLRARHRLSHFLLRHGRRFTLTKKAWTKRHAEWLQAQRWPLPALEQTHRAYVRAVDEAVGRLQAVNLELRDLLTLEPLHARVDRLRCFRGIDDLTALTIAAELGDARRFPNAPSLMAFTGLIPSEHSSGAKHSRGPITKTGNAHLRRVLVEAAWQYRHHAFLGPSLQHRQRGAPQAAIALAWHAQHRLHRRYRALAVRGKPKQLIVTAVARELTGFLWAALTQ

SEQ ID NO: 432700 - protein, 347 aa, unidentified
MPFYTKRHKFYCGIDLHTRMMYLCVQEQDGNVLVHKNIKAQATPFLDAVEPFMDDVVVGAECTFSWYWLADLCHDMDIPFVLGHALEMKLIHGAKSKNDRIDAFKIASLLRAGMLPQAYVYPGHLRPTRDLLRRRCHLVQLKSEMLTHIQNTNSQYNLSPLPGDVRRPRVRDELDQHFSDPMVRTSMAANIALIDAYDQQIRLMERTVLAQATRHRPYDLALLRTVPGIGKILALTLIYEIDDISRFPSVKKFASYSRLVKGQDISAGKLKGTKGAKMGNVHLKWAFSEAVVCMMGKSEQARRFIARQAKKGSKGKAMSILSHKLGRTIYYMLKRKEPFTMARFFAS

SEQ ID NO: 432701 - protein, 412 aa, unidentified
MKIAGIDVHKKVLMVVVIDANTPEEKPERRRFATMPSELRRLSIWLREQGVEEAVMESTAQYWRSVWLELEPHMRLHLAQAFSNRAPRGRKHDFKDAERLVRRLIADELILSFVPDGEQRIWRSMTRMKLQLTRDRVRLQNQMECLLEEMRIKLSIVVSNLLGASGLRILQALARGETDPKRLAQLGDERLQCTEEQLVDALTGRAQPMHREMLALQLERLQLIDTQIAKLNGMIAQAMKPHQEAVMRLAEVPGLGVDSAQQIIAEVGVQASTFPSAAELTSWVGTCPGKDESAEQNHSSRSAKGNKYLRRVLNQAAHAAVKSKGSYFQAVFRRLLPRLGYQSAIWAIAHRLCRVVWKILHEGVRFIEQGCEPDPRTKKKRAQMLARALRKLGYEVAITPINPATATRGLQA

SEQ ID NO: 432702 - protein, 392 aa, unidentified
MRKPKRRKPFNDLSRSPTALNVNETLIAVVELSQKTWLIAGIIPGIERQPLKKLEPDENAVLNLLDRWRREAEKAGHKIKRIAVAFEAGRDGFWLARWLRARGIEAHVIHASSVAVPREHRRAKTDRLDTELLKRAFLGWLRGEREHCKMAAIPTIAEDDARRPSRERESLVGEQTRIVNRMKAALARLGIRDFNPKLGKAADRLEDLRTPEGEPIPPNTLSELRRDIDRRRLIMHQIRQVEAARLERLKQATRSGSHAMVRLLARVKSISVETADMLVHEALSRNLRDRRAVARYAGLTGSPEESGNKRREKGLARSGNIRVRRGMIQLAWRFLRFQKDSALARWYRARTDNVPGSRKKMIVALARKLLIALWQFVREGVVPEGVVFRPAQ

SEQ ID NO: 432703 - protein, 401 aa, unidentified
MAAQRDKAWVGIDVGKTHHWACVVDAEGKTLLSVKVANDEAEIMALLANAGSLAVHLIWAVDIIGAPSALLLALLARAGQAVRYSSGRLVAAMSAAYAGEGKTDAKDAYVIAETARLRRDLSVIDTDADLVRNLAVLTGHREDLIADRVRMINRLRDLMTSVFPSLERAFDYSSHKGALVLLTGYATPDRIRRIGQSRLTGWLRSRNVRGSADVASRAIAAARAQTIVLPGQDLTASIITELANSLLALDDRLKALDAQIETTFAEHPQAAIIQSMPGFGPFLGASLLVGANDLRAFPSAGHLAAAAGLVPVPNDSGRRTGNLHRPLRYSRPLRHVFYLSAQTSMMRAGPNRDYYLKKRSQGATHSQAVIALARRRIDVLWALLRENRTWTATPPPLAQAA

SEQ ID NO: 432704 - protein, 312 aa, unidentified
MPCKTEVAVARTIGIDTGKNTLHMVGLDQEGAIVLREKVSRTRIAARLVNVPRCLVGIEAGMASHHVARELLALGHEVKQVPPAYAKPFRQGHKNDFRDAYAVAEAVQRPSTRCVPVKTADQLDLQALHRVRSRLIGNRTAVINQLRGFLLEHGIPVRQGLRFLRQQLPQILATRNDVLSPRMVRIIGELIGDWTYLDERIERVTDEIETLARADENCRRLMTVPGIGPIIASAMVAAIGNGAAFAKGRDFAAWLGLVPKQMSTGDRTILGRITKRGPNRARDQIGAATRSRDPVSRPGCSGLRIHFRLNGS

SEQ ID NO: 432705 - protein, 356 aa, unidentified
MNTNIKYVGMDVHMATVTMAVRDARNRIVSETTVATHAASILDVVRGLRGTVYVAFEEGTQSAWLYDLLLPHVAKVVVSDSRKNALLKVGSKSDRIDAKKLSELLRAGLLSPVYHGQNSARTLKELVRSYLTLTEDTTRVMSRIKALYRGRAISCSGRQVYTQAHRAECLQQLKPPGLQLRGQRLYEELDALQPVRRTAKQQMLTEARKFSAYQLLRTIPPLGPVRAAILIGRVQIPNRFRTKKQFWGYCGLGLETRVSAEYRVVKGQLQRARKPVLIRGLNVNHNHDLKNVFKGAALAATMRPGALRDFYEALLAKGIKPAMARLTLARKLAAIALTLWKKGEPFDPKYLTEQAA

SEQ ID NO: 432706 - protein, 332 aa, unidentified
MSVYVGIDVHRKRSQIAVVDHDGAVQVNRNVPNGVRPVLGVIGDLPIGAPVAFEAAYGWGWLVQLLEDYGFEPHLVHPLRCKAIASARLKNDKVDAAILAQLLRADLLPEAWIAPVDVRQQRTLVRHRCQLVRLRTMLRNRVHAVLADYGCDRAGGCFTAPGRVWLAGLDLPDASRRVVDDLLGLMDALKEPIDALDTQVLATARGDPRVAALTRLPGVGTLTASVIVAEVGDVTRFPSARKLAAWAGLTPTVRGSDLTVRHGHISKQGSPWLRWILCEAAQSAKRSPEFAAAYQRLAHRRGKKIATTAVARRLLARAYHLLREVESAQERR

SEQ ID NO: 432707 - protein, 340 aa, unidentified
MNYVGLDVSGKSVVAVWKDGDGKTIRQETITNTEDELRKLAASLEGCKVAVESSTSGLFVYRCLSASKVQMVMANPAKIRLISQSDKKTDKNDAAILADLLRVNMLPTSYVPPETIRVLRDLIRHRASLVQATTRFKNRLRAVLAAEGLQCSYDDIFSKSARIWLKQASLAEHNARYVQQLLHLGEEVKLEIRKFDAEIKIAYSESKEAALLDTMPGIAKHSAVVILSEIGDIHRFDSPKKLCSYAGLVPTVYQSGETCRMGHIKQGNSILRTILVQDAHSAANNSRRFMKFYNKVKRKKGAQKAVIAVAHKMLVIIWHMLQKGKPFEEAAICHTRRAAA

SEQ ID NO: 432708 - protein, 412 aa, unidentified
MEQLVERCAALDVHKDSLTACVRVPGSGGPRRQETRTFATTTSGLVALADWLRSFAVTLVGMESTGVYWKPVFYLLEGEYECWLLNAQHLRNVPGRKTDVADAEWICRLLEHGLVRPSFVPPKPIRELRDLTRYRKAQIEERSREVQRLDKVLQDAGIKLSSVASRTLGGSVRLMLEALVAGTHDPELLAELARGRLRRKLPALREALAGRFRSEHHGLLVAQILAHIDYLDETIASLSARIEQVIAPFSSERELLETIPGVARVGAEVLIAELGVDMGVFPSSAHLASWAGQCPGNHESAGKRRSGKPRQGSKWLEKTLTESAKAAARTKGTYLAAQHARLRGRRGPGKATGATRHSILVAAYHILERRLPYQELGADYFDQRRSLEQRTKRLVRQLEQLGHTVTLEPLAA

SEQ ID NO: 432709 - protein, 308 aa, unidentified
MSSDGSIAEETKYNNTLSEAEIFACSMVKKYGKCVAVCESTANLWLKTYQAFEKYNIGVKLANPLKTKAIAEAKIKTDTLDARTLAHLLRSDLVAECYIASREIRQDRSLLRLRTNLVQDRTRVMNRVHSVLDKYDLKCDYDNIFGVKGTRWLKSLKLSDNDQILLREYVMQIEFLNTEIKNIESKITCEASKNESVKILMSVTGIDWSGLCPSIHQSGNSLYMGRMKDGNKKIRWILIQAANTAARKDYRLRKFYLRIAKRHGHHVAITHVANKMITIIWHMLVNKKLYNERKQSLYETKLKRIQKT

SEQ ID NO: 432710 - protein, 341 aa, unidentified
MDHYAGIDVSLEYSSICVVDANGKIIREGKVESAPAALISWFAGLGHGLARIGLEAGPLSQWLYAGMKEASLAVELLETRHVRDAFKAMPVKSDRNDARGIAQLMRLGWFRSVHCKSISAQETRAVLTARKLLQSKLGDVERSLRGILRGFGLKVGRTTERSFAARIRTLVAGQAELERIAAALLEAHAVLLREFQRLERRVIEVARLDVRARLLMSVPGVGPIIAVSFAAAIDDPARFKSSKNVGAHFGLTPKKYQSGEIDRDGRISKIGDKPVRTSLYQAAHCILTKPLKGCPQLKSWAMKIARRAGMNKAKVALARKLAVIMHRMLVDGTPFNAAAAA

SEQ ID NO: 432711 - protein, 337 aa, unidentified
MEQYVGLDVSQETTSIAVRQDGGRVWRGKCPTDPKALSEVIRKHAPHAVRVVFETGALATWLYHVLQAENLPVVCIDARHAKAALDMAPNKTDANDADGLAQIAEIGFYREVRVKGYGPMLTRTLVGARSQLLRISVQLSNQIRGIMKTFGLIVPKGAGRIFERNARALLETNEAVARVVLPLLETWQVVRARAAEFDRQLIAAARTGPSYRLLMTIPGVGAITAVSFVAAIGVPENFKRSRAVGAWLGLTTRRYQSGETDYDGHISRRGDRYLRALVYEAAVAVLTRTRTDCALRSWGLKLKAKVGFKRAAIAVARKLSVIMHTMLKTGAAFAAAA

SEQ ID NO: 432712 - protein, 319 aa, unidentified
MSNVRLDNDLTEIRKQLEPYRGRVQVVAEATFNWYWLIDGLQADGHPVTLAHTAGLAAISAAKVKTDRRDALTLARLLRAGMIPPAYIYPSEHRPTRDLLRHRWDLVAMRATEYRRIRNLLYQHGICDLGLADIKALDTEDVERLLQHPLTQAKALLELERIRLFTQQIDAVESELETVADPRPEFALLQQIPGVGTVLGLTILYEIGDISRFADVRHFASYCRVVPGCADSCESRRRGRNDKSGNPYLKWTFTQAATKAVAHYPRFKQYFERHLRRHGGRAKKIVCYAITAHLLAKAAFHILRTKEPFSEEALFRHQP

SEQ ID NO: 432713 - protein, 325 aa, unidentified
MEKSFTYVGVDISKLTFDVAIFKNGKYQHYKFANETKGFKTFLKLLSARDCCVMEASGPYYLKLACFLVDACIAVSVVNPLIIRRYSQMRLLRAKTDKKDATVIANYGSSQHPALWNKEESYVLELKQMQAYTEQLNKSRTGFIRQMQAFEANPVQSKAVMKSLKKQIEGLEKQLGLLEKEMVALVEKHHKEQFKHLKSIPGIGPKTAMALIVLSGGFTKFNNAKQLSSYVGISPRIFESGTSVKGKACICKMGMSRIRAMLYVCSWSAIKKNKACREIFERLVEKGKAKKLALIAVVNKLLKQAFAIATSKKYYNENNLNLSCI

SEQ ID NO: 432714 - protein, 448 aa, unidentified
MPTRKPSRPRKMKLPKDLQHINPHAAGIDIGGRSHFVAVPEGSCEQSVREFTSFTDDLHRMADWLLACGVSTVAMESTGIYWIPVFEILESRGFEVRLVNARHVKNVPGRKSDVLDCQWLQRLHSYGLLEGAFRPSEQVCTLRAYVRQRMNLVRYAASHIQHMQKALAQMNLQLANVVADITGGTGMRIIKAVLAGERDPLVLAQLRDARCKSSEATIARSLQGNFRPEHLFSLKQAVDLYEFYQGQIGECDRQILNQLSSFDGPDASGNGPAESLDEALQRMTGVDLTQIDGINSNSALKIISEIGTDMSRWKSAKHFASWLGLCPGTKISGGKRLSAKSKPVANRAAGTLRMAAFSLFNSKSALGAYLRRQRSRLGAPKAITATAHKLARLVYSMLKHGTAYVDVGQKRYEERYRSRVVENLKRKAHDLGYALVEVCAKQPQPVAS

SEQ ID NO: 432715 - protein, 323 aa, unidentified
MAEFVAVGIDIAKHKFDVAVLLGAKCRNKVFANTAVGFEQFLMWLRALTPEPVHVCMEATGGYAEALALHLSRAEVRVSVVNPFQIAKFAQALGTRNKTDQQDARTIARFCQTQQPAPWQAPSPQLQHLRELVRRLDALLGLQRQELNRLALSSPSTRASIEAVLRVVDEQVRLLKSTIAEHIDRHPGLKAQADLLDSIPGVGEATIALVLAELPPTALRCVRSADAFTGLAPRQFQSGSSVKGRSSLSKQGSPRLRKALYFPAIVACRYNPVVKLFYQRMLQNGLTKKQAVCAAMRKLLHLIVGVLKSGKPFDPSLHNLKSA

SEQ ID NO: 432716 - protein, 317 aa, unidentified
MTLYNNFVGVDIGKFSFVVAVHGQKQVKEYDNDSSGIKSFIKEHQKYLSKGLCILETTGGYEMRLVLTLCEVGYAVHRANTRKVKHFIRSLGNSAKTDKLDSKALAFYGYERGARLECFTPQSHQALALYELVQRRQDLKRLLVAEKNRLKAPRANLVQESCRVMIETINQQVQLITAQINAFIEQDPGLKAKKEILKSIPGIGDITANELLVLLPELGTLSRRQIASLAGVAPMANDSGTFKGYRATGHGRSDIKPILFMAAMAARNSNSSLKSFYNRLIEAGKKKMVALTALMRKIIVIANARLKPLIPLEPNVG

SEQ ID NO: 432717 - protein, 437 aa, unidentified
MMGVCLTDEELAGKVVAGVDTHAETHWLCVLDENRRVALSREFPATAAGYAEVADAIGEPGGCAAVGVEGTCSYGAGLADELQARGFRVLEVLRPKRDARMLGEGKDDGIDAERAARDVLSGKYTSVPKRRGGWVEDLRAMLVARDRCVKSKVESLAAARSIASTAPDEQRRRWDGMSADALMSALLGLGEDGASALDRALLALARVWEVAREEADVLEREMRDAIERNCPAIMAIYCCGTVSAANLVVSAGENAGRFGTEARFAKHCGVAPIPASSGKTSGRMRLNRGGDRRANMALHEIVIRRMRSDEETREYVERRCAGRRGLSKKEAIRCLKRYVAREVWRALTHPFDVPKPDVRGQELRESRLMAGMRQRDVATVLGISVASVSKVERGKASMRSKSYKTYVEWFKSGMPVDVENSRKQESGKEGEKVQIDT

SEQ ID NO: 432718 - protein, 387 aa, unidentified
MEARTVNNLPPAASHDDDAVRCVLAIELSKKSWIVAVNTPLSDKISRLTLKPCDGKELLDLCERIRTRVARETKQRVEIVSCYEAGYDGFWLHRLLEAHGIRNYVIDPASLQVDRRARRAKTDRVDAERLLRSLMAYLRGEPKVWSVVRVPSVAEEDDRRLHRERGRLINERIQHVNRIKGLLAIHGIYDYQPLRREPLDRLRTADSRTLPPRLKAEILRELQRLELVIGMIKAIEAERDAIASAKAQTEHTSAKKIQGLAKIKCIGPEFASTLVGEVFYRSFDNRKQLASYVGLTPAHFQSGATCHDQGISKAGNAKARTVMIELAWLWLRHQPDSPLSVWFRGRVGKLKGRIRRITIVAVARKLLIALWRYLETGLVPDGAALKL

SEQ ID NO: 432719 - protein, 387 aa, unidentified
MPQANDLSRCLLTLEQDSTLIAVVELSQASWLVAGIVPAVERQPLKKIEADEEALLRLLHRWRDEAARAGRAVTRVAVAFEAGRDGFWLARWLRARGIEAHVIHPSSVAVPREHRRAKTDRLDTGLLKRAFLGWLRGERGHCTTAAIPTAEEEDAKRPNREHESLVGERTRIVNRMRSALARLGVRGFRPTLRKACERLGTLRTPEGAPLPPNTLAELRRDMARLRLVREQIAEVEAARLERLEEEPGSRPHAMVRLLARVIGVGVETADMLVREVLSRDLRDRRAVARYAGLTGSPDESGRRRREKGLAKAGNARVRHGMVQLAWRFLLFQRESALARWYRERTADARGGTRKTMIVALARKLLIALWRLVTTGAMPEGVVLRPAA

SEQ ID NO: 432720 - protein, 376 aa, unidentified
MERGSLMLNTTTFVGLDVHARSIKAVALDAMTGEVRSATFAYDAAAVAEWVGSLDPAAKCVYESGVTGFDLQKKLTALGVDCVVGAVSKMIKPSADRKRKNDRNDAEFLARMLSVGNVVEVWVPDDGCEAARDLVRALDDAREDLKRCKQRLSKFLMRHGYAFSETAPTGRRKGNWTAAHWAWIRSIEFPEKADDDVLAYYIDATRQAMEDKKRLEKPVEAEASKPRWKKRVDSLRCLKGVDAMTAAGIVFEAGEFSRFKNARSFAAWLGLTPSEHSSGESVRQGGITKAGNKHLRRVLGEAAWHYISASPHPKDLAKGQAPDPAARRHAAKGIRRLVKRREEMLGRGVHKNKANVATARELACWCWAIGRMVENG

SEQ ID NO: 432721 - protein, 368 aa, unidentified
MGLDVHARSVVAAAIDGVTGELFQSRLTPSYEHVCCWLGALPGPVAVAYEAGPTGFGLYRHLHDAGIRCEVVAPSKLQKPAGDRVKTDVRDALHLARLLRLDEITPVAIPTVDQEAARDLVRAREDARGDLMRARHRLSKLLLRYGIVYSGGKAWTGAHDRWLRHDAVTQLAAVGGRSIRATFDNDYDALVTTLARRDRLDVLIEQMAAASEFTPLVHRLGCLRGIGTLTAFALAVEVGNWQRFTGKSIGCFVGLVPAEYSSGSSRSQGPITKTGNGHARRLLVEAAWHHRSAYRPSKAMHQRWALAPAAARVRGDEGNRRLHQRWMKFIERNKRHQVATTAIARELAGWCWSLAVLEDALEDAPVHQ

SEQ ID NO: 432722 - protein, 348 aa, unidentified
MTLTIVETRAVTGGVDTHADTHVAAALDSIGGMLGVREFPATPVGYAGLLGWLGGFGTVHLVGVEGTGSYGAGLARYLGAAGVRVVEVDRCDRQDRRRQGKSDPLDAVSAARAALSGRALGVPKGRDGAVEAIRALMVAKRSARGERTQTINQARALIVTGPDELRARFARHSPAALVAELAALRPRAGDVPGYATQIALRELARRVEFFDAQLQRLDALIVPLVTTHAPGLLAVYGVGPDTAAMLLVAAGDEPARLRSEAAWAHLCAVAPIPASSGKVTRRRFNPGGDRQANHALWRIVITRMSAHPPTRAYLARRTAEGLSKKEIIRCLKRYIAREVYPHLRPAGG

SEQ ID NO: 432723 - protein, 360 aa, unidentified
MGEITRVGVDLAKRVIQVHAVDATGRVVVARQLQRDGFTTWCAQLPPGCLVAMEACSGSHHWGRRLQAMGLQVKLIAPHFVSPYRLSGKTGKNDAADAAAICEAASRPSMRFVPVKSVEQQSTVALHRLREGYKEERTACINRIRGLLAEFGLVFAQRPEVLRAALPEVIEDASNELGAVARTALQRAHLHWIELECHIAWCDERIAMHVRSDEQAKAASKLCGIGPITASALVATVDDFKQFKNGRQFSAWMGLVPRQSSSGGKSVLGEITKRGDEYLRTLLIQGAKSAVFTAHRRSDRLSRWIVQLRERVGWQKAAVALANKHARILWSMLVNGQSFDPEHVPTKHPVRSLAALPAAS

SEQ ID NO: 432724 - protein, 363 aa, unidentified
MIVIGTDTHKRTHACGAVDAGTGRLAGEKTAAAREPGFRELLAWGRELDEERIWAIEDCRHVSGALERFLVAAGERVVRVPPKLMGQSRRGERAAGKSDPIDALAVARAALREGVETLPAAHLDEEALQVKLLLDHREDLVRARSQDQCRLRWHLHDLWPDLEIPAGALDRAVWLDRLARRLSRADQGTRVRIARELVVEIRRRTRRVKELEGEIGDLVEARAPELLALEGCGPLTAARLIAETGGAARFASDAKFARLAGVAPIPASSGNRSRHRLDRGGNRRLNCALHRIAVTQGRVHAPAREFLARKQAEGKSRREALRCLKRHLARRVWRLLLLSERGRPEDIVDAQRDLQGPQITATA

SEQ ID NO: 432725 - protein, 392 aa, unidentified
MYIIGIDIGKNHHEASIVSPEGKQIGHSLRFATTHKGADSLMSFIFNNIGNSSCIFGMEATGHYWYPIYSFLKARGYTIYVINPIQSDSLRKMYIRQTKNDSIDSFLIAEVIRFGQFTTTSMADENILAMRQLCRYRDSVISSRTEIKLRISTIMEQIFPEYEKQFSSLWLSTSMGILEKYLTPENIENAPIDELFEIIKDKSHNKLTMKKAISIREAAADTFGIKIAQDAFSFQLKQLIDRMNFLDKQIEALDCQILEYYEKFDCYLHTIPGIGMIAAATILAEIGDINRFKSSSALVAFAGIDPTVRQSGEFSSTHNHMSKRGSPYLRHAIFLAATTCSFHNSPLNAYYKKKREQGKHHLTANGAVARKLTTIIYAVFRDGKTYEPKKFC

SEQ ID NO: 432726 - protein, 342 aa, unidentified
MEKVSIIGLDLAKRSFQAHGARAEGGVAFRKKLSREKVLTFLAEQPRCVVAMEACGSAHHWGRTIRDLGHEVRLIPPAYVKPFVKRQKNDAADAEAIVEAASRPTMRFVAVKTEEQQARAMLFRTRDLLVRQRTQLINALRGHLSEHGVVAAQGPANVKVLEEAVEDQGTSLPLLVVELARVFLDQIEGLWKRISGLEKVTAHEEACGETTRRLQTMPGVGPITALAIETFAPPMDVFKCGRNFAAWLGLVPRQHSTGGKQVLGKVSKMGQRDIRRLLIIGAMAVVRSALRKGSPEGSWVQRMLARKPRMLVAIALANKMARSIWAMLAKAEDYRVPMAAAA

SEQ ID NO: 432727 - protein, 410 aa, unidentified
MGNVAGIDVHKKMLAVVIRVESEDKVEYLKRKFGTTANEVVHLASWLTQQNVLEAALESTAEYWRPVWNGLEAHLKLHLCNPLQVKARRGRKQDFRDAQRLADRWHSGDLEESFVPGAEQRSWRWLTRSRVPLRRLIGAARSRVECLLEQGGIKLTSVVTDPFGVSGWAMLKLLAKGERDVKILVGEARGQLKKKEAELTQALVGKRNPTHRLVLQQSLEQVELLRRQIEEINQALKEAMLPHTAALVRLVKIPGVDLAAAQELLAEIGPGAVTFPSGGQFASWVGVCSGSNESAGVTYSRRSAKGNRYLRRLLCQIAWAAIRTKDTFYGSLFRRLSPRLGAKGAAWAVAHRIGKVIWLLLHEEVEYRELGPAPQRPKSLVKKLQRLQADFARAGMDLQSVLGQCSPAVA

SEQ ID NO: 432728 - protein, 343 aa, unidentified
MEQVTIIGVDLAKNVFQVHGASDDGSVAFRKKLTRPQFKRFMREVDPCLVAMEACSGAHYWARELAAVGHEVRLIAPRYVKPFLKRQKNDAADAEAIAEAALRPTMRFVEPKSADQQAQAVVFRTREQFVSQRTDLVNALRSHLYEFGYSAPQGIQYLSRLAEVVEEEGTDLPDPARYACRLLLKQIAILTEQIKALQNKVAEISVKTGVSRQLQTMPGVGPIGALAIETFAPPMEQFRRGRDFAAWLGLVPRQHSSGGKQVLGKVTKMGQRDIRRLLISGAMTVIVACKRFGKHQGTWVARMLEKKPPMLVAVALANKMARGIWAMITKGQDYREPSVNVMA

SEQ ID NO: 432729 - protein, 323 aa, unidentified
MSEARQATEVFVGIDVAKARLDVGVVPSGETWTIEHDEVGIATVVERVAAVQPTLVILEATGGLELGVVGALVAAEIPVQVVNPRQARDFAKATGQLAKTDRLDALVLARFGAAIRPEPRPIPDAALQEVRALVARRRQLQAMVIAEKNRRASAPKRLHAQIDEHLAWLRRAVADLDRDLATTIKGTPAWQTAVKRWRSVPGVGPVMSATLLADLPELGTLTHPQLAALVGVAPLNHDSGAHRGTRSCWGGRAQVRTTLFMATLVATRCNPVITAFYQRLLAAGKPKKLALTACMHKLLSILNALTRNASSWHDKSQTSVLAA

SEQ ID NO: 432730 - protein, 380 aa, unidentified
MASMHDSVRFKTTVYAAIELSKKSWVVAIARPDRDRPSIHRIAGGNLADLIGRLRKAAGEKQRIVVCYEAGYDGFWLARSLAKVGIDCRVLDPASIQVNRRARRVKTDRIDSLALLRALIAIDRGERHVCAVVRVPTVEEEDARRSHRERQRLVRERTGHINRIKGLLFAQGIRGIEPKRRRTRIDFGKLTTAEGRPLAERLRRELEREYQRLELVQSQLRIVEKERDTADAQDPAVERKRELLCALQGVGGASAAILAREVFARPFASRRQLGSYLGLTPSAYDSGSTTRCQGISKAGNSWARRVLIEVAWLWRKYQPGSPLSHWYARKTADQSPRIRRIMLIALARKLAISLWRYVETGLVPDGAVMAKTTPHMAAAT

SEQ ID NO: 432731 - protein, 391 aa, unidentified
MIYIGIDVAKDKHDCFITNSDSEVLFKAFTIFNNLDGFNDLYQKIESVMDDVTKVKVGLEATGHYSYNLLGYLIDKGLPTYVINPLHTNLYRKSLSLRQTKTDKVDARTIASILMSDVNLKSYSDISYHNEELKSLTRYRFDKVKERAKLKTSVSRLVCILFPELEKLVPTLHMASVYALLSEFPSAKHVATAHLTRLTNLLSESSKGRYGKDTAITFRDSARASIGSNMPAKSFELKHTIKLIQELDSEIDEIENEIKIIMDEINSPILSIPGINYRMGAMIIAEIGDFNRFDSPDKILAYAGFSPSTYQSGQLDGAYAHMEKRGSRYLRYALYNATKYVCHWDPTFAAYLAKKRAEGKHYNVAISHAVKKLVRVIYHLEKTKQQYIKAA

SEQ ID NO: 432732 - protein, 348 aa, unidentified
MTIVDAPRPVTGGVDTHLDLNVAAALDPVGGLLAVAEFPATCGGHRRLLGWLAGFGPVTRVGVEGTGSYGAGLARYLRAAGVEVVEVDRPNRQARRRAGKSDPLDAIEAARAALSGRARGAAKTRDGNVEAIRALVVAKRSARSTKIMTLNQIRHLSFTAPEELRRRLKDVSRHHLAARAAALRPSQRKDADPVIVATKTALRILGRRVLALDEEKAHIHALLSELVTQTAPDLLRLPGVGIDTAAALLVTAGDNPGRLRSEAAWAHLCGTAPIPASSGKVTRWRLNRGGDRQANCALWGVVITRLRHDPRTQAYMTRRLAEGRSKPEVIRILKRYVAREVYHHLPRP

SEQ ID NO: 432733 - protein, 355 aa, unidentified
MERYIGMDVHAASCTLAVISEKGRRLKDFPVETNGQALVEAIRMIPGHKHLVMEEGLQSAWLYETLSPHVDELVVAGITTSRGPKSDKRDAYGLAEKLRVGNLDKHVFKAPRQFTRLREFSRTHMTLVGDVVRTQARIKSAYRSRGVLVTGIDVYSSRRREEWLKQLPSGTKIRATRLYAHLDFLLEQKKQAESDLLREAKKHPIVKILETAPGFGPIRAARLVPIVITPHRFRTKRQFWSYCGLGIVTRSSSDWVQTADGAWIKSRVPQTRGLSRQHNHFLKSIFKGAATTVVTQRNKDPIHARYERLLEGGTKPTLAKLSLARMIAATVLRMWKNEEEYDPGRAGLPIKARKG

SEQ ID NO: 432734 - protein, 466 aa, unidentified
MKNVIKTPKKQNTKKSNIDQCWELINPDAAGLDIGAREHWACVPPNRAEKNVRNFGTFTTDLEALADWFQECGVKTVAMEATGVYWIAVFQILERRGLQVMLVNPRQTKNVAGRKTDVKDCQWIQRLHTYGLLQGSFRPEDPYCVLRSYMRYRDELVAARSTQCQHLQKALQQMNVCLHHVLSDVTGVSGLAIIEAILDGQRDPVKLAAMVHRRVRASQEMIQKALMGDYRAEHLFVLKVAFDLHHTYAEKILACEEQIVLETAKLPDRVDLAVKPLPDRKEGRPAGKDKMAGQDMREWLCRKLSVDLTAIEGIGITTALVFLTEVGPNLGRFPSEKHFSSWLGLCPDNRISGGKVLSTRTRRVTNRLADALRMSATTLERSQSALGGFYRRMKARLGSAEAITATAHKLARLIYRLIKHGENYVRQGLEDYERKFQERKMHGLKKAAMMMGFDLVPKQATTPAVS

SEQ ID NO: 432735 - protein, 421 aa, unidentified
MQEEVSEFAAFVGIDWADRKHDVCLQVAGADAAELSVIEHRPKSIEDWAQKLRERFAGRRIAVCLELSQGPIVSALLEHDIFVIFPVNPSTLAKYRRAFTPSRAKDDPTDAAIALELLVRHREKLKPLRHESQNMRALRRLVEARRDLVQDRVRLTNRLTFTLKAYFPQVLDLFRDKETEVFVAFLERWPSLLDAQRARRETIVDFFHAHSVRRADVIDRRIDAIKTERPLTSDAAVIEPARLLVEALLPQLRAVSAGIVRLDEEIARRCQQLPDFRLFENLPGAGRVFSARLLAAFGEQRDRFADASAFQKYAGIAPVTERSGNKHWVHWRWSCPTFLRQTFVEWVASSVPHSFWARAFYESHRAKGASHNATIRALAFKWIRVLFRCWVDRVPYNESRYLDALQKRQSPLLKFAAHPPS

SEQ ID NO: 432736 - protein, 309 aa, unidentified
MKSITYIGMDVHTTNYTLCCYSVEDDRFFAEIKVKPDYQEVLKYINRVKSQRGKEAEILCGYEAGCLGYSLYHQLMYHGVECVILAPSTMPVTPGKKIKTDRMDARRISKCLAYHTYSAVYVPTAEDDAVKEYIRMRDDGNNTLKRIKQQTIALCTRHGKQYDGKSYWTKRHLYWLEGLDFGNGVLNEVLKEYLVLYYQAQEKVETYDKRIEELSRSETYREPVEKLGCFIGIKNHTALAFCCEVGDFRRFPSAQQFASYLGLVPGENSSGEKQQHTGITKAGNSHLRRLLIEAAQQYGRGAVGKNQRH

SEQ ID NO: 432737 - protein, 366 aa, unidentified
MKKNSTVATGRKQIFKQPKLTIGLDLGDRTSHFCMLDEAGNILLERSLPTTSNGIRQTFGKIPRCRIALETGTHSPWVSRQLSQMGHEVIVAHARKVRLIGESSRKDDQLDARTLARLARIDPGLLGPVRHRSAQAQIHLTAIRARAVLVSTRTALVNAARGLTKSYGERLKKCGTEQMNRDSSQGLSPELRDALDPLLREIESLNERIAEYDRRIEQIAKEVHPEVALLKQVKGVGTLIALTYVLTLDDPHRFRRSRDAGCFLGLRPGRRNSGQSEPQLHISKEGDRYLRTLMVQGAHYILGPFGQDSDLRRWGLKLAERGGKNAKKRAVVAVARKLAVLLHKLWVSGEVYEPLRNNHKGESAVA

SEQ ID NO: 432738 - protein, 321 aa, unidentified
MTYIGIDVSKATFVVAYSSAKTGRTKTFKNTVKGVREFIRTISATEHHCVLEATGNYSALLVYLLSEARITVSLENPLKIKNFARAMLSVTKTDEIDARLIALYGERMQPVPYKLRSDSILILKQKRTVLRQLKKQLVATRNLKGSLEVLPSFDPECKKTIEKTIVFLEKQIKAMEEKITSLAQGEYKKQMDLLTSIKGIGATLAAALIVATGGFTYFDNAKQLTRYLGLSPTYQQSGTSVNVKGHINRNGDSSLRSQLYVAAFSSLRCNTECKACFDRLRSNGKPGKVVVIAVANKLVRQAFAVVTQGKPYVDGFKSEKP

SEQ ID NO: 432739 - protein, 451 aa, unidentified
MAKKKMEMDIIHPHCAGIDIGSRSHYVAVGQALEDVKEFGVYADDLTDICLHLKEHEVTSVAMESTGNYWQNLYVELIKHGFEVTLANGKFTKNIKGKKTDVKDARWIQKLHSIGLLTSSFLPDETTEKLRTYCRQRQNMLTLAAEASHKMQKYLKILNFRLDVVVNDICGLTGMAIITDICQGNLDPEKLSDHRHGNCRKSKEEIAKALKGNNREDYLFGLKQELESYQFYQKKIAECDKQIGAFLKQQINTDPEKKKLKTTDKTHKRINKNAIKGIDLNQAAYQYFGGVDLMSIEGMSHATIVSIISEIGPEGFHKFETAKHFTSWLRLAPNNKVSGGKLLSSKTPKGSNRLKIALRNAANAIGNLKDTHLSNFFNRVCYRKGRTVAVSATARKLAVILWNMVVKNMPYKPPTDYLFLDEKRKLGLVKRIRKQITKFELTNQDLGLATT

SEQ ID NO: 432740 - protein, 377 aa, unidentified
MKAPSTRPAAVLGLDVGKSSHWACLIDRDGEVLASAPVRNREAELDALFASAPAGTLVVVDQFRNIGSLAARRARAAGLGVAYLPGLAASRAAGLFAGEAKTDERDAAVIARTALGVPDSLSGVPGRGEALEAARALSSQRDHVVACATRDKNRLRAVLLESCPALEAAVDLSDRRWLELLAGFGGAWGIARSGAGGPRAEAAGEAAAASTAPPPALVEAENRQVRFLAARISEALDEAGALEAETAALLEGDETYACLLTVPGIGPRTAAQLAVSVDIGRFPDHDRLASYCGIAPRVRSSGTSVRSVGASRRGDARLKSLLIFSCNSLVRSSGRYGEYYRACRARGMGHGRALKAVARKRLRAIYAVMRDRVPYRE

SEQ ID NO: 432741 - protein, 361 aa, unidentified
MSNSTTWIGMDVHKESIVVAAVNGAGGTAARWETPNTSKGKERLAKRLSEFGTIRCAYEAGPCGYDLRRFLEEKGIRCDVIAPSLIPKKPGDRVKTDKKDAEKIARMHRMGELTAIHVPTPAQEALRDLLRAREDATEDLVRHRHRLQKFLLRQGRRFEGKNWTRDHWRWIRVQKVADQNSETVLSEYIAAIDQEVERIGRLDAQIEQESKTPKIAPAIARLKALRGVKTLTAMTILSELIDLNRFDSARKLMGFVGLVPGEYSSGGKQWRGSITKSGNSHVRRVLVEAAWHYRHSPRKTGEAIRKRREGQPPEVIETARKAELRLYKKFTRLVMRGKKTTVAATAVARELAGFVWAIGRI

SEQ ID NO: 432742 - protein, 430 aa, unidentified
MKSNTQNAKIEAITEKTLVLGIDVGSETHYARAFDYRGIEYSKKPFKFSNTEAGFATFKEWVLDLKERHEKDKVVPGMEPTGHYWFNLGKFLQDNEMKPVLVNPHHVKKSKELDDNNPTKNDRKDPKVIAGLVREGRYMIPYLPEGVYADLRTASNIRFQLQAELTRIQNRISRWFNIYFPEYKTVYGKPDAKSGMLILKAAPLPEDILTLGIDGVNQIWRDAKLRAVGKARAKTLIEAAKHSVGSKEGAVSARMEIRMLLEDYESRNTRLQEVMVLIEELVRKIPMAEKLLEIKGVGIRTVSGFLAEVGDISRFNNPKELQKLAGLALVENSSGKHKGETTISRRGRKRLRYLLFEVAMSLVSKNQEFRELHNYYTTRRLNPLKKMQSLMAIAAKLIRVFYAMLTKGVDYDPKKMVSDIKRPAVYLQAA

SEQ ID NO: 432743 - protein, 343 aa, unidentified
MQAVTTIGLDIAKSVFQIHGVDAAGNVIVRRQLKRRYVLPFFQKLPACLIGMEACASSHHWSRELTALGHTVRLMPAAYVKPYVKRQKNDAADAEAICEAVSRANMRFVPTKTVEQQSCLLLHRTRHLFIRQQTAVINAIRAHLAEFGIVAAVGRNGVEQLLDVVADTSDNRLPDVARACVAALGVQLRMIKARILEFDRLIMAWHRSNAASKRLDEIPGVGPALATALVASVADPKAFRSGRNFSAWIGLVPKQHSSGGKDKLGSISKQGDRYLRSLFTAGALAVIRYAKIHGTKHRPWLTALLARRPTKVAAIALANKIARMAWAMMARGDCYKEPVALAV

SEQ ID NO: 432744 - protein, 435 aa, unidentified
MEEVTDEPLYRDRVCGIDIGKAGLVATIRVPSDRDPARRMQETRSFGTTKREVLALADWLRSWQVPAVVMEATGDYWKGPFYRLEAEGFDCVLADAKQVKNLPGRPKRDPADSRWLAACFERGAITSCFVATPEFRIIRLHTRYRRDLTEERTREKQRAEKLLESAAIKISAVLTDLHGVTGRDIMDHLIAGERNPKVLAQLARAAARRKISQLEEAVEGAEFFTAEHAALLAKVLARIDRLSADIDDLSQVIERLLAPYEEQLQQAESMPGWGRRAAQDAVAETGVDMSRFRTGPHLVSWAGRAPQDHQSGQRKGRAKAKKGNRYLGAILGETAVAAGRTQTREGVRHRRLARRRGTAKACVATGNTQLKVYHKLLSNPGMRYADLGPDYYERQRDTRRQVAHHVGKLGALGFEVTLCRIPEPDPDGTDPAQAA

SEQ ID NO: 432745 - protein, 337 aa, unidentified
MYQLGIDVSKATLDICLLLDGVRGRTKTKKLKNDYRAVHVILSWLQQQNCKPENVHTIMEATGVYHELLATGLHLAGVKVSLANPHRSREFARGMDILIKTDKVDAWMLACYGALKEPEPWAPPPEDIRYLSSLLKRRDLLVADAVREQNRLEKYRSTNTPEIIIQSAEKMLLRLNEEIAVLESLLKEHIDSNASLKEDLVLLTSIKSVGQQLALNMLVIMRSHEFDSAEQAAAFLGVVPVEKRSGTSVRGCTQMSKIGPPKMRAKLYLSALCGLRFNPLMKSIYERLCQSGKPKMVAVGALMRKLIHWCFGVLRTRHPFDINYQRVDAQSACKAAS

SEQ ID NO: 432746 - protein, 385 aa, unidentified
MGIETFIPRDYDVFAGLDVDKKSISVTFTDHQGLLKSMRMPYSVDHLVNHVRKHYGDKKVAFAYEAGPTGYGLYDGLVAQRYPCLIASPSMIPKAPGRRVKTNRLDSVGLAENLRAGQLKGIHIPSTLYRELRHLTQLRDALVSEVVAMKQRIKSLLLMEGLEFPPAPPGSQWSFLVKAKLRKLPCSSVVRFKLDQLLDNLEFGEKQVLKVTREIRRFCHNDPELSQCIDYLKSLPGIGWIVASQMMARIGDWRQIKNIREVPAFLGLVPTESSTGERTTRGSITHSGDPRLRSKLIQASWSAIRQDGELLKFFRTVAKKHPRHLGPRVAIVAVAHKLCVRAAVVLMKQRPYEMREKVQSAPLTQEETVPQGTTRRPAVPGEKIS

SEQ ID NO: 432747 - protein, 460 aa, unidentified
MRVESYGFLGADVSKGMCNFVLQKGTGEELESNFQLDDNREGHKVLYDLLRDWKERHGLKKIVVGLESTGGYENNWYKNLRNKSKELSLEVFRINPKRIYHESKTEGRRSISDAVSSQIIAGYMRKNYGKKDLELKRIAVEDKRQDQTDGLKTLYRYIKKLTGQTTQKKNTLEKLLYSAMPEILSIKKEGYPNWFLELLLQYPSRKDILMAGIEGLTKIDYLGDTKAELIIKTVKEFAGLQVDTNISMAISEYAEDIRHYTKKVNRLKNQISESAKEDKSRAEDIERLNSIRGLADYTTLGILLEIGSVSRFESGGNLVAYFGINPTIKQSGDKHYKVGMSKDGSPNARATLYTAAENVKNHEPYFRAIYEKQIRSGKKHRSAIGVIMSKLTRVVYGMLKTKTDFDPGTDIYNQTKKQNEKLKVKKSKVNRERRYQKETLDAPISSRQQKKRKQEQTVLN

SEQ ID NO: 432748 - protein, 407 aa, unidentified
MNAVGIDVSKGKSMLAATRLFGEVLIEPREYPHTADGLSRMAKDILELGEDTRVVMEATGRYHEVVAFALREDGIFVCVLNPLLVKLSGGGTLRKAKTDKKDALKIAKYCLDNWNELREYMPLDILRQHLKLFSRQYNLYMKTIVSLQNNLISLSDKVFPGVNELFTSPDKEDGHQKWIDFFYTFWHADCIADVSEKSFTDRYQKWCKRKGYHFSQSKAEDLYTESAGLILTLPKNDNTKLLVQTAVQELIAAKTCLAAFKSEMINMAKMLPEYKTVVSMFGVGEVTGAQLMAEIGDVTRFTHRSALVAFAGVDPDVDQSGKHNASSVPTSKRGSPHLRKTLFQIVSTHLKRSPTDEPVYQYLDKKRAEGKPYFVYMTAAANKFLRIYYARVKEVLSTEKESANGPA

SEQ ID NO: 432749 - protein, 384 aa, unidentified
MEQIHDRVAGLDVHRDVVVACARVPGARGGTVTEKERFQTTTGALARLAGWLADRYVTLVAMEATGVYWKPVYYALEDSFEVWLCNAHHVKNVPGRKTDMSDAEWLADVAAHGMIRPSFVPPPAIRELRELTRYRKTQTDARVAEIQRLEKVLQDAGVKLTSVASKVLTQSGRLMVEALIDGQRDPAELANLAKGKLRPKIPELTEALNAHFGAHHAVAAARILAHVDFLDATIKALTEQIDVRTKPYQAARELLMHVPGFDRLTIDTVIAETGADMSKFPGPGHLAKWAGVCPGNHESAGKRRRVGVTCGQPLAPAGPGRGRPRRCPHQRKLLRGAVPPDRQTPRPQQGRRRRRPQPERPDLAHVQHRRGLPRPRRRVLPAAP

SEQ ID NO: 432750 - protein, 398 aa, unidentified
MNGSGKRYIGLDVHKHYLIALGVDEGLNIALPARRVEFSYLEAWMKKTLTKQDEVVLEMSTNTWQLYDELIVYAGSVLVVHPPHVALITRSQVMNDKIAASILARLLAKELLVGIWVPPQEVRELRGLVAQRQKMTRLATQAKNRLHAVLQRHHLKPPGGNPFAKANNNWWQALTLGKLEKMNMQSDLATLQFAEHQEAHLEEEMTMIAAEDEKIGRLMHITGFGVITAVTVFAAIGDITRFMEPKKLVGYAGLGARVHDSGMTMRTGKITKAGRRDLRVALVEAAHIAANSHPHWKAELARLQPRLGYNRAIVAIARKLLLTVWYVLQGQADKYAEPKAVAQKMLKFAYAVGKSKRPQGQTAAQFARLRLDALGLGRELTSVPWGSKKPIPLPPSRL

SEQ ID NO: 432751 - protein, 405 aa, unidentified
MYNAVGIDVSKGKSTVAVLQPGGTVIRKPFDVTHSSCELKNLTDYILTLDGETKAVMECTGRYHEPILRALSDAGIFVSAVNPHLIKNFGNNTIRKVKSDPADSKKIARYTLDNWAELREYSSMDTTRAQLKTLNAQMAFFTKQKVAAKTNLISLLDMTYPGVNDLFDTPTRDDGSEKWVDYAASFWHVDCVRKIGLSAFTERYRAFCKRHGYNFQSSKPEELFNASKELVAVFPKEKEYKDMIQMSIKQLNIISANVEHTRREMNRLAATLPEYSTVMSMRGVGATFGPQLIAEIGDISRFNHREALTAFAGVDPGVDESGKFKSKSNNASKCGPSRLRKTLFLIMSSLLQTKPIDDPVYRFLDKKRSEGKPYHVYMTAGANKFLRIYYGKVKECLRTQSETEN

SEQ ID NO: 432752 - protein, 316 aa, unidentified
MEAPAIFIGIDISKARLDIAMRPSGECESVAHEEGALQSLVKRWSQMRPTLIVLEATGGLERSISRALASAQLPFVVVNPRQVRDFAKATGQLAKTDRIDALVLARFGEAVRPAVRPLADEASQELKALSARRRQIIEMMVAERNRASRAPKSVGKRIDAHIRWLEAELDRADKDLDQSIRQSPIWQENEDLLRSVPGIGPIVSRTLLAELPELGQLNRKQIAALVGVAPLNRDSGQFKGRRTIWGGRAAARACLYMAALVASRHNSVIGAFYTRLRSAGKKPKVVLVACMRKLLTIINAMIKHRTHWSEFNSQTT

SEQ ID NO: 432753 - protein, 389 aa, unidentified
MCNIGTTGLPAAEHEDMAVLAAIELSLKRWRVAAMSPASNKLMRVDIAGGGAAELSQRLEHWRSEAARRLGRPVAVTVCYEAGRDGFWLARYLEARGITVLVIDPASLQVNRRARRVKTDRLDAEGMLRALRRHCWGEPRVFSVVRPPSPADEDSRCLTREREALLKERTRHVNAAKALLIAQGIRTVGSTRHGWLERMAELQTGDGRPLGENLRHRLARLARRLDEVARQIKEVEAELLALDRKRAADLPAGSATIAARLCRLVGIGMASAMVLEEEAFHRTFPNRRHVAAYAGLAPTPFQSGESAREQGISKAGNPRLRRLLIELSWLWLRYQPDSPLSKWFQARVGDARGRVRRVAITAVARKLLITLWHYVTLGVLPDGTRLSST

SEQ ID NO: 432754 - protein, 341 aa, unidentified
MADLELVGIDLAKNVFQLHGCSSTGEVIFRKQVKRNKLLSFISELPKCIIAMEACSGSHYWGREFEALGHSVRLIAPKYVKPFVKRSKSDAIDAEAICEAALRPTMRFVQVRSEDNQAAGLAFKARDLLVRQRTQIINALRGHLSEFGFVVAKGPTHVRKLVSAVETGDLELPEISRPLLSILVDTLEALNTRIRLLEAQIAQRAREDEICQRLTTIPGIGPIIATAIAALAPPPSTFRRGRDFAAWVGLTPLQHSTGGKQRLGRTSKMGNRALRRLLIIGASAVVRWAEHKGAAPGSWLARMLERKPPMLVRVALAIKMARIAWALMAHGGEYRARTVTR

SEQ ID NO: 432755 - protein, 369 aa, unidentified
MPHVTSIGLDVHARSVAAAAFNPFTGEVVHRSFGTDAAEIAEWALGFEEPRACYESGPTGFHMARELRALGLDCAVAAVSRMQRPAADARRKNDRRDAEFIARMLATHNIVEVPLPDVAVEAARDLDRALDDATRELRRSRQRLNMFLIRLGHVWDERNADGARKRAWTRAHWRWVSEIRLEGPQRDALEYYVTAARCAESDRRQLERRVVALAGTDRWRATVEALSCIKGVDTLTAFRLAAEAGSFSRFRSAPAFASWCGLTPSEHSSGESERRGGITKAGNALARTALIESAWHYSTCSPRPKAPAPGTDVPPAIRSRADDCTARLHRRREALAAAGKSACKANAAVARELACWVWEIGCRSEGTVL

SEQ ID NO: 432756 - protein, 402 aa, unidentified
MRNSVFVGLDWAYRSHAVCVVDAQGSVLKHLTVSHDAQGLGELRHALAAFGKALPIAIERPSGLIVDALVEAGHQVFAIHPNAVKASRPRYRSTNAKSDAGDAFMLADLLRTDGHRWHALQPQSAAIRGLRTLVRTRDDLVATRVRLANQLTALLDAYWPGATCIFAAVDSPIALAFIEQWSTARKLTARQIAAFCKRQGYSGRRSPGVLLDRLQAAAPSLCEPMLAQAYATAALALVALLKPLAAQIKSLDGHIALSMAALPQAISVMSLPRAGCICAAQILAELGDVPERFASAEQLCSEAGVVPVTYESGKSRAVTFRWACNHRLRRAITCLADNSRHASPWAASVYQAARKRGCDHPHAVRILARAWTRVLWRIWTDGTEYNPAIHSSACRIENTQEG

SEQ ID NO: 432757 - protein, 372 aa, unidentified
MSKFFYRPTVGIDVSADFSVVAILAPDGEIFKKPFKINHNRDGFDYLVDQIKKAEKEFNMKTGIFMESTGVYHLTLFHFLKDKFETFIFNPLITNSNKNSGIRKVKNDKRDAISIATIGKFQSVKCSSAFDVEIYTLKSLCRDYYKLTDTKSTYKKKLSTDLRVIFPGYNSVFSNITCKTSLTILKQYSSPQAILDEDRDTLIEIISRNSRKGLIYGENLYEKLISIAQEALYIGIKSSSLFIKITNTISLIETLETQLENLLKEIHSFIKSHRLSETFVKNMQLIYSIPGIGELTAITIMSEIGNINGFLKPKHLIAYFGIDPSVSQSGKFNSDKNRMSKRGTRIGRRALYAAALASVRTNKNGEPINEVQ

SEQ ID NO: 432758 - protein, 347 aa, unidentified
MAIVGGFDVHRAQITFDYLDMGTGEIATGQIRPATREALRSWLGRFEGRRGVAFAVEGCTGWRFVVEELRRAGVEAHLAEPADTATQRGHKRRAKTDRTDARLMRELLRQERLPASWIPPAAVLEVRTLARLYVGLMAERRAWQQRIHAQLFHQGVPAVGELLSTEGQAALARAELSAAGRRMVETAGAAIDALTALIRPLRAQLRAVGARRPGCRALTEQDGIGFLTGAIIWAELGDCRRFARADQAVRFAGLDVTVWSSDSKRAPGRLARQGSPEPRWALSEAAESAARPTSPDHADDAATRDRLDGKLATRSVARKLARRCDHALRRRGDAAWTAPTTAEQAAA

SEQ ID NO: 432759 - protein, 346 aa, unidentified
MMIIGCDFHPSWQQVSWLDTETGETGEQKLVQASGDAERFYRQVAAPALIGMEATGNCHWLVDLLSELGHELWVGDAAQIRASYVRQQKTDKRDAAHILKLLVEGRFPRIWMPSSEVRDLRQLLLHCYKLVIMRARVKNELQHLCLNKGVQRKHKLWSAAGQQILRELPLQPWAGRRRDDLLKLMAMLDQQIEPLDQAVKAEAQRDKMALLLQTQPGVGAITALAYVLTLGDVSRFPRGKQVASYLGLIPREHSSGGRQKLGAITKQGNRMLRMLLVEAAQIAVRYDPEFRREYLHRCHQKPKAVAKVAAARKLAVRLYWMLRTQRPYSAVVRIESSPRVALVGAS

SEQ ID NO: 432760 - protein, 482 aa, unidentified
MKPSQQNKPQKASCRPEQGSWQQMNRKQRREMTRKMHAQDLSLEVVHPHAAGIDIGNEAHYVAVPPDRDNKSVRRFGCTTAELKEMAAWLKQCGIRTVAMQSTGVYWITVYDILESCGLEVYLVNARETKNLPGRKSDVQESQWMMKLHTYGLLRNSFRPPQEIRTMRTYWRQRNDLIRSAARHIQRMQKALTQMNIQLANVLSEVSGVTGQAIIQAILAGERDPRKLAAFRDKRVKAREEEIARSLEGNWQEDLLFMLKQEQDGYEFCQKQMSECDERLQQYLRQREDRSRGAELPEENRKERLRKNKTNKPRFDLRTELFRMTGTDLTQVDGIDVRTAATVISEAGWDMSKWRTEDHFASWLRLCPDNRVSGDKVIGKRRLPINNRLSVAFKIAASTLRQSITYLGAQFRRLKTRLGPPIAIKAMAARLARLVYRMMRYGMRFVDRGAEFYETQHRRRQINSLKRKAANFRLKIIDAPAA

SEQ ID NO: 432761 - protein, 441 aa, unidentified
MEEKREEKLPQVSEFPEYCTPVGVTVGRIRKAIHPSGTKRFIGLDLSKQSCYVCIINRDGQIELLGKFSLQSDKRSELYEKLQEGDLVLMEASTGTFNIARAMNKLPGVLVCVVNPHSTRINETKKKTDKEDSLFLAKLILRTPVEELQLVSIPSDQEMENRDVISHYRQVDNRHTQVVNQLHALFFDKGFPEVGKTHDLHTKVGRYGAIEKYFGTDRAYSFTKRIAKDLSKELSLLEEQQAVGERQMARIVKQNDRVAAILGSIPGVGLKTIAAFIAFVGDVHRFSQGKQLSAYCGLVPRVYQSGQKDGIRKITKEGQAALREYLVEAVFAMMRTKFNFPLKEKYLELRQRMKSRKAAIAVARKLVVMIFSMLKNGTLYMVEKEENREQVAAYHKRKYIQSVGRYYKFRESCKDISAMIEITNTFYSNELGVLKFKQQGA

SEQ ID NO: 432762 - protein, 425 aa, unidentified
MKKTGMEKLEAITAKTLIGGIDIAKKVHWARFVDYRGIPIGKAIRFENNKAGFEHIVAETERLRKAHGMDYVLLGMEPTGPYWKALAWRLKGLGLRVVTVNSHHTKQAKSLDDNSPTKNDKKDALVIARLVKDGRYFEPYLPEDVFGELRVSSNTRIALMKRMNGVKNRVMGILDEYFPEFTDVFRKPLKGKASMQILKSCPFPVHILELGVEGLLAEVKKAVKKTVGKKKVSALLEAARDSVGVGYGLESARMQMKMLIEELEFLQKQLEEAEARMKVLLEMTGYAELLLGIDGVGVVSAASFLGEIGDPLRFDSPRQISRMAGYNLVENSSGQSKSGTSISKRGRKQLRALLYRMAMVKNSELKLLYHHLKTRRDNPLKGKQALVVVSKKIITIIYQILKTRKAYEPALVLGAVRKQQLGLAA

SEQ ID NO: 432763 - protein, 402 aa, unidentified
MPNIEIGVDFMVKENFIYVGIDLHKETHTAVMIDCYNQKLGEITFPNRPADFPKLVTKVKKCNTDAKEVVYGLENAYGYGRPLAVWLIDKGYFVKDVNTAISHRQAKHRGAMYRKSDSDDAEAIALATLNMLDKLPNACPNDAYWSLGQLVHRRDNIMKQRTRLVNQLHEQLCIAYPSYKSFFNDISRPTALYFWEHYPSKKYLKGKSVEDLRAELVPVSHNKCSTKTCEKILDAVASDKVKNNAYQDARDMVTLSIVSDLQHYDKQLAEVDKMLEQMYKMLGCTLTTIPGVNVITAVKILAEIGDIKRFANANKLAQFAGIAPLHLSSSGKGKDLATKQGNRRLQATIYFLAIQMVQVSSKGTPRNPVVRAYYEKRKAEGKSSQQALICISRRLISIIYGM

SEQ ID NO: 432764 - protein, 345 aa, unidentified
MEKIIRIGMDTSKSVFQLHGVNAVEQPVLRKKLRRKDVVKFFRQLAPTVVGIEACGGAHHWARVLGELGHTVKLIAPQLVKPYVKRGKNDAADAEALCEAMSRPTMRFVPVKSSAQQAALMLIGLRDGLVRHRTQLSNAIRGYAAEFGLVAAKGLEKIEPLLARVEATQGVPGLARELFAAQGRQYARLQEQLTEIEVRLMAWHRENECSRRLAQAPGIGPIGATMLVMKTPDPGAFRSGRHFAAWIGLTPKDHSTAGKVKLGAITRAGDEALRSVLVVGAMSVIRQARHGKGRQSAWLVGLLQRKPLKLAAVALANKMARVAWKMMATGECYEAGRLSPAPKTA

SEQ ID NO: 432765 - protein, 343 aa, unidentified
MKLSRVGVDLAKNVYQLHGVDRFGKTILKRRLKRHQWLKVLLDSAEPGCEIGMEACASAHHWGRELQSRGYTVKLIPPQFVKPYVKSNKNDARDAEAICEAMSRPNMRFVTVKTVEQQDIQATHRVREELKVRRIAKANQIRGLVAEYGLVAPKYMSSLRAAIPCWLEDAENGLTHYFRSLLHGLWNDLLALDDRMCEMDKTIKWLAKDNEDCVRLEQLRGIGPMTSTAMIATVGDARQYRKSRQMAAAIGITPRQHSSGDKHRLLGISKRGDVYLRMLMIHGARSVVTRAKHKDDPLSRWVTEIAKRRHPNVAAVALANKNARMAWAMLRHKTDYDPDFAMS

SEQ ID NO: 432766 - protein, 394 aa, unidentified
MKLVGIDVGKNSHHFCVMDKETGEFNVAPSSFSNNKEGFDFLINSLKPYSKKSILLGMEDTGHYHVALLKFLLSNGYPVALINPKTTDLTRKMEGGITKNDKLDTITICDVLDTPERKKQYRITKVDRFDLYEQRQLTRHHHNLKEELNVYCNRLQKSIDLVFPEFNTLFSSKYSIVYMNLLKTFGSAEAIASTDIRTIRKCFEIKGRGNRISLTPEKLKECAKNSIGISSEVETIQIKHLVSQITLIKEQIAEIDKKIEEFSITNNSPILSIPGISHFSGTSILAELGDIGNYSKPSQIIKFAGVAPYHYESSQYNAQHTGITKKGSKYLRKTLYQIILTVINNNPVFKKYYRLKISQGKGHRCAQGHCIRKLLRIIYHLLETGQSFDPALLR

SEQ ID NO: 432767 - protein, 422 aa, unidentified
MMEWLDAKRQIYHEELHAMNNVAGIDVSKGKSMVCVLRPFGEVAAKPFSVGHTSSELKELADYLKSLDGETRVVMEHTGRYYEPVARFLHEEGIFVSAVNPKLIKDYGNNTLRKVKTDKADARKIARYGLDNWVELRQHTPMDTIRMQLKTLNRQQGLYSKTKTMMKNNLIALLDQTYPGVNSLFDSPVRKDGSQKWVDFATVFWHVDCVRSMSLTAFIERYRKWCKRHGYNFGQCKAVEIHTRAQDLIAMLPKDTLTKTMIRQAIDALNAVSASLERLKAEMRTLAAQLPEYPVVMAMRGVGDSLGPQLMAELGDITRFTHRNAITAFAGVDPGADQSGTHEAKSTRVSKSGPPELRKALFLVMDCLLKTMPLDDPVYRFMDKKRTEGKPYLVYMTAGANKFLRIYYGRVKEYLASLESAD

SEQ ID NO: 432768 - protein, 359 aa, unidentified
MYRIIKIGMDVHSKNYTLCAMEPTIGAEDRIFGEVQVAPDYKEVICFIESLKMKLGFYDEYSIECGYEAGCLGYTLYHQLTGAGIKCVILAPTTMLTQQGNRIKTDKRDARLIAQCLSYGGYHPVYIPTGEDDAVKEYLRMRDDHKLALKKLKQQIHAFVLRHGYQYSGTKWTIKHVTWLKKLELDPMYRETLNEYLASYEEQEAKIERYDKRIEEIASERRYQENVKKLGCFLGIRTHTALSLIVETGDFKRFAKGNTYAAFLGLAPGERSSSDNVNRLGISKAGNTHLRCLLIEAAKGICKGAIGHKSKELRARQSGRSRVQLAARTITIEYLSVSVRSCDHCKVRAICVISMLAPW

SEQ ID NO: 432769 - protein, 553 aa, unidentified
MGSGRLSTSIVSWVCEPADKLGAGARPARVTHCRFEHAGQNFGSLDRGPRAAHPMEWDWRASEVGARRKTKQKPAMVEPVEIPDAEHELVVDRGAAIDVAKAAGKVCVRLPGKSGRRFSRVWDVPARTGAITELAEQLVELGIEKVTVESTSDYWRIWYYLLEDAGLDVQLVNSRDVKNVPGRPKTDKLDAVWLAKLTEKGLLRPSFVPPAPIRVLRDYTRLREDLIRERTRYWQRLEKLLEDAAIKVSAVASKLDTLSTRDMVEALIGGERDSRRLADLARGRMKTKRSELITALDGRFDDHHAELARLLLGQIDALTAQIGALSARIERLIDAMDESDHPTGDRGRSGGGGPQVTGAPSTGGQATAPARRTTTAIGVDSDTATVVEPQRLTAVERLDEITGVGQCAAQTIIAEIGLDMARFPTPEHLVSWAKLCPRTIQSGPVIRGGKTGKGNPYLKGALGEAAAAAARTDTFLGERYRRLVKRRGRLKALVAVARSILVIVWQLLSDPTARFHDLGPDYHTSRVVTERKIRNHIAHLTAMGFHVTLQPAA

SEQ ID NO: 432770 - protein, 377 aa, unidentified
MKQYNTLSVGLDVHKESIAVAYAPDEDGAEAIYLGPVGTRQCDVDKVIRQLHSKACKLRFVYEAGPCGYWLYRYLQKKGQECIVVAPSRIPRRSGDRVKTDRRDALQLARLLRSGDLTAVYVPKPEDESVRDLSRLREETLRDLQAAKNRLKAFLLRHDIRYEGKANWTASHLRTLAHICMATAAQRVVFQEYLGAVTHLMEKLALIEAELREHAKSWRLAPLVQALQALRGVQFHVAVTIAAELGDLRRFEKPRQLMAYVGLHPSEYSSGGKRHQGAIAKTGNAHARRVLVEGAWSYRHLAKVSPQIQQRLEGLPEDIRSIAWKAQVRLCKRCRRMIAHGKNRNIVIVAIARELIAFMWAIARKVELSQVSLAQAS

SEQ ID NO: 432771 - protein, 324 aa, unidentified
MKLFSLGIDISKATFNVALLLDNDKLRHKVFTNNLTGFQQLSAWLLKHKAPNVHACMEATGTYGEALATYLHQAGHQVSVLNPVIIKGFAISQMSRSKTDKSDATLMARYCEQNHPPAWTPLAPEISELQALVRRLEALLEMLQQERNRLSAGVNSVTVKENIQEHIDYLKEQIEQTQKFIQEHIDQYPRLKEQRDLLTSIPGIGETTAARFLAEIIDINNYDSARKVAAFAGLIPRHEESGTSVKSKARLSKVGNGRLRKAFYFPAIVAKRYNPIIKEQSQRLEKRGKCAMVIIGAAMRKLIHLAYGVLKTGKPFDPLYGKTA

SEQ ID NO: 432772 - protein, 406 aa, unidentified
MDVHRDFAQVVALENEGLRQLGRVKLDKDSLTSFANHLASDDEVVLEATGNTFAIVRVLRPKVRKVAVANPLQVRLIAHAKIKTDKVDAAALAQLHASGFLPEIWVPDEETEALRRQFTRRSQLVRHRTRLKNEVHAILNANLIGRCPVTDLFTSTGRKWLAEQVLASSDREAVDRGFREIERIGEDLAALDRALAVEAIDDPRLKRLMTITGIDMVSGLGLIATIGDHTRFASSEKLVSYLGLNPSVRQSGSGPARHGRITKRGANQARALLVEAAWAASRVPGPLRSFFMRVMSRRGSQVAAVATARKLATIVWHVLNREEDYVFARPSLVARKRRSAELRAGKLRQRGRRGIAADYYCAATRAEERERLENAERAYERIVSGWRPTGSRSKPASTDLKGNVST

SEQ ID NO: 432773 - protein, 347 aa, unidentified
MNQITRIGMDTSKHFFQLHGVDAVEQVVLRRKLRRKEMLTFFAKLPSTVIGMEACGASHYWARELGQLGHTVKLIAPQHVKPYIKRNKNDGRDAEGLCEAMSRPTMQFVPVKTEEQQAALMLVGMRERLVARRTQLSNAIRGYAAEFGLTVAKGLDKIEPLLAEIAADEALPVLARDLFAMYGAEYVQLQAELKKIDARLTVWHRANANSRRLAQIPGIGPIVATALVMKAPDPRLFPSGRHFAAWIGLTPKDHSTAGKTRLGTITRAGDEMLRSVLVAGATAVIQQANKGRGRPSPWLLALLARKSSPKLAAIALANKIARIAWKLLVTGESYHAGDKPIASAPVA

SEQ ID NO: 432774 - protein, 349 aa, unidentified
MSGAYEGRQIVGMDLHRRRSVLVRMTDTGKRLETVRISNDPEYLQAVMARAGESPEVVLEAAYGWYWAADTLAELGAHVHLAHPLGVKMFSLRRVKNDERDAADLADLLRMGRLPEAWIAPPATRELRGWVRHRAKLVGLRSCLKNQVHAVLAGAGVQVSMSDLFGADGRAMLAATRLAVESRSRVDSLLRLITALDFEIDLYARLVGGRLRADPGYRAIQQIPGVGPLLGAVFVAEIGDISRFDRPQQLASWTGLTPKHHESDTTVHRGRITKQGSRLVRWAAVEAVQRVSAHTRLGQTRDRVGERRGRNIGVVAAARELITLVFYGLRDHHIRCLPAPAATSATGAA

SEQ ID NO: 432775 - protein, 345 aa, unidentified
MMIIGIDAHKRSHTAVTIDGNGRQQETKTVGTTTQDHLKLLKWATALGGERLWAIEDCRHMTRRLERDLIAAGESVVRVSPKLMADVRDSARTYGKSDPIDALAVARAALREPDLPVARLDGVERELRLLIDHREDLVAERTRIISRLRWHLHELDPGWLPPASIDRTSAFTAITAHLETCWEDGLVLRLSRRLVQYLQVLTLEINALTAEITERVTVVAPSLLAIVGCGPLTAAKILGETAQVRRFRSKDAFARLNGTAPIPVWSSNKQRHRLSRTGNRQLNAAIHRIAMTQARMHPPARELLARRKAGGDGGMEALRVLKRRLSDVVYRAMLSDETQSAPAAA

SEQ ID NO: 432776 - protein, 420 aa, unidentified
MAGTVDIVYPICCGMDVHKNFLVACIATTDERSHTTHQIRRFSTYKGDLLKLADWLIENRCRDVCMESTGKYWIPVFNTLEPICNVCLTHPKYVKAIKGKKTDKRDAKWISELFKCDLVRSSFIPPLDIRQLRDLCRYYVKLTYMCTSEKNRAQNCLTVCNFKLDAVFSDVFGKSASRIIEKLIEHGNSDFDFASLIDGRCKATAEEVGAALDGELIPTQAEKLKFIRQHMDNLNQLKDRLEKLILQLAAKYQPQIDLLLTVPGISEPLTAIRILAEIGADMSVFETSKQLCSWAGLTPQNNESAGKKKTTRIGRAGVYLKPLLVQIALAVSKADKHIELKSKYQALKKRRGGKKSIIAIARKLLTAIWHILSKNEAYNAELYKKSDKPPANRELTTAQAVAFLRSKGFLIVDEETGEIA

SEQ ID NO: 432777 - protein, 337 aa, unidentified
MSYLGVDLHTNSFTVCRRTKQGKNSIGTFRIVRIADFRKTLRKRDLVAVEATGNTAWFVSQICDRVKKVTVVNPFQFEVIRRSVKKTDKHDAKTLAFFLSKDMLPEARMKSKENAQLHSLATTRDKLVKQRTALINKIHNVLNSYGIKFKKESLGSEKGLKSVWAYDWDVIVRIELEALIDQIRSLNKSIKTLDKEMSNHGQKLKGHKNLTSIKGIADRSATVLLSVIGDVNDFADENKLAAYFGIVPRVSDSNETVRHGRITKHGSKLGRTTLVQCTLVAKRYSPYLRQYYERIKSHRGSGKAIIATARKFLGIIYNTLKNDWIFEDFPNFVLVNS

SEQ ID NO: 432778 - protein, 350 aa, unidentified
MDQISRIGMDTSKHIFQLHGVNAAEAPVLRKKLRRKEMMTFFENLAPTEISIEACGGSHHWARLLQSYGHRVRLIPPQLVKPYVKRGKNDAADAEALCEAMSRPMMRFVPVKSTEQQAALMLVGVRDRLVRNRTQLANAIRGYAAEFGLSAAKGRAHLVPLLERIEADESLPGLARELFAIQAEEYKQLQAQIAAVDVKLTAWHRADECSQRLAKIPSVGPIGAVLLRMKTPDPALFRSGRQFAAWLGLTPKDHSTAGKVRLGVITRAGDEVLRSVLVVGATAVIQHARRHGKGSPWLIALLKRKSPKLAAVALANKTARIAWKMMVTGETYTGKSVAATSAGAVSQGAV

SEQ ID NO: 432779 - protein, 336 aa, unidentified
MNIKRIGLDLAKQVFQLHAVDHQERVVLRKTLHRARMLTFFTRLEPCLIGIEACGSSHYWARELTRLGHTVRIIPPQFVKPYLKGNENDANDAEAICEAVSRPGMRYVAIKSEAQQSMQAEHRVRARLIHDRTALSNEIRGMLGEFGFGLPAGLSALRKALPEILSQQEKWDNRFIRLLSELTEELQALDERLNRYDRRLKQLAQEDERIRRLQEISGIGPVTASALVAAVGDAKQFKSGREMAAWLGLVPRQHSSGGKTKMGHISKRGDSYLRTLLIHGARAVLNACDHKEDRRSRWLQSVAERRNRNIATVAMANKNARIAWSVLSRGEEYRVM

SEQ ID NO: 432780 - protein, 361 aa, unidentified
MEKPKIKALVDDVDYFIGVDHHKKTSYVTIKDREGEVVKRGGIVTTKASIADFLNIARETGDSDGDPRIMAVMECGRAYRPMYGWLSDMVDEVVLAHPRGLKIISETVYKDDRIDSGKLTDLLMLGMVPRSYAASEEAWERRMILRHRVMLVRIQTTIKNRIHVIADLHPDALPRKPEVSDLFGKLGLDWLRRVDLPRPERWRLDELLELLEQLKVRISNSESLIRKIAKQDNRCSLLKTIPGIGDFFSALIVAEVDDIGRFPSAKHFVSYIGLVPRMDKSGSTERGGGLHKQGNAYLRWAFVEAAPHAANSNLSLNDLYDRICARRGKKAGPNIAKCAVARRLAEIAYSVLKEGRPYENR

SEQ ID NO: 432781 - protein, 349 aa, unidentified
MDDIATVVGVDIAKTVFVAVGMNDRGKVLWRKKLSREEVLPFFATLALVKIGMEACAGAHYWARRLNAQGHDTRLIAAQHVKPFVNGSKNDWNDAQAIAEVRSRGETKYVPINTEAQQDMQMLHRARQALLSERNGVICRIRAFAGEYGKVFPLSVSKFRKGIAEWLGDDAENGLSGNAVQTLRELLEQLDEKEKRQDAYDARIALAAKEDERARRLMQVPGIGKLTATAVVASVSDPRHFPSSRDLSANLGLVPRQHSSGGKDRLFGITKRGDGYLRTLLIHCARSALRCAGEKPDRMLRWALQVQQRRGAKIAAVALANKLARIVWAMLVSGDEYQPVLQRSASAPV

SEQ ID NO: 432782 - protein, 347 aa, unidentified
MKILALDLGKYKTVGCDYERETGQHRFKGSLTTRACLTQLVKEVKPDRVVIEVCNIAGWVCDSLRAMGVEVQVANTNDDAWRWRKVKKKNDRRDALKAAQLSAVNQIKEVYIPQVEVRQWRALIAFRQQLVRRRGRMKNHIRDLLVTEGELLPRGASCWTKIGMARLEAMARPLTEVGLNELWRGQLDLELRQLKAVQQEIAAAEAKLDAIAAADPRIKLLRTIPGVGPRLAEAIVALLDRPERFHKASEVSAYIGMVPKELDSGETVRRGPITKQGSRLVRSLLVEVAWAGLRHNPWVRETYQRISGGKKSRKKIAIVAVGRRLLVRCWAMLRDGTSWRTEMPKAA

SEQ ID NO: 432783 - protein, 415 aa, unidentified
MALKIVYKICCGIDVHKTFVVACVASTSDKGITSYESHRFSTYTSGLKTLLQWLIDRNCKDVCMESTSKYWIPVYNILEKGCSIVLAHPKYVKAIRGKKTDKKDAKWIADLFKHDLVAGSFMPPSDIRQLRDLMRYRFKLTCFKSSEKNRLQNCLTVSNIQLGNVVSDTFGKSAQAILDKLLENPADTSFDLEPLVYKSLKKKLPELRDAIDGFITPEQAGKLKIIKDHYDNLESRKAELEELILALAAPYQQELTILQTAPGISSNFTAIGIISEIGTNMEAFPSAKHLCSWAGLTPTNNESAGKKKSVRVSKAGCYIKPLLVQCANAVVKSTKHPEMRNRYLRLKKRRGHKKAIITIARMLLTALYHMLKNGENYNPELYQKTDLPPVDREITIEQALMLIRNQGYKIKSATT

SEQ ID NO: 432784 - protein, 370 aa, unidentified
MADYREAFVGIDVAKLRNAIAVADAGREGEVRFFGEVDASEESMRRVIRRIATKFDRVYFCYEAGPTGYGLYRLIRSLGHECTVVAPSLIPRKPGDRVKTNRLDAFALARLLRAGELTAVWVPDEGHESIRDLVRARAAAVETLRVHRQHVSAFMLKHGRIYPRKKGWTMRYLRWLQEQPFDHPAHQIALQEMVEAVCVSKERVDRLEGVIEEFVPASLAPIVRALQTLRGVDLIVAVTFATELGDVQRFESPRQLMGYLGLVPGGRSTGETVRRGGITKAGNGRVRHMLVESAWTYRHPPRVGAKKLYRLEQAPPKVREIAWKAQIRLTARYRMLSGRGKRTTVVCTAIARELAGFMWAVAREVQAIRS

SEQ ID NO: 432785 - protein, 465 aa, unidentified
MKSNRRPHRKKPAAGPSLLERLNPNAAGIDCGSDTHYVAVPADRAPTPVRAFQTFTADLHRLADWLTACGVTTVAMESTGVYWIPLYEILEGRGVDVVLVNARHVKNVPGRKTDVVDCQWIQELHSVGLLRGSFRPTAAIAALRAYLRHRETLVQSAATHVQRMQKALVQMNLQLPIVISDITGVTGLRILRDIIGGQTDPQALAQHRDHRCQASAAEITAALTGHYRPEHVFVLQQNLELFDAYQHQLAACDTAIEAHVLTLAAHAPTPASPVPAARTRKTPRNNEPRFEIRTPLHQLTGVDLTQIDAIGPYSALRLLSEIGTDMSRWPTEKHFTSWLTLAPRNKISGGRLLSSKTQPSANCAAVILRMAAMNLGRTDTALGAFYRRLAYRVGKAKAITATARKLAILVYRTLRDGLAYQDPGAAAYDAQHRVRVLHRLRQRAAHLGFSLLNRETGELLEGAVS

SEQ ID NO: 432786 - protein, 369 aa, unidentified
MGNSTTTSWVAMDTAAERIHVAIFRGEEATPSEEFEVKADAQGIGRLKKKLEKETGPVKCVYEAGPCGYGLYRTLNGSGYPCQVIAPSLTPRKPGERVKTNRLDARRLGNYYRGGQLTPVRIPDEQQEALRDLVRGRDDVRRNLQQSRQRLSGFLLRHGYHFKEGSRWTRKHWAWVKAIQFKQELAQMVVEEYITGVETQIEQMKRFDQKIHEISQRPEYAAKVSAYSVLRGIQTTGAMTIIAEGGDLRQYGWAPQFMASIGIVPGEESTGERRKPRSITKTGNAYLRRILIEAGWSYQKRLHAGAGIQKRRRNQPEALLAIARKADHRLHGKFSKLQYRYNKPSAVANVAVARELAGFVWAIGQFLEQ

SEQ ID NO: 432787 - protein, 350 aa, unidentified
MKKIVKQVAGIDVAQKELVVSLGRMYDDWSPHVYAHKTFANTEAGFMALIIWVKKQTEEAAVHFVMEATGVYHESLAYYLTDKGFEVSIVLPNKISNYFRTLDVKTVTDKTASEAIMLFGLERKLDTWEQPRGLYKTLRQLTRERGQLIEERTVIKNQLHAEQAEARPNKKTISRIKKRIELLNKQEKEIREEIEGLIKEDKEMRGLLIIICTLPGVGLLTAVTVLAETNGFDLIRNKRQLASYAGFDVKEKQSGTSVKGKARISKKGNKYLRKAMHFPALTAIRHDERFKAIFRRLVSKHGIKMKAAVAVQRKLLEMIYTLYTTKTLYDKEYLNKVNLEDKVTAAQAAR

SEQ ID NO: 432788 - protein, 341 aa, unidentified
MNKFNTISIDLAKSVFQVAVFNRHGKLTLNQAMTKKKMLTVISQHPGATICIEACAASHYWGRTFQSRGHTVKVIPPQKVKPYRSGNKNDANDAIAIYEASLRSDIHAVPVKTLEQQDIAMLLSLRQSYIKQRTAVSLRVRGYAAECGITFPQGANKLREMLPLVIEDAENELTPVARFVLRELYAQLLSIDEPIERVESELIEFAKQIPACQLLITLRGVRWIIASAIFARMGDASAYRNGRGASASLGLVPTHTGSGGKNKNHGISKSGDKTLRSLIVHGARAVVANIRDKKDRLSCWLRNLLERKPFNQVVIALANKTIRMACAMLKSNQSYNEALIA

SEQ ID NO: 432789 - protein, 370 aa, unidentified
MQENSKIFVGLDTSKMKISVALAEEGRRGEVRFLGDIDNTSDAIRRLIRKLTGKFCELLFCYEAGPTGYGLHRQITALGHACSVIAPSLIPKRPGEHVKTNRRDALTLARLHRAGELTTIWVPDPGHEAIRDLVRAREAAMEDLRKKRQQLQSFLLRHGRIYPGLRSWTLVHARWLSNLTFEHPAQYLVLREYRQAIEDAEARLERLTQQVADVVSTWSMAPVVEAYQAMRGVAFLTAVTFVAEIGDVRRFETPRQLMAYLGLVPSERSTGEQVRRGSITKAGNPRARRVLIEGAWTCRYPARLSRALQVRQERLPKTVRAIAWKAQMRLCARYRRLMAAGKRQTLVTTAIAREMAAFIGHEVEPRSAAA

SEQ ID NO: 432790 - protein, 345 aa, unidentified
MYRTRVGVDLAKEVIQVCIYRKTKVQSNIEMTPDEFLCWLFKNKPSTIIFEACSTSNYWKQKAIEAGHDARLICAKLVATVRQNQKTDKNDALAIVQAASLPDVTFIGGKTVEQQQLQSIKRLRELAVKQQGASQKQLVSLLLELNIRISNRKGGIISAIESVLEDATNGLSVECRSAIHTAKEQLSVLIDSVHRYDTCLEKSVAAHPDCKKLLKLEGVGTTNAINLYLALGCAEIGTFKKGRDASACIGVTPIQYSSGGTVKLGSIGKYTKNSLLRSQLICGAMATIRHIVKREAKTQKEVWLKALVERRGKKCAAVALANKTVRTAFAMLTQDTEYKAVLLAV

SEQ ID NO: 432791 - protein, 338 aa, unidentified
MTVVNLARLFVGLDYHQDFVQVCVLDEAGKIVSNRRVENDWRRIIAAVPTGAAVQAALEACCGAADLADELLQAGWSVSLAHPGFVARMKQNPDKTDYSDARLLADLMRVGYLPKVWLAPAELRELRRLVRFRQQKVNERRNVKLRIRAILRDHRIKDLDGNPWTRKWLKCLAALAHIGPDTEWILQQHLTHLSRLNGEIRQVDRRLEERVADDAVVQKLRQQKGIGLVTSATMRAEIGRFDRFQTGKQLARFCGLSPRNFSSGNKQADAGLIKAGNPQLRAVIIEAVHRIMHHHPRWQKLAQQLKSRGKHNCLVVAAIANRYMRWLHHRMQPEALAA

SEQ ID NO: 432792 - protein, 344 aa, unidentified
MNEPTTIAVDLAKSVFQVAVSGAPGRVDGHHRLSRARLFEFFARRPAAVVVMEACGSAHYWARQLETVGHTVVLLPAQHVRRYRLGNKTDRADAEAILEAYRRSALRPVPVKSVEQQAIASLHRLRSAWQATRTARLNALRGALREFGVVVPLGARQVLPAVAEALRSEAVPVTLGESLTEVCSEIRELERRIRSVESQLELLTVEVPVVRRLRTIPGIGLLTASALVAVIGDARRFPSGRHAASFLGLTPREHSSGERRRLGSISKRGDVYLRMLLIHGARAVLCHAKRQPKADRLRAWALRLERTRGHNRAAVALANRLARIAWAVWTKQKDFESQLIAEAA

SEQ ID NO: 432793 - protein, 405 aa, unidentified
MWFAGIDWADDHHDAVVLTDQGQLLGALRVPHTAEGLDHLTRFLRGGASTSGAAEPVICLVETQHGLLITALLEAGFTVCPVNPLAVGRLRPPSGVKTDARDARLLARLGRNDWPALRVLQPAGPLLQELKTLTRDLEGLLREQTRLVNQLTACLKAYSPAALRCFDGLTRQVTLAFLQAFPTPEAAAAASLDQLTQVLAQGHYPHPRQKAEQLAALLQAPQLHALPGVARAKARLMAALRAQLAVLTTQVAAFDQAIQQLFAQHADSAVFASLPGAGRRLAPRLLAEWGADRTRYASAASVRALAGTAPVLFQRGAFRGVRRRRACVNAWRQALSHFAWESVLCEPWAKAYYQRKRAQGKTYAMALRAVANQWVRIIYAMWQARQPYQRAIFLAAQHAHGGMVA

SEQ ID NO: 432794 - protein, 414 aa, unidentified
MLFIGDDWAEDHHDVELVDESGGKLAAARLPEGMEGITRLHELIATHHHTASDPDDHTSTNEVVIGIETDRGPWVGALVAAGYRVYAINPMSAARYRERHSTSRAKSDAGDAHLLAEIVRLDRAHHRPIAGDTAAADAIKLLARAHQNAVRERARQTLRLRSTLLDFFPAAVQAFPELTARDALALLERAPDPDRATRLTATRIIAEFKLAQRKNKEAKAVELRELFRAPALQHPATLQGAYAELVVSLVRAIRAINEQIVHLAGAMDNAFAAHPAADIYLSQPGLGPVLGARALGEFGDDPHRFANAQSRKNYSGQSPITRASGKKTVVMARRSGNRRLTDTLHAQAFSALTASPGARDYYDRLKARNIGHHAALRQLANKLVGILHACLKTNTPYNEDLAWQVQTAPGQLAA

SEQ ID NO: 432795 - protein, 416 aa, unidentified
MEIVHTHCGGLDVHKKTVVATVIVPDGQGGLQKETRTFETMTADLLALSDWLLSKEVTHVVMESTGEYWKPVYNILENNFEVLLVNAQHVKHVPGRKTDVKDSEWLAELLRHGLLKGSFIPPIGQRELRELTRHRTNFVRQRATLVNRVQKTLESANIKLASVASDVMGVSGREMLDAIIEGKASPTEMAELAKGRLREKREQLGKALEGRVKSHHQFVLAELLCQIDSLDETIARFDAEIEKYCCPFEEAVELLDTIPGVARRTAEVIVSEIGSDMSRFPTADHLASWAGVAPGNNESAGKRYSGKTRNGNKALSAALVQAAHAASHTRATYLSAQYHRLAGRRGKKRAIVAVAHSILVIAYHLIQRKEPYRELGSDYFDRRRPEATAKRLLKRLERLGYDVSRIEPLALLPTAA

SEQ ID NO: 432796 - protein, 356 aa, unidentified
MNAITRVGVDLAKTVIQIHAVDAGGKLVTNRQLNRDKFLPWCAQLPPGCLVAMEACGGSHHWARKLIALGLNAKVIAAHLVAPYRVQGKRGKNDANDAAAVCEAASRPNMHFVPVKSTVQQGILCVHRLREGLKEERTASINRIRGMLTEFGLVVSIKPEKLREKLNDMLEDATNELSGLARLVIQEAYEQWKGLEKRIQWCDERINSHIKDDAQAKAAKGLMGVGPITASALVATVGDFHQFKNGAQFGAWLGLTPRQNSSGGKTSLGGITKRGDMYLRTLLIQGAKSAVMTAQKRDDPISRWLNQLREKSGWQKAAVAMANKNARILWAMMTKGSTFDPRYVSVKPSNPSVVVA

SEQ ID NO: 432797 - protein, 367 aa, unidentified
MADPLRSEKDLHVVQVSLQELEEVLMRIVGGLDIHRQQVTFDWVDLDTGEAKRGRITPADRVGFRKWLGQFDGEVEVVLEGCTGWRFVAEECAAAGAKVHVADPAEVAARRSSKRRAKTDPIDARQLRLLLERGEVPESWIPPKVVLEVRERVRLYLDLLEDKQAWQHRIHATLFQHGVPKVDGKLLVAGRAEHGRDDPDLSDAGRDAVDTALRIIAALDADLTRIRAELVAFGRRHPGPRELAHEYGLGALLATAVWEELGDTRRFSASRQAVRHAGLDISVYDSDGKHKGRPTLTRQGPPALRWALYEGAVHAHKATSPDHAYYTRLARRAGSGRARLAVARKLARRCHHRLRALGDQAWVELPG

SEQ ID NO: 432798 - protein, 355 aa, unidentified
MISTKYIGMDVHKESISIAVRNAAGKIVMECVIETKASVILQFFEGLHGDLQVTFEEGTAAAWLYDLLKPRVARLVVCNPRRNALLKMGNKDDRIDARKLSELLRGGQLLPVYHGEHGLRTLKELVRSYVAVSKDLARVMTRVKALYRSWAIPCSGTQVYSRLYRVSWLSKISEPGVRLRAAFYFQQLDALRELRQEVRRELLAESKKHPAWKRLCEIPSMGPIRASVALGILQTPHRFRTKRQLWSLSGFAIETRSSADHRMVNGQLQKTKKRVTIRGLNQDHNHELKNLFKAAAVIASTKPGPFHEFYDALLAKGMRPEMARLTLARKIATTVWIVWKRGVSFDAHYLKPQTV

SEQ ID NO: 432799 - protein, 313 aa, unidentified
MQDLLEVCCGLDVHKETIVACLLKGSVNDEKPEKTIRTFSTLLKDLEELKTWLETENCHHVAMESTGIYWQPVYNVLESAFDGNISIIVANAKHMKNVPGKKTDMKDAEWIATLLRAGLLSGSFIPPQEIRELRNLTRYRKSIIEEISSQKNRIEKHLQSCGFKLSNFLTDIFGVSGRAIIDHIAEHGSITAKEVENYVRGRARNKIEDIKLSINGRMNKHQREFLKLLLKHLDETYKHLYEIEESINAEIEKYKRQIEQLDGIPGIDVTAAAAIIAEIGTDMDKFKTAEHICSWAGLSPGNNESAGKKSPLE

SEQ ID NO: 432800 - protein, 348 aa, unidentified
MSNVAVFVGLDYHQDSVQVCVLDREGRRLLNRSCPNDWRAIAAAVEPLGRVERAAVEACCGAADLSDELRSHAGWPLDLAHAGYVERMKRSPDKSDFSDGHLVADLCRVGYVPKVYLPSSYERDLRRLVNHRQSLVDQRRAAKLRVGALLREYRARPPEKRSRWTRAWVSWAASAPQLSGHARWVVGELLAEVAHLDRRVASADARLRGAAEGDPLVGRLMGEAGVGEVTAWVLRAYVGRFDRFASGKQLSRYCGLSPCNASSGSRQADAGLVRGCNRLLRATLVQAAHRLARTEPRWRGLAESMRARGKCGAVVAAAVANRWARGLWHRMKAPTNEPTKQAATEATA

SEQ ID NO: 432801 - protein, 384 aa, unidentified
MTEQSAAATAFDHHSTLVLALELSGKGWQVGAVLPGVARRPRRSVAPRDVAGLLAQIERWKAEAQRAGRTVLRTVLAYEAGRDGFWIARCLLAHGIEVQIMHPASIPVERRGRRAKTDRIDLDMLLRTLLAWLRGEPRVCSMVRIPSETEEDMRRPERERERLVSERIALENRIENLLCLHGIAGFKPRLKKAAERLDDLRSFAGAPLPPMLQEELHRLMTRHRMLSEQLKEIEAAREQAAMAAEPDCAVQQIQMLARLVGLGLATASGLTREVFCRSFADRRAIAGFVGLTGTPFNSGGSEREQGISKNGNPRVRRILLQLAWRWLRFQPDSALSCWFVERTGGAKGRIRKIMVVALARKLLVALWRYVETGEVPAGARLAAA

SEQ ID NO: 432802 - protein, 367 aa, unidentified
MKRIAHVGVDYHVKSLTIAVYLSDTKEFHETVRLPNDDKVIKKNMKRLSEQFELRICYEASGSGYGFQRKMQALGFHCDVIAPSLIPKKSGDRRKNDHKDARNLAQLYANGQLTVVQPPNQQQESIRSLTRCRLALKESEKQVKQQINSFVLSQDCHWKKSKWTCQHRAWLSGLTMPSTYLQQVLQEYLNLLAYLESRRQHLEHEIELIAQSETYAPSVKRLRALKGIGTLTAMVLIAEITDFRRFPNPRALMAFLGLIPGENTSDDARKPTAITKAGNKRCRNLLIESVQHYRKKPRICAKMKEAFSHIDAQSCLIATKCLNRLHKRYWALLLRGKSKQKSLVAIARELVGFIWALMCPQQARVTP

SEQ ID NO: 432803 - protein, 332 aa, unidentified
MDNFYFIGVDVSKKKQDFCVLFEGKVLREEQVSNHQQAVARLIGELKNDLEMDNEQFLICAEHTGQYTFPLVCACKSVECKLWLENPSQIKYSSGMQRGKNDKVDAKRIAIYASRFGDKVKYYDRPSEEIERLKQLERERALYVTDLAKYKGQMYDQKDFMPAALYRKKTKRMKGLIQELQAAIDAITAEMEKIIGSTEVLARQMELLMSIDGVGKVVALNVIIETEAFSRFDNPRKFCCHAGVAPFSYTSGSSQHSKNKVSHRANKNIKKLLHMAALSVTHRKEGELKAYYMRKVEEGKNKMSVINALRAKIVARMFAVIKRNEFYTPIYS

SEQ ID NO: 432804 - protein, 400 aa, unidentified
MKGFFTYEIIGIDIGKNKHFFCVMDQQTGEIISQPVSFSNDKEGFDFLVQKIKSYPKDSILIGMEDTGHYHFALLKYLLDLQYTVALINPKTTDFNRKMQGGITKNDKLDTINICDVLDTPERKKQYRISKVNSFDLYEQKQLTRHHHNLKEEENVYKNRLQKCIDIVFPEFNKLFNSKYGIVYMNILKTFGSAENVANTDIRTIRKCFEIEGRGNRISLTPERLKECAISSIGISSSAEVIQIKHLTAQIELIEEQLTEIDKKIEEFSIQNNSPILSIPGISHFSGTSILAELGDISNYSKPSQIIKFAGVAPLHYESSQFNAQHTAITKKGSKYLRKTLYQIILPVIRHNPVFNKYYQLKISQGKGHRCAQGHCVRKLLRIIYHLLKTNQQFDPQLLR

SEQ ID NO: 432805 - protein, 360 aa, unidentified
MSKISKQTGRKKTTMDKPERTMGIDVGDRYSHLCLVDGDGEVVERDRVRSTEAAFRRHFEGAPRLRIALECGTHSPWMSRLLKQFGHQVIIANARKIPTITESESKNDRNDAEQLARFAAFDPRLLSPLQHRSLGRQQDLNLIQARAILVKARTMIVNALRGLVKSAGGRLPACSSASFPNRAAGAVPPTLADVAGPLIEQIARLNVQIGAMDQQIEKLVIKYPEIGTLRSAPGVGPLVAAAYVLTLDRPNAVPSSRSAGAFLGLRPGQSQSGDSDPQRRITRTGNTYLRCLLVQSAQYVLGRFGPDSALRRWGLKLAAGGAKRAKKRAIIAVARKLAVILHSMWRSGQRFEPFPQSVQA

SEQ ID NO: 432806 - protein, 431 aa, unidentified
MNEHELIRIKQFRQFKKKIRGSKEHLIIGIDIAKEKHVAFMGTSQGKVLRRRVIITNDKQGFDKLLEETTAVQKQHGFEKRVFGMEPTGNYHKPLAQWLMDQDHMVVLVTGKAVKENRQLLDGRWDKNDTKDSANIADLVSQGKCQFFANPDKMTTCLRDLLSLRKRLKRQEHSLRMRIRNSLLSKHFPEMDRYWGSCLRENMAIVRWCLDPRKIAAMPLKEFIRMVTSTDRGLRQVNRLQAIHQAAADSIGLPVTEATRFEARLLVDELEQVCERAVQLQEQIKILCNGSPYYKLLQTIPGVGPFIAAVVLAAIGNPHRFTNRSQVIRLAGLDLNANRSGKNSDMAVPVISKKGDANLRYALYQASLIATYHNDRFKQLFRRMLEGRERERGIRTKMRVKLASKILVIAWTMMKNSSSFNPDLLRVNMAV

SEQ ID NO: 432807 - protein, 342 aa, unidentified
MQIAVLGIDLGKNSCSVVGLDESGGVVVRRRMHRLSVIKFAGGLTPCVVAMEACCGAHHLGRLLQAQGHEVRLMSPEYVRPYVKAQKNDDRDAEAIAEAATRPTMRFVGVKSEAQSDMQSLHRARERLVAERTALINHLRAVLLERGITVPQGRRKLEKELHGIIADETSGLSCRIRQLVNDLREEWQTLDGRIAAFDGEFVSQARTDEAARRLATVPGIGSINATALVAAVGDARAFTRGRDMAAWLGLVPRQVTTGGRPKLLGISKRGNRYLRKNLVHGARAALPYLAARDTPLGKWVQGLLARAHKNTVVVALANKLVRIAWAVLAHGRCFDEAHAMAA

SEQ ID NO: 432808 - protein, 723 aa, unidentified
MTEQAEAFLRFVGVDWGSEAHQVCVIDGSRKILLEKAFAHSGKGISELVEAVLAAGGVDSEQVAVAIEVPRGAIVDTLLERGLAVFAINPKQLDRFRDRHSVAGAKDDRRDALVLADSLRTDEPAFRRVRAGDPTLIELRELSRIHEELKAERIALGNRLREQMQRYFPQVLTIGNVYEDRWLWELLEKAPTPELAKRVSLAKIGSLLKRYRIRSLTPEAVREAVSAEALHVAPGVLEACRRHVALLLPRLRLVHEQKSAVEREIEALLEKLSEPLEGKAEHRDARLLQSLPGLGKLVCATMLTEATEPLEHRDYRSLRTLCGVAPVTKRSGKQHAVSMRTSCSRRLRTALFYWADNATKREARWKERYTALRAAATRTAARFAGWPIACSPYLLLSSSPEHHTTQPAEAGQSWRRNSLPHLRDFSVAHPWEVQSRARGRSGRCARLGEVVVLRRVTFELSERCSRWHDPTPAGGRALRWHLLAPPGGVGCRLERCAHERDGSREIAEHELCADAHDAKARALKLAIAARVRARLARVNSTIDLYDELDARRQEISNEEPRDRHLAAKRNAKLTSLESGPERDFRLGETRAVLSSEELEPSCGFRIKWLSNTHLSLQRRQRAGRSHPGAGCVPRPRRVCACRDWRGAERAPLAKPGTLAALEASGLRITLESYSLSQRQSRRPPSIPRAGRRPSTEFGGGRKRAARRASTGRWGHPGPLAKRT

SEQ ID NO: 432809 - protein, 377 aa, unidentified
MKQDLTFVGLDVHADTVAVAAVQGRDAVRSLGIVTNTPEAIRRILGKLGPKKHLRVCYEAGPTGYVIYWQLLAMGIQCEVVAPSLVPIKASDRIKTDRRDAERLARAHRSGDLSAVWVPDAAHEALRDLVRAREAAKQDQTRAKHRLLKYLLRYGQRAAKDTRPWTAVWWQWVRAVTLPEDNQNIVLLDLIMEVDKQALRIARFDAAIDGAIEKAPPKTRATVEALQSLRGVAKLTAVTLVTEIGSFGRFTHASQVMSYTGLVPSEHSSGKKNRRGAITKSGNSHLRRVLVEAAWHYRHRPRLAKRQRDLQADLPPNVAAMAWRAQDRLHRRYWLLTAKAKPKGKIVTAVARELIGFAWAIGCEIEASPIRAGRAAA

SEQ ID NO: 432810 - protein, 371 aa, unidentified
MKEYSTFIGMDVHKNSIDIAIAEDGRNGQVRHYGKIDGTLCALDKVVRKLVSKGNQLHFVYEAGPCGYQIYRHLTAQGFDCDVVAPSRIPKASGNQIKNDRRDALMLARLHRSGDLTPVYVPMAGDEAIRDLTRAREDAKSDEKRSKQRLLSFLLRSGIRYTGGSPWRIAHMRWLSDIKMSHRSQQIVLQEYIGTVNQCKERVQRLTEQIQQLLPNWQLFPVVQALQSMRGVSTIVAATTVAEIGDLKRFQTPSELMSYLGLVPAEHSSGPKIKRGSITKTGNGHVRRVLTEAAWSYRLPARISRALLKRQEDLPESVCDIAWKAQLRLCSRYRHLWNKGKAKQVIVTAIARELCGFMWAIANEIEATANT

SEQ ID NO: 432811 - protein, 350 aa, unidentified
MIIIGVDYHPEFQQLASVDTQTGEFNEARLQNPEQAEKFYRELAGRGAQVRIGMEASGHARWLERLFGELHFELWIGDADEICSKRVRKQKTDRQDAQLILQLLVEDRFPRIWVPSSENRDLRQLLWHRHRMVQTRTRVMNQLQAVALNEGLRCKKRLWRERGRQHLESFQLGQWASRRRHDLLQLLDQLNPTIAELTQAIEREAEKCPEAQRLRTHPGVGALTALAFVLLIGDAKRFRCSKQVASYLGLVPLEKSSGNRRRLGHITKQGSSILRFLLVEAAQATVRSVPEWRSKYFHLMQRRGRNTAKVAMARKLAVRLYWMWRRGWDYEQLHRFGSHAGEPGNRHGVQ

SEQ ID NO: 432812 - protein, 335 aa, unidentified
MNYFVGLDVSMEETAYCARNAEGRILGQGKTVTDPDAIAVALARFGRPTRVVLETGRMANWLHRQLIARDLPAVCVDARQAHAVLSQMPNKTDANDAAMLAELARTGFYRAVRVKSEAAQSMRALLKARELVLRQRIDLDNTIRGLLTSMGIRLPEGPRRWADRVELALEANEALALALRPLLRLRGDLARSLAELTRRLLTEAWGSDLCRRLMGVPGVGAITAYAFLATIDDPTRFTHSRSVGAYVGLTSKRYQSGEVDYTGRITRRGDGMLRTLLFEAASSLITRAGGGGALREWGLRLRAKVGHKKASVALARKLGVILHRMWVDGTEFRVA

SEQ ID NO: 432813 - protein, 368 aa, unidentified
MKDITTYVGIDAHKKDLFIAMLVGTQATPLTWTVANEPNAIRRLVRKLEREAPGPVRSCYEAGPCGYALQRRMTTTRVVCQVIAPALIPRKPGERIKTNPRDARKLAELLRAGLLTEVQPPTPEEEAVRDLCRARDDAREDLQRSHHRLGKLLLRRGLHYSGRNWTRAHRQWIDSLEWAHAAERVVVDDYLLAIDHLEARLIELDARLAEIAETEPYREPVAWLRCFRGIDTLTAILILAELHDFRRFQSPRALMAYIGLVPGEDSSGEKHRRGRITRTGNALVRRLLVETAWHYQHRPSVGVALTRRRKGQPTRVIAIADKAQQRLCRRFRRLAEHHKPAPKIAVAIARELAGFLWAVLQPASVSAS

SEQ ID NO: 432814 - protein, 333 aa, unidentified
MVLWYRPAQARFRPDGPRVKQARVANTPFALAQYFAAFPAPHHAVVESTGGWYWLADVLAPLGVDLVLAHATRLKAISAAKVKTDQVDSDVLAQLLRADLIPIAHMIRSEQRGPRDLMRARLRLVEKCVSAQNSIDRLLEKFNVATVAQLDALYQLQAACHQAQIHLLDEQITTLERALHPHLIPNPDVQRLLWIPGLGKVNAFTRYTEIDGITRFPSARQFFSYCRLVPGADNSGGRMRHRSGSKAGNRYLKLAFSHAGIRAVQYYPEIRAFFKAKARRKPIRIARTLVALELARIVYQVLTKQEAFNGQFKTHPLSRRKHAQWPRRASPSV

SEQ ID NO: 432815 - protein, 365 aa, unidentified
MEKNTSAIPGWTVGLDVGDKYCHLALVNRSGSLVGKSRIPTNASALRKFFSNASVKQKQLRVVLEAGPHSHWISRLVEEERIEVIVANPRRLKLIYDSDSKCDESDAEALARLGRLDPSLLKPIKHRSQRSQSDLALIRSRDVLVRSRTKLINHVRGVTKSFGVRLKKCSTKSFHNQVPEQLPEILKPSLTPLLEMIKELSKKISHFDHLVEQKAVTGYPATERLRQVKGVGALTALAYVLVVDDPHRFRKSRLAGSYIGLRPRRDQSGGRDPELRITKVGDTMLRRFLVGSAHYILGPFGEDSDLRRWGLKLAARGGKNAKKKAVVAVARKLAVLLHHLWVSSEDYEPLRNQHYIERREQLAAS

SEQ ID NO: 432816 - protein, 345 aa, unidentified
MQITTIGLDIAKRVFQAHGADATGRAVLRRKLQRGEVLAFFAKLPACLVGLEACGTAHHWARQIRALGHEVRLLPPAYVKPYVKRGKNDAADAEAICEAVTRPSMRTVPIKSADEQAALLLHRVRDLLVRQRTMLINAVRGHMAEFGIIAPRGAKRVGELLSLIMGEDEAALPALARQALRTLAAELHTLDQRIAGAEAAILAWHKEHEASRRLAAIPGIGPVTASAIVATVGNAAQFRSARHFAAWIGLVPKQNSSGGKQRQGGISKQGNPYLRRLLVIGATAVIRHAGGRLAATPSGLWVKSLLERRPARLASVALANKTARIAWALLAKGATYRASVPAQPA

SEQ ID NO: 432817 - protein, 342 aa, unidentified
MEKIEKSGKTVLSSKACVQFIGVDVSMSDFTVSELLEDGKYILSTYKNTAVGIESFIEKINSPLDTLVTLEATGTYSMKLFFALAEYDIPTAVLNPKQSKGFISGVLLSTTKTDNKDACALALYGKVNRPTIYVLPDSKVLEIKEFRSLLSMYKKQRTVVSNKLHALSFHACPSAFVVAELEADKSYLEAKIQKIETQLCDLSAESFDDLYELAISIKGIGKATATALLIATNGCTNFDNVKQLAKFLGVCPTQNESGKSVRGRRGLAKTGAKEVRALLYMCARSARRFNLVCKDLYERLRSRGKCHQVAMNAVSHKLVKQFFAVVTKRVPFDNEYNLKNNN

SEQ ID NO: 432818 - protein, 345 aa, unidentified
MEQISRIGMDTSKHFFQLHGVNAAEKVVLRKKLRRKEMVAFFKALAPTVIGIEACGASHHWARILRSFGHEVKLIAPQLVKPYVKRGKNDTADAEALCEAMSRPTMRFVPVKTAEQQAALMMVGLRDRLILNRTQLSNAIRGYAAEFGFTAARGMAHIDPLLDRIQADENVPVLARELFAAQAEEYAQLQAQIAEVDTKLMAWHKADECSRRLAKIPGVGPIGAALLMMKTPAPEMFRSGRQFAAWIGLTPKDHSTAGKVRLGVITRAGDEALRSVLVVGATAVVQQVRRGGRGSPWIVDLLKRKPPKLAAVALANKMARIAWKLMVTGNSYAAKSAPATLMGAA

SEQ ID NO: 432819 - protein, 376 aa, unidentified
MSNVRCIGLDVHAETIAVAVAEPDGEVRSVGVIPNRPESIQKLVKKLGPAEQLRVCYEAGPTGYVLYWQLTALGVSCEVVAPTLVPTKAGDRVKTDRRDALKLARSYRAGDLTPVWVPDAAHEALRDLVRAREAAKKDQLRARHRLGKFLLRHGRRPSTAMPAWTQRHLTWVKTVHFEHAAQEATVLDYLHEVEHMTDRIARLDRAIDDAVKTAPERMRVVIEALQALRGIAQVSAVTIVAEVGELSRFTNPRQLMGYSGAVASEDSTGERTRRGGITKTGNAHLRRVVIEAAWAYRYRPAVGRALRKRQGEVSPEVRAIAWKAQHRLHARYRHLTARGKCKQETVTAIGRELLGFIWAIGVHVEAKRTRTASVAA

SEQ ID NO: 432820 - protein, 375 aa, unidentified
MNTSQAEGMTVTIVDAARPVPGGADTHSDLNVASCLVTGGVDTHLDLNVAAALDPVGGLLGVAEFPTTLAGHRELLGWLSGFGPVARAGVEGTGSYGAGLARFLRAAGVEVVGVDRPNRQARRRSGKSDPLDAIEAARAALSGRACGAAKSRDGNVEAIRVLVVAKRPARSAKIQTLNQIRHLSFTAPDQLRQRLAGVSRQQLAARAAALRPPTVDSADPVITATRTALRILGRRVLALDAEKARIDALLATLVTQTAPQLLTVFGVGIDTAAELLVTAGDNPGRLRSEAAWAHLCGTAPIPASSGKVTRYRLNRGGDRQANRALWGIVITRLGNDPRTRAYMARRLGEGRSKPEVIRVLKRYVAREACHHLPRP

SEQ ID NO: 432821 - protein, 340 aa, unidentified
MLIIGCDFHTRYQQIAMAHESGEAQAFYRSLQSSQEPVRVGIEATGPMHWFERLLAELGHELWIGDSAKIRASEVRKQKTDERDAALLLDLLLAKRFPRIWVPTPAERDLRQLLWHRHKLVRLRTMLGNQLHFLAMSQGLCRKGKLFTKKGRAELGSLTLGPWARRRREELLKLLDQLDAPIAELHDAVLEEAKRRNDAVLLMSHPGIGPVTSLAFVLAIGPVTRFQCSRKIASYLGLNPTEESSGGRRRLGGISKQGNTMVRWLLIEAVHPAIRRDPALRQDYQRLKFRRGHAVAKVAIARKLAVRMYWMLRSGADYAQLVRRQGSPGATLMNASSSLG

SEQ ID NO: 432822 - protein, 335 aa, unidentified
MDIRHFIGIDVSKNTLDWAVYANKGIIWQIQSENSPLAIRAVIKQLQALPNFQIANCVVCMEHTGLYNAHALEVLFQAQLPIWLEASLHIKQAGGLQRGKSDSIDAQRIAEYAYRFQDRTRLWKPTRPVMKKLTEFTRLRQRLQGMISQLKVPLAEQKRFGDKALTTQLGQHCSSSLKALLSDLKGVERAIKQLIADDPTLKSLFELVTSIPGIGQVVATELILASDEFKAIEYPKKLACHAGVAPFEHSSGSSVRGKTRVNHHARKSLKTLLHMAAMSALQVKGELQDYYQRKVADGKNKMLVINALRNKLIHRVYAVVKRGKKYDKTYALPLA

SEQ ID NO: 432823 - protein, 284 aa, unidentified
MTLYVGLDVSQKETEICVIDGDGRRTWRGKCSSEPECIAMVLREHAPDAVRVGMETGPLAIWLWHGLRALDVPIDCIHARHVAAALSLQVNKTDVNDAFGIAQVVRSGWYRPVAIKSLQSCRIRALLSARSELVAIRTTLYNQIRGLLKTFGVVLAAGKGGTFERAVLTRCPADPLIRSAIDALLEAWRVAGERRQRLDSQLLRLARSHEACQRMITIPGVGAITALTFTTAIDDPNRFSRSTDVGAFLGLTPRRYQSGEVDISGRISKSGDRMARSLLFEAPN

SEQ ID NO: 432824 - protein, 341 aa, unidentified
MKKSTVLAIDLAKTTLQLGKFEHDGKMVYNRALSRQQLKERLIKEPSAVVAMEACGGAHYWARFAQSCGHQVKLMNARSVKAFRTGQKTDRNDTLAIAIAAGQPTVRAVPVLSTEAQAAQSLDRARRLADNQCVSLSNQIRGLLSEFGIVFPQGYVALRRRIYGVLEDGENGLPATFRELVWSLWRMLERLRAHADELQRQLERRVTEIESCRRLLALEGVGPVGAFRLWLSLGDGSGFASGKNAAACLGLTPKQHSSGGKERIGHISHVSADQPLRSTLYQGALAVIRHLKRRHPRTRKEQWLAALVQRRGVKVAAIALANKTVRTAHALLSQNTTYQPQ

SEQ ID NO: 432825 - protein, 341 aa, unidentified
MQITTIGLDIAKNVFQVHGIDASEKVVVRKQLRRGQVMKFFEALAPCLVGLEACATAHYWARELTRLGHDVRMIPAKDVKAYVKRNKSDAADAEAICEAVRRPTMRFVQVKSAAQQGRLMQHRTRDLLLRQRTQTINSLRAHMAELGVVAAQGREGLKKLLAVITDGKDERLPVDARASLIVLAAQLQALQTMIGSIEKRIMTQHRASEEGKRVATIPGIGLLGASAITATITDPRTFRSGRDFAAWIGLVPRQDSTGGKQKLGPISKQGDRYLRRILVVGAHSVLRRAKQSPEKYPWLTRLLARRPFKVVAIALANKMARVAWVLLARGGTYRVPALAAA

SEQ ID NO: 432826 - protein, 350 aa, unidentified
MKTILAIDLGKRTSVFCRLNTSSLKTKYFTAKTDPHKFHDIFIELDGESSIVLFEVGTQAGWLSDMLRAMRIEFKVANVNHSAWKWTNNQNKSDKTDAHRLAMMYHHGFFPEVYIPEKSVRQKRSLIYYRQKIVNRMTQVKNSIRALMSTVAIDLPAGKNCWTKKHRKQLQQMALSFDNIDDPHDLWRGQLDMELRQLDDLQASLDKTTAKLDELNKQKQSVKLLETVPGIGSRSAEAIVAVIDNPHRFKSCRQICNYVGFTPRRYQSGQMERSGRISKRGNPLLRALLVQASWTALRFDWAKHIYKRVCRGSSKRRKIAIIAVARHLLMRCWAMLRDNKPWNYRIDKAA

SEQ ID NO: 432827 - protein, 394 aa, unidentified
MKLVGIDVGKNSHHFCVMDKETGEFNVAPSSFSNNKEGFDFLINSLKPYSKKSILIGMEDTGHYHVALLKFLLSNGYPVALINPKTTDLTRKMEGGITKNDKLDTITICDVLDTPERKKQYRITKVDRFDLYEQRQLTRHHHNLKEELNVYCNRLQKSIDLVFPEFNTLFSSKYSIVYMNLLKTFGSAEAIASTDIRTIRKCFEIKGRGNRISLTPEKLKECAKNSIGISSEVETIQIKHLVSQITLIKEQIAEIDKKIEEFSITNNSPILSIPGISHFSGTSILAELGDIGNYSKLSQIIKFAGVAPYHYESSQYNAQHTGITKKGSKYLRKTLYQIILTVINNNPVFKKYYLLKISQGKGHRCAQGHCIRKLLRIIYHLLETGQSFYPALLR

SEQ ID NO: 432828 - protein, 306 aa, unidentified
MYLGLDVAKDTVVLASEPAGVAGTFATDVAGLTALVAQCQAPGIALCVLEATGGYEAPVAAALAAAGLPVAVVNPRQVRDFAKALGRLAKTDAIDATVLALFAARVRPTPRALPDDATLELQAVLLRRRQLLDMLQAERQRHLRSHGRVRANLRSHIHWLERSLADTDDQLRELITSSPVWRVQDELLQSVPGVGPTLASTLLALLPELGQLDRRQIAALVGVAPLARDSGTLKGRRTCWGGRAPVRAVLHMAALVAARWNPMLRVFYHRLRAAGKPAKLALTAVARKLLVLRNAMLRDGQRWRHA

SEQ ID NO: 432829 - protein, 360 aa, unidentified
MSFNGTSVGLDVHALSVVAHAVDEQTGRVERARLCPDHGEILAWLRRLRDPVRVAYEAGPTGFGLARALAGAQIDCVVAAPSKLIRPAGDRVKTDVRDAAHLTRLLRLGEITAVTVPEADVEAVRDLVRAREDARADLMRVRHRLSKLLLRQGRIYSGGHAWNGVHETWLRRQRFDDVHTAAAFDHHFDAVLTATAARDRLDEQIVVVAASPRWADPVNRLGCLRGISALTGLALSVEIGDWTRFSGSSIGAYVGLVPTEYSSGVSRVQGSITKAGNAHVRRLLIEAAWHHRAAYRNPGPTMRARWAKVDPALKARGHAGNRRLHQQWCRFNERKKPHVVANVAIARELAGWCWSLATLK

SEQ ID NO: 432830 - protein, 312 aa, unidentified
METKFVGIDVSKLTLDFDCLPVSAAQQFGNDAEGIGALVELLKGSGVERIVIEATGGYETAVASALAVAKLPVVVVNPKQVRDFAKATGSFAKTDRLDAKLLALFGERIMPPLRTLPDEAQRALADLLDRRSQLVAMRAQEKTRLATVTAIARKNVQQHITWLDKCIAKLDGDLEERLRKSPVWCEKAVLLGSVPGVGQVTTFALLARLPELGQLNRQAIAALVGVAPFNDDSGKRRGARYIRGGRADVRCALYMATLSAKTHNKPIKEMYERLMASGKPFKLAMTACMRKLLTILNAMLKKNQPWKIQPSS

SEQ ID NO: 432831 - protein, 457 aa, unidentified
MGSSKVQGGSLSLQCIEPNAAGIDVGATEIYVAVPADRDAQPVRCFATFTQDLQAMTAWLLQCGIVTVAMESTGVYWIPVYEGLEDAGLRVCLVNSRHVKHVPGRKSDVSDCQWLQYLHSVGLLNGSFRPASAICGLRALSRHRAGLVEIASVHVQHMQKALTQMNLQIHHVLSDITGKSGLAILDAILDGQRDAVRLAGLADGRVHADQETVVKSLVGHYRSEHVFTLRQSLQAYRQYQKMLADCDREIEQHMGQLPDQPNGDQQPPLVNQGGKGKRRRKNQFHFDMGKELYRVLGTDLTVVPGLNALTVHTLVSEIGTDVSRFANVGAFTSWLTLCPSNKKSGGKVLSSKTRKSTSRVGKALRLAAQTLHKSQSYLGAYFRRLRARLGGPQAITAAAHKLARIVYHLISTRTAYDESVFAKEEQKYNLRHQHRLHKQALALGFQLVPLQNQDFVH

SEQ ID NO: 432832 - protein, 366 aa, unidentified
MDKSSTVKMSGNEILKQRKLTIGMDLGDRSTRYCVLDEAGDVVLERSVPTTKKGIDQVFGAMPRSRIALETGVHSPWISRQLTQLGHEVIVAHARNVRLIGESSRKDDRLDARTLARLARIDPQLLSPVQHRSAEAQAHLTVIRARAALVGARTALVNAARGLAKSYGERLRKCGTQQVRPDLAAGWSVELRAALEPLLGEIESLSQRIAAYDRQIEQIAKKEYPEVSLLQQVKGVGTLIALTYLLTLEDPHRFRRSRDVGCYLGLRPGRRNSGSSQPQLHISKEGDGYLRTLMVQGAHYILGPFGEDSDLRRWGLRLAERGGKNAKKRAIVAVARKLAVLLHKLWVNGEVYEPLRNHPTAVDAVA

SEQ ID NO: 432833 - protein, 350 aa, unidentified
MKDNITIGMDLGDKNHIVVVLDADGNQIECTSVINTKMSVKRFFKQYPGAKVAIEAGVHSPWISRLLKELGCKVYVGNPYKLRVIWDSTDKSDERDARMLAMVCRLEPKLLWPIRHRDIKSHNDLEVIKARDILVQSRTKLINHVRSVVKTTGERLPKCSSASFASRVFNLLDASLLPALNPLIYTIADLTDRIRELDRQIKTMTLEHYPDTQVLQQVPGVGPVTALAYVLTIEDPSRFTKSRMVGPYLGLTPRQDQSGDTNKQLKITKAGNTYLRKLLVGCAHYIIGPFGPDSDLRHHGISISARGGKNARKRAAVAVARKLSVLLHSLWVSKQVYVPLYKSYKFKKAA

SEQ ID NO: 432834 - protein, 396 aa, unidentified
MSGLPPESGLKSEVVTCPRMGWTGRAPAPNGSQSAPGACQERITTMPRTTTLHAVTAIGIDMGKNTLHLIGLDARGAIMLREKVARGRIALRLANLPPCLIGIEAGMATHYVARELAALGHDVKQVPATYAKPFRQGQKNDFRDAHAVAEAVQRPTTRFVPAKTNEQLDLQALHRVRSRLVSERTAVINQIRGFLLERGIVVRQGPRFLRQQLPDILAKQTDVLSPRMARIVADLANDWRRLDERIETVTDEIGTLAKSDDSCRRVMTVPGIGPIISSAMVAAIGNGAAFARGRDFSAWLGLVPKQMSTGDRTILGRISKRGNGYLRTLFMQAARVILLRSANWPKHSFGLWLVRAAQRLHPNVLAAALANKLARIAWTVLAQERSYEARVTKAAA

SEQ ID NO: 432835 - protein, 346 aa, unidentified
MMIIGCDFHPSWQQGSWLDTETGETGERKLVQASGDAERFYRQVAAPALIGMEATGNCHWLVDLLSELGHELWVGDAAQIRASYVRQQKTDQRDAAHILKLLIEGRFPRIWMPSSEVRDLRQLLLHRYKLVIIRARVKNELQHLCLNKGVQRKRKLWSAAGQQILRELPLKPWAGRRRDDLLKLMAMLDQQIEPLDQAVQEEAQRDKMALLLQTQPGVGPITALAYVLTMGDVSRFPRGKQVASYLGLIPREHSSGGRQKLGAITKQGNRMMRMLLVEAAQIAVRFDPEFRKQYLHRCHSKPKAVAKVAAARKLAVRLYWMLRTQRPYPDIVRIESSPRVPLVGAS

SEQ ID NO: 432836 - protein, 347 aa, unidentified
MKFMTPVTGFYCGVDLHARTMYLCVIDRQGKILMHRNIGTDPEYFLRLIQPWGKDITVAVESTFNWYWLADICASEDIPFALAHALYLKAIHGSKVKNDRIDCEKIARIALGGNLPLAYAYPRQHRAVRDLMRRRIHFVRERAELMGHIQCLNMQENNLPLGASLKVKAGRAAAPDNFIQEDVRFTAEANLAMIAHYDSVIPIMEKRILERASNGHQRELAILDTFPGIGEVTALTIIYEMDTVDRFKSRQDFCSYARLVKPLHESGGHKSPGHGAKIGNPHLKWAFSEAAVHAAQHNESIRTLYEKLVRRHSKGRAKSILAHKIGRAVFHMLKNGTAFDEKKFLSN

SEQ ID NO: 432837 - protein, 345 aa, unidentified
MEIRTIGIDLGKTVFHLVGVDALGRVVVRKKCSRTQLLRFTSNLRECLIGMEACGGSHFLGRALREQGHDVRLMPAQYVKPFVKTNKNDYIDAEAIAEAVTRSSMRFVPIKSDNQLDLQSLHQVRERWVVRRTAVINQMRGLLLERGITIRKGRRHLEASLPSILEDANIKLSGALRVLLTQLQMEMQYLHRQIEESDKLIVRIAGELEACRRLVAIPGIGPLIATATIAAIGNGAAFKKGRGFAAWLGVVPGEHSTGGKQKLTGTSRRGNKYLRKLFVQGAHTVLLQRTKQAPGLSMWLANLVSRKRKQVATVALANKMARMAWAVLFKGEAYRPPQIPQTVAA

SEQ ID NO: 432838 - protein, 347 aa, unidentified
MTIVEQRTAITGGVDTRSEVHVAAALDPLGRLVGTEAFSADAAGYKALFAWLENFGEVTKIGIEGTSSYGTGLVRFLRRKGVEVVEVNRQNRQSRRNQGKSDPLDAIEAARAAISGRASGSAKSKDGPVEAIRVLVIAKRSARQARVKAITQMRHLGFTAPEQLHCRLKGMTVTALVAECAGLRPARSGDPVTAATKASLSSLAHRVQSLDVELAELDEKIESLLVATVPDLLARFGIGPDTAAALLVAAGDNPQRLHSEAAWAHLCGVSPIPADSGKSAGHLRHHQGGDRQANSALWRIVMVRIAHDPETTAYFERRVKEGRTKRDVIRILKRYVAREVYRYLPRG

SEQ ID NO: 432839 - protein, 418 aa, unidentified
MKGTKDTSGQEKRYIGLDVHKHYITVGGMNARQELVLRLRNVEMERFKRWAEENLRQTDEVVLETTTNTWDIYDTVAPLVERVVVANPAEVKQIANARVKTDNQDVVRLLRLLIAGMIPEVWVPPVEVRELRALISYRWRLVKMATAIQNRMHSLLHRHNIQAPDGKIDTGENREWWEQVQLSDLERLRLNQELKTLRLVREHIEEVEKELGRLSTSERWARRAVHIMQLPGVGIIVTMTILSAIGDIQRFPSARKLVGYAGFGAGVEDSGEKHYEKGITKSGRKELRWALVEAAWQAIRSNASLRAEYDQLCKRKHPNQAIVAIARKLLVILWCLLNRQESYNPATDEDLAYKMLTWAWHMDKSAKRGMTNQQFAKYGLLQLGRGEHLTRIVKGGRPRRIAPKEEVLALMPELSLKQ

SEQ ID NO: 432840 - protein, 293 aa, unidentified
MDHCAIDVGGKKSQICVRDSGGTIQFEGAWETPALGDHLRQLPHCRVILETAAESFRIADQARAAGHEVRVVPATLVRTLGVGARRTKTDKRDARALSEVSTRIDLPSVHIPSARSREWKTMAGVHDALVSCRTKLINNVRGWLRGQARKPRSGVAETFAERVRRLGELPVYITSELKMIDALSEEIAASAKRFASVTNADPVCKRLMTVPGVGPSTALRFVAAIDVVTRFASAHKVEAYLGLSPGEKSSSERQLRLGITKAGSASVRWVLIQAAWILKIFALWRDGTEFKSC

SEQ ID NO: 432841 - protein, 377 aa, unidentified
MTAMTHSTVGSVSEPVLYVAFELSAKQWKLAMTSGFGVAPWVRTVPAKDLRAVERAIAQGRQRFHIALDCAVVSCYEAGRDGFWIHRALTQLGIRNRVVDSASIEVNRRARRAKTDRIDALKLVRMLVRVCNGERDVWREVRVPAASDEAARHVSRERMALVHDQTRLVNQIRSWLATSGARWPARRRAAWWTLVTDWQGHALPRTLQARIARADARLAQLTAQIDELETQQQAAVAAAAPDSAVQRLVHLKGVATTGASTLLDEGLVWRDFRNRREIGGLLGFAPLPYQSGEVARDQGMSRAGNERLQAISIQLAWNWVRWQPLSALTQWYRHRFAEGGTRARRIGIVALARQLIIALWRYATTGVVPAGAILKGA

SEQ ID NO: 432842 - protein, 358 aa, unidentified
MNTLLKYSIGIDVAKDKLDACLISLDNGLTIKLQSRHKFANSPAGFKEITAWIKKFCKEEIPVEILMEATGVYHEKLAIYLTDQKKKVFVVLPNKSQKYLQSLGLKSKNDRIDAKGLAIMCAHGQFNEWKPIVKYFYELRLLTRHYQSIQETRTGFINQLHALKHSGYSSKELIKQLEKTIALFDKQLKVIKKLIEKHLLSDDNVRRKVSQICKIKGLDTLSVATVLAETNGFELIKNIRQLVSYAGYDVIENQSGNHAGRTKISKKGNSRIRRILHMPALITVKYKEPALLNLYERIFDRTKLKMKGYVAVQRKILELIYTLWKKDKTYDPHFKQVVPSKDSTTLDKQLNLNQQLSL

SEQ ID NO: 432843 - protein, 394 aa, unidentified
MKLIGIDIGKNKHFFCVMDQQTGEIISQPVSFSNDKEGFDFLIQKIKSYPKDSILIGMEDTGHYHFALLKYLLDLQYTVALINPKTTDFNRKMQGGITKNDKLDTINICDVLDTPERKKQYRITKVNSFDLYEQKQLTRHHHNLKEEENVYKNRLQKCIDIVFPEFNKLFNSKYGIVYMNILKTFGSAENIANTDIRTIRKCFEIEGRGNRISLTPERLKECAISSIGISSSAEVIQIKHLTAQIELIEEQLTEIDKKIEEFSIQNNSPILSIPGISHFSGTSILAELGDISNYSKPSQIIKFAGVAPLHYESSQFNAQHTAITKKGSKYLRKTLYQIILPVIRHNPVFNKYYQLKISQGKGHRCAQGHCVRKLLRIIYHLLKTNQQFDPQLLR

SEQ ID NO: 432844 - protein, 307 aa, unidentified
MAGKVTETAVVGGVDTHKDLHVAAVVDQNNKVLGTQFFSTTRQGYRQMLAWMTSFGALKRISVECTGTYGSGLLRYLQNAGLDVLEVTAPDRMERRKRGKSDTIDAECAAHAAFSGIRTVTPKTRNGMIESLRVLKTCRKTAISARRVALQIIHSNIISAPDELREQLRNMTRMQLIRTLGSWRPDASEYRNVTNVYRISLKSLARRYLELHDEIADLDVMIAAIVDELAPELIKRNAIGYESASQLLITAGDNPQRLRSESGFAALCGVSPVPVSSGKTNRYRLNRGGDRAANSALHIIAIGRFAN

SEQ ID NO: 432845 - protein, 328 aa, unidentified
MYVCILDSEANILVHQNIPTNSKAFLALIEPYKEDIVVGVECMFSWYWLADLCAREKIEFILGHALYMRCIHGGKAKSDKIDSEKIARIMRGGDFPLAYAYPAELRPVRDLMRRRSHLVHIKSEIQSHIAITNYQYNLEPFEKNIVHKANRQGIADHFKDASVRLNVETDIAVMDALHDQINHLENYIIKHAKHYDGRMLYRLKTVPGIGDILALTIMYEVLSVERFPTVQKFCSYARLVKCANESAGKKMGFSGSKIGNAHLKWAFSEAAVLFIRGNDQAQKYVAKLTKKFGKGKALSILAHKLGRAIYFMMKRNDVFDMKYFFRTH

SEQ ID NO: 432846 - protein, 436 aa, unidentified
MPFCGLDVHKRVVEAVVLNDAGKVTKRARFACERSELVRFAKRLGPRCRVALEATTNTWAVVALLQPLVAEVVVSNPMRTRAIAEAKIKTDKVDALVLAQLLRTDFLPRVWQPDDDTRRRRHLTSRRASLVGDRTRIKNRIHAVLHQRLIAPPTEQLFGKVGRTWLRTLELDDDGRTAIDSELALLAAVDAEIDAADLALARDAYADPRVRLLMTMPGFDVAVAQAVVAALGDVERFKSGDKAASYLGLVPSTRQTADHCYHGPITKQGRSHARWMLVQAAQHIGRHPGPLGHFFRRLAKKKNRNVAVVATARKPAVIAWNMLKRNEPYRYATPAATQYKLSKLRVRATGERRRSGTPKGEPRTKSYGTRTPTRRIPSLDEVLVSEDLPERAPLANGELRMLRRTKTTSLLNKISRPHRVPKKVAAKPTKPPANEE

SEQ ID NO: 432847 - protein, 341 aa, unidentified
MNEISIIGLDLAKNVFQVHGSGPDGSVALRKKLSRGRLLEFFANLPVCVVAMEACASAHYWGREIGKLGHEVRLINPSYVKPFVKRQKNDAADAEAIAEAAARPTMRYVNVKSAEKQASSMAFKVRDLLVRQRTQTINALRGHLMEYGLIVPQGIKHIPLLREQITTQPDLPEVARVLCDGLLDQVVFLSGQIAVLEKELRTRARQDEVASRLMTIPGVGAICATAIEALAPSAETFSKGRDFAAWIGLTPKQNSSGGKDRLGKVSKMGQRDLRRLLVLGATAVVRWARRYGAPAGSWLARMLSKKPPKLVAVALANKLARTAWALMARGGVYRAPAPGAA

SEQ ID NO: 432848 - protein, 410 aa, unidentified
MLFVGDDWSEDRHDVEIQDEVGRRLARARLAEGIAGITRLHELIAERLGEDGEPGRVVVGIETDRGPWVRALVAAGYQVYPVNPLQVARFRERHSVSGAKSDPADAHTLADMVRTDRHQLRPIAADTTLGEALKVLARAHQTLIWERTRHLLRLRSALREFFPAALVAFGEDLAGAHALELLGVAPDPASAARLSISRISAALTRARRRRVADKAKVIQAALRGQRLGQPPVLTGAYAASVRAQAAILATLQTQITTLEGQLEAHFGQHPDAEIYLSQPGLGSILGARVLGEFGDDPQRYASAKARKNYAATSPITRQSGKKKTVHARHVHNDRLLDALARQAQSALNASPGARAYYDRLRAREVEHFAALRQLGNRLVGILHGCLKTLYDEATAWPAATAAGDQQASAA

SEQ ID NO: 432849 - protein, 479 aa, unidentified
MKSTQPAKAARDQRYKDRHPRWTPLLERIQPDAAGIDCGAEHHYVAVPPDRDAQPVHAFRTFTTDLSRLADWLTQCRIKTVAMESTGVYWIPVFEILEARGLEVVLVNARHLRNVRGRKSDVTDCEWLRDLHSVGLLSPSFRPAAEIVVLRTYLRQRASLVEEAASHIQRMQKSLTQMNLMLHLVLSDITGATGLKIVRSILDGERDPARLAAHRDRRCHASLQEIIAALTGNYRAEHLFTLKQNFDAHEFDRKQITECDIAIHKLIDALAAAQPPPTTELPTARHPARPKKHDPAFDIRTPLHRLTGGADLSQIDGIGPHAALQLVAEIGTDMSRWPSANHFTSWLSLAPNNKISGGRLLSSRTQPSANRAAAVLRRCAMSLMRTSTALGAFYRRLAARTGKPTAITATARKLALLVYRVLRGDITYSDPGAAAYAQLHRTRVIKALRKRAQQLGLALLDLNTGEILTVNSLSPRPVL

SEQ ID NO: 432850 - protein, 430 aa, unidentified
MTYRQPTPPDAALVAIDISKRRNDVLIELPGWRQRKRLIVLNTRPEHDRFVDRLIKLDRRVVIGFEATGNYHRPLAYRLLQAGFSLRLISSVALALTREALHNGWDKNDPKDAQVILHMLRIGLCQTYCDPFLAGLNDIQELSKTHEIVSKAKTELWHRLLTHYLPLYFPEIARFAGNSRSDWFLAFLERFPTPASIAERAQKDFVEAAWPVIGRKVAKARLLNDIYQKACSSIGLPVELDSPAIAMFRMVIAEGRSLIRQRDMIEAQAHALLGSHPDYQRLCQLPGIGPINALTILAEAGDLRRFAHHRQFLKYCGLDLATHQSGQFRGQTRLSKFGNARLRRAFWMAAQVAIRQRDNSFRAKFERYIAKDRDNPDLRRKALTAVAAKIARSAHALVKTGTDYRPFFEGPIPSGRTSLSKCREGAFATL

SEQ ID NO: 432851 - protein, 355 aa, unidentified
MNSVRYVGLDVHRDTISAAVLNESGRMIQQSILATRAAAILDFIGGMRGTLHVTFEEGTHSAWLYDLLQRRVATLVVCNPRMNSLLKSGNKSDAIDARKLAELLRADMLSPVYHGEKSAMEVQHLARSYALLTEDTTRVMARIKAIFRGQAISCAGQKLYGHKHRDEYLAQLGACALRRRAELLYEELEAVRQLRRQAKREMIVECRKYPETKLLCSVPFLGPVRAAVLIGRVQTPHRFRTKRQFWAYCGLALEMRDSGEYRVIDGQVERRKKPAQIRGLNWNHNHELKNLFKAAATTASFSNGVFREFYLGLLKKNMQPEMARLTLARKIAAITLKIWKKGEAFDAELMKLQAA

SEQ ID NO: 432852 - protein, 364 aa, unidentified
MKEEKSKTRFVGIDLGKRTYHMAVVGKGGKVTMSNGTTYTAGRQGLYKKLRPGDKVALESCSLAFIMAKEMEAAAGCKVYVLNPGRLSIIYKSMKKTDKEDSLKLAHILEDFAEERLPVVPVPSDKEINRRKITANTRRAQNNRTRLINLLHALFVSQGITTKVRKDLATEVVRKEAIKELTGIERDEAEYLVQCLELSEKRIEKLDQMTAEESAGDKEIEMLQSIPGVGPKVAFAFVAHVGAARFENSGQLCNYLGLVPRVYMSGDTVRYGQITKRGNSYVRALLVQGAWALVRSRTGGKLKEMYEYMTIEKSKNKKKAIVAVARQLAEMMYTMMRDKTWYACRKFKPGKEAAAELAQLAISV

SEQ ID NO: 432853 - protein, 356 aa, unidentified
MADKLIVGIDVSKDWLDLCASNAAGVERIANTPEVVAAWLERVGAGLIAFEPTGGYERTLIAAARERGIPFVRVHPNDVVAFRKSRGIKAKTDAIDARLILAFVCDKVARAELRTSLIGDDRLRALAARRRQLVDALQAERCRLDAAALPAVRASLEAVIAVLRHSLGVLEAELADAIAAHPQTAELARLLQTIFGIGPVVAITLIADLPELGLLSAKQIAALVGLAPHTKRSGKTRYRETTGHGRPGIRRVLFNAARAAVRHPSLFKDFYDRLVTDNRRPGKVALTAVMRKILITANAVARDRQPWRGRPAAGTPCRPHAEQTAHRAGRVKAAAAPRAVARSASLCVGHVRQFWG

SEQ ID NO: 432854 - protein, 344 aa, unidentified
MNVTRIGLDLAKNVFQVHGVDRQESVIVKRKLSRSQVRGYFEKLSPCLIGMEACASAHYWAREFGRMGHQVKLIAPQFVKPYVKSQKNDANDAEAICEAVGRPNMRFVAVKTVAQQDVQAIHRIRSELVRQRTAKANQIRGLLGEYGIAVPIGIGALRRALPELQEDAENGLSGVFRRLLTGLREDLENFDTRVAALDEEIAIAARDDAVAQRLQSIPGIGPMGATALVSAVGDARQFKRGRDMAACLGLTPGQHSSGGKERILGISKRGDSYLRLLLIHGARAVLKVAGRKTDPRSCWVMNIAARRHKNVAAVALANKNARIAWALLTQGGVYDAKHGMAATA

SEQ ID NO: 432855 - protein, 347 aa, unidentified
MTKIIRIGMDTSKQFFQLHGVDEAEQVVLRRKLKRREVLGFFGKLAPTVIGIEACGGAHHWARELMRLGHEVKLIAAQLVKPYVKRGKNDAADAEALCEAMSRPTMRFVPVKSADSQAALMLAGLRDRLVRSRTQLANAIRGYAGEFGLVAAKGQAKIEPLLLRLQADETLPALARELFAAHAEEYAQLKAQLEAIDAKLMAWHRASALSRNLARIPGVGPVIASLLVMKTPDPHAFRSGRQFAAWLGLTPKDHSTAGKVRLGVITRAGDETLRSLLVVGATAVVWQVRRGAGRRPSPWLVELLKRKPPKLAAVALANKIARVAWKLMTTGEIYDARRALTATPAAA

SEQ ID NO: 432856 - protein, 340 aa, unidentified
MTLPYGRSFRFLHTLEGFKDLLSIINEVRSKTGSSPVVILESTGHYHQAVIQFLESQEILFLVVNPLISHQAKKSSLRKVKTDAVDAYQLCELYYKEDFENHKQRDVGLLNLRHLTRQHESITHMYIQVKLHFQSVLDQVFPDYRGIFGDLYSTVSLSVLREFPTSKTVLKAGLTKLTDRIACLCPRRSESWASGKAEAILAAAANNPFQETAYNSHLVSIELYINLLPQYQEHLLHLENKIDALAKEVEEFMIIQSIPGIGGKIAATILSEIGEINRFNHAKKLVAFAGVDPSVFSSGKFTANTNRITKRGSKYGPSRKTALFFQQVPNGHRKLVFVRI

SEQ ID NO: 432857 - protein, 342 aa, unidentified
MKKILRQIVGIDVAQKELVVCLGRMYGDWSSELYAHKTFANTKAGMEALVLWVKKQMDPEVAVRYVMEATGVYHEVLAYFLDEKGYELTVVLPNKISNYMRTLEVKTITDKTASQAITMFGLERKLENWKRPKEIFRKLRQLTREREQVIEERTIVKNQLHAEQTEAFPNKSSVKRIMDRIKMLNKQEKEIKAEVAALIAQDDELKKIVVIICSLPGVGLLTAAIVLAETNGFDLIRNKRQLASYAGFDVKEKQSGTSVKGKAHISKKGNKYLRKAMHLPALAAIRYNERFKAIFARLVSKHGIKMKAAVAIQRRLLEMIYILYKTNKPFDKNYMINKLQAA

SEQ ID NO: 432858 - protein, 414 aa, unidentified
MKEEYKVKRYYVGVDWADREHQLYVGDEEGEKVTEMKVQEIPDEMAQLGRWLDESRATGIELWAAIEKPHGRIVDFLLDHGVVVYPVNPKALDRVRDRYRMSQSKSDPFDARVLSEFLRTDHVHLRPLQPNSDEAQELKLLTRDQHRLVRHNTRLLNQLKITLKEYYPRPLEVFGDLGTKIAQDFLKAYPTPAALSQLSRTKWNRFAQQQHHLGKARCDELWEKLNKPQLVVPQHVVRAKAQLVEVLLDQLKPSITAVKTYTERVERFFASTPAAELTQTLPGGKSGTLVPTIWAELGDAQGRWESFQHLQAEAGVVPVTRSSGKSHVVQFRFACNKHLRHAAYLFAFAALNRSEWANRYYRDQRAKGHSHPQALRALGAKWLKIIFVMWRDHKPYDENYHLANITRQRMRQAA

SEQ ID NO: 432859 - protein, 375 aa, unidentified
MEHHTEAFVALDTAKLRNAVAIADAGRNGEIRYLGEIDNTEVETRKLVAKLASKHARLTFCYEAGPTGYGLYRLIKSIGHDCIVVAPSLIPSKPGDRVKTNRRDAVNLAKLLRAGELTAVWVPDERHEAMRDLVRARDAAVKDYRIKRQNVSSLLLRLGRHYPGKKTWGRAHINWLTSLKLEHREQRIAFEEMLLAVRQVRERIERLEQAMREAVADWTLAPVIEAVQAMRGIDTVGAIAFLAELGDLSRFENPHQLMAYLGLTPSERSTGESVKRGGITKAGNTRARRLLIEAAWSYRFPPRVSKDMQIRIGAAPRTAREIAWKAQMRLCGRFRTLTRKGKRPTIVVTAIARELSAFIWAINREIVGSHATANQ

SEQ ID NO: 432860 - protein, 347 aa, unidentified
MNFYTQQHKHYCGIDLHARAMYVCILDQTGTKLVHKNLPTTPEAFLRIIAPYREDLVVGVECIFTWYWLADLCEREGIAFVLGHALYMKAIHGGKAKNDKIDAHKIAVLLRGGMLPQAYVYPAEMRATRDLLRRRGHLVRKRAELLAHIQNTNSQYNLPEIGKKLAYKANREGVEEHFPDPSVRKTIEVDVSLIDHYDKVLGEVELYITRSAKAHAVQTFSRLQSVPGIGQILALVILYEIQDIPRFPRVQDFVSYCRLVKCAKESGGKRLGTSGKKIGNVHLRWAFAEAAVLFLRHNQPGKEYFTKLAHKHGKAKALTVLAHKLARAVYYLLSREQAFDLQRFVSA

SEQ ID NO: 432861 - protein, 322 aa, unidentified
MLGIDVSKLTLDTCLRLGSKSRHRRFANTQEGIAQMLAMLQSAGAGQALIAMEATGPYSLAAATSSAVAGHPVAVINPRRGLAYAPACERLNKTDKVDAALIARFAANEALPRWLPRPEEQTLLRELLRRQSALERQLHAEQRRLEVAPAAPALRASLQRSITWLQAELVRLEKSLKQHLRDHGPLRTEIDNLQTVPGFGEKSARLVAAEIPRHFAHARAASAWLRVVPQQCTSGQSIRKPSRIGHDAPSLRSQLYFCAVTALRCAPRFQAFAERLRAKGHSKMSIIMAVLHKLVRIAFAILKSGQPYQPDHVVTLPAPCSP

SEQ ID NO: 432862 - protein, 406 aa, unidentified
MAAVMIGVDPHKGSHTAVVIGPAEEPLGELRVRASAGQAGKLVGWAAAWPERTWAVEGAGGLGHLLAQQLVAAGERVLDVQPKLASRVRLLQAGDTNKNDPNDALPVAVAALRSRTCRQVVADDYPAVLKAWSKRHRDLARTRNQVACRLHAVLCDLVPGGHSKEISAAQAARILAQVTPSGAVALARVELAAEFLADLRHLDAQLRGTRKKLAAAVRASGTSLTQVFGVGPVIAGTIAGDVGDVARFPGRDHFASCNGTAPVEVSSGNRTIHRLSLRGNRRINHAIHMAAITQLRHKHSEGRACYDKKVAEGKTHKEALRSLKRKVSDAIFARLQADARQAAAARTKGPGGQPGNGSDSSAASSHPERRLFGPATPGPDTTIRPGTTAGTPSPSKPTSKKTRPAT

SEQ ID NO: 432863 - protein, 420 aa, unidentified
MITEDKDEVYYERCAGIDVHKSILEVCLRIGQKIEMKEFGALTHDIRDMVRWLKSNGCEMVAMESTGSYWKPLYNIFEEERLPAMVCNAYHIKNVPGRKTDAKDAQWIAKCLSKGLLKPSFVPEREQRELRDMTRFRKSQIEERARNVNRLQKFLEGANIKLGNHVSEIDGKSATALLELVIGKADFTVDDVAARMAGKLKATAQELFASLEGSITPMQREFFGHVMSVIKEQTAQIERTDEMIQNSLSTNYRAAVAALDEIPGIGKVAAEQIIAEIGDDMSRFKNQNSLCMWAGVCPGNNESAGKRKSGKTPPGNQALKTTLTQCAKSAVKKKDSFFAAQYNRLVSHRGKNRATMAVAHSMLIAIFFVLSGHEFHDLGADYYTQFNRERKINSHVKQLAKLGLDIPDDLLHLALSKPPG

SEQ ID NO: 432864 - protein, 457 aa, unidentified
MSRDNANPSSTEELRSVNPNAAGLDIGSAEIWASVPEDRTADSVRKFGTFTPDLYALADWLKECQIETVAMESTGVYWIPIYEVLEARGFKVCVVNARHIKNVPGRKSDVKDCQWIRRLHSFGLLSASFRPEAEMCALRAYLRHRASLIEHRAAHIQHMQKALQQMNVQLTQVLSDVTGVTGLAIIRAIVAGERDPHTLAAFRDRRCARKEDEIAKALTGHYRAEHVFALKQALALYDFYTAQLVECDAEIEQQFATLKPTATDDNPTWDANDKRDTHSKNAPKYDARTLLYRLTGVDLVAIAGLNASTVQTIISEIGTDMSKWPSVKHFCAWLGLAPHNDISGGKVLHSHILKTANRAGQAFRMAAQSTTRSYHTVYGAYYRRLRARMGPEKAMVATAHKIARTFYHMLKHRTPFQDLGAEEYEKRAREREIATLRKKAAKLGFTLLQPAPTPATT

SEQ ID NO: 432865 - protein, 354 aa, unidentified
MSQKLDASPAVIGIDIGKNSFHIVGQNQRGAIVLRQKWSRDQVETRLANLPPCLIGMEACVGGHHLSRKLQMLGHDARLMPAKYVRPYSKGQKNDFRDAEAIAEAVQRPTMKFVATKTADQLDLQALHRVRDRLVGQRTGVINQIRAFLLERGIAVRQGPHSLRFELPGILATRTDVLSPRMLRIIEGLAEDWRRLDQRIEGLSSEIETLARQDKACQRLMTVPGIGPIISSAMVAAIGTGDVFSKGRDFGAWLGLVPKQISTGDRTILGSISRRGNRYLRALFVQAAWVVLVKVKCWERYGLNSWIEAAKKRLHHNVLAIALANKLARIAWAVLNKGRAFACVKTEEMVSRPA

SEQ ID NO: 432866 - protein, 340 aa, unidentified
MGIVGGIDIHRRQLTFDIVDLATGENVRGRISPVERVELRRFLAGLDGAGGDVAMEGCTGWRYVTEELERAGFGAHVAEPADTAALRGNKRRAKTDRGDAQHLRKLLMTGELPESWIPPRHVLEARAIVRLYKDLADQRVAWTQRLHATLYHHGVLELGCPVAGEQARTLLHDAELSPAARRAVEVALAQIEIVNEMLAPIKLDLARLSRHQPGCQALTAHYGIGPVTSVAIWCEMGDTRRFSSSSDAVRHAGLDVTVHQSDSNRAKGHLARQGPGVLRWALYEAAMSSMKKASPDHEYFCSLREHLGTQRAALAVARMLARWCHHALRAAGDDAWTEAA

SEQ ID NO: 432867 - protein, 332 aa, unidentified
MGKRRNRVCGADVHKDLIVATIQSADGTEFQEKFGATYSELERFRDWLIANNCEQVAFEATGVYWFPVYDALSPSIDTIVANPWMIKGIPGNKSDACDSRWIAENCLDGKIKRSRIFSKEDRNLRTMTRARSGYTKTRTQLRNRIHKYLALCGIKLSSCISDIFGKSGRHILDGLVEVKDIDEILDSIPSGKVKKKRDLIKAALGNGIDDVSRMLVKDTLELLDHLEKNIEKISLEILSRLQKRAKDLAIVMSVPGIGFTSGSIILAEIGDYRDFHTPEQLAKWCGLAPGLNESAGKKKPCGITKQGSKSLRTILVEIAQVVITSFQGSSID

SEQ ID NO: 432868 - protein, 402 aa, unidentified
MNCVGIDVSKGKSMIAVMRPFGEVVVSPFEVRHTANELSELAGLLKSLDGETRVVMESTGNYHAPVAWLLHDAGLYVSVVNAMLVHDYGNNSLRRAKTDKKDAVKLANYGLDHWLTLPRYIPEEDTRLMLKICYRQYQQYSKVQTMLKNNLISLLDTTFPDANRLFTSPPRADGSEKWVDFVATFWHCECICGRSEKAFTTQYQKWCRKHGYNFSEDKALDIYASACRHFGVIPKTDTAKLLVEQAISQLQTTSSALAALKQEMQSLAASLPEYPVVMGMFGVGPTLGPQLLAEIGDVRRFHSKKALVAFAGIDAPPYQSGQIDVRSRSISKRGSASLRRTLFLVMSVILQCAPIDEPVYQFMDKKRSEGKPYRVYMMASANKFLRIYYASVKAYLESLEHD

SEQ ID NO: 432869 - protein, 345 aa, unidentified
MKIVGCDLHTRYQQIAMLDEETGELVERRLEHAGGEAKEFYTQLAGPVRVGIEATGHTRWFERLLAQLGHELWVGDAARIRASAVRKQKTDARDAALLLELLLSGRFPRLWRPSAEQRDLRQLLWHRQKLVWMRNAVGNQLHALAMGEGICRKKQLFTKKGRAELEQLNLDRWASRRRQELLRMLDQVDASLKQFDEAVSNQAEHSAEAARLMTHPGVGPVTSLAFVLMVGPVARFQRSKQLVSYLGLNPREHSSGGKQKLGSISKQGNPMLRGLLVEAGHTAARMDAELRRDYQRLRLRRGGSVAKVAIARKLAVRMYWMLRRQVNYTQLVRMQGSSRGTLVQP

SEQ ID NO: 432870 - protein, 421 aa, unidentified
MKRADTRKVRGVKADTLIVAIDVGMEMNRGYCTTPDGRSTKIFKFDNTREGLDTLWGMVTASKNRFKCNEVIVGYESTGPYGEPMVHYLMKKPVKMVQVNPMHTKRVKELNDNSPLKTDDKDPRVIADIIKLGRALSIVIPEGDAAHLRRLNNSRERHVRERTALVNQLQQLVFLLFPEFKKVMKDIKCRTPLYLLKKYPTPEAISVLETHILGEEMRKKSRGKFRERHADMLIKLARNTIGITEGVSGLSMDIRHILVQLEMLGNLIAEIESEMEITLGRIPYSSKLLSIKGLGVVSVAGIIGEIGDFKKFGTQPEIMKLAGLDLYEISSGKWKGQRRISKRGRSLLRKILYYAAIQTIRKNGILHDYYTRLTDRGMKRMMALVAVSRKLLGIIYAIVRDDSEYSVNFESMKRQVIKKAA

SEQ ID NO: 432871 - protein, 387 aa, unidentified
MPQPNDLSRSPAALDHDSTLIAVIEMSQSSWLVAGIVPGIERHPAKKLEPDEAALRGLLYRWRDEATKAGRTISRIAVAFEAGRDGFWLARWLRTHDIEAHVIHSSSIAVSREHRRAKTDRLDTALLKRAFLGWLRGEPDHCSMAAIPTIEAEDAKRPSRERESLVGERTRIGNRMKSTFARLGIRGFKPTLRKASERLEGLRTPEGTPLPMNTLAELRRDMARLRFINDQIREIEAGRLERLAQRAEEGAHPMVRLLARVIGVGIETADMLVQEVLSRNLRDRRAVARYGGLTGSPDESGARRREKGLARAGNARVRRGMIQLAWRFLMFQKDSALAQWYRARTADTRGATRKTMIIALARKLLVALWQLVTTGEVPHGVILRAAA

SEQ ID NO: 432872 - protein, 316 aa, unidentified
MQSALCIGVDVAKDNVVVACSSASFATRTVPNKTAALKTFLQSLPAQSSIAMEATGSYHQTLADLAHQQGLRVYVLNPRDLYHYAKGVGLRAKTDRVDAAMIARFLANEGPRLRAYQPPTAEQRQIDQLLRRRSKIVTLKTALQLTCSDAPSLRTESGKLLKSFAALLKKIDQQLAALQKAMPERSQQLERLESIPGVGPLTACWLANLLSRVPFANSDALVAFTGMDPRPCDSGQKRGQRRLSKRGPAEGRRLLFNAAMAASRCQAWKQTYEHYRERGWTTTEAIMILARKMLRIAFAMHKTQKHFDVQFIAKTA

SEQ ID NO: 432873 - protein, 322 aa, unidentified
MNPKNYGGIDVAKKNFVIGIYGQDKTKTGANTPKGHAKAVEYLQKHNVDLVVLESTGGLEVPLANALHAADIRVVIANPQRTHQYAASFSLGKTDHLDAKMLADYAQALDSRKMADDMCYAPPSEEALALEALVKRRSQLVEMRKMEKNRLEQTHASQKASVVAMIKHLGELIAALDKEIDQSNRGGFNGKGEILSEMKGVGRITCATLLSMLPELGKVPHKRAALLVGVVPPPRQSGEKEKKSGCVGGRMVVRNALYMAALTATRSEPKIKAFYEKLMSRGKAFKVALNACMHKLLRILNARMRDYLASLKETEESESQSA

SEQ ID NO: 432874 - protein, 427 aa, unidentified
MNSKQNDRINQVQENTVVIGIDIASETHYARAFDWRGIELGKVISFGNRLEGFKKLGLWIQTLQKEYVKNQVLLGAEPTGHYWFTLADYIQEHNMNMVLVNPHHVKKSKELDDNHPSKNDRKDSKTIAKLVIEGRYMEPYIPKGVYADLRISVNNRYRIIKELNGIKNRIERWLKIYFPEFKDAFGSTYGKGSMMVLHKAPLPEEVISLGSEGINHIWRVVKLRAVGMNQAKRLYAAALRSVGRKGGNRMARMELMMQLEDYDRKNSQLEVLDAIIENLCMQIPEVEKILEIKGVGMITIAGFFAEVGDISRFDSPKQIQKLAGLAIRENSSGKHKGKSGISKRGRKRLRTVLFQAALPMVVNNKEFQELHMYYTTRRNNPLKKKQSLIVLCCKLIRIIYGISVKGFQYDGQKLLSDIIRPVEMTAA

SEQ ID NO: 432875 - protein, 400 aa, unidentified
MLSIGIDVSKGKSTVCGMKPGGEIVYTPFEIQHTREGMSELVSLLHNSGEEVRAVLESTGSYHCPVVAALLENGIFVSVVNSLRMKRFCSQSIRKVKTDRIDAMQIALYGLAYWQELQPTRLPEDTYRELQLLARQYYQMTSILIKAKVDFNALCDQVLPGMQELMNDHAGRHKLSDFVLRYRHTTHILEMGETRFRKDYCKWAEKKGYRNCERMAALIFATAQNGIPVLPNAPSTQIVITEAIRVLHTVEASRDAILTQMQALAKTLPEYSLVREMPCIGDTLAPRLIAEIGDVRRFHSKRALIAYAGIDAPPYQSGKFCANNRHISKRGNRYLRKTGYEVMQSYVMHKPANDPIFTFIEKKRGEGKSGKLAMVAGLNKFLRVYYGKVTELYRSLSAIE

SEQ ID NO: 432876 - protein, 357 aa, unidentified
MPAQTKSAKRESQIAVIGIDIGKNIFHLIGLDKRGAIVFKRKFSRGQLECFLANLPPCLIGMEACVGAHHLSRRLIALGHDARLMPAKYVKPFLKGHKNDYRDAEAIAEAVQRPTMRFVATKTVEQLDLQALHRVRARLVSERTASVNEIRAFLLDRGIAVAKGIHHLRKALPDILAKHADFLLPRMIQIIEALVADWRRLDERIEGISYEIGELAQKDAPCKRLMTIPGVGPLISSATVATIGGGDMFAKGRDFGAWLGMVPKQLSTGGRTILGRISKRGNTYLRTLFVQAARVVLLKRTCWERYGLKPWIEAAARRLHPNKLAIALANKLARIAWAVLRHGRNFEVSHADAPQHA

SEQ ID NO: 432877 - protein, 404 aa, unidentified
MRLFVAIDVSSEKLDVCFLDSHDTVLKEICLSNDVNGANAIKEDVLHFHQLYNYEKIVIGMESTSVYSFHPSMFLTEDKDLRALDVEVVVQNPKAIHRYKKLFEEDKTDKIDAFRIADFLRIGRYNKFLIKEEKYVALQRLTRSRYQLVHQQTECKQHFLENLYYKCNTLSKELNTSVFGATMMEILSDSLSLDEIAEMDLEALATLLQKKGKGRFSDPEDLAKTIKKAIRDSYRLGKVVQDSVDVVLATYARLIQTLKKQIKEIEKSITALFEAIPEARYLTSVPGIGVVYAAGIIAEVGQIERFENEAQLAKYTGLYWKKSQSGNFESERTRMTRTGNQYLRYYMVEAANSVQLREATYRAYYLKKYDEVPKYKHKRALVLTARKLVRLVDVLLRNHQLYMP

SEQ ID NO: 432878 - protein, 392 aa, unidentified
MVISVGIDVSKDKHDCFIVNSEGEVLADVFTIQNTRDGFNFLLQKIQDCTTPQDKIKVGLEATGHYSYNLLGFLLDNGLPTYVLNPLRTNLYRKSLSLRKTKTDRVDARTIATMLLSDAGLKPYTDTAYHNEELKSLTRYRFDKVKERAKLKSSVSRLVCILFPELEKLVPSLHTASVYTLLEEFSGAKQIAAAHLTKLKALLETASKGRYKRDMALEIRDAARNSIGSWMPAKSLELQHTIRLIRELDVEIAEIEEQIQSIMDELCSPITTIPGLGFRMAAMILAEGGDFTRFDSPDKLLAYAGMSPSTYQSGQLKNCYPHMEKRGSRYLRYALYNATKYVCHWNPTFAAYLAKKRAEGKHYNIALSHAAKKLVRLIFAMEKSRQPYCSAA

SEQ ID NO: 432879 - protein, 342 aa, unidentified
MKAPSTRPAAVLGLDVGKSSHWACLVDRDGEVLASAPVRNREAELDALFASAPAGTLVVVDQFRNIGSLAVRRARAAGLGVAHLPGLAASRAAGLFAGEAKTDERDAAVIARTALGVPDSLSGVPGRGEALEAAVDLSDRRWLELLAGFGGAWGIARSGAEGPRAEAAGEAAAASTAPPPALVEAENRQVRFLAARISEALDEAGALEAETAALLEGDETYACLLTVPGIGPRTAAQLAVSVDIGRFPDHDHLASYCGIAPRVRSSGTSVRSVRASRRGDARLKSLLIFSCNSLVRSSGRYGEYYRACRARGMGHGRALKAVARKRLRAIYAVMRDRVPYRE

SEQ ID NO: 432880 - protein, 413 aa, unidentified
MAKASWHLLVANFLGEVVVAGVDVVADEAGYAEVRKRIDGAAVATKAQVVRIGVESAGHYHETLARRLMDDGYEVVGHNPAAVKTARAESGKARTKTDGLDAAAMCSLTIRGLGRRPYLPADAVGGLQVAYLGREALAAHRSALRNQITSLVDLIWPGASAEDKDRGVRPILSDLLSPTGVALLRLGPDPRRIAADSPAVLARRLRARGAKPTRAKCAELVARARMALAPCGPVEARTLLLQRFLDIFEALDAAIAALETEEAAALAMTKGAKLPEVVGLGVVSAAGYVAFVGDPARFDNRPERIWRALGADPTRAQSGPADPDLPISREGSAWGRAAMMKVGFCLTSHNPVFAGYLAGRREQNKPKKVARVAAANKANRLLCRLMATGATYDLEVHQRAVERARTAGASKQA

SEQ ID NO: 432881 - protein, 400 aa, unidentified
MTAARNSNPTPAQGVLHVAFELSWNEWKLAFTTGPAQKPRLKTIRARDLEALATESAKAKKRFGLAAEAAVRSCYEAGRDGFWLHRYLVAQGIDNVVVDSASIEVNRRQRRAKSDRLDAVKLVSMLLRYHGGERQVWSVVRVPDAADEDRRQLHRELAELKDERTQHINRIKGLLVTHGLALTEVDETLPARLAAARLWDGSVLPADCQARLLRELERWRLTQRQIMDLENERKRRVRRDDTPHVERVRLLLGLPGVGLNGAWLLVHEVFGWRTFRNRKQVGSMAGLTPTPFASGERSREQGISKAGNRRLRRLLVELAWCWLRWQPYSALSQWYRRRFGSGAARLRKIGIVGVARKLLIALWKYLEEGEVPQGAEVGPWQRKLGGCKRGRGADQGEAVA

SEQ ID NO: 432882 - protein, 316 aa, unidentified
MTDNSMICAGIDVGKSHLDIAIHPGTARLRVTYDAAGLKELDAFLQEHDVSRIGFEASGGYEWRLMVHLRAGKRPAARLQPAQLRFFAKSRLRRAKNDRLDAALIALFTATLEQLPALPDARFDRLAAELTYLEQIEQQIALVKTFAETALSETVKRRHAREVARLETCRKARLLRLEKTVRDDCDLAQRLDLLISIKGIGLRSALCLIIRLPELGHAGRAEIAALAGVAPYDDDSGKHHGRRRIQGGRERLRKSLFMCAFTATRHNPDLASFYARLRRNGKEHLCAVIAVARKLIILANAILIRKTEWAPQYPQK

SEQ ID NO: 432883 - protein, 333 aa, unidentified
MYYSGIDLHSDNSYITTVDESGIVVKQKRVENNNKLVLDYFHSLPGSHQAVVESTTGWYWLNDLLQDNGIELVLAHAKYLKAISYAKVKTDKVDSQTLAILLRQGLIPQAHKISRELRGLRDTMRIRLRLVQQRTACLLRLYSIQAKFNSSVPDPYRFQLAVLEHTRDTFTNQILALEKSLHPALIPNDDIQRLLHIPGIGKLTAFTVYLEIDGIERFVSDKHFVSYCRLVPAADNSNRSVRHRSSKDGNKYLKIAFSDAAVHAIQYYPEYKRFYQKLVRRSGEATARTVVAKELAKIVFYVLKNKTQYKGLKGQPISRQKSLQWPRLSSPLS

SEQ ID NO: 432884 - protein, 329 aa, unidentified
MFYLGIDVAKAKIDCCLILENSESKKKTKTFSNMPKGFEQLQTWLNHHAANSTQTIILMEATSIYHERLAKYLFDAGYQVCVTNPARARYFAQSMSKLNKTDKADSEVLARFAMTADLHFWQPLPEHIQLLNALLDRRAVLCEDLQREKNRLEKAESTFTIEPVLQSIHKSIKQLNKHIQDIDQQIDDHIDQNPDLKNDKELLSSIPAIADRTSLLMLSFLRSHSFERASQAAAFVGLVPIQRQSGSSIHGRSRLSKAGSSKIRAGLYMAAIVATRHNPHIKEMNERLLANGKTKMMAIGAAMRKLVHLCYGVLKHQQPYQENYCINSQ

SEQ ID NO: 432885 - protein, 351 aa, unidentified
MKYYTSTTEFNCGIDLHAREMYVCVMDRQGNKLVHTNIVGNDFAYFLKKIEPYRHSLTVVSECTFNWYWLADACFEAKLPFVLAHALYLKHIHGGKNKNDRIDSEKLAHLLRSNLIPPSYVYPSERRPIRALLRQRMSYVWQRAALMTHVSMNQTAEGLTPAAKGGHNRDVWQERVLTQYKNPLHQMAVSCEMDVIRAYDIQIEKLEAEIIRQAKQHEGRDYHLLLTVPGIGRILAMTILFELDTIERFATVKDFLSYSRLVKGSVASAGKVKGLTGGKMGNAYLRWAFGEAAVLGKRTYPLLSSYADRLVAKRGKFKGNAILAAKLARAVYFMLQKGTAFDTDKLIATSL

SEQ ID NO: 432886 - protein, 365 aa, unidentified
MDGPRTRQLSAIMRLYSAAKEGKPSMSKIVTIGLDIAKHVFQVHGVDFVGEIALRRKLRRSEVLSFFEGLEPCLVGMEACATSHHWARQLVALGHQVRLMPPAYVKPYVKRQKNDTADAEAICEAVTRPSMRFVPVKDEQQQAVLMLHRSRELLIRQRTMLINALRAHMAELGIVVRQGATGVDTLVTFVEDDEHDMIPPIARTALLPLVDHLRDVQRRIAKLDHTIIEWHRSSEQSRRLATVPGIGPITASALVATISDPTLFSSGRQLAAWLGLVPRQNSSGGKERLGGITKKGDPYLRRLLVIGAHAVLRFVRKSKATTMQWAARLLDRRPYKLAAVALANKLARIVWAVMVRNVEYRPQGT

SEQ ID NO: 432887 - protein, 342 aa, unidentified
MDHYAGIDVSLECSSVCVVDASGKIAREGKVASEPEAVIAYFGSLRLSVVRIGLEAGPLSQWLYAAMKEAGLAVELLETRHVRRALETMPVKSDRNDARGIAQLIRLGWFRPVHCKSIGAQETRAVLTARKLVQSKLLDVENSVRGILRGFGLKVGKTTNRSFAGRVEDLVVNHASLHLIAAALLSVHAVLLRELKAFDKQVRSMARVDVKAKLLMSAPAVGPIVALTYASAIDDPGRFTSSRRVGAHFGLTPKKYQSGETDYTGRISKIGDATVRTALYEAAHIMLIKPIKGCAPLKSWAMRIARRSGMKKAKVALARKLAVILHRMLANATPFNAAMAAA

SEQ ID NO: 432888 - protein, 346 aa, unidentified
MKQISRIGMDTSKYIFVLHGVDAAEQVVLRKKLSRKQVLEFFAKLPPTVIGMEACGASQYWARELRKLGHEVKLMAPQLVKPYVTRNKNDWRDAEGLCEAMSRPSMRFVPVKSAEQQAALMLTGVRDGLIARRTQLTNTIRGHAAEYGLIAPKGLDKIEPLLAQIAQDETLPAMARELFTVLGREYERLEGELQEIEVRLMAWHRSDALGRRLAQLPSVGPIIATMLVMKTPDPGAFRSGRHFAAWLGLTPKDHSTAGKTRLGKITRAGDEDLRRLLVIGATAVIQQARRGRGRHSHWLLALIKRKPPKLAAVALANKVARIAWKLMVTGETYDATRINAAAVVAA

SEQ ID NO: 432889 - protein, 325 aa, unidentified
MIVRTTASGDPLETVRISNDVDSLIKVMAGAGVSPEVVLEATYGWYWAADTLADLGAVVHLAHPLGVKGFSYRRVKNDVRDATDLADLLRMGRLPEAWIAPPVTRELRELVRHRAKLVAIRSGCKCEIHAVLAKCGIQVLMSDLFADAGTALLERLDAPAPYLARVGSLRRLIDDLDVEIDLFARLIRGRLAADDGYRAVQTIPGIGPTLGAVFVAEIGDVHRFPGPTQLASWAGLTPKHHESDTHVHRGRITKQGSRLVRWAAIESVQALGPGTGAGRLKHRVGDRRGRNIGKTAAARQQLGYVYYALRDGHVRSLTRRPRVAA

SEQ ID NO: 432890 - protein, 316 aa, unidentified
METSQTFVGIDVSSQRLDVDTVPVSQPFSEPNNEDGIASLTAHLKALNPQIVLLEATGGYEIAVAYALYEAGLPVVITNPKNVRHFAKAIGRLAKTDKLDAQVLALYAQRVHPPVQPLRDQEQLELANLMTRRRQLQGMIVMEENRRRTCTPKVRANIDLSLAHLRQLLKDLDRDIHDSIRRTPLWNENSEILQSCTGIGPKVSASLIADLPELGLLPRNKASALAGLAPMNRDSGQYRGQRKIQGGRSAVRRALYMAALVASRHNPVIKEFYQRLRLAGKPPKVALTACMRKLLVILNAMIKNRTYWNPQLPLAA

SEQ ID NO: 432891 - protein, 342 aa, unidentified
MEYYAGIDVSLEYSSLCVVDGTGKIVREAKAASEPAALIAWFGSLGLGLTRIGLEAGPLSQWLYLAMKQAGLAVELLETRHVRDAFKAMLVKSDRNDARGIAQLIRLGWFRPVHCKSMDAQEVRAMLTARKLVQTKLLDVENSLRGILRGFGLKVGKTTDRSFATRIQELVKGHPNLEAIGEALLSVRAVLLREFNAFEKRVRAMSRLNARAKLLMSTPSVGPIVALTYASAIDDPARFKSSKQAGPHFGLTPKKYQSGETDYSGRISKIGDAAVREALYQAAHVMLTKPIKGCSELKSWAMRIARRAGMSKAKVALARKLAVILHRMLANATPFNAAAAAA

SEQ ID NO: 432892 - protein, 407 aa, unidentified
MTTPAPAVYIGLDVGKSDHHAVALTSNGETVYDKALPNDETRLRAILDELLKTHGPVLLVVDQPATIGALPVAVAQSCAGVEVAYLPGLAMRRIADLHPGSAKTDARDAAIIAEAARTMPHTLRAIRVDDEQIAELAMLAGADDDLAAQITAASNRLRGLLTQIHPALERVLGPRITHPAVADLLGRYPTPAKLKTAGPGHVRARLRKHAPRLAAPLTEEIFQALGQQTVVVAGTEAAATVVPILAEQLAGLIHQRNKLATQVEAVVEAHPLHPVLISMPGVGVRTAARILTEVVGKDFADAGHLASYAGIAPITRRSGTSIRGEHAPRGGNKRLKRALFLSAFASLHHPASRAYYDRKRAQGKRHNQALIALARRRTDVLYAMLRDGTLYEDPTMPQTPSTVALAA

SEQ ID NO: 432893 - protein, 347 aa, unidentified
MIPVPEVFDYIVGIDTHARTHTYCLIDSRTGAIIDSAQFPTSKPGNARAITWTQRRSKNGNILAAVEGTASYGASITMSLRAADIEVTEVRPGPKREHAHTGKSDTIDAESAARRVLRSNVESLAQPRASGERATLRVLLSSRSLIDQQRTANRNSLTALLRSFELGVDARRPLKDTQIAAIARWRVVTDPAIEPLRSEAKRLAATVIEQTRLLEENHQKLAKFTEHLAPGLQEIQGVGPVTGAILVTVYSHHGRISSEAAFAALGGISPLPESSGNTTRHRLSRSGDRQLNRAIEVITRTRISCDPTTQDYVARRQAEGLSKREIRRCLKRYICRALYRELKTRMA

SEQ ID NO: 432894 - protein, 372 aa, unidentified
MIVIGADTHKQSHTVAAVDATTGRLIDDNTVRARRRSFDDLLVWARGVDAERVWALEDCRHVSGALERFLLRRGEQVVRVAPKLAAGARTTARERGKSDVIDAVSIARAALREGLATLPIAQLAGPELEVRLLVDHRERLVAQRTQLINDLRGHLHDLWPELEIPARGLTTSRWQDRLAGRLARAEQSARVRIARDELRRIRELTRSIDTLQRELTELVGALAPQLLAERGCGVLTAAKLIGEIAGIGRFSSDAKLARLSGSAPIPASSGHTIRHRLDRGGNRQLNCALHRLAITKGRLDPDTAAYLARKQAEGKSRREALRCLKRHLARRIWRLLQPPANPDDPAPSPPPRRPPRTITVHCNTPYNRFALT

SEQ ID NO: 432895 - protein, 341 aa, unidentified
MDHYAGIDVSVEYSSVCVVDSCGKVVREGKVASEPEALISWFGSLGLSLARIGLEAGPLSQWLFAAMRDAGLAMELLETRHVRTAFKTMPVKTDRKDARGIAELIRLGWFRPVHCKSMAAQETRAILTARKQMQSKLHDVEMSVRGILRGFGLKVGKTTPKQFDGRIRELVAGHPTLEVIAEEMLSARAALLRAFNGFEKRVRVMARHDAKARLLMTTPGVGAIVALGFASAIDDPARFRSSKSVGAHFGMTPKKYQSGETDYSGRISKIGDSGVRTGLYEAAHVILTRPVKGSGLKSWAMRLAKRAGMQKAKVALARKLAVIMHRMLVEGKPFNLAAQAA

SEQ ID NO: 432896 - protein, 343 aa, unidentified
MNFVGIDLHKKTISVCVVNQERKVLTRKTLACLPAEKIREFFAALGTFQAVVEATASYEWLWLLLEPLANRLVLAHPKKLRVIAESTRKSDRRDAQVLAEFLALDMIPEAYRPTPRQRQHRALVRQRFYWRKRIVAVKNRLRRILSDYNADRRDLFSPEGLVFLKGVAVSATDRFILNQLVAEWEGHEQQLMQLTKELKAFAKKAPQPEQEARAVLATIPAVGPVTIDVVVSELGPIERFRSAKRVVAYAGLAPGQRESAGHSRDLGITKDGSRYLRWALVEGAWRLIRRSAHWRAVYEGIQKRRGKKKAIVAVARRLLTVMAALLRSGQAYAFAAEPAGARG

SEQ ID NO: 432897 - protein, 349 aa, unidentified
MQIIGCDFHPGYQQIWVLDSATGEIFEKALSHERKEEVRAFYSSLAGPVRVGIEASGQSQWFERMLAELGHELWIGDAAKIRASTERKQKTDRRDAELLLKLLVENRFPRIWVPTAEERDTRQLLLHRSKLVQMRTKVKNQLQALALNQGMQRKWKLWSAAGRVQLESLPLLPWARRRRAELLRLFDELSASIRELDQVVGEQAYARVEARRLMTHPGVGAVTALAFVLTIGPALRFRRGKQIASYVGLIPTEYSSGGHGQRLGHISKQGSPFLRGLLVEAATTAVRYEPEMRRAYQRLAQRKSRALAKVAMARKLAVRLYWMLRLEVDYAQLIQGSHAGPPESFCGRG

SEQ ID NO: 432898 - protein, 349 aa, unidentified
MLIIGCDFHTRFQQIAMLDSETGEISERQLEQPEEARMFYTGLEGPARVGMEATGHAEWFERMLRECGHELWVGDAAEIRARVVRKQKTDSRDALHILELLLTDRFPRIWIPSVAERDARQLLRHRGKLVGFRTSVQNQLHALAMGEGVCRRRKLWTKVGRKELESLALGSWTNRRRQDLLRMLDQLQAGIEELDQAVKKEAESRPEAALLMKQPGVGPVTALAFVLTMGPVERFRKSKQVVSYLGLNPRESSSGGQQRLGSISKQGNSMMRYLLNEAAQTASKFDPELRRDYQRLQFRRGKAVAQIAIARKLAVRLYWMLREAAQPAPSARMQGSPTRPLVEETLSGK

SEQ ID NO: 432899 - protein, 388 aa, unidentified
MQVIGDRPEAASAIRTNLGAIFVSLELSQSTWLITSLSPGSGEKMSKHVVHGGDIAGLLERFARLQEKARARTGRNFPIIVIHEAGLDGFWIDRVLKNEGIESHVVDPASVATSRRRRRAKTDKIDGEALVRTLLAYKRGEPRVCAMVKAPTPEEEDRRRLCRERKVLITERVKHVNRLKGLLFSQGVCGYEPLRRNRRRRLDELRTGDGRPLPKHLKAQISRELDRLELLLEQIKVVETERDALLAAQQIAAPTSAAMLLAIKGIGPDFAAILWSEGLFRHFDNRRQIASYAGLAPTPWKSGSIDREQGVSKAGNPRLRTTLIQLAWLWLRHQPQSALALWFKERVVRNGGRLKKVTIVALARKLLVALWKYVTAGVVIEGAVMKVA

SEQ ID NO: 432900 - protein, 477 aa, unidentified
MAKKAKTLPALTLLPILPHETLSIGVDVGKFKHVAGFLSRTLLERHEHFEGCPTFSFEQSREGFRAFVDRIHSYVPLEQATILLEHTGHYHKNVEQYLLELDMTVYRIHVQKRAAGLLKTDKRDALGLANTLYTQLELGAQVPDKMQLVRRAIPPTKAAAQLQSLIQHRYELSQASTRYRNKLTAICDEIFPEWIQGFHDPNLPTSLAFRERFPTPLAIATASLAALHELRARNFPSDAQLLHLQQLAQETIGVKDRDRQHGLLLEQGLLIKELRLIQDHLEVLQTEMSAIVNNCREGQRLLSLPPIGGIQAATIIATVGNIANFEKASELKAYFGWAPKRNQTGTSFDRTTLSKRGVRPMKQMLFLMAVRATTLDGEWAKIYQRLLPRMATYDERTKDYRGKLKVIGRIAGQMAAMIFALLKTDQELVSRVSPGQELPPPMLYDPETHRKHREGNYRSLKPDTQPRKIIQLPREPS

SEQ ID NO: 432901 - protein, 368 aa, unidentified
MTTEGIRVIGGVDTHKHTHYAAAIDDHGRLLDHQEFPATDRGYRHLLTWLRGHGELIAIGVESTGSYGATLTRALTTAGEQVIEVNRPNRLARRMDGKSDRLDAEQIARAVLGKTSTATPKAKSGAVEVIRTLRVTRASAVKARTQAFNTLWGVMIGAPSPLRDELALLTKRTLVNTCLGLRPETDELLSLTSDPDRLLLATVKTSLRDLARRWRALDTEITALNRQIEAMVEATAPELVELHGVGAEIAGQFLVTAGDNADRIRNEAAFAKLCGVAPQPASSGRTTGRHRLSRSGDRAANSALYIVTIVRMRRHQPTRDYVERRTAEGLSKRDIIRCLKRYIAREIYANLPKPTADQPRLTRVQDAA

SEQ ID NO: 432902 - protein, 338 aa, unidentified
MNIVFLGIDLAKNVFQLCGLNLAGKPVYTKRPGRKELLQTLANIPACLIGIEASTGAFYWQREFEKLGHKVKVISPQYVKPFVRGQKNDGNDAQAIAVALMQPTMQFVQPKSPEQQDIQALHRARQRIVNHRTATVCQIRGLLLDRGIPIGSAVSRVRRAIPLILEDAKNGLSSRMRRTIAELYDLFNDLGRRIHFFDKEIETVFRQSEACQRIAKVKGIGPETATAVVAVIGKGTEFKNGRHFAAWLGLVPRQHSSGDRQVLMNMTKKGDRHLRTLFIHGARAVVRVATNNNDGHMNQWVNQLKERRGFNKTTVAVANKNARIIWSMLRNDTEYQVV

SEQ ID NO: 432903 - protein, 323 aa, unidentified
MNKDIKYFGIDISHLVFDITDSDGNYYQFKNNPSGFKKFVKLLDIDSHCVMEATGYYHYQLAYFLLESGIKLSVENPLAVKRFIQMKLSKIKTDKSDSKLICEYAKQVELKLWQGNSKHQTECLQMTRLLSVYTKQSTMLKNKLHGEDVLGNPSKAVVQSLKRSLKQVEKEMKTLEDKLLILVKQVHQDVLTRLKTIPGIGKKTSLMLVVLTDGFERFTSGSELCSYAGLTPIIRKSGSSVKGRPRISKIGNQKLRNLLFMCSFNACKYNKACREIYERIVAKGKSKKLALIAVCNKLLKQAFAIAKSGLIYDDTYRSTLVKS

SEQ ID NO: 432904 - protein, 396 aa, unidentified
MPEIWAGVDIGKTHHHVVVINAEGERLLSRRILNDEAELLALIGDVLAISDDVLWAVDLNHGGAALLIGLLTAHDQPVAYLTGLAVHRASATYRGEGKTDAKDAFVIADQARIRRDLGLLRPGDEIAVDLRTLTNRRLDLVFDRTRQINRLRAQMLEIFPALERSLDLTNKGPVLLLTGYQTPAAIRRTGAKRLETWLKNRKVKGAAALGRTAVEAAQAQHTALPGEKLAAAMVARLAKAVMTLEEEIAELDALIEARFREHPHAEVIRSLPGMGTRLGAEFIAATGGDMGAFSSADRLAGFAGLAPQPRDSGRVSGNLRRPRRYHRGLLRAMYLSAMASLKSCPASKTYYQRKRSEGKGHKQAVLALARRRINVLWAMIRDRTRYNPSPSVAAAA

SEQ ID NO: 432905 - protein, 386 aa, unidentified
MAHSTNILQHSIDYDQTLILAIELSNKSWVLAAQVPGLSQTKAKRTIEPDKKDLLAAIDGYRIRAAAAGRSVKRVITSYEAGWCGFWLARWLMAHGIEVHIVQPSSVPVDRRMRRGKSDGIDAELLLRTLLAWLRGEPRVCSMVPIPNEADEDARRCVRERGELVSERVGLVNRIGAVLATLGADDYNPLLQSRRRRLTELRTGLGDPIPPNALAKIARLLTRLELVLAQITELELERDAVARTDAPDHAAKMIQQLVSLRGIGVQSATVLVREAFVRRFANGKALGSYAGLTSTPYSSGGIDREQGIGKAGNRRLRTVMVELAWLWQRYQPGASQVVWFRERVGSTSRRVRKVMVVALARKLLIALWRFVIDGVIPEGAVTKPSI

SEQ ID NO: 432906 - protein, 345 aa, unidentified
MNKISVIGLDLAKNVFQLHGVDADGEIVVRKQLSRSQLRQFLTRLEPCLIGMEACGGAHYWSRELTRLGHTARMMAPAFVKPYLKSNKNDRNDAEAICEAVQRPSMRFVAAKTLEQQSVLHLHHARRLLVRQRVALSNHMRGVLSEYGIVLPQGVKVISRRLPELLEDADNDLPMLTRHLLAELKAEHDQLMERIDRFEQQLKAWHASNPVSQRLASIPGIGVLTATALAATVGEGQDFENGRQLAAYLGLVPRQASSGGKERLLGISKRGDGYLRGLLIHGARAVIHHIRRRLKAHQPGGNHWVEQLLQRCHVNEAAVALANKMARTAWVLLDRNETYYAVRPV

SEQ ID NO: 432907 - protein, 415 aa, unidentified
MGGRQQWYAGVDWGSQSHHVVLTDGDGRKIGERSFKHGGEGLAEMAAWLMAASCAAEPGQILAAIEVPHGPVVETLIERGFKVHAINPKQMDRFRDRFTMAGAKDDSRDAEVMASALRTDPRCFRTLAAADPIIVELREWSRIAEDLGVERNRLVNRLREQLWRYFPALLELEGDLGAEWLLELWEAAPTPDTANRLREATIAKLLKRHRIRRFDAAFVVNTLRRPPVCVAAGTVEAASAHVALLVPRIRLLNRQIKDAHSRIDGLTARLMPAEAAEPGQKKQHDAEILASLPGVGRTVLATLLAEASDALQRRDYAALRSLAGVAPVTKRSGKSCVVVRRLACHDRLANAVYHWARVAVQHDPRSRAKYAELRSRGHSHGRALRSVADRLLNVACAMLKSGTAFNPSSAAQKPA

SEQ ID NO: 432908 - protein, 346 aa, unidentified
MNQIIRIGMDTSKHFFQLHGVDAAEQPVLRKRLGRGQMVAFFAKLPPTVIGIEACGAAHYWARVLGEFGHEVKLIAPQHVKPYVKRNKNDRRDAEGLCEATGRPTMRFVPVKTSEQQAALMLAGIREQMIARRTQLSNAIRGYAAEFGITAAKGLDKIEPLLARLVQDEGLPALACELFAIQGREYAQVQGELKAIEARMRAWHRANADSRRLAQIPGVGPIGATTLVMKTPDPGAFPSGRHFAAWLGLTPKDHSTAGKTRLGKITRAGDERLRSVLVAGATAVIQQAKHGRGHPSPWLIALLKRKPPKLAAVALANKIARIAWKLMVTGESYDGVRILGASAIAA

SEQ ID NO: 432909 - protein, 401 aa, unidentified
MWKHNNNFKGVFMIYLGIDVSKFKHNCYLADEENFDEGCHFEIKNSRDDFEYLLKKLLNFDKDKIRIGLESTGHYHLNLSRFLLDLNFNIHFFNPYQTSLYRKADSFRNTKTDKVDAFFIAKLLRATDSNPTHNELYHNYELKSLTRYKSSLKNDRVKLKNTIVGHIDLVFPELYEVCKDVFCKYTLEILKEYPSADKISKANLTRLTNLIKKASNGNHSKEKAIEIREAARKSIGINSPAMSFRLVQDIKALEFLIGQINDVNEQIKPLLNEMDNPIMTIPGVGIEIGPSLISEIGNIENFESPSKLLAYAGLDPSINQSGTMHSNYSSMSKRGSSYLRQALFLAAFLICQNDETFRTYYEKKKSEGKHHYVALTHVARKLTRVIFHLLKTNQKFVSQTT

SEQ ID NO: 432910 - protein, 357 aa, unidentified
MVERETEAKSSGSGVTNPYHRTEHCDKIHAYRCDKEVGVIGIDVSKDHLITSRGRVRRYENSKKGYEEILKMKPCTIVLEPTGVYAIKPSQYFKERGVRVLQVSPNVLSREKEFRGKKTDFYDAEKLENMVDKAKEYDYNPLKELVTLYLFLKDIETKYKNRLKRALFLVSDNDKVSKDRLEKLAKGDFTQEELYQLEYTPLVLEEIKILAKNLLETQERLKEVRRMIEGQVPQDHVLLTIPGVGRLAAGVIIGVVGDVRRFPKPESFVAYCGLDPVVERSGKAVVSRGISKRGNKYLRSLFYFLAMRSYSRNPTLLKFYETHKDRLKGKKLYVALARKLARVVWSVWYNNRPYEPK

SEQ ID NO: 432911 - protein, 371 aa, unidentified
MKETITSYVGLDIHKSSVAMAIADAGRAAPRFIGTLNPSPTELSKALRRQKLKPENALLVYEAGPCGYGWVRYLQKHHWRCEVIAPSRLTRSPAEQRVKTDRRDALLLARELRAGNLTRIVVPDERDEAIRDLSRTREDAVAARLRVRLQMKAMLLRHGRDYVRFRSGSQAHERHLSTIRFEHPAQEIAFNEYRLACKEASERVDRITQALRDMCACWRMNPLVKALMCLKGLDFVAAVTFVAELGDLARFEHPRALMSYLGLVPSEYSSGPSRRQGSITKCGNKHARRILVESAWNNRFKAQISRILEVRQEGQPKIIRDISWKAQLRLSKRWRSLAMGRKLNQNKICVAIARELVGFIWDIGRHVSLKP

SEQ ID NO: 432912 - protein, 419 aa, unidentified
MFKIFYKNCCGLDVHKTWIYACIGITDTAGITSYHEARFSSFSRGLRGLAEWLQKYECKLVCMESTGKYWIPVFNILEKTCDVTLAHPKYTKPQKGNKTDRKDARWICDLFMCGMIKRSFIPPADIRHLRDLVRYRVKLTNMLTGEKNRAQNCLTVSNLKLDDVFSDVFGKSSRSIVEYILEHPGETFDVTPFVDSRCKTPIEEIQAAVDGSVSKEQAVKLRQCLTHIDELAAHKDKIEEEILQIVEPYRCYLDLLRTIPGCSSDPMTAITILSEIGNDMSVFPSSKNLTSWAGCCPRNDQSAKHVKSTRISRAGAWIKPLLVQISNALIHSKKYPEFSERYRRIKARRGHRKAIIAICRMLLTAIWNILTKLEPYSADGFLKERSVDKKKSMSTAEAIKLLKSRGYIIKDSPDDPLTA

SEQ ID NO: 432913 - protein, 316 aa, unidentified
MDQHSAMVPVFVGIDVAKDRLDVHLLPSGEAFAVARDHAGLEQLVARLDQAKAALVVLEATGGFEITVAAALSGAKLPLALVNPRQIRDFARALGRLAKTDALDAQTIALFAERIRPEPRPLADAQAQRLAELVARRRQIVEMIGAESNRRRQARDSQLQRDLDTHLVWLQQALARIERDLDDSIRGSPVWRATEDLLASAPGVGAVTARTLIAELPELGRLDRRRIAALVGVAPINRDSGAFRGRRMVAGGRSSVRKALFMATLTAIRFNPPVRALYQRLTQSGRPAKLALTACMRKLLVILNAMVRDGRRWADS

SEQ ID NO: 432914 - protein, 400 aa, unidentified
MENAKVCVRIAGQGRRKTVETVRTWASTTNAVLALREHLVDEQVSLVVMEATGDYWKPFYYLLEDAGFEVMLVNARQVKNLPGRKSDVSDAAWLAQLGAHGLVRGSLVPPAPIRELRDLTRARTMMTRERGRDIQRLEKLLEDAGIKLSSVASDITGVSGRLMLQALIDGQRDPAVLADLAKRRLRHKLPELTEALTGRFADHHAFLARMYLEAIDQRSRAITELTARIEVVIEPFRSFCNLICTVPGIGVRCAEVIAAETGADMSVFPTAAHLASWAGTCPGSNESAGRVKSTVTRPGNPYLKAALGAAALSIANTRGTYLAAKYRRIAARRGPKKALVAVEHAILIAIWNMAHTGAEYDDLGADYYTRRDPERVRLHAMNQLQRLGYHVTLSPAATSA

SEQ ID NO: 432915 - protein, 411 aa, unidentified
MDVFCGIDWAEDHHDIALVDRDGKLLARQRISDDAAGLTRLLDLLAGHGDSPEDPIPVAIETPRGLLVACLRATGRQVYPVNPMAVARYRDRHTVAGRKSDKGDSAVLAGVLRTDMHAHRPLPADSELAQAIAVLARAQQDAVWTRTTAHNKLRSHLREYFPGFLHAFAGARDGIMRPEARVILAAAPDPASAAKLTLSQLHALLKKAGRVRGIDAEAARLKEAFRKEQMRQLPLVEQAMGRQALALVRQLEAACASAADLEQAATESFNQHPDAGIITSFPGIGALTGARVLAEIGDDRSRFQDARGLKAYAGSAPVTRSSGKSRSVTHRKIKNNRLASAGYIWTFAALTASPGARAHYDRRRDAGDRHTAAQRNLFNRLLGCLHHCLITGQHYDEATAFPAQKATSAAA

SEQ ID NO: 432916 - protein, 345 aa, unidentified
MKTIMIGLDLAKSVFQVHGVDGAGQVVIRRQLKRGQVEKFFAKLEPAVVGMEACGGAHHWGRVLQGLGHEVRLMPAAYVKPYVKRNKTDGRDAEAICEAMQRPTMRFVAVKRPEQQAMMAVHRSRALLVRQRTMLANALRAIFAEFRIVVPAGVKGLQSLIAPLPAPAAVPEAGHAALTMLARQWQALDADITALEQQIVQSVRTNEAARRIMAIPGVGPITASAVVAAVPDMKQFRSGRGFAAWVGLTPRQNNSAATRRSGGISKQGQRDIRCLLILGASSHLRQEQARKRMKATTDPWLAGLLTRRPVKVAAVARAAKTARIIWALLAKDQCYRAPAQLQHAA

SEQ ID NO: 432917 - protein, 348 aa, unidentified
MAVYIGVDFHARQQTISYLTTEDGEIKRQQLDHGEAREVRKFYQQFRGQQVLVGYEASGYAAWFEELLEELGYELWVGHATAIRTFARRRQKNDRRDADLILDLLVRGDFPRIQRHSKVSRAVLQQLRYRQRLVKMRTMVINSLVFMGASRGVSLRTQLKSRRGLARLKQLALPEPLGQQRTELCQLLLEMQVKIKTVEQWLEEQANSDQRVQRLRTQHGIGILTGLGLVHTLAPVERFSNARKVTAYVGFDPVEDSSGERQRIGAISKQGSRLLRGLLVEAGQVAVRRDRDLAVVYKRIWLRRGHAKAKVAVARRLLIRAFIMLRDEIDYAEFQRRGVAARSSRGTA

SEQ ID NO: 432918 - protein, 353 aa, unidentified
MMVIGVDPHKQAHTAVAADELGRRKAQKTVRARRDGHRELIAWARQACPDGRTWAVEDVRHVAGGLVRELLAAGEQVVFVPPKLMAGARRGGRERGKSDPIDALAVARVALREEITLPAARLDGPVLEVRRLGDYRDDLVAERTRVVNSLRWMVHDLDPALAPAPRSLGSARARARLEAGLRALPGSAGRAVALSQLARVAALTAEITRLEQDLAPLVTALVPGLLALPGVAVLTAAKILGEAGDIRRFTSPAAFARHDGTAPIPASSGTGEDGPHRLNRGGNRQLNAAIHRIALAQARCHPGARALLERRGRDKHETRKASFRVLKRHLSDAVYRALKADAWRLDQPAPHAA

SEQ ID NO: 432919 - protein, 381 aa, unidentified
MTTLATRNTQEHTTEGTLFVAFELSEKTWKLGFSTGHGQKPRERTVTARQQEGVLEEIAQAKRRLGLAETAPVVSCYEAGREGFWLHRLLQAHGVTSHVVDSSAIEVNRRQRRAKSDGLDVRKLLSMLMRYHAGERQVWQVVTVPSVEAEDQRHLHRDLETLKQERASTTTRIKGLLSSQGIRVTSLSKLPEQLDALRLWDGSPMPPGLRRRVLRVYAQHTFLSEQIAEVEAERRSQLQASTDASIDQVRQLMQLKGMGINGAWLLVMEFFGWRAFKNRREVGGLAGFTPTPYQSGESAREQGITKSGNRHVRWMTMELAWSWLRFQPASALSVWFRARFGSGGARLRRIGIVAVARKLLIALWRFLKTGVIPEGAELKKA

SEQ ID NO: 432920 - protein, 336 aa, unidentified
MVVLGVDAHKRSHTIVAVDELGRKLGERTLGTTTADHLELLAWAERFGTERLWAVEDCRHLSRRLERDLLGAGERIVRVPPKLMAHARDGARSFGKSDPIDALAVARAALREPDLPTAQLDGPARIVRLLVDHREDLVAERTRVINRLRWHLHEIDPDMQPPARCLQRPKHLNGLTARLSEVEGVVARLCRDLIDRCRQLTDQISGLETEIEAHTRDLAPALMAIRGCGALTAAKIVGETADVRRFRSRHAYARHNGTAPLPVWSSNRPRHRLSRTGNRQLNAAMHRIAITQARYHPDARQYLQDRRANGDTKAESLRALKRRLSDVVYRALLADA

SEQ ID NO: 432921 - protein, 342 aa, unidentified
MQITTIGLDIAKNVFQVHGIDANETAVVRKRLRRSQVLAFFKALPPCLIGMEACATAHYWARELTKLGHRVRLMPAKDVKAYVKRNKNDAADAEAICEAVRRPTMRFVRIKSAEQQGQLMQHRTRDLLMRQRTQSINALRAHLAELGIVAAQGDKGVKELLSIVAEEKDARLPIDARASVILLAAQLQALQTLIGSIEKRIKTQHRSNEASKRLETIPGIGVIGASAIAATVADPTVFRSGRDFAAWIGLVPRQDSTGGKQKLGPISKQGDRYLRRILVVGAHSVLRRAKQNPEKYLWLTQLLARRPFKVVAVALANKMARMAWALLAHGGTYRAPVLAAAA

SEQ ID NO: 432922 - protein, 408 aa, unidentified
MYNAVGIDASKLKSTITVIQPAGVVIRKPFDVLHTSDELNTLVTYLKSLDGETRAAIECTGRYHEPVVKSLSEAGIFISAVNPKLIKGQKQNSLRKVKSDPADARKIARYALDNWAELRHYSSMDTTREQLKTLNSQFDFFMKQKVAAKTNLISLLDNTYPGVNKLFDSPVREDGSEKWVDYAYSFWHVDCVRKIGLKAFAERYEAFCKKHHYNFQKGKPIELFEASKQLVAVFPKEKSYKLLIQQSIQQLNLASEHIEILRKEMNALASTLPEYDTVMSIYGVGETYGPQLIAEIGDVSRFTHREAITAFAGVDPGVNESGQFKQRSNRASKNGSTRLRKTLFQVMTTYLQNRPVNEPVYQFLDRKRAEGKPYLVYMTAGANKFLRIYYGKVKECLRNLEQESNEES

SEQ ID NO: 432923 - protein, 323 aa, unidentified
MDPVMTMFLGLDVAKAKVDCALLLNGKVKSKVVPNNQEGFETLKQWLTKQGATHVHACCEATGTYSDAIALYLHDQGHTVSVVNPAQIAAYAQSQLVRAKTDALDAKLIARYCERERPMTWTPPPAAERLLLALLRDLQDLQSMHQAESNRLDTAHPDVRERIERHLEFLGREIEQLRKKIERHIDDNDQLRGRRDLLDSVPGLGEHTIPWLIAYLGDGQRFPGSKCAVAFCGLSPKPHQSGSSVRGKAHISKTGHADLRHALYMPAVVAYSRCKAFASFVQRLKAAGKPPKVIIVALMRKLVAIAQAILKSGKPFDPSLHCT

SEQ ID NO: 432924 - protein, 367 aa, unidentified
MKKISTVAAKQTKNFPQQKLTIGLDLGDRNSWYCVLDEAGKIRLEQRVRTTPKAMGEVFGAMPRCRIALEIGTHSPWISRLLSQWGHEVIVANARKVRLIAESRKKDDRLDAQTLARLARMDPQLLYPVKHRSLQAQADLTVIRARTGLVRARTALVNTARGLAKSYGERLRGCNVRNMNPEKAEGLSPELQAALEPLLNAIESLSERIVEYNERLESLALQSYPQVALLKQIKGVGTLIGLTFLLTLEDPHRFRQSRDVGGYLGLQPGRRNSGQSEPQMHISKEGDPYLRTLLVQGAQHILGPFGPDCDLRRWGLKLAERGGKNSKKRAIVATARKLAVLLHHLWVSGEVYEPLHNSRPTTVAAAA

SEQ ID NO: 432925 - protein, 464 aa, unidentified
MITEKVEGDKMARRKQRRKRLAVTDLPEQLQHVNLNAAGIDVGSDRHVVAVPVGRDEVSVREFEAFTTDLHALADWLTKCGITSVVMESTGVYWIPLFELLEQRGFEVKLVDARQVKNVSGRKSDVLDCQWLQQLHTYGLLAGAFRPPDQVCVLRGYMRQREMLVQASSMHIQHMQKALQQMNLLLHNVVSDITGVTGMKIIKAIISGQRDPQILARQRDQRCHSSAATIAKSLLGNYREEHLFALTQAVSLYETYQAKIVECETAIASYLKQQPNRTDDEPPPPDKSVRNRDRLRGGVDVRSQLYKMTGVDLFNLPGLAADTLLTLAGEVGFDMTPWHSEKHFTSWLALCPGTKKSNGKVLSRKTKRSANRAAAAFRIAAASLARSQTALGAFYRRIRVRVGPAEAITATARKLAVLYYSLLKHGSAYVEIGQTAYEQKYQQRRLNSIQKQALAMGYQLIPAA

SEQ ID NO: 432926 - protein, 408 aa, unidentified
MEILHRRCAGLDVHQKEIVACRRIASGRKVEAELARFPTTTPGLLALSAWLMEAKVTHVAMEATGVYWKPIWHVLCADFKLILANASHIRNVPGRKSDANDATWIADLLAHGLIRASFVPPQPIQELRDLTRTRRELTREIVRHTQRIQATLEEANIKLTSVISDILGWSGRRILKAIVAGESDPLRLAELGHPRLACARENLVAALQGRLRDHHRFLIGQHLKTIEQLEATVAEFDARLDAALAPFRDAIERLKEIPGVGDNVSQTLVAEIGADMTAFPTADHLVSWAGLCPRLDESAGRKRSKRLRKGAPWLKPVLVQSALAATKVKNSSLRARYFSLKPRLGHKKAIIAVAAAMLRIAYHMLKDGTFYQDLGPDYHRPKNPERAAQNLAKRIRALGFEVEVKMAA

SEQ ID NO: 432927 - protein, 420 aa, unidentified
MEIAGLPTPVFCGVDWAEDHHDIALVDAGGKQLAKVRINDDAAGFAQFMALLAEHGDSEDAQIPVAIETSRGLLVARLRATGRPVFAINPLAVARYRDRHSVARKKSDAVDAAALANILRTDMAAHRPLPADSELVQAIAVLARAQQDAVWARGQAHNKLRSQLREFYPSILDAFAPHKHGLCSREARSILAAAPTPTMAAKLTRRRLQSLLKQAGRVRGIQAEAERLHEVFRRDYLHQLPRVEAALGHQTSALLRQLNTACDNADQLEEAVTQAFEEHPDAPVIRSFPGLAALTGARVLAEIGDDRTRFATAGSLKAYAGSAPVTRASGKSCKVMSRKVKNQRLAAVGYVWAFVSLTRSPGARAHYDRRRAAGDRHVAAQRNLFNRFMGMLFHCLQNGHTYDEAVAFPQSSAGHIAAAA

SEQ ID NO: 432928 - protein, 385 aa, unidentified
MTQAAQTSSFIPRDHDIFGGLDVDKKSMAVTFRDHGTMRKSLKLPNSASQLLNYTRKHFPGQRVAFVYEAGPTGFGLYDELTAANYPCLVVSPSMVPTAPGQRVKTNRLDGNKLSEGLRGGQLRSIHVPAASYRELRHLVQLRDTQVGQLTATKCRIKSLLLYEGIPFPAANGRWSGGVLRQLEALPCSAAVRFKLDRLLDALQFHFQSAAVVQKEIRRFCQSDPELRQSLSVLTSLPGIGTITATHALARLGDWREIRNVRQIAGFLGLVSSEHSTGDKENRGPITRSGDSRLRNKLIQCAWVAINQDPELRAFYRRIYQRQPRKVAARKAIVAVARKLTTRMYAVLKEQRPFVIRADSSVAPLTAEETVGPRERLDTAQNEQH

SEQ ID NO: 432929 - protein, 436 aa, unidentified
MAAVVSPTKMSLISAGGRYLLDTFKEVFFIMISVGIDVSKEKSTVCAIKPYGEVLMTPRDFKHTKDDLDSLVKQLSRFKEEIHIIMEATGNYHLPVYQYLKSKDYQISIINPLEMKRYRCQGIRNPKTDKIDSYIIAQYGIDFWYRFKPNDDMDEKRQELRLLGIQYTQFMKTRVIRCQALCEILDRTMPGVYGFLDDFNRDNGRDKLCDFAEKYWHSDNITKYSEKAFIERYNSWLKKKGYRQNEKEARQLYSVAKNAIPTLDSKLPSTKLLVQETVNVLREVDSSLYDILNQLKSLSKEMPEYETVLHMKGIGETLAPRFIAEIGDPRRFHSAKALIAYAGIDAPPYQSGQFTGTKRHISKRGSSNLRKLGYELMDSVNKHKSLYSGDPVCEYFMKKRNEGKPYRVAMVAAFNKFLRIYHSKVSNVLNEYDKTK

SEQ ID NO: 432930 - protein, 409 aa, unidentified
MDQLIERGAALDVHRKTIAVCVRVPDERGDRGQHVRTFGTTAAELVTLRDWLEAHRVTHVALESTGVYWKPVYYVLEEAMTCVLVNAAHVKQVPGRKTDVQDCVWLAQLLEHGLLRGSFVPPPPLRELRDLTRYRKVLIQERTREANRLHKVLEDAGIKLATVATDILGVSGRAMLQALVSGTTDPDLLADLARGTLRKKLPALRHALAGRFRAHHAFLVSQHVAHLDYLDEAVGALSARIEEALAPFAAELARLDTIPGVAQRTAEVLVAEIGVDMRQFPTAQHLASWAGLCPGQNESAGKHKSGRTRAGNKWLRVALIEAASMACRTRNTAFAARYHRIARHRGHKKAVVAVAHAMLVTAYHLLARQVDYHEPGADYFDRRHAERSTRRAIRTLERQGYRVTLESAA

SEQ ID NO: 432931 - protein, 342 aa, unidentified
MKFVGADLHKKSITLCVMEKDMAGKLEIIARKRLLCDKPDRVVRFLADHTPCDLVVEATIGFDWFAALAETVCERVVVAHATKMRVIAESTRKTDKIDARILAEFLAHDMIPESWRPTPRVRQHRTLTRYRTKLTRRSTSLRNTMRGILTRYKADRKDLFTRTGWQAAMQLKLHEEERWVLKELKAQLEDIQDRKLETDLRLGEFAHSAPLREQEARQVLASMPGVGFATIEVILAELGDWRRFKNSAAVVAFAGLDPGVRSSDETRHNLRISKSGSPQLRWILIQLAHRVKRRSARWEAIYGKLLKRMGNKKATCALARRLLVTIYAMLREGKAYRMPAAA

SEQ ID NO: 432932 - protein, 465 aa, unidentified
MRTDKKLWRNRKARKELARRLQSENPGLEVLHPHAAGIDVGNSAHYVAVRPDRDPQPVRRFECFTADLHRLANWLQSCGVKTVALQSTGVYWIPLYDILEERGFEVYLVNARHTKNLPGRKSDVQESQWLLKLHTYGLLNNSFQPPSKIRILRTYWRQRLQHVTGAATCVQRIQKALTQMNIQLANVISDLSGVTGQMIVRAIVGGERDPLKLAELSHPRIQASRGEIAKSLEGNWRQELIFVLQQEIEMYDTYQRRVAECDQQLQKQLTSFADTVLPPVNEALPPKKKKKQNKNNPHFHLADELQRITGVDLTRIDGVDVIVAQTLVSEVGLDMSRWKTEAHFASWLGLCPDNRISGDKVLARGTRHVLNRAANALRLGASTLLRSQTYLGAQYRRLRSKLGAPKAITAMAHRLARLVYRMLKYGQHYVDKGAEYYEQRNRQQQIDFLKKKAAQLGLQVTPAHA

SEQ ID NO: 432933 - protein, 371 aa, unidentified
MEHTRFIGLDIHKERISVAVAESGRSGAVEYLGEIANEPGAISKLCDRLRRPGKPLAFCYEAGPCGYGIHRHLTRLGHRCDVVAPSLIPTKAGDRVKTNRRDATMLARLHRAGELTPVWVPDADHEAMRDLIRLRSVVRQIVTRARQHLQGFLLRHGRKHGRGTAWRMAYRRWLSTLAFEHPAQQIALQDYVDAVMDAERRLKRVEEQVFGLLPDWNLRLVVDGLQAMRGIALINAVVLVTEVGDFTRFSNPRQLMAYFGLVPGERSSGETVRRGAITKTGNAHVRRALVEGAWAYRMKARIGRHKVDRIEALPKVVRDIGWKAQVRLCTRYRRLRARGKTANVVNVAIAREMVGFIWSIACTIQSAPRAA

SEQ ID NO: 432934 - protein, 368 aa, unidentified
MRKNSINFGSARASFIGLDLADKQSTFVGIDGRGRLVEEGKVTTDAGGLQREFADRQRCRIALEVGTHSPWVDRLLREMGHEVITANPREVALIYRNKRKSDKLDATTLARLARSDPELLHPVKHRGKQAQIDLAVLRARDGLVAARTQLVNLVRGAVKSYGERLPKCSTESFPAKAAAALPADLSPALTPVIEQIAALSERVRQYDQEIERLITERYPEALGLQQVKGVGPITSLAYVLTLEDPGRFPTNRDVGAYLGLTPGRRQTGESDPEMHITKAGDVFLRKLVVQAAQYILGPFGVDCDLRRWGLRLAGTPANADGQPRKGSKQRKKRAIVAVARKLAVLLLALWRTGEVYDPLRWASRKEAA

SEQ ID NO: 432935 - protein, 320 aa, unidentified
MAQQAKEIIVGVDVCKDRLEIFEQSRERAYCIDNDAAAITTWLDGMEGMLKLALEPTNRYHLALAAAAYARGHQVYLIDPYRLSHYGAGLGRRAKTDPQDARLLARFLEREARELRPWTPLKPGEQRFWRLLKRRAALVRCKVQLHQSLGGLEVLQEEAEGLVHHCEQMIRKLDRALLDEAKQLGWSEWIERCQGIPGIGPLTAMALVASWRRGQFRSVDAFIAFLGLDVRVRQSGRWQGRCKLTKKGDSEVRRLLFNAAMQGRRSPQWAPYYLKLRARGLSSTAAFVALSRKLAKVSFALLRTNAQFVPAASETACVAT

SEQ ID NO: 432936 - protein, 329 aa, unidentified
MMTNPPQIVFNHIVAFEVSKETLVVHTLPADEQCTIDNKPQAVRRLIKAEIKRNRNKQLGQMLVICEATGGYERHVLDVALEMGVSVHRAHGTRVRHFGHYRGLLAKTDPIDARLIAQYGLKTENIRLYSPPPPDTAALRALHARRTEIQQMLIAETSRLDHAQHKSVLKSLKAHIASLKAALAAIEADIAQLVEGSEMLRKKVALMQTVIGIGPISAMVVLAYLPDIGQLTKGQAARLAGLAPINNDSGKKRGARHVEAGRTAIRRALYMAAGVAMRANPILKAFSDRLRGKGYPFKYVVTAVMRKLIVILNAVLRDGQSWKGAQMAA

SEQ ID NO: 432937 - protein, 404 aa, unidentified
MRADRERSWCNDRVYRWTLYHRKIVNTMTHTYSPRSLTARLSFGQRRPVVSLVRQAPPPDQPGQLPGPPKPGSTRQGALNGGTDTEERMDQTNPCVGIDVAKAKLDVALSPTEPIVTVDNTEAGLQPLLTQLQRVRPTRIVVEATGGYEQLVVRLLVDAGLPIIVVNPRQVRAFAKATGQLAKTDAIDARLLALFAARVQPALRAQPDQATAALAALLARRRQLVAMITDEKHRRHLATPPIRKSIQKHLGWLERQVATLDTEFTTTIRQSPVWQEHEDLLQSVPGVGPVMSRTLLADLPELGTLSRRQIAALVGIAPFNQDSGTRRGHRTCWGGRAPVRTALYMATLVATTCNPVIAVFYHRLLMAGKRKKVALVACMRKLLTILNAMVQHKTKWLEIRSYTS

SEQ ID NO: 432938 - protein, 339 aa, unidentified
MKKVFIGIDFSKLKFDAAIYSVDTKAIVSTEVFENEQSGYVEFLQWVKENNPCRKSEMLFCGEHTGYYSGNLSVFLYESGHDMWLVSGLEMKLTQGIKRNKTDRVDACKIAEHACRYQDKVVLFQPVSKALEEIRELLSYRERLVETRKVLITSAKEMKRVKDNASCDYIYQDSLEYIRSINASVHDCEKRIEALLKLDISLKTNYKLVSSVVGIGLVNAALILIATANFTQFTNARKFGCYCGVVPFEHSSGSSVRGKTRVSKMANRHLKTKLTLAAQNAVRFDPELKEYYQRKRSEGKNNWLVLNNVKNKLIHRIFAVVRDGQMYEKQHVHPLRQTA

SEQ ID NO: 432939 - protein, 349 aa, unidentified
MSQNLNSAVAVIGIDIGKNSFHVVGLNDRGAIVLRQKWSRGQIEARLANLPPCLIGMEACVGAHHLSRKLKALGHDARLMPAKYVRPYSKGQKNDFRDAEAIAEAVQRPTMKFVATKTADQLDLQALHRVRERLVSQRTGIINQIRAFLLERGVAVRQGLRFLRAELPRILATPPEVLSPRMVRVISDLAEDWRRLDERIDQLSNEIAVLARQDAGCERLMSVPGIGPIISSAMVAAIGTGEAFAKGRDFAAWLGLVPKQMSTGDRTILGKISKRGNRYLRVLFVQAAWVVLIKPMSWERHGLKHWIEAARKRLHRNVLAIALANKLARIAWGVLAGSHTFEASKLQAA

SEQ ID NO: 432940 - protein, 357 aa, unidentified
MNSQEIKYVGIDCGKKSLEVVRINSENSLERRQFSTTESGISSLLKWLTLNDIVGLEAGSQSFRIAKSILNKGIQVIVLNPGDLATIYQSLKKTDKEDSLKIARLIQRYPIEELPVVPIPTDEEEDNRRLCTEHENWTRQLTQGKNRLHSLFTQAGLTEITKKHLRTKASREVSVALLPDRYKKEAERILKVLDLVELNLKLIEGEIKDSLKKHPAYVQTIMSMPGIGMITSLAIMSYMGDCKRFSSGKQAAYYAGLVPRVDISGDTVRYGRIVSRGCHSIRRVIVQAAWSLVRCQHGGKIKEFYDRLYLKKGAKKSIIAASRKMIEVLYTMIRTGELFNSMPENILNRKLAQYGLM

SEQ ID NO: 432941 - protein, 408 aa, unidentified
MKDSRKRYVGLDVHKHYLIAIGVDDELNVVLPVRRVEFSYLEAWMKKTLTKQDEVVLEMTTNTWQLYDELCQHAGSVLVVHPPHVALITRSLVMNDKIAASILARLLAKGLLVGVWVPPQEIRELRGLVAQRKKMTELATQAKNRLHAVLQRHHLLPPQGNPFHESQQGWWLALPLGTLEKVNVLSDLETLRFAQTQQLRLTSMLEEIANQQEQVTRLLQLPGFGVVTAVTVWAAIGNIQRFADAQHLVGYAGLGTKVHDSGMTSHTGRITKAGRRDLRVVLTEAAQVAANSHPHWKAELARLQPRLGRNKAIVAIARKLLVAVWYILAQHKTDRFAQPEAVAQKLLKFAYQVGKENRPQGQSAAQFVRHHLDVLPLGSDLTSITWGTKKPIRLPPSTNKVSDVPNTK

SEQ ID NO: 432942 - protein, 374 aa, unidentified
MPQGIKAYCRYQSPFFHGYQEPDRILVPPIKGLSLRNHKIIKIMNIIEVIGIDVGKLENDARIHTNQKNYSFENNPAGFKKLENWMLKNINCPKQQLLIAFEHTGLYSHPLSVYLTENQYSYIVIPGLELKRSMGITRGKDDKIDAKRIAQYAYEKRDDLVPYQLPSEEIIQIKRLLSIREKLVKQRAGYMGTLKEYKHFLKRKDNEMLFDVHEKMIAQLSKHIARIETQLDDVIKGDDQIKKMYELITGIKGIGPQTALFIIAFTNGFTQFKNWRKFASYCGIAPFPNRSGISVRGRTKVSNLANKKIKSLLDLCAKTSIQYNMEMKIYYEKRVSEGKSKMSTINIIRNKLLSRVFAVVERETPYVNTVRYFK

SEQ ID NO: 432943 - protein, 326 aa, unidentified
MPVKVGVDVSKAKLDVALLTANGKFRSKVFANELAGFKSLLQWLTTHLPEGHNGVHVCMEATGSYHEALALFLHDQHLGVSVVNPLLVKRFAEINRQRNKTDDGDAKCLARYCEMHKPELWEAPTPGVRALQALVARLDTLQQMRQAECNRLDVAHESVSASIQSLISGLDAQIKQVRKQIGQTVDDDPDLKRRRDLLETIPGLGDKTIPQLLAYIGRPERFKSVKALIAYASLAPLIRQSGTSLNKTRGTHPMGHRILKRALYFPAMVAGKHNPLVAAFWDRLKDQNKPGKVIVEACMHKLLAIAFGVLRSGQAFNANHLKPASA

SEQ ID NO: 432944 - protein, 430 aa, unidentified
MNSINNRYISVGIDVAADDSVICIMSPSFEIIRKPFKVVHTDLDSMTKAVSAIKIAEEQFQMKSQIFLESTGIFHFPLFCYLRAAGLEVFVLNPLITNSNRNDNIRKVKNDKRDSKKIAKLGLNPNIKRSIIPNEFVLNLRFLCREYYSLSDDRTALVNKLGNYIRMIFPAYIGIFSETAGETSMAVLSYTQSLDHLLDAPKAELTQLIAKTARKGMVYAENKYNAIIKAITISKEISMSLPDIFRLIHATINHIKLIDAQMGTTTKTIGNIVKANSKYKFVKQIHIVDSISGVGFISAVTLMCEIGDFDAFKRPKQLYAFFGVDPSVNESGKFKGSKNPMSKRGSRFARRVLYTIALASIRNKPNGQPFNSVLQAYYQDKLISKPKKVALGAVMHKVCNIIFALLRDHACFVLITPEEHIRSHKLAMAA

SEQ ID NO: 432945 - protein, 390 aa, unidentified
MRYFIGIDIAKFKHTACVIDTDGIALVEPFDFTNDIIGFQSLLKNIKPFLKKKHLVGMEDTGHYGDNLRNFLLEKQYKVVMLNPIVTSHIRKASNKAKNDRIDCFVIANTMMNPNFYRDQQVQSIDYATIRQLTRMHHTHTEEINRYKCQLQKSIDIVFPEFNSLLNTKYSKTYLEILDTYRGAYTIANTDIRLLRNTLKNVGVGRSVSISAEQLKKSAKESIGQHNLAIEMDIPFLISLIRRLTSILGEIDKKIEEFSHQLNSPILDISGISHFSAMSIISELGDITYFSNEKKLIKFAGVNPCVYESGTYSMTHTRLEKKGSKYLRKTLYQIIDSVIRFNPIFQAFYQKKISQGKSYRCAQGHCIRKLLRVIYKIISTGEGFDSAKLK

SEQ ID NO: 432946 - protein, 414 aa, unidentified
MDVLVERCAGLDVHRDTVVATVRAPADGDGRRVRRHETRTFTTTTAGVIRLADWLVTHGVTRAGIESTGVYWKPVYYLLEDQVEVWLLNAEHLHNVPGRKTDVADSLWIATLIEHGLVRPSFVPPAPIRELRDLSRHRRTLIEERTRVVQRLEKVMQDAGVKLTSVASNLLTKSGRAMLDALLAGESDPQVLAELAKGRLRSKIPALREALAGRFRAAHHGFLVAQMLAHVDFLDTAIADLDARLDQAAAPFRQLIDRICTIPGVRQRTAIMLVAECGADMATFRTAAHLASWAGICPGNNASGGKSRTGHTRHGSIALRTALTEAAYAATRTKGTYLAAHHAQIRRRRGLPKAIGATRHDILIAYWHIVHNNIDYQDLGPDWATRRLSVEHRTRKLVHQLEQLGMKVTVDSTA

SEQ ID NO: 432947 - protein, 407 aa, unidentified
MICVGIDVSKRKSTVCFMAPGDKIIRRPFDVKHTKEELQPLVDEIRVQAKYDEIKVVMESTGVYHLSIAYFLQQNGIFVSVVNALKVANFNKAENFRHTKTDSIDSTNIARYGIAYWAKLPQFDLNGDKYFLLKRLCDAYLNFSEERSRILLQLQSQLEQTMPGIFDLFGGFDINSGKDKLLDFLERYCHIEDIIAKPEAEFVASYCGWAKEKGYRSNESKAATIYAQAKNGIPSIPNNPIVRETIMWYVGLLRRADEALMASLTRMEDIAKDLPEYELVGEMGGVGRVTRVALIAQIGDVRRFKNKHSLICFAGLTPSIHESGKFRASQNHIVKKGPARLRKVLYQVMMSLVMHKIPKDDAVYRFIKKKEAEGKYKKVAKVAGMAKFLRIYYGRVMHLYRDLGLAA

SEQ ID NO: 432948 - protein, 365 aa, unidentified
MNKNTNAKRMAREETKQPLAFYIGIDLGDKNSDVCVLDQAGEVNQEFRLRMKEADVRACFSKIGRSRVAIEAGGQSRWVAEVIEKCGHEVYVSNTRKVPYIHDSDDKHDPGDAYKLAELVHFKPQLLHPIRHRSQEIQADLSWIRAREVLVESRTQLINAVRGISKAFGERLAKCSTEAFTGKRAEQIPAAIRGAVAPLLETIDHLNEQIRYYDQMEEQIARQRYPKYWLLEQVDGVGVHTALSYMLTIGDPGRFEKSRMVGCFLGMRPKKKDSGSSQPQLGITKAGDEYLRKTLVNCAHYILGVHGKDSDLRRFGQRICARGGKNAKKRAVIAVARKLSVLLHRLWVSGEVYEPLRNSQERTAA

SEQ ID NO: 432949 - protein, 393 aa, unidentified
MFFIGIDVAKRKHSLAAITETGKRVIEGYEFANSTEGFEHMLLRLSAEGIAPENSRVALEATGHYSRSITAHLIDKGFEIAVGNPLQTHNFAKAQSIRKVKNDAVDALALAQWLLAGSPESAVLSSSEVAELKSIARFRTFQSQIIGDCKRKAIAVLDQLFPEYASFFSDVFGSASLAVLIRYPSAQALSHAHIDSLSKLIEESSRGKLGSDLARALRDAARSSFATNAAIAAQTLELKQLISQIGFTRKQLVEIDREMKALLEKAATPITTIPGIGVVCGATILGEIGDISRFKKPSSLVAYAGLDPSVYESGEFKGTNNHLSKRGSTYLRWALWIAADRARMFDPAFKEYYSKKRLEGKCHKVAISAVARKLCNTIFAVLATNTEYICRVN

SEQ ID NO: 432950 - protein, 398 aa, unidentified
MTRKNTLKSLPTDTEFRVVGLDLAKSDVSVAAIPVDDNTPSLVDRMTYADLLDWAGKISPTLFAMEPCNGYSLLCLQLENLGHEIKVIRGSTVSMWINTHLSGQKTDLNDAIALARLAVSDAELTPIRHKSITEIRIQTVQAVRQQLMSQRSKSIVSFKALAQQWGIPCAAGHRNLKKLRESIEAKVDLITRPVANAMLFLLDAVKSLDRQIGQLNQTLQELVMSDERGRLLQSVLGVGTQISARVITVVGNVERFNSPRSLVAYVGVAPRNFITGHKNLTKKKHGNCPDLSHKGQGKISRRGDKLLRSLFIQGAACLYMQFCKDQLPECQLKRWILKQLAMQKPYGKLMVSLAAKLIRIVWAVLTYREKFNIQKAGMTRSMWSEMALETPLNKEVPA

SEQ ID NO: 432951 - protein, 393 aa, unidentified
MQQRKNAGSEPVNNTESTSSIFISGLPACLNPDPDSRLTSIVEVVRLSSSPFFLKSVKDKSMENFYFIGVDVSKKKLDFCVMFEGKVVHEEETANHQSAIMSLLHHLEEDYGIVSDQILVCAEHTGQYTFPLACACKAVECKLWLENAAEIKYSSGVQRGKNDKVDAKRIAVYARRFQDKVQYYERPTEDIERLKQLESERTLYVTDLAKYKGQMKDQKDYMPKALYERKMKRLQALMDDLEEAIQAITDEMDEVIASCPVLSRQRELLMSIDGVGRVVATNMIIATEAFTRFDDPRKFNCYAGVAPFSYSSGSSQHSKARVSHRADKVMKRLLHLAAVAVTHRVGGELKKYYERKVAEGKNRMSVINALRAKIVARMFAVIKRNEKYKPILS

SEQ ID NO: 432952 - protein, 391 aa, unidentified
MIFVGIDVAKDKHDCFILNSEGTVLADVFTIANNRIGFETLLSRIQSCSQGESKIKVGLEATGHYSYNLLGFLLDSDLATYVINPLHTNLYRKSLSLRRTKTDRIDARTIAMMLMSDVDLKSYSNTAYHNEELKSLTRYRFDKVKERAKLKSSVARLVNILFPELEKLVSSLHIAVVYALLSNYPGASYIANANTEELAEILCTASKGRYTKSKTAEIQVAAGVSIGSKMPAKSMELKHTIALIRELDKEISEVESAIDKITSQMDSPIFTIPGIGRHMGAMILAEVGDFSNFASADKLLAYAGLSPSTYQSGQLQNCYAHMEKRGSRYLRYALFNAAKYVCLWCPTFSAYLEKKRSEGKHYNVAISHAAKKLVRLIFAMQRSGKAFLADY

SEQ ID NO: 432953 - protein, 420 aa, unidentified
MEEITEEPGALVERVAALDIGKASLTACLRVPHEDKPGARRQEVRTYATVTRALLELRDWLVCQGVTLVVMEATSAYWKPPFYLLEDDIACQVVNARDVKNVPGRPKTDKLDAVWLCKLAERGMLRPSFIPSRPQRQLRDLTRYRRTLTQERTREKQRAEKLLEDAQIKLSVVISDIFGASGRAMLDALISGQASPHELAALARGKMRAKTSALQEALTGHFTEHHAFMLGMMLDRIDALTAQIATLTTRIEQAIAPLAAQIAQLDEIPGIGATAAQDIIAEIGTDMSRFPTPGHLVSWAKFAPRARQSAGRAKAATTGKGNPWLGGTLGEAAAGAARTKTFLASRYKRIVRRRGKNRALVAIGNSILTITWHLLSDPAAHFTDLGPDWHDRLAPLRRKRQLIAELERLSGKKVTLQDAD

SEQ ID NO: 432954 - protein, 402 aa, unidentified
MFFLGIDIGKQHHEVGLIDQHGKSIGKTIRISNTKFGSEQLLAFFNKHALLPENTMVGMEATGHYWLSIYTFVHKLGFHTTVFNPIQSDVLRDFYIRKTKTDTIDALLIAQVIRLDLPDKTELPAEDIFRLKQLERFRYGLVDRCSDLKRKILACLDQVFPEYDQIFSDVFGCSSTQVLLNSPIPEDLLEIDAERLIETINTASEKRLGIARSEEKVMKLKEAAAHSFGISIASDVFKLEIQIMLEQIQLLDSQIKIIEAEIQEIVSKQENYLTTITGIGDITAAVLMAEAGDIKRFERPNQLLAFAGLDASVHQSGDFTGTKNRLSKRGSPYLRRAIWQAAFVAAFKDPALSLYYQKLRKRGKSHGTAIGAVARKLVNIIFAVWTQNKPYEVHFPEDISEK

SEQ ID NO: 432955 - protein, 354 aa, unidentified
MNITTVGVDLAKEVITVCTMDHRGHILQVRNLRATDFSAWLIQLPAGTVLGMEACSSAHHWARKMQGMGLEPKLMAGAFVQPFRKSASAKNDANDAEAIAIAVRQPQMRFVAIKTEAQQARLAWHRVREGWKEERTALINRTRGLLLEFGYPLARSSKAFTVGLQTALLHPALPAGFRTLLGHVQQQLQQLDKQLAECDRTIAQSAKQDGHSQRLQAQPGIGPISADALVATVGNARDFKNGRQFAAWIGLTPRQYSSGGKTKLGRISRRGDAYLRTLLIQGAKSTLQSALKKAPDLLSRIQQWILKLYGRVGYHKTLVAIANKHARQVWAMLAKGEEYDQKAWEKYAKVVAAQ

SEQ ID NO: 432956 - protein, 400 aa, unidentified
MNPVVGLDVSKGESQVQVFLDKGQPYGKSFSISHTREGLDTFLHFLKNVESITGQQPPVVLESTGHYQTPITQCLEEQDYLYILINPLISYQAKKSSLRKVKTDAIDAYHLCELYYKEELQPYKKRGLQLLNLRNLTRQHDSLTDLCVQAKLQFHAILDQVFPEFRTVFGNLFSKVSLHILLEFPTSEEVLKAKESKLTKRIEAICISRSNTWAEEKAKKIMDAASRNPFQKAVYESHLISLEMYIRMILQYQEHLSNLEQRIDALASEIEEYKIIQSIPGIGEKIAATIISEIGEIERFNHPKKLVAFAGIDPSVHSSGKFTATINRITKRGSSRLRHALYMAVLCGIRSSRNKKLKEFYDRKRAEGKPFKVTIIACVNKLIHWIYILLKRKETFLDIA

SEQ ID NO: 432957 - protein, 357 aa, unidentified
MPEDIAFDSHKRYSWVDRRDLRTGKSKGQRLEHAPGAIRDYLSGCEPGTRVAVEATGNWYWITDEIEQAGLRPLLVHPRKAKMMMGQTNKTDKLDAQGLNRLQQNGTLPVVWIPPGPLRDLRELTRTRLVLVTQRTRLKNRLSATMAKWGLPASEYSDRYGKQGRVELQGQLQRLPEQSRWVSEQLLAQLDFVSAQVRELEQRLEKLVEITPEMQWLLSMPGVGVILAATIALEIGDVRRFPDAMHLASYAGTTPRVHASGGKVRYGSLRGDVNRYLKWAFAEAGNSVAVNHARKPEWHVSKLYQRLRARKGHPKAIGAVARHLAEAAFHVLHKKQLYRDPGFGPGSDQPRASAKMS

SEQ ID NO: 432958 - protein, 318 aa, unidentified
MPPAAPAFVGIDVAKAELVIALRPSGDRWTVANDEAGIQTLLKGLHRHAPALVVLEATGGYERAAIAALAAARLPLVVANPRQVRDFARATGQLAKTDRIDADTLALFAERVRPEPRALPDEAANALDALLTRRRQVLEMLIAERNRLEHALPAVRRGITQHIRWLERQLHDVDRDLDDSIQGSPIWRAKDNLLRSAPGVGPVLSRTLIGELPELGTLPRKQIAALVGVAPLARDSGTLKGKRLVWGGRAPVRAALYMAALVGTRCNPVIRAFYLRLLAAGKPKKVALTACMRKLLTILNAMMRTNTTWRQIDQSQTT

SEQ ID NO: 432959 - protein, 343 aa, unidentified
MAEYVALDVSLRSTSVHIVDQQGRCLWRGTCPTDVAALADTIRRHAPAVERVGLETGQLATWLCHGLTKAGLPVVCMDARQAKAALSCRINKTDANDAEGLAQLLRTGFFRQVRVKSEGTMLVRTLLSARRQLVRTGLDLANQIRGLLKIFGLLLPRGGGRAFEAAVRERLAGHARLAAVIMPLLEAWRAVREQVLALDRQAHAAAKRDARCRLLLTAPGVGTITALAYVAAVERPGEFRNARAVGAWVGLTPARYQSGQVDYSGRISRQGDVHLRTCLYEAANTVLTRSRADSALKRWGLALKARLGHRRAVVAVARKLAVVLHAMWSKEEPFETDAAVAAA

SEQ ID NO: 432960 - protein, 319 aa, unidentified
MEHYIGLDWAQRNMAIARLTGQSEKEVIDIPSDIDDLKLYLKSLKGFKSLTFEESSPAQWLYTELREFVDRIIVCDPYRNYLLKEGAKTDKTDALKLARLLKAGMVKPVFHGSEEHIELRKLVSGYEDLIQSGVRLKNQQKALYLAKGDGELTSEAEFFVNDGLNARIEHYELEKGLYKQEFSRLRKQYKPIKNLESIPGIGLIGAVTIFSTVVDPFRFPDAKTYVSYCGLIKHETMSGGRSYGYRTPRHSRRLKYIYKVAAIASVNASDKNSMKQYYNDLLKVRKYPEHQARHNVARRIATLTYGVLKTGKPYKINIK

SEQ ID NO: 432961 - protein, 525 aa, unidentified
MAKALRALFGNSVYPVWKSASERFKGRPELNINLPISLVQTMKTKKAKASRSHPARSGAKGPIRPAANMPIINGHAAGVDVGSVEHYVCVPADAVPAGQSNVRGFGGFTEDLNQLVEWLQGCAVTTVAMESTGVYWIALAQKLEAAGIEVVLVNARHLKYVPGRKSDVKDCQWLQQLHSYGLLNGSFRPAQDICAVRSLMRHRENLVASCGREVQHMQKALQEMNVHLHHAVSNLVGATGLRILDAILGGERDPKKLVELRDDLCSKTTAEELEKALRGDWRQEHLFVLEQALGTYRHLLGQLEKCEEQVQKALAEVVIPAAEEPESPAPPNPKAKESGQSKKKRFHPHKTGTGLKRDLTEELKRLCGVDLTKIVGLNVLSVLIIISEIGLDMSRWRSAKAFCSWLGLCSGNKISGGKVLDSRTTHVVNRVALLLRTVAPAVGKTDTWLGIFHRRMRARLGPAGANTATARKLACLVYHLLRYKEEFIDVDHLLMMAKLREQRVHRLRKQAEELGLEVIAKQPAA

SEQ ID NO: 432962 - protein, 359 aa, unidentified
MRYVGIDYHKRYSVLCATDERGQELKQRRISGNSATGFAQFFSELGEESKVVMEACWNWGWLYDLLAKIDGIDEVMLAHPYKTRLIAEAQIKTDRLDAQMLAKLLRGDLIAQSHAPSAATRARKHLLRQRLFWVRLRTMLRNRMHAILDRQQGLERPQLKNFFSRRGQTWLEEVQLPCAEDQPLLTQDLEVAELLEEKIKQLDRSIGQSQSEEEKLLESIPGIGPLFSSVIATEIDGVGRFNSATKLAAYAGVVPTTHASGGRVFNGRLLWQCNKWLRWALIEASWSAIQFSGYFGSIYRCARARGKNKNIAITMVAHRMIKIIWLLLTEKRPYTETLPDRSEDGMTVVVRRKVLGLAS

SEQ ID NO: 432963 - protein, 388 aa, unidentified
MNVGADKSEPLTAVHTDLGAIFVSLELSRSSWLITSLSPGGGEKMSKHSVPGGDFAGLMERFAQLQEKARLRTGQSFRIIVIQEAGLDGFWIHRALQNEGIESHVVDAASIATSRRRRRAKTDKIDGETLVRALLAYKRGEPRVCAMVKAPTPGEEDRRHLCRERKALTAERVRHVNRIKGLLFSQGISGYQPLRRDRRQRLEELQTGDGRAFPQHLKALVNRELDRLELLLKQIKTVEAARDALLAVGQTAKPATAAMLLDIRGIGPEFAAILWSEGLFRHFENRRQIAAYAGLAPTPWQSGAVDREQGVSKAGNPRLRTTLIQLAWLWLRNQPRSALSVWFHERVSRNGGRLRKTTIVALARKLLVALWKYVTAGVVIEGVTMKVA

SEQ ID NO: 432964 - protein, 454 aa, unidentified
MRSQQKKQPEKRTILSLQCIEPNAAGIDVGATEIYVAVAAERDPQPVRRFASFTEDLRQMVAWLKQCGITTVAMESTGVYWIPPYDILEAAGIRVCLVNSQHVKHVPGRKSDVSDCQWLQYLHSVGLLQASFRPDSAICALRALSRHRASLVEVAAIHIQHMHKALTQMNLQIQHVLSDITGLSGMAILDAILEGRRDAKQLAALCHGGVRAPQETVIKSLVGHYRPEHLFTLRQSLAAYRHYQQMLIECDREMEQHLRQLQGSADPGDPPLAPAPLASKRRKNQFHFDMRKELYRILGTDLTAVPGISSLTAHTVLAEIGPDLSRFRSSTAFASWLTLCPGNNKSGGKVLSSRTRQTNSRVSLALRLAAQTLHKSQSYLGAYYRRMRARLGAPQAITAAAHKLARILYHLLTTRTAYDESVFAREEKKQAVRHENRLRKQAKAIGFQLVPIPA

SEQ ID NO: 432965 - protein, 414 aa, unidentified
MKLFVGIDVSSQELEACFMNADGDKLETLTVKNNLNGASHLRDQIVAAANKLAVTEIHIGLEATSVYSWHPAMYLHQDPALRERKAKVFTLNPKLISKFREAYADMDKTDRLDAWVIADRLRFGRLTTTIVMQEQYVALQRLTRMRFHLVHNLAREKQYFLQNLFYKCNAFTTEVDSSVFGHALMEMLSEKFSLDDIAEMDVADLADYLRDKGRNRFPDPERVARCIQQAARASYRLSKVVEDSIDLVLGTSIESIRSIQKQLKDLDKAIERVLDGIQGAQCLLSVPGIGKVYAAGLLGELGDIERFKDQAAVAKYAGLTWRRHQSGVFEAEDTARIKSGNRFLRYYLVEAANSVRMRDEEFGEYYRKKYHEVPKNQHKRALVLTARKLVRLVDVLLRSGQLYTPRRKVNSAKD

SEQ ID NO: 432966 - protein, 399 aa, unidentified
MTCLRTFNPAGAPTTKVMDCLIGALSAKRGRRWVGRVVDGSITTVGISTPTGVTVAHAYGSQGLAPVSNPACGPNPKLAETAMTDKVFVGIDISKLWLDIAFSNNASSLRIANQADAIEAWLAQYDPRHFALVAFEPTGGYERYLSAALRAHGTRFARIHPNQLAAFRTRRGGKAKTDVLDARLIAHFAAQELAQRGLAASVEADGILRALLARRRQLCEMLHAERCRADISDDARVADSLNDIHAALTHSLATIEKALAAHVAANPALTASAQNLRSLKGVGPITVYTLLGDLPELGQRSGKEIAALVGLAPRTRQSGKQSWRASIAHGRPGVRAVLFNAARVAIQHNPVMRDFYQRLRVINQRPGKVALVAVMRKMLVTLNAIAQSQKPWKYAQHTT

SEQ ID NO: 432967 - protein, 332 aa, unidentified
MKKSAKAQAGQVFAGIDVSAHELSVGMRRGIEDRLAVTTFTNSAAGHKALLVFLLQGNARVRVCLEASGNYSLDLALTLQAHRQVEISVVNPRRARRFAESLGERNKTDRVDARVLCEYAARMPWVPWQPPSPVALHLRALTRAIADLSGIRTQQNNRAHAAAASHALPGLVVKEMQRHQKYLEQRMTRLRREALRLVAGHCELDRRFRLMQTATGVGETSALQILGELAVLPDTLDARQWVAFSGLDPRLFKSGKSVDKRPRISRGGSRHLRRALYMPALVALRRDPYLRRFYQNLVVRGKARLQAVVAVMRKLLHALFAMFRTNQPYDGS

SEQ ID NO: 432968 - protein, 348 aa, unidentified
MKILALDLGKYKTVGCAYEATSGRHRFQASFTTPTGLAQLVSEVKPDRVVIEVCNIAGWVCDLLRGVGVEVQVANTSEDAWRWRKVKKKNDRCDALKAAQLSAVNQLREVHIPHIEVRQWRALIAFRQQLVRRRGKVKNHIRDLLLSEGQILPRGAKCWTQLGVEQLTALAKPFSEIGLHELWRGQLEIELRQWRELQHEIDQVEEKLDAIGKADPRVALLRTIPGVGPRLSEAVVALLDQPERFHKAREVSAYVGMVPKELDSGETQRRGRITKHGSRLVRSLLVEVAWAGLRYNPWVRATFRRISGGKKSRKKIAIVAVGRQLLVRCWAMLRDGTSWRPPALPGIV

SEQ ID NO: 432969 - protein, 400 aa, unidentified
MDRNRTVAGLDVHKDSIYLCIMGHNEAIIFQKTYGVLTPELRQLRNDMLSRGVTECAMESTAVYWVPVWNELCGSMDLKLVNPYFIKQLPGRKSDVKDAQWIAECVLKNLIKGSFVPEPVVQDMRKLNRRIMDLNEDMTYNCNKLDAALQRCGFRLSNYVSSTKSKSYQSVLKAIIEGQTSPEELVRLVHGRTLNKHGRETVKAAVTASFSTTDLTVFRQLKEMIDLIERQTEECQKQLTALCKEHFPKQYERLQTIPGVKERAATAIIAETGIDMKMFCTAACLVGWCGLKPRNDVSNGRYKSRKVTHGNKYLRQILIEIAWGASRTRNCFFSNFSYVQTTVKKKSKMKIQVAIARKILVAVWHMLSKEEDFIDVYLKRLEEQKKAEEQIRLLESYMAR

SEQ ID NO: 432970 - protein, 415 aa, unidentified
MSEIVNKACGLDIHKNFLIATIFSRSDETKQQERFVRDDEGIIALNNWVISAKCDVVACESTNDFWVPIYDLLTKNVRVIVGNARDMKALTHKKTDKLDSEFIAKLALNEMIQPSRVFPKDHREFRSLVRLRHAYVRKRTDIKNEAHSVLSSEMISIKGILSDIFGKSGKMILSGIISGKSVDEIIANLPVNVRKKSDQIREVLDREISQSATIRLKSCLNLIQYFDDEIRILEEHIFEYVYSNHEHEMNILMSVPGIGELSAATLIAEIGDFNDFSSGDKLASWLGLVPNVYQSADKYYSGRITKRGSRVARWILTQIAHAASRKKRSILKEFFKRKKKTIGHAKAIIALARKIATIIWHLIINDEMYEDETGYEKGEIKKRKIVENEPFSVDERISIFSGIAAIVRKKEGDST

SEQ ID NO: 432971 - protein, 369 aa, unidentified
MMGWTPRTASMCQSGVFEQHLREASVSGVITVGLDIAKHVFHAHGVDDQGRALFSKRISRGKLLDFFAAQPSCTVALEACGGAHHWARQLTQLGHEVRLIPPAYVKPFVKRQKNDAIDAEAICEAAQRPNMRFVAMKSEQQQAAGLVFRTRDLLVRQRTQLINAVRGHLTEYGWIAPKGPSHVAELAHLIEEKRMAGSLPEAARAMFRLMLDQLASLNGRIAVLDKEIARRAREDEVSRRLMTIPGIGPISATAIAALAPPVETFAKGRDFAAWLGLTPVQRSTGGKQKLGATSKMGERTLRRLLIIGSSAVVQQASKRGAAKGSWLEQMLARKPRMLVTVALANKMARIVWALLVKREVYRAPVAANA

SEQ ID NO: 432972 - protein, 342 aa, unidentified
MRYIDLDVHKDNITACVLSDAGKVVFEKDFKKTDGTCDCLAELFDHVGKSGFCVLMETGTYAYPPYRFFRDRGCDVDCVHAQGLRMITQTDKKTDKKDAMTIARMLRLWKRHDIDLQIAYMPTREQCEPKDLCRYREEISKKIGDETRRIKSQMSRNCQVLPEGMDSFQIRRNRRYVLKKYGTDVTLSRRMKALEQLFEERDIVQKQVESCLPDDPNVKLLEHIPGVGRQTAVQLMSMIVDISRFEDSEKFCAYFGLVPRVRDSGGKEHHGRMTKNGDRMMRMLMERVTEAHVRNCDSFITDHYKRLCPQMGTKKALITTSRKMLMTVFAVLKKQQEFRTGP

SEQ ID NO: 432973 - protein, 384 aa, unidentified
MNRIVKIGMDVHSTNYTLCAMEPVLDGEDRIFANIKVTPDYKNVIQFISKLKNKLGASDTYSIECGYEAGCLGYSLYHQLTDAGVKCTILAPTTMLTSQGKRIKTDKRDALMIAQCLSYGGYHAVHVPDEKDDAIKEYLRMRDDHKLMLKKIKQQINAFCLRHGHFYDGNKWTIKHREWLKTLKLSDLYRETLDEYMTTYEEQESKIERLDRRIEELASDSAYKEKVKKLGCFLGIKTHTALSLIVETGDFKRFAKGNTYAAFLGLAPGESSSGDNVNRTGISKAGNSHLRTLLIEGARGICKGRIGHKSKDLRLRQAGNSAEVIAYADKANVRLRSRYYRFMRHEKKKNVAVAAIARELACFIWGMMTDNISIVPERGKQNVA

SEQ ID NO: 432974 - protein, 397 aa, unidentified
MDPTYAVFCGIDVGKGEHHAVGLDPAGTRLFDKALPNDEAKLRTVFDRLAEHGPVLVIVDQPNTIGALPVTVARACGHAVAYLPGLTMRRVADLYPGQAKTDARDAFIIADTARTMPHTLRRIDVGDETLAELGVLVGFDDDLAGEATRISNRIRGLLTGIHPALERVLGPRIAHPAVLEILSRCGGPVGIRKAGKRRLTTLATKHAPRMGARLAEEILTALDAQSVTVPGSNAAEIVLPKLADSLKEVLQQRKSIAEDVERMLDDHPLSQVLMSMPGVGVRTAARILLEVGDGSAFASAAHLAAYAGIAPVTHRSGSSIRGEHPARSGNRKLKRVLFLSAFAALHDPTSRAYYDRKRAEGKKHNAALICLARRRCDVLYAMLKNKTFYRTPAAAPA

SEQ ID NO: 432975 - protein, 431 aa, unidentified
MPGENQDKLMSGNQPEVQYAAFLAIDWADQKHVWSLQEANSSARERGEVDHMPEAVETWVAQLSQRFAGRPIAVAVEQSRGALVFLLSKYAQLHIFPVPPAMTANLRKAFYSSGAKNDPTDADLLLDLVQQHREKLRRLSPDTEATRHIQNLVEERRKLVDEKTAQSNRLEAHLKIYFPQIPRWFGDVGSPMVCALLERWPTLEALQKARPDTLRSFFRKHHCRKEELIESRIKAIGEAMPALKDRAVVQTKVAVVKVSVQLIQVLHEGIEGLNRQIQEAAEAHPDFFIFDSLPGAGAVMAPRLLAAFGSQRERYQNAVEMQTFSGIAPVTESSGKSSWVHFRFACSKFLRQSFHEWAALSITQSQWARAYYELQVRRGKKHHAAVRALAFKWIRIIYRCWKERVAYDENVYLAALAKHNSPLVAATKAAL

SEQ ID NO: 432976 - protein, 459 aa, unidentified
MNEGCISGVLDRFSVADSMGILLSPQSVMKGMGRKRPSRSKRNRARVADWSKCEGSRVLGTPARLTRGTSVGKARRGGSLYHASALRRKRMYLGIDVHKRNSQVAVRNEDGEVIREVRVKNANLAEIAQQYAGSEAAIEATGNYYTIHDTLDEYLDVTVANPGRLKLIANSDRKTDRVDARELARLVRLGSVPESYVPPEEIRECRALVRGRKGFVEDRTEYANKIHGLLDQQGITRKVKPLSVGGREFLEELSLEAPWETLLETYLETIEALTEQITSLEGEIEDRAASLPETQLLMTIPGVSFYSALLIHAELGEIERFDSSKQMVSFAGLNPVIRESGDSRFEGGISKRGSGQLRCSALHVGYLTYIWSKRAAEATLEQNSGGQLDGDSSTGVTIYAEIQSYLPSEDRLTIPLIVESAGRPFPASVFEINMSYSQRAKLSPLDTRSECAYSSPHES

SEQ ID NO: 432977 - protein, 391 aa, unidentified
MSMYFIGIDISKYKHDCCIISATDQKVVSKFSIKNDKAGFEQLLTIFHSLSNPQDIKIGFESTAHYALNLELFLENANHSFMEINPVLIKEYKKSTSLRRTKTDSVDCESIARWLMTVEYKPHSKGFYHAYSLKSLTRLRDRLVRQRSFYLVKITNVLDHTFPEFKPFFHERFSKTALYLLENYGSAEKMARMNSASYEKLRSLSRGNFSPQQFLRLKELAANTVGVNNSIFDVERNSLLTLYQSLVKEIDTLETEINKLIEEVHPHYMSVPGIGTISAAVIYSEYGDISNFSTPAQMLAFAGIEPGVNDSGTESHGGGMVKHGSPGLRYVLINCCLPLIHFDMTFAAYYAKKRGEGKPYRVAITHVAKKLVRVIHALERQGVDFNAQKLQ

SEQ ID NO: 432978 - protein, 344 aa, unidentified
MEYFAGIDVSLEQSSVCVVDGAGKIVREAKVASEPEALVGFFRGLETGVTRIGLEAGPLSQWLYAGLVAAGFEVVLLETRHVKAALSAMVIKTDRKDARGIAQLLRMGWFRPVHAKSPAAQEVRALLVARKLLQTKLLDVEFSIRGILRGFGLKMGEVSKGRFVARVRELAAGHAMLEQITEPMLRAREALRTEYARLHGEMLAIARPDPVCRRLMTVPGVGALVAITFKSAVDDPGRFTRSRVLGAHFGLTPRKYQSGETDVTGAISRVGDAMVRMALYEAANVMLSRVTRFSSLKRWALDVAKRRGLKRAKVALARKLATVLHRMWVDGANFHWGKQAAAAV

SEQ ID NO: 432979 - protein, 340 aa, unidentified
MGQVVTVGLDLAKSVFQVHGVDAAGQVVVRRQIRRSQLLAFFAKQPACVIGMEACASSHHWARELTALGHDVKLMPAQYVKPYVKRGKNDAADAEAICEAVTRPTMRFVAIKSPDQQSAMMLHRVRLVLCRQRTQLSNALRAHLAEFGVVAPAGRLGLERLLEIVADTADERLPAAARPCLQMLADQLAMVKRQILENDRRIMADARRTELGRRLMEIPGVGPLLASAFVASVADPGVFRTGRDLAAWIGLVPRQNSSGGKERLGSICKAGHRYLRQMLVVGSMAVIRHAERSATRRPWLAQLLARKKAKVAAVALANKIARTVWAMMMTGERYRAPLAA

SEQ ID NO: 432980 - protein, 348 aa, unidentified
MAITIVDLSRSVTGGVDTHLELNVAAAVDTIGGLLGVAEFATTRAGHGQLLAWLNSFGTVGRVGIEGTSSYGAGLARFLRAAGLEVVEVDRPNRQSRRRTGKSDPADAVEAARAALSGRAQGAGKAKDGNVEAIRALVVAKRSARDTKIKTLNQIRHLGFTAPEELRERLAGLSRKRLPAAAAALRPRPGGDQVAFATKTSLSLLGRRVLALDAEKEHLDGLLAKLVKETAPELLGLYGVGVDSAAALLVAAGDNPGRIRSEAAWAHLCGVAPIQASSGKVTRWRLDRGGDRQANAALYVIVVTRMGADKATKAYVERRLAEGKAKPEIIRILKRYVAREVYHYLPRP

SEQ ID NO: 432981 - protein, 375 aa, unidentified
MKENVRFLGLDVHAETIAVAIAEPDGEVRSLGTIANRVESISKLVKKLGPVAHLKACYEAGPTGYVLYWQLAELGIQCEVIAPTLVPMKAGDRVKTDRRDAERLARSYRSGDLTPVWVPDEGSEALRDLVRAREAAKQDQLRARHRLSKFLLRSGQRPAAGLKAWTLGYMAWVRQLRFNQVAQELTRLDYLHEVEHMAERVKRLEQAITEAVKLASPALQEVICGLQALRGVAQISAVTIAAELGNISRFNTPRQLMGYSGAVPSEDSSGQRARRGSITKTGNAHLRRIAIEAAWSYRLRPGVGPALRKRQEGVAEEIKEIAWKAQHRLHKRYMRLAAAGKDQRKIITAVGRELLGFIWAIGIKAEADSKLRIAA

SEQ ID NO: 432982 - protein, 384 aa, unidentified
MKGKTFKPTDYEVFGGLDVDKRSISVTFTNHQGFIRSLRMPYSVEHLVNHVRKHFGDQKVAFAYEAGPTGYGLYDGLVAKAYPCLIASPSMIPKAPGQRVKTNRLDSRGLSENLRGGQLKSIHVPSALYRELRHLTQLRDTFVSEMVGMKQRIKSLLLFEGIEFPPAPGRQWSFMVKDKLRKLECSKTVRFKLDQLLDSLEFSEKQVLKATREIRRFCRNDAELSQCIEYLMTIPGIGWIVASQLVARIGDWRELKNIRQLGGFLGLVPTENSTGERTDRGSITHTGDGRLRSKLIQASWSAIRQDGELREFFRSVCRTHARHLASRVAIVAVARKLSVRISVVLMKQRPYEVRQKVRSTPLTQEETSPQGTTRRQAEPGEKNS

SEQ ID NO: 432983 - protein, 372 aa, unidentified
MNYNTVYVGMDVHKESFTLCSCRYEDEKASHYQRTPASYKNVLRYLAFLRTIYGEDTRFVCGYEAGCLGYSLYHQLENFNVECVILAPTTMLEQRSKRRIKTDKRDAEIIARSLAQHNYSPVHIPTETDNQTKEFIRMRDDHKAELKKIKQQILSFCLRQGYQYDGSGNWTAKHVKWLRSLKPAGLYKEILDEYLLTYTILTDKLNRLDQRIEELASKEEYTESVSKLTCFLGIKIHTALSVIVEVGDFQRFVSARKFAGYLGLVPGQHSSGDDRNGLGITKAGNTHVRRLLVESAQSYTRGKIGYKSRVLRSRQAGNSPQVINYADRANERLRRRYYKMVLKDGKKYNIAKTAVARELACFIWGMMTDNIY

SEQ ID NO: 432984 - protein, 370 aa, unidentified
MRVDRKNGKRKGCKMNSIVAGIDLGDRESLATVLSPIGDVADRFSFPMNEEGYAYFASRVPKNARIAFESTIMAYPILRAFRTHGYSDITVAHPKTLAWIVKSKKKNDKADSLKIAKLHMAGMLPESHLLDRDQQIARDLLVQRVKLGVEIGRLKNSLIGYLKREGVYDSLPKTGDNFSVKRRHAILSLRFDDKRDLILGTMMDRLEFLEGQCIPLEDSVRENARVSDDVRLLMSITGVDYYLASLLSSFIGDVERFPSDDHLASFFGIIPTSRDSADVKRRGRMTKDGSSIVRWALSIMVDTVMLHNDPIREYYTGVKKRTGSGKLAHVATMRKLTRMLYHMLKTKQHWKWENPLLTERKMAKLEGGWR

SEQ ID NO: 432985 - protein, 367 aa, unidentified
MKKGSTRAVAQSRNISQQKLTIGLDLGDSNCWYCLVDEAGQIRLEQRVRTNAKALREVFGAMPRSRIALEIGTHSPWISRLLSELGHEVIVANARKVRLIGESRKKDDRLDAQTLARLARIDPELLYPVKHRSAQAQADLMMIRARAGLVRARTGLVNTARGLAKSYGERLRSCNVRNLNREKAESLSPELQAALEPLLNAIESLSERIVEYNERIEQLAQQSYPQVALLKQIKGVGTLIALTFLLTLEDPHRFGKSRDVGCYLGLQPGRRNSGQSEPQLHISKEGDPYLRTLLVQGAQHILGPFGVDCDLRRWGLKLAERGGGNGKKRAIVATARKLAVLLHHLWVSGEVYEPLHNSSRTTVAAAA

SEQ ID NO: 432986 - protein, 450 aa, unidentified
MSKPKPQVIEDEEHQRVFERVAAIDVAKASGMVCVRLPGRDGRPRASKVWEVQAMTSAISDLGRRLLSDRVQMVTLEATSDYWRIFYYLLEALGLAVQLVSPAQARQLKGRPKTDKHDAMWLARLTEWGMLRPCFVPSAPIRALRDYTRARTDYVRERTRCYQRLEKLLEGALIKLSSVASKLTTESAKDMVRAMIAGERDPHVLASLARTRMKAKHDALVEALTGMFDAHHGELAQMELDQAKFLDQKITQLQARIRGSLAAIPGAQGVDADGTTGPAAGTGPDARVLPAAGRLAEIPGISPDLAAAIIAETGLDMTRFPTAAHLVSWAGLCPAANQSGPRTGHGKKKHGNAYLRGALGQAALGAARTGTFLGERYRRVARRRGKAKAQVAVARSILIIIWHLLADPAARYTDLGPDYVASRTNRDKKIRNHVRQLQALGLEVTLTPAA

SEQ ID NO: 432987 - protein, 342 aa, unidentified
MGEITIIGIDLAKNVFQVHGAAADGSVVFRKKLTRPQFARFMAEQPPCLVAMEACASAHHWAREMSRHGHNVRLIAPHYVKPFIKRQKNDAADAEAIVEAALRPTMRFVEPKTQEQQARAVAFRTREQLVKQRTEAVNALRSHLYEFGHVAPVGIGYLPRLERVIADPDADIPDLAREICQMLLDQINQLTGRIDALKARIAALSNEAEMPRQLQTMPGVGPITALAVETFAPPMDQFRRGRDFAAWLGLVPRQHSTGGKQKLGKTSKMGQRDIRRLLVIGATAVIRWASRRGAPKGSWLARMLERKPVPVVAVALANKMARGIWAMLTRGESYRGPVLIGA

SEQ ID NO: 432988 - protein, 483 aa, unidentified
MRHPLPPLPGLLGRPRCLIPTFLTQAPHNPRRGRRLPKQLSVVNPNAAGIDIGGHHHYVSVPEGRDKETVRRFECYTSELVSMAGWLKRCGVTTVVMEATGVYWMPVFRVLESHGIEALLVNPKHVKYVPGRKTDVADCQWLRQLHTYGLLRSAFVPPQEIAAMRTYWRYRKDLVKAAAEQIQHMQKCLIQMNLHLHVVLSDITGVSGMRILRAILEGQRDPDKLARLANVMVKTPREEIAKALTGHYTQENLFVLKQAMAIFDFYQERIEECDRQLAGYLSHFQTKADPATLEQNCPAKTTKRRKNQPHFDLRAELYRLSGVDLTRIDGIDAMTAFSVLSEIGFDVSAFPTEDQFASWLGLCPDNTITGGKVKRRKTRAVTNHAADALRLAAQSLWQSKSYLGACFRRFKGRQSKPQAITTTAHKLALIVYRTLKFGHEYVDKGQDHLEKQHHERAIHALIRNARQLGFGLFDTQTGEVLVC

SEQ ID NO: 432989 - protein, 427 aa, unidentified
MNFTQNEKLNQVSENSIVIGVDIASELHYARAFDWRGVELGKVFKFENSVEGFTSFNGWINGLKEQTQKDAILIGAEPTGHYWFGLAAYLKEQSIKLVLVNPFHVKRSKELDDNHPGKTDSKDPKTIAKLVIEGRYNEPYIPEGVYAELRITTSCRLRIVKELNGVKNRIQRWIKIYFPEYTKVFGSFEAVSSMIVLETAPLPTDIIALGAEGINKLWRDKKLRAVGIKRANCLYEAGKNTIGCIAGSASARLEIQLLLEDYRNKINQYESVMKVIADLCMQIPEVEELLKIKGVGIVIVAGFVSEIGDIRRFHSPKQIQKLAGLALKETSSGKCKGQTTISKRGRSRLRAVLFQAVMPLVAKNAEFAEIHRYYTTRIKNPLKKKQSLIALSCKLIRVFYAILSKGIAYDSTKLISDIQRPKEMIAA

SEQ ID NO: 432990 - protein, 428 aa, unidentified
MNVLNERITRITATTIIVGIDAAKEVHWARMTDYRGIDLSKPVKVHNSMDGFENLLAKIEKLRTKHGCDQVVIGMEPSGHYWRALGWYLKLHESEPVLVGVNPYHTKQTKELNDNSQTKSDPKDALVVAHLIRDGRYFDTYLPEDEYAELRQLNTERQRIMKQVSRANNILIALLDEFFPEYATVWSDVTCPTSLELLKIYAFPSDITSAPRDKLLKDIRMASNGREGTRLMEKMISAASRSIGVKEGLRAVRLRMLSLIDELYYYEDKKADVEAKLEAVMDTLQLGKVLQSMLGVGPIISAAFMGEVGDISRFTNWKQVRSLAGLNLVENSSGQHKGKTKVSKRGRPYLRHMLYMAGECGCRCNPEMRNYYRYLRDRKNNPLKSQQAFVATGLKIMRILFHLAKTGERYDPSKALGAVRTQQIASLA

SEQ ID NO: 432991 - protein, 386 aa, unidentified
MHHPTTLPVSEQTCSREDCATLFVSLELSRSTWVATSLALGSRKMSKHTLVGGDGRKLLDLLARLKTRAEQRIAAPVKVVAIHEVGLDGFWIHRLLEANGVESHVVDPASIAVPRRHRRAKTDAIDGETLLRTLMAWQRGEPRVCAMTVPPSPSEEDCRRVSRERATLLRERIQHTNRIRGLLFGQGITNYNPLHKNRRECLEELRTGDGRSLPTHVKAEILREIDRLELVLRQIGEVEAERDEILRPAEASSPAALLIRLKGIGAEFATVLYFEGLFRHFENRRQLAAYAGLAPSPWKSGSIDHEQGISKAGNPRLRTTMVELAWMWVRYQPDSALSGWFRQRVGSERGRTRRISIVALARKLLIALWRYVTHGEIPAGAVMKPV

SEQ ID NO: 432992 - protein, 358 aa, unidentified
MGTGHNNPSPRELPLSNQARFSTIGLDLAKNVFQAHGASASGAILFRKRLRRDQVLAFFAAQPRCLVAMEACASAHYWAREIAKLGHEVRLIAPAYVKPFVKRQKNNAADAEAICEAAQRPTMRFVAVKSEAKQASAVVFRTRDLLVGQRTQIINAIRGHLAEYGLIARQGPSHVDQLIAQIEDPSSGIPDPARSCLAVLVETLRALQGKIVALDAEIAARAKRDDGARRLMSIPGIGPLIATAIEALAPPVETFRSGRDFAAWVGLTPLQRSTGAQERLGKISRMGERTLRRLLIIGASGVVRWARRKGVPAGSWLARMLARKPPMLVIVALANKMARIAWALIAKGGSYRAPAVAA

SEQ ID NO: 432993 - protein, 314 aa, unidentified
MKNYIGIDISKSSIDVYDGKKSYKFENNKDGFQKVVRLSENIKETVFIFEPTGIYSYDLTEFCDKNRIGCVIVSPKVSRDFARSLKVRSKTDKIDAKVLYKYQSHVEANMVKIPKINHHAIQIQEMLNTYELLKSTIQQHKNHLESLSKGNKNSIRLSQKMIKFNETESDKLFAKIEKLLFKDENIKRKYKAMLTIPSIGEKSALYLISFFIKYPTANAKELTALMGLDPVMRDSGTYRGKQRISKHGGQQLRNLLFLPTLSALRWNDRIIEFYTRLTSKAKPKKLAVIAAMRKLILMAFSIFKSEQNYEPLYV

SEQ ID NO: 432994 - protein, 343 aa, unidentified
MSEQKIIGIDLAKTNFYLFSINAHGKTTGKIKLSRNQLLNWLAQQPKMTVAMEACGASHYWAREIRKLDHDVILLPAQHVKAYQQRQKNDYNDAQAIAEACQHGTIRPVPIKTLEQQDVQTFLKMRRLVSMERTQLINHVRGLLAEYGIVFSKGATELRPKLPALLEEAENELTDTMRTLLHRQYIRLITLDNELEWYDSEQKKYVRQDPVCKRLLATPGFGPLVSQAIKSWMGDGKQFRRGRDASAALGLVPRQFSTGGKQVLLGITKCGDQYIRSMLIHGARAILFRASEKTDSLSVWVNRIREMRGFNRAVVALANKLLRIAWVIIARNEMYLPATKQNQ

SEQ ID NO: 432995 - protein, 448 aa, unidentified
MPHPPEAHTRSMPNAEAAAFDWYVGIDCGGATHHVGVLNAHGDRVGERAVAHSGQALTAFVAWLHELAGPSLARVAVGLETPHGGPVALCLEHGAAVFAINPKQLERFRERASAAGAKDDRRDAFVAASALRTDRAAFHRVVPEAAALVRVRELSRVSDELREEAARLSNRLRAQLERYFPPLLAVVPAADEPWLWALLTLAPTPAAAARLSERRLARLLRDYRIRRLSAADVRALLQAPALPVAPGTTEAVSAHVALLVPQLELVTRQHRACLAQLEAALTALAGPGDDPPAAAPPNADGAAGPGPGGVDGLGTVVRLLGSLPGVGVGVAGVLLAEAAPALLAGDYHALRTHGGTAPVTKQSGKQRLVVMRHACNQRLRTALFHWARVSIQHDSAAHRYYATLRARGHSHARTLRSLADRWLRILTAMLTTGTAYDASRFAVAAPTP

SEQ ID NO: 432996 - protein, 412 aa, unidentified
MLKIVYRVCCGLDVHKSFVVACIASTNEQGVTTYKSKRFSTFTGDLRRCADWLSENNCKDVCMESTGKYWIPIYNILETTCNIVLAHPKYVKAIRGKKTDKRDAKWIADIFKHDLVSGSFIPPADIRQLRDLVRYHWKLTNFIAGEKNRAQNCLTVSNIKLDDVFSDVFGKTATAITTRLLENNDPFDVVPYLNKRIKTPVEKIQAAVDGEMCVEQAEKLRIIRSHMDSLELCKLNLESLILSTAEKYLPQFNLVMTVPGIKSFSAVGIISEIGVDMSVFPTSKHLCSWAGLTPQNNESAGKKKTTRISRAGAYIKPLLVQCALAAIRAKQFPEVRNRYLALKKRRGHKKAIIAIARMLLTAIYNIIKKNEPYNPELYRKADRPPAHREIPLEEAIYLIQRQGYLVVAPTPT

SEQ ID NO: 432997 - protein, 342 aa, unidentified
MLYVGIDVAKNKHDVTALNVPGKTVLKPLTFSNNKAGFELLDLSFRQLNQDCLIALEDTGHYAFNLLNFLHEQGYKVYTYTPLLIKEFAKSLSLRKTKTDKKDAHGIALKLLSDPNREQFQHDNRQVDLKILARHIHRLKKKQSDWKVQYTRCLDIIFPELDKIVGKHSEYTYQLLTCYPNPQKRLETGFDKLIEIKRLTASKIQDILSVAPRSIGTTSPAREFEIIEIIKHYKRLIDKAETCVNDLMAEFNSVITTVTGIGGRLGAVILAEIRNIHAFDNPAQLQAFAGLDSSIYQSGQIDLAGRMIKRGSPHLRWALIQAAKACARFSPAFKAYLKTKLE

SEQ ID NO: 432998 - protein, 416 aa, unidentified
MVLFVGDDWAEDHHDVEVQDAAGRRLGKARLPEGVAGIVGLHALIGQFADPDDPAGSGQVLVGIETDRGPWVTALVAAGYRVFAINPMQVARYRERHTTSGAKSDAGDAHALADMVRTDAHQLREVAGDSALAEGIKVVARTHQTMIWDRQRQVLRLRSMLREYFPAALGAFEGVLGDLAAADVLALLERAPDPDTAARLSRAQIAAALKRARRRDIDTKTATIQSVLRAEALRQPAVLAAAYAAGVRSLVAVIGVLNTQIAVLQGQVEAHFGQHPAAEIYRSQPGLGDILGARVLGEFGDDPRRYPDARARKNYAGTSPITRASGRKKVVLARYARNDRLAAALHQQAFCALNSSPGARAYYDTLRARGTGHHAALRQLGNRLVGILHGCLKTGRPYDEGTAWAHHTEQHQQDAA

SEQ ID NO: 432999 - protein, 388 aa, unidentified
MTTDHEFAVVASTTDVQKVFVAIELSKSTWVVAIQPPAVDKVSLFRIAGGEIERLFELFEQARRRAGQPIEICACYEAGYDGFWIYRALTARGVACTVLDSASIQVSRRARRVKTDRTDAESLVRVLMAIYRGEHQVAKIVQVPSPEEEDDKRLLRCRGNLLRDRIQHMNRIRGLLNLQGVRHIDPNRSNWENELVNLRTGDGRSFPRQLMNEVRREGKLLGTVVRMLKEVEAEIAGMIRDERKRRHPAQRGQNHPIARRLAEIHGVGPQTAGILATEVFYRGFKNRREVASYVGLTPTPYNSGTMVRDQGISKAGNRRARAVAVELAWIWLRNQPESKLSRWFRTRVGDSAGRVRRIAIVDLARKLIVALWHFLEAGVIPEGAKTNA

SEQ ID NO: 433000 - protein, 428 aa, unidentified
MNCNTQNTKIASITEKTLIVGIDVGSETHFARAFDWRNYEYTKKPLEFSNTEAGFLTFKAWVEDIAEKQGKTAVIPGMEPTGHYWFALGKFLQDNGMKPVHVNPHHVKKSKELDDNNPNKNDRKAPKTIAALVNEGRFSYPYIPTGIYAEIRSLSNLRFQTQEELTRIKNRIARWFAIYFPEYKDVYGDLKAVSGRMVLKVAPLPEDIGKLGVEGVNQIWRSAKLRGAGIKREKTLVSAAEHSVGSKEAPEAARMELKNLLDDMDVYVSRLDELLVNIEEKLKEIPYVDKLMEIKGIGLVTVSGFIAEVGDIGRFDNPKQLQKLAGYAIVANDSGKHNGESRISYRGRKRLRYVLYEAAISLIGKNAEFKSIHEYYRTRKENPLKKMQSVVAVACKILRVFYTILTKGVDYDPVKLLGDIKRPQLQAA

SEQ ID NO: 433001 - protein, 345 aa, unidentified
MGSKLEQLLERPSRPFTPRAGPAWPARILEAGVNYHVKEQLVYLGIDIAKSYLDASIGSEKRRFSNDTIGHRELIKWGKQVKAPVQVICESSGGYERALVQGLARARIKISLVQANRVRQFARAAGILAKTDRIDAKVLCEFGKVMQPQTVTAATLEQEHLRELESQRRHLTHLLVMEHNRAARVSDASVVRLNRSLINQIKKQIEKLDLLIKEHIEQSPRLSAKAEKLISIKGVGLRTAALLLAQMPELGQLNRREVAALVGVAPFNRDSGKMRGKRAIYGGRRFVRHGLYMAALVAARHNPILRNFYLRLRAAGKPAKLALTATMRKLLIVLNSSLKTDLNYA

SEQ ID NO: 433002 - protein, 410 aa, unidentified
MIYVGIDWADDHHDVAITDDSAKTLSQFQISHDSSGFAALHGQLAKFRQSPDQILIALETSRGLLVHELLRSDYSVYAVNPKAVNRYKDRYVLSKAKSDALDALALAHLLRTDRHRFKALCPFPEDYRLLDRLCQDLRKLVEEKSRISNQITSVLKEFYPIALELFSLDSNIGIAFLRAFPDPQALSTCKKRTLGAFFRKHSYSRPQKLEELWKLIQRPGLHPDPVVLKAGRFRLLALLDQLIPLREHVALYEKEVKAILDKLPEAKSISSLPGVGDRLAPELTAALGPKDSDSQSRFECAEGIMKLSGCVPVTRESGKWKTVSFRYACVKNLRRTFRDWAFASLEQSVWARAYYDFYKAMNMPHSTILRNLGKKWARILFALWSQGTIYDETLYIQSLKNHNVRWAMAL

SEQ ID NO: 433003 - protein, 391 aa, unidentified
MSMYFIGIDISKYKHDCCIISAANQKVVSKVTIKNNKAGFNELLTIIHSLANPADIRIGFESTAHYALNLELFLENSLLTFMEVNPALISEYKKSKTLRRTKTDSVDCESIARWLMTVEYKPHSKGFYHAYSLKSLTRLRDKLIRQRSFYLVKITNVLDHTFPEFKPFFNERLSKTALYLLENYGSAEKMARMNSASYEKLRSVSRGKFSPQQFPRLKELAANTVGVNNSIFDVELNSLLSLYKSLVKEIDTIEKEINKLIEEVHPHYMSVPGIGPLSAAVIYSEYGDISNFTNPGQMLAFAGIEPGINESGTESHGGKMVKRGSSQLRYTLINCCLPLIRFDMTFATYYAKKREEGKPHRVAITHVAKKLIRVIYTLESQDIDFNAQKLR

SEQ ID NO: 433004 - protein, 422 aa, unidentified
MLEQAQDREQIIERVAALDIGKASLTCCVRVPDSQRPGRRLQEVGTYSTMTRSLQQMADRLMDLGVTRVVMEATSDYWKPPFYLLEAHGFETWLVNARDVRHLPGRPKTDRLDAVWLCKVAEPQMLRPSFVPPPRIRRLRDLTRYRSALVSDRTAEKNRVEKLLEDAQIKVSVVASDIFGVSGRQMMAALINGERDPRVLANLARGALRTKLPTLQEAFTGRFSDHHAYLLSRMLARIDALSAEIADLDARIEAEIAPFARAVARLDEIPGVGVSAARVIIAEIGVDMTRFPTPGQLASWARFAPGVSESAGKTKGTGATGHGNRYLAHVLGEAAVGASKTPTFLGERYRRIARRRGARRAVVATGRSLLTIVWHLLSDDSTTYNDLGPDFYDAHHNRDRKRNQHIRELQALGYKVTLEPAA

SEQ ID NO: 433005 - protein, 329 aa, unidentified
MVFLGIDVSKGRLDCAVLAAEGGRSPGRRSFRNDVEGAERAATWTAQVSGAAAADTHVILEATAAYHEPVAHRLAALGMRVSIVNPAQVRSFAKGIGVLGKTDRIDAQLLARYGQLARPRAWFPPARALLDRQGLIARLDDIEADLRREGNRLEQARTRGCPDVVEQSLLASLAALESSRETLRRAIAAHVAAHGELQAGLDRLLTIPAVGPKTAVRMLAMLRARGFDSARQAAAYLGLVPVERQSGKSVRGRPQLSRAGNPRLRAALYMAAVVGIRRNPDLKAQYERLLGRGKCKMAALSAAMRKLVHLCFGVLKGEGGYRAGAATPT

SEQ ID NO: 433006 - protein, 335 aa, unidentified
MLEEGSVGNNRAALSELGGRYPEALVVMEAGCHSPWVSRHLEQAGCEVVVSNPRKTRAIYQHERKSDRRDALMLARIARMEPALLYPVRHGSEEAQQDLLRIKLRDSLVRARVALINSLRFTLKSLGYSIANPSTERFHKVIQSALPQSVAQVIAPSVQALEELTLRIKLLQREISDQTRSKYPDTAWLEQIPGVGPITALYFVLKIEDPARFKRARDVGAFLGLCPRRDQSGENDPQLRISKRGDAYLRRLLVSSAQYILGPFAPPSALRQYGLALASGATARAKKRAVVAVARKLAVLLLTLWKNKSSYEAFPQRSSREKMRTNDLERLRCIA

SEQ ID NO: 433007 - protein, 402 aa, unidentified
MKKSSRMSVIHPHAAGVDIGAEFHVVAVPPDADAAPVRTFQRFTGDLHRMSGWLKTCHITTIAMESTGVYWLPAFEIPEAAGFNVILVNARDAKNVPGRKTDVNDAQWLQKLHSFGLLRASFRPEHDISVLRSYLRQRERLTEYRAAHIQHMQKALMQMNVQLHHAVSDITGVTGLSIVRAIVSGERDPSVLIQYRDVRCKKTPEVLQQALTGNWQPEHLFALEQSVAFFDFYQEKIRECDDQIETSLLQLSTGTEEPEGVLPSARHRTKQPNRLSFDVRPLLWKITGADLTQIHGFGPYLALKFVAECGTDMNRWPDASHFTSWLCLSPGNKISGGKVLSSKTRRSSSRIAAALRLAATTIGRSDTALGAFYRRLSSRIGKAKAVTATARKLAILFYNALK

SEQ ID NO: 433008 - protein, 348 aa, unidentified
MDKITRIGVDLAKNLIVVHGVDSMEHVAVRKAIPRQKFLEWFANLEPCLVAMEACSAAHYWGRKLRALGHEVRLIAPQFAAAYRKGGKHVKNDRLDAEAICEAASRPHMRFVALKTADQQNVLVLHRMRSGFVEERTALVNRLRGELFEFGVCLPQGIDAFRGHFVEALEDGTTELDGIARTALLAGWHHIQALDEQIAWCDSQIAARVKHDTNAQRLMAIVGIGPLTASAAVATVGDARVFRNGRQFSAWLGSVPKQASSGGKTRLGHITKQGNTYLRTLLFQGARSALTSAHRRTDRLSRWIVQLHARVGWYRTLVAIVNKHARILWAILAKGVRFDPSYTPIRPS

SEQ ID NO: 433009 - protein, 371 aa, unidentified
MSVYVGIDVHRKRSQVAVVDQAGEVLANRNVPNGVETILGVIGDLPVGTPAAFEAAFGWGWLVELLEDYGFDPHLVHPSQCKAIASARLKNDKVDAHILAQLLRADLLPEAWIAPPAIRQLRALLRHRIQLVRLRTLLRNRIHAVLADHGKDRAEGCWSAPGREWLAGLQLPAGSREVIEDCLAVIDALQAPIDRLDGEVRAHAKADPRVKVLTTLPGVGPLTALVILAEIGDVARFGSARKLAAWAGLTPTVRGSDRTIRHGHISKQGSTWLRWILAEAAQTAKRSPQFAATYQTIARRRGKKIATTAIARKLLTRAYHLLTDAENTATTPTTARPAAQPVPRRLPDREDHHTPGELAKSHEPAPPRSTT

SEQ ID NO: 433010 - protein, 349 aa, unidentified
MRFYTKQHQFYCGIDLHARSMYVCIMSHPGEILVHRNMAATAKELIKVVEPFLDDIVLAVECVFTWYWIADLCHRLGVHFVLGHALYMKAIHGGKVKNDKIDSQKIASMLRGGMLPEAYVYPQGMRSTRDLLRRRLYMARQRAELQAHIQNTNTQYNLPSFEKRLGPRSNRKGIGERFTDPAVRTSIEVDVAIMDALHEQILAIERQINALVREHDPVALHLLRSIPGVGKTLALIILYEIHDITRFPSVGQFISYARLVKCPHESAGKRTQGKGAKIGNVHLKWAFSEAACLFRRRNEQGKLYHQRLVSRYGKAKAMSIIARKLGRTVYTMLKRRTPYDARRFFETLK

SEQ ID NO: 433011 - protein, 326 aa, unidentified
MEARTVNNLPPAGTHDDAICCVLAIELSKKSWIVAVNTPLSDKISRHTLKPSDGKELLDLCERIRTRVAKETKKRVEMVSCYEAGYDGFWLHRLLQAHDIRNHVIDPASLQVDRRARRAKTDRVDAERLLRSLMAYLRGEPKVWSVVRVPSVAEEDDRRLHRERGRLINERIQHVNRIKGLLAIHGIYDYQPLRRDRIQRLEQLHTADGRTLPPRLEAEILRELQRLEIVIGMIKTIEAERDAIASANTETERGSVKKIQHLAKIKSIGPEFATTLVGEVFYRSFDNRKQLASYVGLTPAHFQSGAMSRDQGISKAGNAKARTVMI

SEQ ID NO: 433012 - protein, 340 aa, unidentified
MDKYDFSGIEVSAKELIVAVERQGRTVPLECFANDAQGHQAVLRFLRRTGHPVRACMESTGVYGLDLALVLARSGIQVMVANPRAARHFATAMMQRSKNDRLDARVLLEFVKRMPFQAWTPPRPAVLELHALSRRLEALKDTQAAEQNRLHAARSTDTTPAAVRRDLERSLRSLHRAIARLTLEAVKIIRQDSDLKLRFDLLLSAKGIGETSAIALLAELAVAPQDLDVRQLVAYAGLDPREHSSGSSVHKKPRISKHGNVHLRRALYMPALVALRHEPNLRAFYEHLRARGKAKMVALVAVMRKLLHAIYGMFKHQIAFDGNKLFALPAPEISKTEAAA

SEQ ID NO: 433013 - protein, 405 aa, unidentified
MEVIIERGCGLDVHKETVVACIMGTGIKKEIRTYLTVTNDLLRLKEWLQNSGITHVAMESTGVYWKPVFNLLEDHFEVILVNARHVKNVPGRKTDVRDSEWLCRLLRSGLVSGSFIPPRDIRELRDLTRHKRKLIQAMVAEKQRVEKVLEDANIKLSSIASDTFGASGKRIVAALIKGELEPEGMAELSKGRLRQKREDLKEALVGQVREHHKFMIKVSLKHIRAMEKILFEIERKIQEKINHQYKEEYELLQTIPGVKGEASTLIAEMGVDMERFPSERHLSSWAGMSPGNNESGGKKKPGSTTYGNKCLKTMLTEFAWVASKTKGTYLRSKYHSLVGRRGKKKALVALGHKILLMCYHILKYRCAYKELGVDYLDKRRKDKIARSYIKRLNHLGYEVTLREAA

SEQ ID NO: 433014 - protein, 321 aa, unidentified
MVSYLGIDVSSLSLDAAVRPQGTRLHVSNDPAGFEALLDGLCGLSIKRVLLEATGGYERNILRFLQDAGYKVIRVNPRRARAFAESIGVKAKTDAIDAEVLAHYAEVIPDQPTLRISPERALLRELLQQRDRLVQQRDDDRRRLKQAQFSAVSDFLKANLQHFKSQIKLIEQAISQQTEALKDERVTQLVQVKGIGLVTAGKLITLLPELGRVESKEIASLVGVAPFNHDSGKSVGKRSISGGRFEARRSLYMSCLVAIKYNPALKARYEALRGRGKVAKVALVACMRVLIVRLNAMLRTGKPWLDLVLPQPMRTESRKPT

SEQ ID NO: 433015 - protein, 392 aa, unidentified
MIYAGVDIAKVDHVIGAVDEAGAEAAKPMRFKNSEAGFERCIAWLESVAESEDEVFVGMEATGHYWKACFAYLMAAGYRVCVVNPMQVHAMRRLKGLSGVKNDRIDSRLIAETLRQGDYDETRLATDELQALKQLTRYHQGLKQELATVKTQAICVLDAYFPEYAGLFSDMFGAASLKVLAECPTPSEIGRKRASSIAKLLSEGSRGRLGADKAAQVKAAAKSSVGIRLGEEAASFQIKTMVSQVEFLNATIAKVEKEVASLLGKVEPNITTIPGVSTTTGAQIVAEIGDVKRFRNAASIVKYAGLNSGVDESGKYSAEGVPITKHGSPYLRRSLWLAANRARQYDPKLREYYDKLRRKGKPHRVAVTAVARKLCHVVYAVMRDGEPYDPAK

SEQ ID NO: 433016 - protein, 349 aa, unidentified
MNKHTTIGIDLAKRVFQVCVVDTHRPRVQVNKELKRHQVLDFMRRQPACRVFMEACGGSHYWARQLQALGHTVALISPQFVTPFRKGHKTDANDALAIVEAGLRPDMRFVPLKSGEQQDIQSLHRIRERYIHQRTQLINQVHGLLQEYGVISGRGQKALKQRVWLALEDADNELSMLMRDLIAEQMAELDRLNERIQSLDKRVEQMSRAVMPCRQLLAIEGVGPVVATQLYSALGNGNAFKKGRQASAYLGLTPTQHSSGGIAKIKGIGRTGQISLKAALIRGAHSAINTVGDKQDAKSRWLRALVARVGKNKAAVALANKTVRNAWAVLHSGQSYCREFNDGSALMVS

SEQ ID NO: 433017 - protein, 352 aa, unidentified
MAKVEFDDLKSVGIDIGKDTFHIVGFNHEGQRVLRKQIKRLALVTTFEKLQRCIVGMEACLSAHFVSRTLRKMGFEPRIIPAIYVKPFNKGQKNDYNDAEAIAEAALRPNLNTVSEKSQDQLDLQALHRVRSRLVSRRTATINQIRAFLIEQGITVRKGLRALKNSFEAILEDRKDEISPRMRKILIGLYGDWMWMDDRINAVSKEIEDISRTEENCVNVMTVPGIGPMISTAMVAAIGEGEAFDRGRDFAAWVGLVPRQYSTGGRTILGRITKRGSRYLRMLFVQAAKVILMRPHRWPDFSFGAWLTRASERMHRNKLAIALANKLARMAWSILRHKTAFDAPRDEIMAGV

SEQ ID NO: 433018 - protein, 335 aa, unidentified
MEAKNFVGIDVSKGALDISIVQDGNVILYTQVKNSPLQINSAIPRLLKQCKAAIEETLFCMEYTGIYSAPLLKWLQERKALIWMESGIHIKKSMGLTRGKSDKVDSNRIALFAFSNRHKVKYYVAPRPIIESLKALDAQRSRLVKAKFQLIRPVQEQKGFIDGAISKSVEKFAQKAVDEITRQISAVEKEIKRVIDSDDRLRNLYSIVTSVEGVGFVTAVYMLISTNEFISINDARKYACYSGVVPFEHSSGTSVRGKNRVSHVADKNAKKLLHMAALTVIQHKGELQDYYHRKVQEGKNKMCVLNAIRNKLILRIFSCVQRGEPFKKEYLYKVA

SEQ ID NO: 433019 - protein, 331 aa, unidentified
MKNFFIGIDVSKLTLDVALYSINGNERLNHLMIENNPDGFKKMISWIKKKKIDLKEVFICMEHTGVYANAIVSFLEKEDIAYCRISALAIKKSLGIIRGKDDGVDAFRISQYTYEKREKLKPSKLPPANIIALRNLLVERNGYVKSIAQYKQRKKEIAVHQEKKSIKRKNEIIDILTEKVEEIKLEMMELIEKDPELLKTYTFISSVVGIGFVNAVALIAYTNNFKDFTNPRAYACYISVAPFPYTSGTSIKKRTSVSKIGRLELKALLTMAARSAIINDPELKRYFERKFNGKKGPESNYGQVLNAVKFKLICRVFAVVKRQEKYVVFKY

SEQ ID NO: 433020 - protein, 373 aa, unidentified
MKKISRLGVEKSKKKEERASKGYTIGLDLGDTKSQYCVLDGAGEIVAEGSVSTTRTALEQQFKSYAGSVVALEAGTHSGWVSRVVKQIGLEAVVANPRKVRLIAESTQKSDPEDARMLARLARVDRKLLFEIHHRSEAAQLDLTVIRARAGLVEARTKLVNSLRGQTKTLGSRLRKCDAEAITVEVLEGLPEAVKGALTPLVVQIQALTVGIEEYDQRIAAGGKQYPEIERLKQVRGVGDVIALTYVLTLGDKARFERSRDVGCYLGMVSQRRNSSESQPELSISKEGDTYLRSLLVQGAHYILSRRGPDTDLKRWGVRLAQRGDQKSKGKKAKRRAVVAVARKLGVLLHRLWVSGEKYEPLRQARQQERQAA

SEQ ID NO: 433021 - protein, 444 aa, unidentified
MRFIALDVHRDFCEVAIAEDGRVRRAGRLETTPAGLELFARSLAADDRVALEVTGNAVAIARIIEPHVDRVVLANPKAVKNATRSAKTDKLDARTLARLLAAGFLPEVWTPDEQTRVLRRRISRRAQLVRQRTREKNQVHAILIRNPKGRSPATDLFGTAGRRWLAAQELPADEREMVEACLRGIDFLDREVAAIDRALAELVLGSPGLRRLLTLPGVNFVTACALLAAIGDIRRFPTARRLVGYLGLDPRVRQSGSEPARHGRISKQGPGETRHVLVEAAWHAARTTGPLRAFHERVSARRGRNIATVAVARKLTVIAWHMLSRGEDYAFTRPSLTREKLRRLELMTGAERRKGKRIGVFATREQHLLDKQLAAQAGLAYRRLVRDLAAHHQQGHGCRTGARISWAVKRPSSAAGDSPTSCALARGHPRPHHSRKGAGLVQPT

SEQ ID NO: 433022 - protein, 412 aa, unidentified
MKDLLEISCGLDVHKEKIVACILTGPLGKPTRSEIREFSTLIPDMIALRNWIVSKNCHHVAMESTGIYWMPIYEILEDAFSGDITLLVVNARHMKNVPGKKTDMRDSEWISTLLRAGLLNGSFIPEKRIREFRDLNRYRKSVIRDITSQKNRIEKFLQSSGFRLSSFISDIFGASGRNIILHLIEHGQIDKTALDSCLKTKTRNRIDEILMSVNGTLSEHQKAFLKILMTHYDSLKKHLAEIETSLEEDMAPFALQVEQLNSIYGISTTASCAIIAEIGIDMKPFKTAEHICSWAGLCPGNNESAGKRKSTSVTKGNPYIKSMLCEIAWVIAGKRNTYLSAWYWRIKQKKGAKKAIVALARKLLVIIYTMLKQGTLFDESCFETRRKHCEQKQLSRYIRELEKHGYHVESQS

SEQ ID NO: 433023 - protein, 346 aa, unidentified
MNYIGMDCHISTLDFAVVNDAGRLVKAGSVATSVNRFIEFVKKIPLPRTIYIEESTLAAWVLEICIRYGEKLVITDPKKNLWIASSGQKGDSIDALKLAQLARGGYIKEIHHPVGQRRRFRELMEAYHDTVRSEVRIKCKIKAKFRQNGIQCTGDTVYAKNHRQEWKDKLPQEATLLLILEGLWLQLEQLEQTEKEILKAAKAQAKHYPEIKHFEDITGIGFINAATISAILETPYRFPNKRKVWMYAGLGLMKRSSGGKLYSEKLSTDYNRLLKYTIKQAAEAAIRAEDNPLRRKYLDMTLLHGIAPNLAKLTIARGMLASTWAMWEKGEKYNPEIRERATHKQG

SEQ ID NO: 433024 - protein, 348 aa, unidentified
MTIGLDLGDRYSYFYTLDSSGENIESGRVQTTRSALEKRFQSGERARVVIEAGTHSPWVSRLLAECGHEVVVANPRQLALIAQNQSKDDPVDAELLARLGRVEPQLLSPIVHRGAEAQADLAVIRARDAVVAARTQLVNHVRGAVKSWGARLPRCSPRSFAQKGESEVPEPLRAALGPVLEVIAQMTEQIKGYDRQLEAACQQHYPETELLRQVGGVGALTALAFVLTLEDPHRFGRSRSVGSFLGLRPGRDKSGAQDPELRITKAGDQLLRRLLVGSAQYIVGPFGPDCDLRRWGLKLASRGRKNAKKRAVVAVARKLAVLLHRLWVGGEVYEPLRLAPPTPVGSPA

SEQ ID NO: 433025 - protein, 350 aa, unidentified
MMIIGCDFHTRYQQIAMMDTETGELVERRLEHEDGEAREFYASLPKPSRVGMEATGYAQWFERMLAELGHELWIGHASEIRAGVVRKQKTDARDAAHLLRLLVENRFPRIWIPSPAERDTRQLLRHRYKLVCFRVSVKNQLHGLAMSQGVCRKKRLFTAQGREELEKLSLGPWASRRRQELLAMLDHLNPAIEELDRAVQQAANSQPDAVRLMMHPGVGPVTALAFVLTLGPVARFQRSKQVASYLGLNPKERSSGGKQHTYSISKQGNTMMRWLLVEAAQTAVRFDPELQRLYQRLKFRRGGSVAKVAVARKLAVKLYWMLRVPASDAQMAPMQGSPTATLVPHVGSTF

SEQ ID NO: 433026 - protein, 310 aa, unidentified
MDAIYVGIDVSQARLDVHVLPGGEAFAVARDGKGLEELIERLRAFSPQLIAVEATGGFETIVAAAVAGASLPLVVVNPAQIRHFAHALGKRAKTDPIDAAVIAHFVEAVKPELRALPDEAQRLLAELVGRRRQIIEMMVAERQREKRAANIRVRKSILRHIRVLEKELPEIDEDIGTLVRGSTVWREKEDLLVSFPGIGNTLARTLLAELPELGALTRRQIASLVGVAPFTRQSGHWKGKSMIGGGRAAARTALYLAALVASRHNPILKTFYARLLAAGKPKMVALIAVARKILTTLNAMLRDKRKWQPA

SEQ ID NO: 433027 - protein, 414 aa, unidentified
MFAVGVDVSNARSTVAVLQSKTNVAIKPFEVQHTADGFAALTETLNALGGEARIVMEHTGRYYESFAMSMHQAGFFVSAINPLAIKDYQDGITVRKVKTDKADALKIARFALDNWEILPQYTPMDTIRYNLKTMHRQFQLSSKTKTVLNNNLIALLEQSYPGVDKYFDSPARSDGSQKWVDYADTFWHVDCVAKVSQKAFTERYRKWCKRHGYNFSAQKAVELHEDAKQKFPLVPKSDTCKLLVKEAVAQLNAVSRTVETYRAEMDRLASQLPEYDTVMGMYGVGRSMGPQLIAEIGDIRRFAHQKSLIGFAGTDPIKDDSGDKVSGSKPSSKRGSPYLRKTLFVVMTILLQLQPQDDPVYRFLDKKRSEGKKYHVYMTAGMTKFLRIYYGKVRDCLKEKGLWDQPSVDVVNPD

SEQ ID NO: 433028 - protein, 412 aa, unidentified
MAVFCGIDWAEEHHDVALVDGEGTLVAKRRISDDAAGFTALVQLLADAGDTEDQRIPVAIETNRGLLVACLRATGRQVFTINPMAVSRYRDRYSVSRKKSDAGDALVLANILRTDLAAHRPLPSDSPLAQAIAVLARAQQDAVWDRTTAHNKLRSVLREYYPAILDAFADKRGGLLRSEARTLLAAAPTPHAAAELSTAKLRALLTRAGLQRNIDPEAYRLREILQREYLHHPQLVEEAFGRQALALLHQLDAACASAEDLAAAAAEQFDRHPDAEIITSQPGLGSLTGARILAEIGDDRTRFTDARSLKAYAGSAPVTRASGKAITVLHRRVKNQRLAATGYIWAFAALTASPGARAHYDRRKATGDRHIAAQRNLFNRLIGILHHCLQTRQRYDETTAFAATAIPTAAVA

SEQ ID NO: 433029 - protein, 345 aa, unidentified
MTIVETTRSVTGGVDTHLDVHVAAAVDASGGTLGVESFPTTPVGFVQLHEWLSSFGLVAGVGVEGTGAYGAGLARYLRGQALEVIEVDRPNRQLRRRAGKSDTIDAIEAARAALSGRASGIAKSADGNAEAIRALLIAKRSARDTRIMCLNQIRHLGFTAPDELRERLRGVSRRRVAHVAAGLRPSGSDPVACATKLALQTLGRRVLDLDTSTERLDAQLAMFVRAAAPALVALEGVGIDTAAILIVAAGDNPQRLRSEAAFAHLCGVAPIAASSGKTVRHRLNRGGNRQANHALWRIVFTRMSSDERTRKYVARRLAEGRSKPEIIRVLKRYVAREVYKNLQRG

SEQ ID NO: 433030 - protein, 409 aa, unidentified
MEVVHERCCGLDVHKETVVACVVVPSAGKQPHKEIRTFNTMTADLLQLADWLTAQGVTHVALESTGVYWKAPWNILESSFTLLLVNAQHIKQVPGRKTDVRACEWIADLLRHGLLRASFVPDLPQRELRELTRYRTTLIRERAAERNRIHKTLEGAGIKLGSVASDVLGSSGRLMLEALVEGTTDAATMADLAKGSLRTKLPQLERALTGKVGAHQRFLIAHQLAHLDGLDELIDQLSQEIAERLRPFQNKLERLDGITGVGLRSVEVFLAEIGTDVARFPSAAHLASWVGICPGNNESAGKRKSGKTGKGDVWLRTALTEAAQAASHTKDTYLASQYQHLAARRGKKKAIVAVAHSILRIVWHLLDHDCEYVDLGSRFLEERDRQQIERRLVRRLERFGYTVKLEPAA

SEQ ID NO: 433031 - protein, 388 aa, unidentified
MPQAPSFPDRPANLDYDRTLILAIELSNKKWVLAAQVPGMPQTKARRTIEPTPEALMAAIGGYRARAVAAGRMVERAIAAYEAGWSGFWLARWLAVRGIEVHVIQPASVPVDRRARRAKSDGIDAELLLRTLLAWLRGEPRVCSMVPVPDEADEDARRCVRERAELVSERTGLVNRIGAVLATLGVSDYKPLRQDRHRRLEELRTAVGAPLPPYAHAKITRMLLRLELVLAQLAELDQQRDAVMEDATPDRAGAMIQQLAGLRGIGVQSATVLVREAFVRKFANGKALGSYAGLTSTPYSSGGVEREQGIGKAGNRRLRTAMVELAWLWQRYQPASAQVRWFRERVGTTGRRVRKVMVVALARKLLVALWRFATEGIVPEGAVMKPAS

SEQ ID NO: 433032 - protein, 357 aa, unidentified
MGKSISNFSSVTTIGLDIAKNVFQVHGVDAKGAAIVARSVRRGGLLKFFASLPPCLVGMEACSSSHHWARALSELGHQVKLIPPAYVKPYVRRNKNDAVDAAAICEAVGRPNMRFVPVRSVENQAELMRHRARELLAGNRTRMLNALRGHLAEVGIVAAQGAQHAYGLKRLLTDGCDENGEIVVADCVRKALAPLVQQIDAIDEEIEAIDDHIKAQVKADDTARRLARVPSIGPITASAIVATIRDPSAFASGREFSAFIGLTPRQSSSGGKERLGRITKMGDRYLRKLLVVGACSVLNHRKGHNDALRVWADQLLARKAVKYKFKLTAVALANKVARIVFALMTRGGEYDDRPLAA

SEQ ID NO: 433033 - protein, 433 aa, unidentified
MPTNHPYDLVIGLDRSDRKADLHLITPASGQRRSETIDTSPEALWEWLLELRQTHPQGRVALCLEQPAAHLIAFLEAYPWITLYPINPITLQKYREAFVTSRAKDDGKDARYLAELLLNHHDKLKAWAPEDSPTRAVQHLVFHRRAVVDERTGLSNRLIALLKQYFPQALVLCGEDLWRPLATRFLLKWSSLQAVQKAKPATLQTFYYLNGSRSAKLLERRLALVQGALPVSDEFSLINTFSLRVQLIARQLQLLHQTIQSFDQQIAAAFAQHPDHAIFASLPGAGPVLAPRLLASLGSQRERFAQAASLQRYTGVAPVTKRSGASCHIHRRYLCPKFHRQSFHEYAKESVLWSRWAAAYYLQQRTKGAHHHSAVRALAYKWQRIIWKCWQSRTLYREEIYEAALRKNGSRLVGLLDQIELGKSPFKTREKKS

SEQ ID NO: 433034 - protein, 353 aa, unidentified
MKPKTESDTALPMVIGVDIGKEVFHLVGFGVDGKIVFRRKIKRLGFAAVFEKVPPCIVGMEACLSAHFVSRTLRTLGHEPRIIPAIYVKPFVKGQKNDYNDAEAIAEAALRPNLRFVQEKSQDQLDLQACHRVRARLVSRRTATINQIRAFLIEQGIAVRSGPRALRISLFAILENRKDEISPRMARLILDLYKDWCHLDERIDTVTGEIEELSRVEAKCQRLMTVPGIGPVISTGLVAAIGSGEAFERGRDFGAWLGLVPRQYSTGGRSVLGRISKRGSKYLRTLLIQAAKVLLMRPHNWPRYSFGAWLKTASERLHRNKLAVALANKLARIAWSVLRHDKAFDTHLETAAI

SEQ ID NO: 433035 - protein, 339 aa, unidentified
MIVGIDISKKWFDAAWQVDGQGRHQRFEYTDEGIGQLLAQTPEAAHYVMEATGTYHARLALRLHESGRRVSVVNPLVIKRFAQMQLSRVKSDRADAELIRRYGEQQPLSPWAPATDEVLELQQAHGWLDDLIGERTRLLNRREAHAHHAKPSAFVISQMAAQLQQLDGQIKTCERHLEVMVKKSFTELFERLLTIPSIGAKTAIELIIVTDGFRRFEDVKALCAYIGVSPTTFRSGSSVNGKGGIAKLGQGRMRQLLYLCSWTAKTCNPACRALYARLKALGKPPKVINVAIAHKLLRQAFAVATTNADCRVAALLAMTSKGLPRVVRLLRPRKLGASQ

SEQ ID NO: 433036 - protein, 344 aa, unidentified
MVAKKAKFVHFIGIDVSKGKIDVWLCVNLGNQGHYWGQFEQSKKGFSAFKKWLEGLIGKDMSVVFACLENTGLYDDALLYFLADHNIAACVENGATIKAAKRDQRQKNDKLDAREIAMYAIRYLDELEIWEKPREIVEQLKQLLSLRSASIEHLKGLKQRIKEIDGFKWARIQKVKNYTAGIKGLRKDIDDIEKAIWELIKSDAALYKMYALIISIPAVGKITAWHFICYTNEFKRVRNGKNLAAYCGVVPFKEDSGTSVRKPPRLPNRANMTLKTLLHLCALTAIKMKGEFAIYYQKKIEEGKHVLKALNSIRNKLVLRIAAVIRNDRPYDQHYDYKSICSGA

SEQ ID NO: 433037 - protein, 365 aa, unidentified
MYKVLNSAATLIQRTTTGAPQGHMYYIGLDVHKKTISYCVKEASGKVHEEGQLGATRWELDGWMKTLPQPWMVAMEATIFTGWIYDHLLPHATQVKVAHPLMLRAIAAAKKKNDRIDAGKIADCLHCDFLPECHMASTAIRDRRRTLRYRHLLVRQMVQMKNRISGLLMETGVSHNKRRLHKVGYFRKLLASNEEVNESIRPLLRVSRDTIVRLQKIEYALVSSLQRDPLLAERIKRLRTVPGVGPITALTWALEMGEVSRFPSIREAISYCGLCGDEKSSADKVIRTPLSKQRNKHIQRVLVEAAKLAPRQDHNLALVYEREKQQGNANRATLAVARKMVAYLLAVDRGQRDFVPFADPQSAAA

SEQ ID NO: 433038 - protein, 339 aa, unidentified
MELYAGLDLHSRNTYIGIMDKAFNRVFKKRVPNHLEHILQTLDPFRDQIKGFVVESTYNWYWLVDGLMDAGYSSAHLANPSAIKQYEGLKHSDDQHDAFFLAQLLILGILPQGYIYPKKGRPVRDLARKRMFLVQHKTAHILSLQSLIARCCARKVRANDMRHLSVKELEMWLEEEHLVLSAQANLDSINFLKQKIQGLEKAIIQKVKLNKEFKYLLTVPGIGNILAMTIMLEVGDIKRFPKVGNFTSYCRCVPSRRFSDGKSKGSGNRKNGNRYLSWAFTEAVHLGRRHNERFRSYYNRKVAQANTSLATKALGNKLARICYYIMRDRVPFREELLSR

SEQ ID NO: 433039 - protein, 355 aa, unidentified
MSYVFENKGKIVDPEFDKKTISYCVKAADGNIHEEGILRAIPMVLREWAGKRQEPWHGAMEATLFSGWVYDALKPFASALEIGNPSMMKAISAAKKKNDKLDARKIADLVRCNLLPACYVAPQEMRELRRLLRYRNVVVAQAVRMKNKMSGLLMEVGAEYSKQRLHSKKYFSELLDQLEEVPESVKDLLRLSRGSVEMFETTQRQLLNRLQKDPLLVKRVELLRSIGGVGEVTALTWALEICDPQRFHCIADAVSYCGLSSALVSSAGKQQRGPISKQRNAHLQTVLIEAAKLAPRWNRQLAELHERERKRGNRNRATLAVARKLVAYLLAVDKSGQAFQVRNPPPAEPGVDKVA

SEQ ID NO: 433040 - protein, 358 aa, unidentified
MRFYTKQHKYYCGIDLHTKKMFVCILDATGQIRVHQNIKTDQQAFLSIITPFREDLVVAVECMFTWYWIADLCIEQNIPFVLGHALYMKAIHGGKAKNDKIDSHKIATLLRGSMIPQAYVYPARMRATRDLLRRRNHFMRKRAELYAHIQNTRSQYNLPDFLGRIAKPQNREGIVERFHDPSVQKSIAVNLEMIQAYDHLLTQLEHDLIASAKEHDLRSYALLQTIPGVGRILALVILYEIESIERFPQVQDFVSYCRLIKSIKESNGKKYGSSGKKIGNAHLKWAFSEAAVLFLKGNDPAKKYLERLSHKHGKGKALSILAHKLGRAIYFMLKNKEAFNQKKFLGLSKLEGMDQPGV

SEQ ID NO: 433041 - protein, 311 aa, unidentified
MFVGIDVAKAQLDIALRPTGERWTVPNEDTSIAALVTQLQTVAPTLIVLEATGGYQRAVVAALAAAGLPVVVANPRQTRDFAKATGQLAKTDTLDARALAHCADAVRPTPRPLPTAQTDDLRALLTRRRQLVAMRTAEVNRLSNAPGRLRADLEAHIAWLEHRLVALDDELDTTLRASPLWRERETLYRSVPGIGPVCARTLLLDLPELGTLSRQRIAALVGVAPFHCDSGTMRGRRTIWGGRAHVRATLYMGTLVAVRHNPVLKAFYERLVAAGKAKKVALTACMRKLLTILNAMAKQKTLWQPREVSIA

SEQ ID NO: 433042 - protein, 348 aa, unidentified
MNRIYIGVDFHARQQTICYLTTEGGEIQLHELKHQHKQEVRAFYAQFQGRVIVGLEASGYSPWFERLLEELGCEVWLGHATEIRRRARWRQKNDRRDAELILDLMLHDEFPRLYLPPLQSREVLRMLRYRQKLVKIRTMGKNSLQALALQSGLAKGSHLFSKAGLQELRTAAMSPAMQWQREQWLQLLEPLNQRLLETMFWLKQQSQDDQRIIRLRTHPGIGLLTSLCLVHSLEPVTRFRNQRKVVAYAGLEPLERSSAERIRFLGISKAGSRILRYLLVEAAHVAVRKDEELKRFYQRLAARRGRAKAKTAAARKLLIRAYIMLRDEIDYAEFRRRAVAARLARKIT

SEQ ID NO: 433043 - protein, 413 aa, unidentified
MYFGGIDIAKRQHEVCVLNAAGEQVLAMPVSNDSAGADRLLRTLRSRLGPDPQVVTFCMEATGHYWMALYGYLTHKGYSVHVVNPIQSDAARDLYIRKSKTDRKDAFILADLLRMNRTEATEIATEPILKLQTLSRTRFAFVDHVSALKQRVLGILDRIFPEYPGCFSDVFIKTSRELLKNYSTPEELAEADLSELTEFLVKHSRGRIGADRAAEIQRYAQGTFGISLAVDAFALELRLLLDQIEFIEEQIGALEEAINIVLEELAQQNHDRDLPEGAHHVIETIPGIGPVLAAAIIGEIGDISRFSNARKLVAYAGLDATVRESGQFTGTRNRISKRGSPHLRRAIWLAAVSARRFNPQLRAYYDSKRAQGKHPLVATGAVARRLLHIIHAVWTKGSPFNADYCWTLPGGDD

SEQ ID NO: 433044 - protein, 422 aa, unidentified
MENEYRLYVGIDWASEAHQVCVLDAARRIVSERSFAHAGDAVAAFAEWLNELAGDDPGGAAVAIEIPRGAVVETLVERGFHVYAINPKQLDRFRDRHSVAGAKDDRRDAFVLGDSLRTDRDCFRRVRLDDPVVIQLRELSRVDEDLKRDSNQLANRLREQLHRFYVQALKLCPAADEPWLWSLLGLAPSPAAARGLRIKRVERLLREHRIRRVSAAEVIAALRAPALQVAPGVVEAATEHIGLLLPRLGLVHSQRQRCGERLEALLDQLQATPDQGPKQREHRDVEILRSLPGVGRVVAATVLAEASWALAERDYHALRAHAGIAPITKQSGKHRVVLMRNACNGRLRNALYHWARVAAICDPASKTYYAALRGRGHSYARTLRALGDRLLRVLIAMLKNDSLYDASKRRSRPTPSTLEEVA

SEQ ID NO: 433045 - protein, 358 aa, unidentified
MKIIGCDLHARQQTIAMLDTDTGEFVEKTLEHEGEELRRFYSALPGPILVGIEATGSMQWFLEMMEELGIECRVGHPAKIRRAETRKQKHDRRDARLLLTLLAENRFPTIWMPSSEQRDLRTLLRHRHQWVRLRSRVQHTLQSMALNHGLRRGRSLWSQAGQDELRALPLAPHASERRAALLSLYPRLQESIDQLDQQVGQQVQQHPPARRLMTHPGVGPITALATEVFLGDPLRFSDGKALASYIGMIPSEHTSGRRQRLGAMSKQGNTLLRYLWCEAAMHAVERDPELKRFYRRKLVQKGLGKARVAAARKLGIRLWIMMRDQIDYQEFCRRGKARQESGSVRAGMPDIDSGPAQQ

SEQ ID NO: 433046 - protein, 348 aa, unidentified
MRFYKRQHQFYCGVDLHAKSMHICLVNQAGEVLVHRNLPTRPDRFLNAIAPYDRQDLVVGVECMFTWYWLADLCAEHNLPFVLGHALYMKAIHGGKAKNDKIDSEKIAMLLRGGMLPEAYAYPHKMRATRDLLRRRMYLMHHRAEALAHIVNTASQYNLPPITKKLTYAANRQGIADGFADRSARLAIQSDLELVDHFDEQLRRLELELSRTAKVDDPQSYYLLRSVPGVGKILALVMLYEIHDVRRFAKAGNFLSYARLVKCAHESAGKRLGAGGKKIGNAHLKWAFSEATVLLMRQLPAAKQYVDTLAKQHGKGKALSILSARLGRTVYLMLKRKQPFDAERFLRS

SEQ ID NO: 433047 - protein, 357 aa, unidentified
MGGAKTPTDSGGESMDTVTTLGIDLAKSVFQLHGVNAHGRVSLQKQLRRGVLLKTVAQLPPCVIGMEACSTAHYWARQFERFGHTVRLMSPQYVKPYIKGQKNDQSDAEGICEAVSRPNMRFVPVKSLEQQDLQSAHRVRQGWMGERTALINRVRGLLGEYGVALARSPATVKRELPGMLEDTQNGVTAIARHLLRQLLDHLKDLEERIAVIESLIEELGSQHEVVERLRTIPGIGLLTATAMVAAAGNGKAFRSGRQLAAWLGLVPRQYSSGGKPRLLGISKRGDKYLRGLLVHGARSVMLYAERQARPNQLWLNALRERRGKYRACVAQANKTARIAWAVMTKGEIYRAALVTPV

SEQ ID NO: 433048 - protein, 340 aa, unidentified
MSLVMGMDQHRAQISTEWLDTMTAEVFRARIAPADRAGVRKFLGRFAGEDLEVALEATTGWRFLAEELERVGAEVHLAEPTETSGLKSKKKRAKTDWADARHLRELLLLGRLPESWIPPAHILDLRGRVRLRHTLSHQRTEWQQRIQAVLYHHGIPQRRDLLTLEKRQWLARQKLPAAAREQVTIALEMIDALDIQLAPFDVALRAYARKQPGCRALIDQIYGVGELTSVTILAELGDARRFPSSRDTVRYSGLDITVYQSDQRRAPGHLSRQGPPALRWALYEAAQRARFPASPDRAYYLQLAERIGGNRACLALARKLLKRSYHILKALGDDALKPAA

SEQ ID NO: 433049 - protein, 396 aa, unidentified
MLVACVLKQGKKAVRTFSTMTEDLLRLLDWLTQEGCTHVAIESTGVYWRPVFNILEGAMDVILTNARDAQGYKARKTDVIDAEWLADLLRHGLLKPSFIPPRPIRELRELTRYRESLVREQTALANRIQKLIESANIKLGQVASDALGVSGKLMLRALAAGETDAEKMSHLARRTLKRKPPQLQQALEGRFTQAQRWILGQLLDQYDHVEAALQRAEEPIKPEGENRADPFGPEAIPLLDTIPGGGETVAQIIIAEIGVDMTRFPTATHLASWAGMCPGNHESAGKRKSGKPTKGSRYLRAALVQAAWAASHQKGTYLAAQYKRLVKRRGKKKALVAVGHSILVIAYHVLQTRRSYQDLGGDYFERRNVDKQRKRLIRQLASLGVKVTVEEVKEAA

SEQ ID NO: 433050 - protein, 343 aa, unidentified
MAIVAGFDVHRAQITFDAVDTETGELSRGRIDSNRPAVRAWTDRFPGQEIEVALEACTGWLFVCEELAAAGALPHLAEPAETSARRGSKRRAKTDRADARHLRELLSQGRLPESWLPPAHVCEWRTRTRLRRTLVEQRTEWLQRIRATLFQHGVPAGEVPQRLLGRQGRAFLARLGLPEAAQERITVALRLIEAIEAELQPLERELRRLARGQAGCQALIRQYGIGELTAPTILCELGDVQRLSSSRKAVRAVGLDVGVHRSDRRSRVGKLTKQGSPHARWALYEAAQSAARPGSPDHDAYLALKARGLSHTRTSLTIARKLARRCFHSLRELGPAALEPLVD

SEQ ID NO: 433051 - protein, 340 aa, unidentified
MLYIGLDVHKEFCQTCVIDEPGRALSNERFSSTNEELDRFLDRFQDAKFVLESTGIWEFIYEGIEKRGFEAVLAHPLKVRAIAEARVKTDKVDAETLAQLLRADLIPRSWVPSRDMHDLRQLVRQRAYLVRQASRFKNRIHAEILRRGVRRPENLKTPFAQRSIRWMRSLDIPTVTSCLNCLESVQAQVQEINAQLLVEFERRPDAQLISTVPGIGFYGALLILAEVDDVRRFHHPEKLCAYAGLVPTVSQSASCARYGSISKDGSAYLRWILTESVHVHTRYEPGSQLSRFHARIAKRRGRRVATVATARKLLRIIYWMLIRHEPFHSHGFNPVKRVHC

SEQ ID NO: 433052 - protein, 483 aa, unidentified
MKPKRVEKNKKASCRPTAGNWHDMNRKQRREVTRKIQSEDLSLEVVHPDAAGIDIGNESHYVAVPSTRDSQPVRRFGCTTAELKAMADWLKQCRIQTIALQSTGVYWVSVYDILEESGFEVYLVNARETKNLPGRKSDVQESQWLMKLHTYGLLRNSFRPSQEIRTMRTYWRQRNDLVRAAGRHIQRMQKALTQMNIQLANVLSDVSGMTGQAIIKAVLAGERDPHQLAALRNWRVKASEEEIARSLEGNWQEDLLFVLQQEQEGYEFCLKQMADCDQRLEHNLQQQQDRSQGTSLPEEKRKERLRKKKKGNAPQFDLRTDLFRMTGTDLTQIDGIDVTSAMTILSEAGWDMSKWKTEHHFVSWLRLCPDNRISGDRIIGKGRLPTNNRVSNALRMAASTLRLSNTYLGAQFRRLRTKLGAPVAIKAMAAKLARLVYRMLRYGMQFIDRGAEFYDAQHRKLQINYLKRKAANLGFQIIEAPAA

SEQ ID NO: 433053 - protein, 356 aa, unidentified
MPILAETIDGVIGVDTHRDTLTAAVVSPVGGILTQTTTSTTTQGYQQLLDVALAEVPGRRLWAIEGVGSYGAGLGAFLHGHGERVVEAGHPKRPARRTGAKTDAIDAVRAAREALGHEHLALPRHRGDREALRVLLGCRRNAVTARVVATNQLKALIVGASDELRAELRGGSTAAQIARCARLRDRPARPLEHRTTVRVLRTTAQRIQHLQAEIDELTTQLTNLVDAIAPWLTDLPGIGPVTAAQVLVSWSYAGRLRSEAAFAALAGVSPIPASSGQVTRHRLNRSGDRQLNRALHTIVLARLRDDPKTRAYVTRRVAEGKTPREIRRCLKRFVARQLFKLLERCDQPGIEILRTA

SEQ ID NO: 433054 - protein, 363 aa, unidentified
MKNSNRSLGSLGVRNSGHGFTIGIDLGDRRSHICILDRIGKVIREEDISTSPRSFEAYFQAIPQAVIALEVGMHSRWASRVIRECGHEVIVANPAKVKLIFSNDQKNDRVDSRSLARLARVDRRLLCPIQHRSENAQAALSVLRARDSLVRARTRIINCVRGLVKPTGVRLPASNAEGFCARVNDHIPATLRPAVALLLEQIQALSDTIAVYDQYVEHLVATGFPQARLLQQIAGVGALTALAFVLTLDDPSRFSRSRQVGCYLGLRPRQDQSGERDPQLGISKGGDEFLRRLLVNAAHYILGHFGPDCDLRRWGLKIAERGGRKAKKRAVAAVARKLSVLLHHLWITGEVYEPFYKSRAKAA

SEQ ID NO: 433055 - protein, 414 aa, unidentified
MRNLFVGIDVSMKDFKVQFMDHLGETITKRQRFSNDNPGMESLVQLILEICQANDIGCVMVGLEATSVYSWHLQMGLTSDTRLTPYNCQVYSFNPKVVANFKKAYPDLPKNDWTDAWVIADRLRFGRLPENSQVDFRYLPLQRLTRFRYHLMQTISREKNYFLTNLFLKFNTLQQNEVFSNLFGATSEAILTEFLSPEEIAARPLEDLIDFLMEKGNKHFSDPKATAEALKKAARNAHRLRGDLLEPVNLILATSLETIRCLEKQVKTIDKAIARELANFKHTLDSVPGLGPVMCAGLIAEIGNIHRFNNDSALAKFAGLTWRSHQSGEFEADETPLTRTGNAYLRYYFVQAANLVRQHEPEYLDFYARKYRESKTHHHRRALVLTARKLVRMVDALLRSNQLYMPQGQRRDSN

SEQ ID NO: 433056 - protein, 354 aa, unidentified
MSSSIRPKKGIVIMKKNSFFIGLDIAKADFAASIYKTPGQPIVTKEAIPNDPKGFEMLLLWLKEHHIDKTNSRICMEATGVYSQAIAYYLLFAGFPVSVEPPLKVKRAFDPVGHKTDPVDSKQIAEYAYRFQDELTSWQPKDEILEKIRQLLSVREQFTKQKVALKNAIHAYSKQRVQVTLIKKAHQETLAQIEKQIARIDQELTKLIKGDPEILQKANHLKSIPGYGMLLAAHLLVITENFTKIQKSKRLAAFIGIVPYQNKSGTSVFKRAKIRHFGPGPSRKLLRLAAQSVATHDVTFRRYYLRKLAQGKAKALVLNNIANKLLKVACAMVRNNTRYIKEHRSIHPMYLKSA

SEQ ID NO: 433057 - protein, 337 aa, unidentified
MKVTLIGIDLAKSIFQVCGVNQAGKRVFNRQVGRIRLMQLLLQYPDATIAMEACSGSNYWGRELQKRGFKVMLIPPQHVKPFVKGNKNDRNDAFAITEAARRPDLKCVEPRTLAQTDMIQVHRLLERMIRQRTALINQLRGFLSEYGVVVNRGREKLSTVMPELLEEADNGLSPASRRLFQAIYAQWQQMDKAIEQVEQALEAHAKADEPAQRLMQMRGVGVKIATAMIAQVGNGHGYQSGRHCSANLGLIPRERSSGGIQKLGGITKRGNGYLRRLLIQGAWSVVRYAERNDDRLSRWARQLLERRGKHKAVVAVANKMARIMWSMLYHQTEFRAN

SEQ ID NO: 433058 - protein, 337 aa, unidentified
MEYFGIDVHSKYSEICGLSGEGKVTVRRRIPTTETALRRFFGPRERSQVTLESGPVTPWVYRLLCELGHDVTVVNPRRVRLIAESTLKTDGIDAEVLARLSRLDLGFLRPVYQRTPEAQELRTRLRVRTSLVKSRTSLINTVRGTLRAQGYRVPSCAAKSFVVRFASMGLKTTLSEAIDPLVTTIGELTDRINGLEKALVAESRSNELLVRLQTVPGVGPLVSLAYMGWVDSPDRFKRSRDVGACLGLRPSLRSSGGHEIRGRITREGDSEMRRLLVQAAHAALNCRKDSSLKRWGEGLVERLGKGKAVVALARKIAVLLHRLWVTGESFRAFPQAA

SEQ ID NO: 433059 - protein, 344 aa, unidentified
MDHFAGLDVSVKETSVCIVDDTGRIVREVKVASEPEALLAVLKNPAYHFKRIGLEAGPLSQWLFSALAEAELPVVCVETRHMQAVLKAQINKTDRNDARGIAQMMRVGLYRPVHVKTLRSQKLRMLLTHRKLLQSKAIAIDNDLRGTLRNFGLKVGMVGTVKFEARIKELVENLPDLAVLVEPLLVVRRVLREQFVILHRRLLAIVRDDEVCRRLMTTPGVGPVVALTYRATVDVPARFRKSKAVGAVFGLTCSKYQSGEIDRSGRISRCGDEMMRVMLYEAAQSMLYSKKWSWLKAWAMQIARRRGMKKAIVALARRLAVIMHRIWVDGTEFRWTREQAAAAA

SEQ ID NO: 433060 - protein, 399 aa, unidentified
MLAVGIDISKSKSVAAILNQDGSMHTSPFEFHHTQPELDAFIKYILNSNQSATILMENTGHYHYPVLKAFREAGLPVCMVNAYQIKKFGDMDLRKAKTDKKDAVRIARYALEKSYSLVPYTSMEQKYEDLRFLARQYNQRMLTLKTNKVFLLNLLDETMPGITNILPLTTRTPETSLSVLFINRFKSYDRIKKMGKNRFLDAFEKIARKSRNRQTKTYGLAIYETALYNITTRGENEYTLGAQDQCLELVCESQKAADSIILKMQTLAETLPEYAVLRSMAGVGDRLGPLILAEIGDIRRFHSGKALNAYAGNDAPPYQSGTFESHNRHISKRGNAALRKYCFEVMQALKLTQPQDDPVYLFLLKKEQEGKPYNVAKMAGVNKFLRIYYARAMETLKQQ

SEQ ID NO: 433061 - protein, 346 aa, unidentified
MLYAGLDLSRKRLDFHLLDGEGKTVELGAAPPDADGLRGLSQRLERHREPIRAAIESMNGARFVHDRLELAGWQVEIADAQKVKGLAPLACKTDRIDAWVLAELSRRDLVPAIWLPDPLVRAERERARWRLHLVRHRSSLKQRVHAVLLTHGTPCPVSDLFGVRGRQLLARLGLPEPWQGTIEASLRLIDELDREIGECERELRRLGADHRYVPLLLTVPGISWVLAYTIAAELGDITRFASPRKLAGYSGLCPRVYQSGERDLRGSLAKQGPRYLRWALVEAATHACSHPAYRDRYQQTKARIGKQRGAKVAQVDLARRLSEAIWHMLSRNEPFAPAGATDPLAA

SEQ ID NO: 433062 - protein, 344 aa, unidentified
MGEVNTIGMDIAKSVFQVHGVDAAGSITIRKRIGRAKVLEYFGELPPCLVGIEACPSAHHWGRELQSLGHTVRLIPPSYVKAYLKRSKNDANDAAAICEAVARPSMRFVPIKTTEQQSALMLHRTRQLLVRQRTMLSNALRGHLAELGIVSAKGRNGTAELLEIIADGADSRVSPAVRGILEVLARQYGVIGTEIASIDKSIMALHRTCEASRRLAEIPGIGPVGATALVAEIGDWNAFSSGRSLAAWIGLVPKQNSTGGKDRLGSITKQGNRYLRWLLVVGAMAVIRYARKHGTQRRPWLARLMERRPTKVAAVALANKIARMAWAIMVGGEKYREPQLPLAA

SEQ ID NO: 433063 - protein, 340 aa, unidentified
MNATTYGLDVAKRVFQMYWVDVETGEIVNRRFGRDELMRFLVRRPAGRVAMEACGSGHWWARKIKALGHEVVLLHAKFIRPFVQTNKTDAADAHAIWTAVQQPGMRTVAAKTEDQQAMLSLHRMRALLVKFRTMEVNQLRGLLYEFGATFRAGRAAGLAEIRARMAELEDALPGTMMCCLQDQLRRIDGLQRDIDQLEKRIGVWQKQDMACRAIAEVPGIGRLTATALVATMGDVKTFKSGREFAAFLGLVPRQSGTGGKVRLGAMSKRGDPYLRTLLIHGARSVLYHTKAPTTWQKEIQARRPANVAAVALASKIARTAWAVLARGQEYQRNHVSVKPT

SEQ ID NO: 433064 - protein, 456 aa, unidentified
MPGRKQTRGRPSGRLSTINPDAAGLDVGSTFHVVAVPGDRDERPVRTFRTFSGDLHRLADWLKETGVKTVAMESTGVYWVPVFEILEARGFEVLLVNARDVKHVPGRKTDVNDAQWLQQLHQHGLLRGSFRPRDGVVRLRAYLRHRERMVDYAASHIQHMQKALMQMNVQLHHVVSDITGATGMRIVRAIVSGTHAPDELAEFRDVRCAASEDTIREALTGNYRPEHVFALRQALELYDFHQAKIAECDTEIEAVLRTLNEARATPEEPLPSARHGKARNEPAFDARPALYTLLGADLTQIHGFGPYTVLRLVAECGDDMRKWPTAKHFTSWLSLAPGNKISGGRLLSSKTRRSSNRATALLRIAAVNIGKTQTALGAFYRRLAARTGKAKAVTATARKLAILFYKALRFGMSYVDPGASYYEERYRQRVIHNLHRRARHLGFTLVADPAVSEGVS

SEQ ID NO: 433065 - protein, 486 aa, unidentified
MSVLRIRYVGLDVHKRVVEVCIVDRAGKVVLRERFALDRRTLELFATKILRPSDHVALEATTNCWAVAEVLRAHVARVVVSNPMATKAIAQAKVKTDKVDAHVLAQLLRCDFLPEVWQPDEATRRLRELTGRRSALVGQRTALRNRIHSVLAMRLIVTPVRLFNGEGIEWLRGVAVDEQARLLIDSDLRLLEFLQTQLDALEAELARRGYASDAVRLLMTLPSVDVATAEAMLAAWGDVHRFPDGDHAASYLGLVPSTKQSANQCYHGPITKRGNSQARWMLIEAAQHLDKHPGPLGHFFRRLLRKKNRNVAVVAAARKLAVIGWQMLVRNEPYRYALPRTTETKLSRLRIKATGQRRVGGTAKGTKCTAKLPGGSRTIKPLSEVYRIEGLPAPLPLSPGERRTVQQAGCAELVATLAAAQVVPRSPAARQTAAHQPATAGKRRGACPTSAARANQASETKHGAVQPNGGSTGSSSLIRSNGHGRN

SEQ ID NO: 433066 - protein, 412 aa, unidentified
MQVVYARCAGLDVHKKAVSACVSVCEAEGAKRQQTRVFGTFTRDLLVLADWLKEHGVTQVAMEATGVYWRPVWAVLEGQFELMLVNPQHIKAVPGRKTDTKDCEWIADLLQHGLLKGSFVPPTPIQDLRDLTRYRAELRQSQNRVANRIQKLLEQANLKLSSVASNTLGVSGRLILEAIIEGQENAPQLAQMARGRLKSKIPQLEQALAGRVRDHHRFLLAEYLDEWEALGERIRRMEAEIDKRIRPFESAVTLWQTIPGVDRVTACNLVAEIGVDMNQFPTPQQLASWAALCPGNHESAGKRKSGQTRDGNRWLRRSLCQAAWAVTRKKNCYLSAQFKRLAARRGVKRAVMAVAHTMLIIGYHMLKTGQGYYELGGNYLEQINKVQLQRYFVKRLQRLGLKVTVEPATAAA

SEQ ID NO: 433067 - protein, 404 aa, unidentified
MLYLAIDQHRDQLTINLRNEKGDVIQKEQISTKHDDINDFFDGLARQAGRHRGYMAIVEVCGFNHWLLEKLKEYKCNEIVVIQPNGYSNKKTDKRDANALGELLWNNRKRLQNGKRPNGIRRIIPANQEDADARQLSNFRQFLIMQRTRLINKIKGILNKHNMLQDAPTKLSFTNKFRKWLETVTLPCIDRMEVDAHLELWKTYDKQIITIETEIAQRTENNKEVTKIAAIPGISAMGAITLLSRIGDIKRFKNPDSLANYFGLTPGCHNTGGKQRIGGITKAGSPVARQVLNFAVNHVIRKDPEMKAWHKKIKARRGAKIARVAVMRKLATIIWHMLRWDKPYQFRYEAVKPQKNMKGKSSSKKGFSRHNNKNHFSGSNATRNLKKEKTPLKNKGKTPVKTKA

SEQ ID NO: 433068 - protein, 342 aa, unidentified
MQVTTIGLDLAKNVFQVHGITEDEDVAFNRPLRRAQLLPFFSKIEPCLIGMEACSSAHHWARELTKFGHDVRLIPPMYVKPYVKRGKSDAIDAEAICEAVTRPTMRFVAIKTVEQQSLLSVHRARSLLVRQRTQLINGLRGMVAEFGVFIPKGLARIIDFAENTLAGEVLDLPDIANEVIHNLCEHLMALHTRVRWYEDRLKQVAKEDARVRLLRTIPGVGAVTASAIIASIGDGHQFRNGREFAAWLGLTPANKSSGGKEKLGRITKMGDQYLRSLLVVGMTSLVRQTKSHPERASKWLTSLLERKPARVATVAMANKTARIVWAVLTRNQPYTPHTPHTT

SEQ ID NO: 433069 - protein, 324 aa, unidentified
MEAEAVYVGIDVSKARLDVAVWPGAERFSVGNDPRGIAELVEKVAARTPQAVVLEATGGLEAMAASELHAAELTVAVVNPRQVREFARSLGRMGKTDRLDALVLAQFAQSAHSNERLPKLRLPDAAEAELKALVTRRRQLVAMLTAESNRRERAPKVIRKSIVASIRALKRSIAEIEQQVREVMSDSPVQQAKAVLLAAVPGVGPQLTATLLAELPELGSLGRRKIASLVGVAPHPHESGKFYGRRRCWGGRATVRTTLYMAALSGVRFNPALRSHYRALLERGKARKLALVACMRKLLLILNAILRDSASWNPHHQLDFQHSR

SEQ ID NO: 433070 - protein, 351 aa, unidentified
MKTEPTAQPKLYIGIDIHKRSWKVHCATDLFMGKSFSMPPEPQILYDYVQKNFVDHEVSTAYEAGCCGFSAHRSFMHFGWLSVVANPADIHRSGKEKYSKTDRIDAQLIARELKDGRLNAVTVPDVEREELRSLFRRRNDLVKDIRRNKSRIKMQLLYFGITIPEVFNTDKWSHRFRNWVDAVTFAHPTAKSALEGRMRTFRFLDREKREVSNELRAYCRKHYKNDYDLLRSVPGIGGVVACGILSELGNLRRFTTIKHLAGYLGLAPGIYQSGDNSRDTGVIKRANKIMRSYFVEASWQAIRADPIMQAYYRKHLPKNSKTIIIKIARKLASRTLAVIKTGIPYQPGVLQ

SEQ ID NO: 433071 - protein, 386 aa, unidentified
MFYVGVDIAKNTHYACVMNDKQGILTAPFPFANNEAGFEKFLNSFKKLHKDDIIVGLESTSVYGENLMSFLTGLDYRIALINPIETASMRRGKIRNTKTDKIDSKLICKYLSKEEYRLLHPKELQLLQLRGLCRFRQTLKKSNARLKTQLVSYLDVSFPEYSTVFKSGIHGKGSYAVLLEFQSASEIAKANITKLTNLLRDASRGHFNREKADRLKLLAKHSVASNSNMSFQIRQTIMQIQLIESQLIDVERHICIVFDGFDSIIRTIPGIGSLNGAMIISEIGDVSRFSNPNQLIAFAGLDPITNQSGNFKAKTTRMSKRGSSVLRYALVNAAWNVSLNNDTFKNYYDEKLAQKHRHYAALGHVAGKLTRVIFKMLKDNVPFDLP

SEQ ID NO: 433072 - protein, 347 aa, unidentified
MTLVGCDLHSRDQQVAVLDTATGEVQERRLVHEGDTIEQFYTSLTGPVTVGIESTGYALWFHALLQRLGHEVVVGDAAQIRAMVVRKTKTDRRDATHLLDLLKHGRFPTIWLPDPAVRDQRALVTHRMRLVRMRTMVKNGMHAIALNHRLALGPSLFTRSGVSQLQALSLPPHTSRRRCESLKLLSWLNTHIKGLDDQIEEAAHAHPDARRLMTHPGVGPLSALTTVLVLGPVTRFPTSKHVVSYVGLAPAIESSAGKHRLGRITKQGNALLRYLLGQAGQAAIKRDADLKRLYYAVLHRRGRARAKVAVARKLLVRLYVMLRDQVDYRTFLERGPAVRRNEMPATA

SEQ ID NO: 433073 - protein, 321 aa, unidentified
MSKEQKYAGVDISKDYLDIAVAESTDKWRFGNNQTGIKKAIKEFRKKSPVMVVFESTGGLEIDLWLALNEAGIDAAPINPRQIRNFAQALNQQAKTDTIDAQIIAQFGQVIKPKPQVVPDTQGLKELVARRNQIVEMISAENCRIKAARQNAIKTDIRANIDWLEKRRDEISKEILQAIEDDPELKDKAKLLQSTPGVGPIMTSTLLTELPELGTLNRREVAALVGVAPFNHESGHWKGKSFIWGGRGSIRRVLYMAAVAATRCNPVIRVFYQRLIKAGKAAKVAIVACMRKLLIILNSMVKHQTHWQHFTPLFDTNSHWV

SEQ ID NO: 433074 - protein, 348 aa, unidentified
MVILGIDAHKRSHTVVAVDELGRKLGERCVTAISSDHLALLEWAEHFGSTRLWAVEDCRHLSRRLERDLLGAGESVVRVPPKLMAHSRDSARTFGKSDPIDALAVARAALREPHLPTAHLDGPDREIRLLLAHREALVAERTRVVNRLRWHLHEIDPSWEPPARGLRHVKHLDAVNRRLDAVPGLVARLSRELVARCRDITARVNDLEAEIQLLLAPLSPALLGVQGCGALSAAKIIGETAGVQRFHSKDAFAKHNGTAPLPVWSANCVRHRLSRMGNRQINAALHRIALTQARHNPQAREYLARRRAAGSSTKEAMRCLKRRLSDVVYRALVADHDSQESAPLSLVA

SEQ ID NO: 433075 - protein, 317 aa, unidentified
MNNINNQNEINVGVDTGKTQLDIYIRPLGIYFVVSNDESGIKEAITTIKKHKVTRVVIEATGRLEQPFIMACAKANIPFVIANPVNIKRFAGAINQKAKTDKLDAQLIAHYAEVIKPKLSQLKPEQIRLMSDLLSRRRQLMGMQTMEKNRLQIMPKEITSSINPILTALKNQLEKIDNKLHKLIESCDEYKIKNDIIQSVPGVGKVVAFNLISEMPELGYINNKEASSLVGVAPFNRESGSYKGKRMIRGGRAQVRTAMYMAMMSAIQCNPTFKAYYQRLVAAGKPKKVAIIACIRKLVITLNSMVRDGVYWDPKMN

SEQ ID NO: 433076 - protein, 316 aa, unidentified
MNTQEVYVGIDVSGRRLDVHTWPRGEAWSVDYDEAGLSALTARLQALSVAVVVLEATGKVQAVAVATLAAAGLPVAVVNPRQVRDFARATGRLAKTDRLDAEVIARFAEAVKPPVAEVPDADSQRLSELLARRRQLVEMLTAEQNRLRSTQDPALCKGVQAHIRWLKEALSKLEKELSATIRQSPLWRAKDELLRSVPGIGPVVSCMLIAELPELGRLGRRELAALVGVAPINWDSGARRGERHIRGGRAPVRRALYMAALVGMRKNDVVRAHYQHLRAAGKPPKVALVACMRKLLLILNAMVRTGQPWQPKAIHT

SEQ ID NO: 433077 - protein, 312 aa, unidentified
MTEHCYCGIDVAKDRLDVQVLPHRQRFSMDNNATGWDELVERLHALPIAAVGIEPSGGYERGIIRALLAAGLSVRRINPSKLRQFARARGILAKNDRLDAQLIAEYVSIIPTRAVQRAATAERLAEVVTMRRQLCDEHVTIENQAAHVEDAILRRLNKRRLARLKADIHLLDKRMAEIVAADAILAQRYELLTSMRGVGPTLAFTLIALLPELGQMSRKQIAALVGVAPYDFDSGKLKGHRCIYGGRMPVRNILYMAALSAARYNPALKVFHNRLAAANKKPKVIIVAVMRKMITTLNAMIRDKAAWQPRAA

SEQ ID NO: 433078 - protein, 376 aa, unidentified
MKKIRFVGLDVHAETITVAVAEPNGEVRSLGTIPNREESVRKLVKKLGPPHQLRACYEAGPTGYVLYWLLTSLGVQCDVVAPTLVPVKAGDRVKTDRRDGLKLARSHRSGDLTAIWVPDEAHEALRDLVRAREAAKQDQLRARHRLSKFLLRHGKRFPGAGKAWTLKYMAWIGQIRFTQPAQEYAMLDYLHEVEHMNGRVLRLEQPIEEAVKLAPVWMQEVVQALQALRGVAKISAATLVSELGEISRFDNPRKLMAYSGAVPSEDSSGERVQRGAITKTGNAHLRRVVIEAAWSYRLGPGIGPALRQRQKGVSEEVREIAWKAQNRLHKKYQRLMAAGKDQRKIVTAVGRELLGFIWAIGRATETRCRQQSAMTA

SEQ ID NO: 433079 - protein, 312 aa, unidentified
MDAINVGIDVSKDRLDVAVRPSGESFAVDRTGAGIDELIERLRSLSIKLVAVEATGGFETVVAAGLAGASLPVVVVNPAQVRAFAQALGKRAKTDPIDAAVIAHFAEATKPQLRQLPDATTQLLADLVARRRQIVEMIAAESQRARHVTLPRLKKSIARLRKALEKELSELDDDISDHVRGSPAWAEKEDLLASVPGIGPMIARTLIAELPELGSLDRRQIAALAGLAPWTRQSGKWRGKSFIGGGRSSVRRVLFMGAMVAARHNPTLKLFRDKLVAAGKNKLLAIVAVARKLLTILNAILRDKTPWQPKTA

SEQ ID NO: 433080 - protein, 321 aa, unidentified
MTYVGIDVSKTTFVVAYSSDKASKTKTFRNTVKGVHEFIQTISSAGHHCVLEATGNYSSLLVYLLSQAGITVSLENPLKIRNFARVMLSVTKTDETDALLIALYGEKMQPAPYRLRSDAILTLKQKRTVIRQLKKQLIATRNLKGSMEALPFFDPKCRKTIEKTIAFLEKQIKGLEEELSSLAQSEYKKQMDLLTSIKGIGITLAAALIMATGGFTYFDNAKQLTRYLGLSPTYQQSGTSVNVKGHINRNGDSSLRSQLYIAAMASLRCNTECKECFTRLRSNGKPGKVAVIAVANKLVRQAFAVVTQERTYGDGFKSAKP

SEQ ID NO: 433081 - protein, 402 aa, unidentified
MPMLSIGIDVSKGKSTVCGMKPGGEIVYTPFEVQHTREGMSELVSLLRSSGEEVRAVLESTGSYHCPVVAALLENGIFVSVVNSLRMKRFCSQSIRKVKTDRIDAMQIALYGLAYWQELQPTRLPEDTYRELQLLARQYYQMTSLLIKAKVDFNAICDQVLPGMQELMSDHAGRHKLSDFVLRYCHTTHILEMGETRFRKDYCKWAEKKGYRNCERMAALIFATAQNGIPVLPNAPSTQIVITEAIRVLHTVEASRDAILTQMQALAKTLPEYSLVREMPCIGDTLAPRLIAEIGDVRRFHSKRALIAYAGIDAPPYQSGKFCANNRHISKRGNRYLRKTGYEVMQSYVMHKPANDPIFTFIEKKRGEGKSGKLAMVAGLNKFLRVYYGKVTELYRSLPAIE

SEQ ID NO: 433082 - protein, 432 aa, unidentified
MSQYFNVPVIGIDVSADFSIVAVLTPHGDLYRKPFRINHDADGFNYLFEQIKKVEEEFAMKIALFMEATGIYHLTLFYFLKDNKVNCFVINPLITNCNKNKSIRKVKNDKTDAISIANIGKYEDVKASNYLDINVYLLRNLCREYYDLVDDRANIKKKLASDLRVAFPGYQAVFSNITGNTSLVILKSYSTPEAIVDAPKEELIELISKSSRKGLLWAKKVYNKLIAASENALKIGIASFTFSSKIQRYSNLLDTYTTEIDSLLCQIKEVLNSEAVSEAFKNSVSLLSTLPGVGFISAITIACEIGDITRFKKPKQLTAFFGVDPSVSQSGKFNSNQNKMSKRGTRFGRRALYAVALSSVRKKRNGEPNNSVLLEYYQVNLGGKKKKVGLVAIMHKLLKYIFAILKNGHPYEVRNPKLHAKMYLENHYRLVA

SEQ ID NO: 433083 - protein, 343 aa, unidentified
MGEVSTIGLDIAKSVFQVHGADGTGAVVMRKRVSRSKVLEFFAGLSPCLVGIEACPSAHYWSRELQALGHTVKLMPPSYVKAYLKRSKNDANDAAAICEAVTRPSMRFVPIKTQEQQTGLMLHRTRQLLVRQRTMLSNAIRAHMAELGIISAKGRNGTAELLQIVGDVADDRIPPVARFCLDLLARQYLTLNAEVSSIDKRIHAWHRACEESRRLEEIPGIGPIVATALVAEIGDWGAFRSGRNLAAWIGLVPKQHSTGGKERLGSITKQGNRYLRWLLVTGAMAVIRYARAHGTKRPWLTRIMDRRPAKVAAVALANKIARMAWAIMVRAERYKEPKLLLAA

SEQ ID NO: 433084 - protein, 375 aa, unidentified
MHKDSVYLCILSSTGEIYEKKFGVLTTELIEMRDLMLSHHVLEVGMESTSVYWIPIWRVLEPHFKLKLINPYFIKQLPGHKSDVKDAQWIAECMLKELVNGSFVPPERIQQLRQYDRRIYDLDDEIIRKLAKLDAAVQRCNIRLSNYVSNTDSVSYKAVIDKICEGVTDPNVLVEEIHGRIINHHGKKTIIASLTGSITECDIDIMRQLKAEIDLAEQHKQQCMDKMLAICENEYSTQLHNLQTIPGVKMRAATSLIAEIGTDMSHFETANHLASWSGLKPRNDQSNKTIKSRRITYGNRYLRRTIIQCSWGASRTKNCFFSRFSYHQTQVRKKNRMKVQVAIARKMLICAWNILKDGVSYKDFNNIIEASVING

SEQ ID NO: 433085 - protein, 370 aa, unidentified
MTQSRTLYVGMDVHQASIAVAYVANEHHAEVVSLGNIGTRQCDIDPLLRRLPSKSPHLVFVYEAGPCGYWLSRSLTHKGHVCWVVAPSLIPQKPGDRVTTNRRDAIKLARLMRSGDLTPVDVPTVEDEAMRDLCRAREDAIHDLKAAKFRLKAFLLRHDIREVSRATWGPAHLRWLSEVVCPTAAQHIVFQEYVRAVTEQTERLQRLEQALQAHVKTWRLQPVVEALQGLRGVQFTVAVTLVAELGDLTRVDNPRQLMSDLGLIPSEYASGDRRRQGGITKAGNTHARRALIEGAWAYRYPAKVSRHLQLRLETRPKPIQDLSWKAHVRLCTRDRKRSARGTHAHPVVVAIARELIAFMGAIAQAVPVTA

SEQ ID NO: 433086 - protein, 317 aa, unidentified
MNFVGIDVAKDSMEVMVHESSKRWNFMNDESGLHKLIAKMKRLSPCLIVLEATGGYENMVATGLQCKGFSVAVINPRQIRDFARSIGTLAKTDILDAMVIAHFAAKIQPPPRILPTEEAKRLGAILMRRRQVVTLLTAEKNRLLQANPAVRERVKNHVTWLKQELSDISKELKQMVQDDPEWKEKDKIIQSVPGVGPILSVTLLADFPELGTLNRKQIAALGGVAPFNRDSGKMRGKRTIWGGRGVVRTATYMAAFAAIRCNPLLTSFFNRLVAAGKPRKVALVACMRKLLCILNAMLKNRTRWTCYSPQLVGLCYC

SEQ ID NO: 433087 - protein, 342 aa, unidentified
MDDMMIGVDLAKNVFQLHGTLRTGEVQFRKKLTRQQFAIFMAQQAPCLVIFEACGGAHYWSREMESLGHKVKLIAPQYVRPFVKRQKNDAADAEAIVIAARQAEMRFVEPKTIDQQSHAAVFRGRERLVHQRTADVNALRALLHEHGHVFPVGMRYLDRMTVLVDDKAADLPALVREECQDMLAQIAEKTARITERTAKLKALASQSDTARRLQTMPGVGPMTAVAVEAFGPDMAQFKTGRDFAAWLGLVPRQHSSGGKERLGRMTKAGQADIRRLLIMGAMSRLGWLGRPKIAQGSWLSRMLARKPTMLVAIALANKMARQIWAMLRKNEDYKDPALAVTA

SEQ ID NO: 433088 - protein, 321 aa, unidentified
MTNFNTKYQSVCGIDIAKNVIQIYQVNQDGECKNFQVKRKEFLQLFENREPSLIGMEACGGSQYWARELQKLGHTVNLMAPSAVKPYVSGFKSDRKDAIGIFNAMLAGVRKVAVKTEAVTDLATLLGIRARRIRARTAKVNMVRGYLMEYGIVMARGLRQFKNSIADSLLQLERAQASNMVKEEFKFLVDEVDKETEAILRLDREINSLAKQCKNFDHFLTAPGVGLITAATMCVKLADPQVFKNGRQFAAYIGLVPQHYGSGGKNVNTTIPIKCNKELRGLLVQCAQSIRRTKNKSSWVTQIEDRKPNSVATIAVANRLA

SEQ ID NO: 433089 - protein, 430 aa, unidentified
MSYKIAGIDVHKKILAVVVSDVEVENEYKFERRMFGSSPDQLRSLAAWLLEQEVEEAVMESTAQYWKPIWEALERYWKPIRQKREGASRRSGTLHLAQAQSNRGRRGRKRDFPDAERLVKRLVAQELTLSFVPDAEQRLWRTVTRRKYQLTRDRVRLQNQVESLLEEAHIKLSSLVSDLLGASARRMLKALAEGETNPAALAALADQKLRATPEQLCDALGACTDLKPVYRRLLKMALEQLQFLEQQIGQLDQELASLLHPHQDAVQRLAEVPGLGVDSAQQIIAEVGSTAATFPSEKQLSSWVGACPGDDESAGVNYSHRSPKGNRHMRRILNQSANAAVKAKGTIFEIVYRRTVARLGHQQTIGAIAHRQCRLIWLILHQGVRYEERGPAVTKQSKQRRTAKMIRQLRSLGYRIEPPNPQHPSPAQGQ

SEQ ID NO: 433090 - protein, 315 aa, unidentified
MKRESPSVGIDVSKATLDLCLYPSGKNWQVEHSPAGMSALAEELVALEPAVVVVEATGGLEVSLAVALGSVGLPVAVVNPRHVRDFARATGRLAKTDKLDAQVLAQFGAMVQPPVRPLPEAARRELRGLVTRRQQLLVMITAEKNRMRRTTPGIRHRIEVNVRWLQGQLKELDRDQEDFLRTSPLWQEEAKLLRSVPGIGPIVTATLIARLPELGSLNRKEVAALVGVAPFNRDSGTLRGKRTVWGGRGPLRTALYMATLVATRYNPVLRDFYHRLCAAGKPKKVALTACLRKLLVILNSMLKHRRSWNPAGQNS

SEQ ID NO: 433091 - protein, 347 aa, unidentified
MKYYTTTTEFNCGIDLHARQMYICIMNKEGKKLVHKNIKNNDFEFFLKLAAPYLHDLTVVCECCFNWYWLADACLDAGIEFVLAHALYLKHIHGGKNKNDRIDSEKLAHLLRTNLIPPSYVYPKERRPMRALLRQRMSYVWERSELLTHLSMNQTAEGLVPVAKGGHNRDVWEERILAQYTDPLLKLAVECDMELIRSYDRRIELLDQKLAAEARREHGRDFPLLMTVPGIGRVLALTLLFEIDTIQRFPTVKDFVSYCRLVKGSVASAGKVKGLCGGKMGNPYLRWAFGEAAVIAKRNHPLLTPYAEKLVSQHGKFKGNAILANKFGRAVYFMLQKGTAFDAELVV

SEQ ID NO: 433092 - protein, 365 aa, unidentified
MRKVSTAKQGRDCSEQKLTIGLDLGDHSSCYCVLDETGHILVEQKVSTRPKGLQAAFGAVPHCRIALETGVHSPWVSRLLSGLGHEVIVAHARNVRLIGESRRKDDRLDAQTLARLARIDPQLLCPVKHRSAKAQADLTVIRGRAGLVGARTALVNSARGLARSYGERLRGCNVRNMNPEKAEGLSPELQAALKPLLVALESLSEQIREYNERIEKLAQESYPQVALLKQVKGVGTLIALTFLLTLEDAHRFQKSRDVGCYLGLQPGRRNSGRSEPQMHISKEGDPYMRTLLVQGAQHMLGPFGVDCDLRRWGLKLAERGGKNGKKRAIIATARKLAVLLHRLWVSGEVYEPLYNSRRVAIPAAA

SEQ ID NO: 433093 - protein, 493 aa, unidentified
MGACELESGDVALAAIPIRKMTIGIAQTLLLIIDWRITMPKRTTGDRAELKPVNVGAAAIDIGSKMHMAAVNPASTDVPVRSFGTFTQDLHDLADWFKACGVTSVAMESTGVYWIPVYEILEQRGFEVILVNARYAKNVPGRKTDVSDAAWLRQLHSYGLLRGSFRPDAEIATLRAYLRQRERLVEYAAGHIQHMQKALMEMNLQLHHVVSDITGATGMRIIRAIVAGERNPEVLATYRDVRCHSSIETIRAALVGNDRHEHIFALTQSLELYDVYQAKMLDCDRKLEVLMAALNNKGAKPAGKLSKPRIKTKQVNTPTFDVRSALYGLLGVDLTEIHGLGPSLALKLVGECGTDLRAWPSAKHFTSWLCLAPGNKISGGKVLSSRTRRSSSRAAALLRLAATTVGRSDTALGAFYRRLSSRAGKSKAVTATARKIAVLFYNTLRHGMSYRDPGADYYEQQYRNRVLANLQRRAKSLGFVLQAVPGDADPAVS

SEQ ID NO: 433094 - protein, 315 aa, unidentified
MSDVPCFIGIDVAKAQLDIALRPSGERWAVPNDTSGVTMLVDQLQALYPTLIVLEATGGLERLVTSALATAGLPVVVVNPRQARDFARATGQLAKTDALDARALAHFADVIRPTPRPLPDAQTQELRGLLGRRQQLIVMRTAEQNRLAGTSGRLQTDIAAHITWLNAAIATLDDDLETILRASPLWRENDDLLQSAKGIGPVCARTLLLELPELGTLTRQQIAALVGVAPLNCDSGTLRGRRMIWGGRAHVRTVLYMGTLVATRFNPQIKVFYERLLAAGKVKKVALTACMHKLLTILNAMLKHRTPWQPQEVQS

SEQ ID NO: 433095 - protein, 409 aa, unidentified
MRVMNCRCAGVDVHQKSVTVCTLSGEAGGEPKIEKRVFLSTTSQLLEMSDWMKEQGVSQVAMESTGTYWKPVWAVLEGDFDLTLCNAAHIKQVPGRKTDQKDAEWIADLLRHGLLKKSFVPPQPQQDLRELTRYRAQITADRSAVSNRIRKLLEGANIKLGSVASDVTGVSGRRMLEAIIQGESDPYRLADLALGQLKEKREQLIEALSGRVREHHRRMLRLLLAEWNFLDALVREIERDIEEALRPFCEAVALVRTVPGFSAVSAASLVAELGDRMEQFASTGHAASWTGICPGNHESAGKHYSGRTRSGNVWLKRTLCQVAWAASHTRCTYFAAQFRRLAAKRGKKRAILAVAHSLLIAVYTMLKNHCAYQELGADYFDKLNAEGLKRYCLRKLEAMGNRVVLVPAA

SEQ ID NO: 433096 - protein, 340 aa, unidentified
MHATTYGLDVAKRVFQMYWVDGDTGEIVNRRFGRDDLIQYLSRRPPGRVALEACGSAHWWARKIKALGHEVVLLHAKFIRPFVQTNKTDAADARAIWTAVQQPGMRTVAAKTEEQQTMLSLHRIRSLLVKFRTMQVNQLRGLLYEFGASFRAGRVGGLAEVRARMVELEEALPGAMMCCLQDQLRRIDGLQTEIDQIEHRIAAWQKQDAACSAIAAVPGIGKLTATALVATMGDAATFKSGREFAAFLGLVPRQSGTGGKVRLGSISKRGDPYLRTLLIHGARSVLYHTKMPTAWASAIKERRPANVAAVAIASKMARTAWAILARGQAYQRDHISVRPA

SEQ ID NO: 433097 - protein, 344 aa, unidentified
MSQVTTIGLDIAKNVFHAHGADERGAMIFSRRLTRGKLLEFFAGQPACVVALEACGGAHHWARQLQTMGYDVRLIPPSYVKPFVKRNKNDAIDAEAIAEAAQRPGMRFVAVKSEEQQAAGLVFRTRDLAVRQRTQLINAIRGHLAEYGWVAPRGTAHMTMLAGLLEDEEMTSSLPAAARPMFKLMVDMLADLDKQVAVLDREIARRAKEDEAARRLMTIPGIGPIAATAIIALAPPVETFRKGRDFAAWLGLAPRQHSTGGKQRLGSISKMGERTIRRLLIIGGSSMVRQACRFGAPAGSWLERMLARKPRMLVSVALANKMARMVWALLTRKEDYRAPTAVAA

SEQ ID NO: 433098 - protein, 410 aa, unidentified
MHYKQNHIYVGLDLHKDTHTAVIIDCWNEKLQTIIIENKPSDFTKLLNKVKKVAGKLTPVFGLEDVHGYGRSLAVFLLEKEQIVKEVNSALSYSERMSYPTTKKSDDWDAQCIANVLVRMLEKLPDANPLDLYWTIRMLVNRRNAIVKSITTLTNQLHGQLCNNYPSYKKFFSDVNSKTALVFWENYPSPHHLKGVTDEDLAELLRKPSHNSCSTRKAKAILELVESDGDTLREYQESRDFIIQSIVRDIGFKSEEIKKVEAEMKKLLALLEFKLETIPGIDTVTATTLVAAIGDINRFRNADKLARFAGIAPVNFSSAGKGKDKQSKQGNRQLYATIYFLAVQQIQVSKGKKTPRNPSFLEYYNRKVSEGKTKVQALICVMRRLVNIIYGMMKNKTEYVMPNVELKEAV

SEQ ID NO: 433099 - protein, 339 aa, unidentified
MIAVGVDTHKERHCAAALDELGQVIGEFAFTATAAGYADLRRWAESHGNPDELVFGIEGAGSWGAGLCQHLQHAGHVVVEVERPRRAERRAGKSDHIDALAAAKQVLVGEKVSTPRRRGVLSAVRALLNARRSTIAERTRLLNQLQALNVTAPVALRERIGDGTGKQLERRLLSMRSRAGGDIEERAVFGVMRDLAARSRALAADAKRYEHGLAELVRSLDDTLLDEPGIGPISAAKLLACDPTRFKHEAAFARCNGTAPLPASSGKTVRHRLNRGGDRQVNNAIHTIAVIRSKHHPETRAYLDRRISEGKTKREALRALKRHISRELFKRLATVPLTS

SEQ ID NO: 433100 - protein, 427 aa, unidentified
MPYRIAGIDVHKKTLAVVVSDVEIDNEYQFERRQFGSTAAALRQLADWLLEQQAEEVVMESTAQYWKPVWGALERLWKPVCAKREGARPTSGTLHLAQALSNRARKGRKRDFADAERLVKRLVAQELVLSFVPEPEQRLWRRVTRSKHQLTRNRVRLHNQLESLLEEAHLKLSSFVSDLLGVSGRRMLQALAEGESDPAALAALADCRLRATPEQLRDALGACQELNPLYRRLLKLALEDLQLLEKQMGQLEQEIADLLRPYQDQVGRLAEVPGLGVDSAQQIIAEVGATAATFPSEAHLASWVGACPGDEESAGVNYSHRRPSGNRTMRRILHEAANAAVRYKGSLFQILYRRYVPRLGHNQTIGVIAHRLCRLIWKILHEGVRYKELGPAVSQSSKRIRAKRMIRELRKLGYQVALPTTESTVSA

SEQ ID NO: 433101 - protein, 445 aa, unidentified
MAMRKRDDDEVFPNAAGIDVGGSSHWVAVPRHLAAQAGCEPVREFSAMTDDLHALADWLLACGVDTVALESTGVYWIPVYEVLEQRGLTVWLVDARQLKYVPGRKSDVLDCQWLQKLMSLGLLRAAWRPGDEVCVVRAVVRQREVLLTEQADWVRRMQKALVQMNLQLTEVLTDVMGMTGQAIVRAIVAGERDPKVLARHRHSRVKASERDIERALTGNWREEHLFVLGQALAMFDSLAQRILECDAKLEALLAPLGCHEVELGGPGKRRGKNTPEFDARTALARWAGVDLTRINGLAVTSVMTILSEIGPDLSRFANVKHFCSWLGLCPGTKVSGGKVLSARTRRSTNRVRQALKLAAMSLSRNGSALGAFYRRLCARMDKPRANTAVAHKLARMVYFMLTRGEAFVDQGQQHYEEQQRQRSIAALKRRATALGFQLNPVPVAA

SEQ ID NO: 433102 - protein, 332 aa, unidentified
MDNFYFIGVDVSKKKLDICVLFEGKVLREEQVSNHQQAVARLIGELKNDLEMDNEQFLICAEHTGQYTFPLVCACKSVECKLWLENPSQIKYSSGMQRGKNDKVDAKRIAIYASRFGDKVKYYDRPTEEIERLKQLERERALYVTDLAKYKGQMYDQKDFMPAALYRKKTKRMKGLIQELQAAIDAITAEMEKIIGSTEVLARQMELLMSIDGVGKVVALNVIIETEAFTRFDDPRKFCCHAGVAPFSYTSGSSQHSKNKVSHRANKNIKKLLHMAAVSVTHRKEGELKAYYMRKVEEGKNKMSVINALRAKIVARMFAVIKRNEVYTPIYS

SEQ ID NO: 433103 - protein, 422 aa, unidentified
MVLEGVPMALKIVYQICCGIDVHKTFVVACIASTNKQGVTTYKRHRFSTFTQGLKELLQWLLDNHYKDVCMESTGKYWIPIYNVLEKDCNIVLAHPKYVKAIRGKKTDKKDAKWIADLFKHDLVAGSFMPPADIRQLRDLMRYRFKLTCFKSSEKNRLQNCLTVSNIQLGNVVSDTFGKSAQAILDKILENPEDTSFDLEPLVFKSLKKKLPELRDAIDGYITPEQAGKLKIIKAHYESLESRKAELEELILALAAPYQQELTILQTAPGISSEFTAIGIISEIGTNMEAFPSAKHLCSWAGLTPTNNESAGKKKSVRVSKAGCYIKPLLVQCANAVVKSSKHPEMRNRYLRLKKRRGHKKAIIAIARMLLTALYHMLKNGENYNAELYRKSDLPPVDREITVEQAILIARNQGYKIKSATA

SEQ ID NO: 433104 - protein, 339 aa, unidentified
MKYTPVGVDIAKHLIQVHFIDENTGELVDKQLRGRDFLTFFSNRESCLIGMEACGGSQHWARELTKLGHKVRLLQARFVKAFVMGNKNDVMDARAIWMAVQQPGKEIAVKTEEQQSVLVLHRTRRQLVKFRTMQINSLHGTLLEFGESIHKGRAAMEREFPEALERMKERLPPYLITVLEDQYNRLSELDSLIDDIEKQLTSVARQNETCKRLLDIPGVGPLIATAAVATMGEASTFKSGREFAAYVGLVPKQTGSGGKIRLLGISKRGDTYLRTLFIHGARAAALLTREPGPWITELKKRRPASVAIVAMANKLARTVWAIAAHGRKYDKNHVSIRPY

SEQ ID NO: 433105 - protein, 338 aa, unidentified
MKLYGGIDLHSNNNYLGIMDKKEKKVYKKKLPNDLSEVLKALNPYRKDLEGLVVESTFNWYWLVDGLMENGYRVHLANPSAIKQYEGLKHSDDAWDAFHLAQLLKLGILPEGYIYPKEERPVRDLLRKRLQLVQHKTAHILSFKNLISRNLGLQIPSNDIKKLSEEDVDSMFKEEHLVMAGQANIATMHFLKERITAIEKMVLKRAKLKGEYHNLLTVPGIGKILALTIMLETGEITRFPEVGNYVSYCRCVGSTRISNGKSKGEGNRKNGNKYLSWAYVEAANYAIRLYPYVRRYYQKKAAKTNNIVAIKAISHKLARASYYVVKDQEVFNPKKAFG

SEQ ID NO: 433106 - protein, 425 aa, unidentified
MNYKQNEKINQVKESTLVVGIDIGSTTQYARAFDWRGIELGKVFTFSNSREGFESFKAWMQRLQDKYKKSDVIVGIEPTGHYWFDLGSYLEDEGILMVMVNPYAVKQTKELDDNNQSKNDRKDPKVIAKLVTEGRYSVPYTPDGVYADLRVMVTNRKRLIREITQIKNRFARWFAIYFPEYKDVFGDYEAQSSMLLLKVACTPKAIVELGAEKINQIWRDAKLRAVGMKRAKTLCETAKRSIGLKKGSSAAEYEMKLLLADYEYKMAQLDSVMEEIESLCKKIPESEQMLAIKGIGVITVAGFLAEVGDVRRFESPRQIQKLAGLSLRENSSGKHKGQTTISKRGRSKLRAVLFNAAIPLIAKNPEFRSLHEYYTTRANNPLKKKQSVIAISCKLIRVFYAILVNGVTYDPEKMISDIHRPPQVA

SEQ ID NO: 433107 - protein, 356 aa, unidentified
MKIIGVDLHTRQQTIAMLDDQTGELVEKQLNHEGEGVRQFYSALPRPVLVGIEATGSMFWFLRLLEELAIDFRVGHPAKIRAAEPRKQKNDRRDARLLLRLLVENRFPAIWMPSPRLRDLQVLLRHRHRLVRIRTRVQLGLQALALSHGLRRGSSLWTPGGQHQLRALPLARHAAAQRETLLTLYPQLQHSIDCLDRQIETQVNERPQARRLMTHPGVGPITALATEVFLGDPRRFANSKAVASYIGMIPQEKSSGGRQRFGKLSKQGNALLRFLWGQAAMQAVRRDPELLRFYRRKLVQKGLGKAIVAAARKLGIRLWIMLRDEIDYTEFCRRGNLLRQCGAAYAGMPEGDSGPR

SEQ ID NO: 433108 - protein, 358 aa, unidentified
MKQKRTELDFTDQVFYIGLDVHKNSWTVTIRNSNLKLKTFSMNPETEELIKYMKKNYPNGTYKSVYEAGFSGFSADRELRAGGIQNIVVNPAQVPSSHKEKVRKADTIDSGKLARELEKGSLEGIYIPSLEEEGFRALCRVRTQLIKDQTRIKNRIKSLLHYSGVVYPEQDEISHWSGNFISFVSGLTFSNTCMQATMKQLIDQLQSLRKQIAELMRQLKETVNNDKAKSTLIRRLTGIPGIGFTSAIILYSELMNMGRFPRFDNLCSFVGLIPDVRSSGEKEITLGLSRIHLRYLRNILVEAAWTAVRKDPALTLAFSQLCKRMSKQEAIIRISKKLLSRIMYVWKQNKDYVPAVVA

SEQ ID NO: 433109 - protein, 317 aa, unidentified
MSGTCFIGMDISQDTVDVAVRPGTAFQIANTEQGLAEAVQRLQTLTPALIVLEATGGLEVPLAGALAAVGLPVVVINPRQVRDVARATGQLAKTDRLDAQILARFAEAIRPPIRPVPDEQTQALVALVARRRQLIEMLTAEKNRLRLTARPLQQRVQAHIIWLETELAHMNTDLTTTMRQRSVWREKEEIVRSVPGVGPVLTTTRCANLPELGTLTRKEVAALAGVAPFPRDSGTLKGWRAIWGGRAHVRAVLYMAALVATRKNPVIRIFYLRLCQAGKAKKLALTACMRKLLTILNAMVKSRTPWHHKMESACAEA

SEQ ID NO: 433110 - protein, 369 aa, unidentified
MKKTIKNIGLDVHKNSISIGIADDGRDGEVRYYGKIDNNMNQLDKVIRKLISKGAVLRFVYEAGPCGYAIYRYLTKNDMNCVVIAPSKIPQQSGNRIKNDRRDCLSLARLHRAGELTPVYVPTEEDEALRDLVRAREDATRALRTAKQQLGAFLLRHDTVYSGRTKWTQAHFNWLADIAMPHPAQQIVFQEYIDTVADCSNRVQRLTEQVRQQSQQSRLHELIKALQSMRGISLIVAATIAAELGDLTRFENPGKLMAFLGLIPSEHSSGERVSKGSITKTGNRHVRKALVAAAHAYRFPARKSRAIRKRQNELPKEVIGISWKAQCRLCTRYQYLTAKGKNANVTKTAIAREIAGFSWAIASELAKAA

SEQ ID NO: 433111 - protein, 339 aa, unidentified
MKYTQVGVDIAKHLIQVHFINEHTGEVVDKQLRSRDFLTFFSNREPCLIGMEACGGSQHWARELTKLGHKVRLLQARFVKAFVMGNKNDVLDARAIWMAVQQPGKEIAVKTEEQQSVLVLHRTRRQLVKFRTAQINSLHGTLLEFGESIHKGRAAMEREFPEALERMKERLPPYLITVLEDQYNRLSELDSLIDDIEKQLTNVARQNETCKRLLDIPGIGPLIATAAVATIGEASAFKSGREFAAYVGLVPKQTGSGGKIRLLGISKRGDTYLRTLFIHGARAAALLTIEPAPWITELKKRRPASVAIVAMANKLARTVWAIAAHGRKYDRNHVSIRPY

SEQ ID NO: 433112 - protein, 348 aa, unidentified
MLADQLDYVVGVDPHRDLHALAVVHVLSGAVVFEKTVAANSDGYAHALKLVDAHASGRRAFAVEGSGSFGAGLTRFLTRRGERVLEVSRLRRERRSGGKTDALDAVRAARSVLAQERPATPRAGGERQALQALVAAREGAVNAKCAGLGQLRDLLITTPEPLRSELRPLTRARLLQHLAATRPGGRRDPELRGSMLALRSIARRVLQLTAEERELAREIETITRKLAPQLLDQPGVGPHAAAQLVLSWSHRGRIGSEAAFARLAGCAPIPASSGQTIRHRLDRSGDRKLNRALHMILVTRKRSHPPTTAYNERRIQEGKTRREANRCLKRYLARNLYRLLEHEPPLTT

SEQ ID NO: 433113 - protein, 433 aa, unidentified
MDIVHPRVAGIDVHKKVAWVAVRLPGEAPGERTVVIKRFKTFWRPLQKMAAWLAELGVTDAAMESTGVYWWPVYHALAGAGIEVCVCNAAHMRNVPGRKTDLKDCQWIAELHEYGLLRPSFIPVAEVAALRQRTRYRKRLIEQRTAESQRLSKVLEDAGIKIDSVASRLLGKSGREMIEALIAGERNPGRLADLAKGVLRRKTDDLQMACDGRFTGSHGQMCRLHLDAYDHLTGKIAELDALIAGAAAPFTAVIARLMTIPGIGQRTAEVIVAETGGDMTRFAASARLAAWAGLAPGDNQSAGKRKHAAARQGNRHLRAAMTEAAWATARTRTRPGARFRRLARRFGKGHEKKAAIAVARTLICIAWAVMARGQDYADAGEDYYDQRDQRNLEHLIRHHQQALARLGCQITLVPPEHDSPPPGTASPHTGQAA

SEQ ID NO: 433114 - protein, 408 aa, unidentified
MADKIAGIDVHKKVLMVVVMDARTPESKPERRRFATMPSELRRLSTWLQERGVEEAVMESTAQYWRSVWLELEPHMCLHLAQAFSNRAPRGRKHDFKDAERLVRRLIAKELILSFVPDGEQRIWRNLTRMKLQLTRDRVRIQSQIECLLEEMRIKLSIVVSDLLGSSGLRILHALANGETDAKSLALLGDDRLKCTDEQLVEALTGRSHPMHGQMLALQLERLRLLDEQIAKLNSLIAQAMKPHQDAVIRLAEVPGLGIDSAQQVIAEVGVTASTFSSAAEFTSWVGTCPGKEESAEENSSSRSAKGNKYMRRVLNQAAHAAARSKGTHFQAVFRRLLPRLGYQSAVWAIAHRLCRLVWKILHQGIRYIEQGIESEPKLLIYRAKYLAKQLRKFGYNVQITPANRAPA

SEQ ID NO: 433115 - protein, 315 aa, unidentified
MNEVAYKFHCGIDVSKPKLDVVISNNPSVFQISNDEHGFKELINLLPNKQKTLIVLEASGGYEKGVTNHLRKKNFSAAVVNAKRVRDFAKAQGKLAKTDSIDAKTIMLFGKTFNPHPQPYVSEEKEERLAYLNRRDQLVKLITMEKQHLELVHESIKKKINKHLRLLKKELSSIEETLKNLFNKDEILKEKLTRLEEIQGVGKITAMNVLIHMPELGSLTSKEVASLTGVAPFNKDSGQRKGKRETAGGRSIVRRALYMAVLSARIYNPIIKKFYERLIAKGKLKKVAMVACMRKLIIIMNVMLREKTSWNPAMT

SEQ ID NO: 433116 - protein, 366 aa, unidentified
MDYGVYCGVDFHARQQTICCLTTEDGVIATYELKHDCKNAVRDFYAQLPGPVLVGLEAGGYSLWFEQLLEELGHEIWLGDATEIRRCARRRQKNDRRDAALILDLLVRGEFPRIHRQAPLSREILRMLRYRHRLVKLRTISKNCLQALAIQSGLSLKSQLFTQAGMQQLTSVTMSPVMQCQREQWLQLLPTLEQRITACEKWLSEQAAADPRVRRLRTHPGLGLLTSLAVVHTLDPVSRFPNQRKVAAYGGFDPCEDSSAERKRYLGISKAGSKLLRFLLIEAGQTAVKEDPDLKRFYRRLQQRRNKPKAKVAVARKLLIRSYILLRDEIDYAEFQRRAVAARLARENARLNACPLIEQSASLAGD

SEQ ID NO: 433117 - protein, 423 aa, unidentified
MAYRIAGIDVHKKMLAVVVADVEVHSEYEFERRRYGSNPEHLRSLAEWLMEQQVEEVVMESTAQYWAPVWGALERYWKPTCQEREGAGPMSGTLHLAQAQSNRGRRGRKKDFPDAEGLIKRLVANELILSFVPDAEQRLWRTITRRKYQLTRDKVRLQNQLEALLEEIHIKLSSLVSDLLGVSARRMVKALSEGETSPEALAAMADKQLRATQAQLCDALGACAELKPIYRRLLKMCLEQLQMIEQQISQLDQEMANLLSPHQDAVKRLAEVPGLGVDSAQQIIAEVGAQAATFPSAKQLASWVGACPGDEESAGVSKGHRSPKGNRQMRRILNQAANAAARSKGTIFEIVYRRLVSRLGHNQTIGAIAHRLCQLIWIILHRNVRYEERAPSVNARSRQRRTNKMIRELRNLGYRIEPVPIPA

SEQ ID NO: 433118 - protein, 388 aa, unidentified
MTQAPGALPTPTVLDYERTLILAIELSNTSWVLAAQIPGLPGVKAKRSIEPTPEALMAAIENYRTRAVKAGRNVERVVAIYEAGWSGFWLARWLAQYGIETHVIQPSSVPIDRRARRAKSDGIDAELLLRTLLAWLRGEPRVCSMVPIPAEADEDARRRVRERAELVAERVGLVNRIGAVLATLGVGEYNPLRRDRRQRLDELRTALGGSLPTHARAKIVRMLDRLELLLLQITELEKSRDAVLEDENPDKAASMIQQLAKLRGVGVQSATVLVREGFVREFANGKALGSYAGLTSTPYSSGGTEREQGIGKAGNVRLRTLMVELAWLWQRYQPDSAQVSWFRERVSGTGRRMRKVMVVALARKLLIALWRFATQGVVPEGAVMKPAT

SEQ ID NO: 433119 - protein, 335 aa, unidentified
MENVILVVGIDISKDDFHVCAKEKTADGNVKVKGSRSFKNNTNGFAELALWVSKREKAGSLVRYIMEATGSYYEDLAYYLYEAGNKVSVVLANKIKHFAKSLNVKTKTDKVDSAIIAEIGVERELQEWKPMSPKYKELRDLCREMLSLKKEKSRAMCQLHAMNHSHDKTPSVVKIKRIQIDFYEETILEIEAEIERLVNADTDLKNRIDKIQKVKGLKLNTIIVVLCETNGFQMFESIRQVVSYAGFDVVMKESGNFKGKTKISKKGNNRIRQCLFMPAMSAIQHNAKIKDLYSRIVERNPDIKRKGVVAGMRKLLILIFVLWKKNEEYDPNYVW

SEQ ID NO: 433120 - protein, 351 aa, unidentified
MNSIDYIGFDIHKKTISFCAKAQDGRILDEGTIPARRTDVSAWAQRRSRPWWGAMEATLFTGWVYDHLKPLAQELKVAHPAMLKAITASKKKNDKVDARKIADLLRCDLLPECYMAPSAVRDLRRVLRYRNLVVRQATRMKNRIAGLLMETGTLYNKERLHGKAYFCELLGSLRETPASVIDLLKLSRAQLEFFVTIQQRLVKGLRTDAGLRERVERLQSIRSVGEILALTWALEIGEVNRFTSIADAVSYCGLTSAQHNSAGKEQRGPISKQRNKHLQTILIEAAKLAPRFNPQLAAVHERELQRGNRNRATLAVARKLVAYLMAVDKSGKPFQVRASAGEANQDEQPVG

SEQ ID NO: 433121 - protein, 423 aa, unidentified
MSKKKQTVAGLGAIYARVCGMDVHKEVVVACVRILDMQDGTVQSTLRRFGTMTADLLELRYWLAQEQVTHVAMESTGVYWQPIFNILEGHFEVWVVNAQHIKKVPGRKTDMKDAEWIAQLLQCGLLKPSFVPDREQRELRDLTRQQTKLVQQRNTVANRIQKVLETANIKLGSVASDVLGVSGRNMIEALIGGERDVSKLADLAEKRLRHKIPQLQRALEGEVREHHRFLLRRLLDQYDFLEKEIARISERLAAIAPPSFRGAVERLDEVAGVAERGAQALLAETGTDMTRFPSHKHFASWAGRCPGNRESAGKRKSGKTPSANRHLDAVLTEIAHAAVRKKDSYFKSQYHRLAGRRGKKRAIGAVKHSILVTIYFMLRDNKSYTDLGPDHFDKLNPQQQIRYHVRKLNELGQNVELSLRPAA

SEQ ID NO: 433122 - protein, 342 aa, unidentified
MQISTIGIDIGKNSFHFVGFDARGGIVIRRQCSRTQLVRALANVPPCLVGMEACCGAHHLGRILIAQGHDVRLIPPQYVKPFVKSHKNDLLDAEAIGEAVQRPTMRFVPLKTMEQLDLQAIHRLRTRLVARRTAVINQMRGFLLERGVTCPIGREALVKRFPEVLDNPALGLSVRFCRLLQQLRDEWRLLDDDIEDVDQEILSLARDDEACNRLMQVPGIGPLTATALVAAVGNGAAFAKGRDLAAWLGLVPRQHSTGGKTVLRGISKHGNAYLRCLFIHGARSVCRYHHEKPHRLGRWLTSLEARAHPNVVVVALANKLVRTAWAVLQRNTHYDGRLLANA

SEQ ID NO: 433123 - protein, 348 aa, unidentified
MALTIVETRAITGGVDAHADTHVAAALDPIGRLLGVRQFPASAEGYARLLDWLGGFGTVCLVGIEGTGSYGAGLARHVTAADIRVVEVDRSDRQDRRRQDKSDPLDAVSAARAAQSGKACGAPKGRDGSVEAIRALMVAKRSARADRTQAINQARSLIVTGPDDIRVRFAAHTPAALAAELASLRPRPGDVVGYATRIALRELGRRAEFLGGQLDRLDELMVPLVTARAPGLPGLYGVGPHTAALLLIGAGDHPGRLRSEAAWAHLCAVAPIPASSGKTVRHRLNPGGDRQANHALWRIVFTRMSSHPPTRAYFERRSAEGLSKKEIMRCLKRYVAREVYPHLRPPVG

SEQ ID NO: 433124 - protein, 348 aa, unidentified
MDTIGVDLHKRETQLCIGQADGTITEQRIVTSRERFTAVLGHRPPARILVEASTESEWVACHLESLGHEVIVADPNYAPMYATRSRRVKTDRRDARTLMEACRAGTYRPAHRLSAARRHVRAELAVRDAVVRTRTRYVALAKALVRRDGLRVPSSAAERVGAHLERLAVSPALAAELAPLLTLLPPLNAAIAAADQRLAELEHTDPSVALLMTAPGIGAVTASALVATIDDVQRFASAHQFEAYLGLVPGERSSGELRRIGPITKAGNRRARWLLVEAAWRILRSKDPASAPLRAWARPIAARRGPRIAAVALARRLAGILYAMWRDSVPYDARKVRRPRRAPGGPAS

SEQ ID NO: 433125 - protein, 326 aa, unidentified
MEHELHYIGIDTAKEKLDVDVLRPDGRHRTKKFANTTKGHDELVSWLKGHKIDHAHICIEATGTYMEPVAECLYDAGYIVSVINPALGKAFAQSEGLRNKTDTVDARMLAEFCRQKRPAAWEAPHPLERALRALVVRHQALTDMHTQELNRTETAREVQRPSIDAHLLWLEAELKRLEKQIKDLTDDDPDMKHRRKLLESIPGIGEKTSAVLLAYIGLKDRFAHARQFAAFAGLTPRRYESGSSVRGASQMSKAGHVSLRRALYMPAMVATSKTEWGRAFRDRLAANGKKGKVILGAMMRKLAQVAYGVLKSGVPFDASRHNPVAA

SEQ ID NO: 433126 - protein, 313 aa, unidentified
MDSTVVGVDVSKDRLDVHVLDGAGGNAFAVSRDGKGIAELAERLGPLGCRVVALEATGGFETVVVAGLSAAGLPVVVVNPAQVRSFARALGQRAKTDAIDAAVIARFAEATRPQVRALPDAETQLLADLVARRRQIVDMLRSEHQRERRAPARIAKSIKRLIKALEKELAQVDGDIDGAVRGSPAWLAQEALLASVPGIGKTIARTLLAELPELGRLDRRQIAALAGLAPYTRQSGRWRGKSQIGGGRSSVRSALFMGAMVAARHNPTLKAFRDKLVANGKPKLVAIVATARKLLTILNAILKTQTPWQPQMP

SEQ ID NO: 433127 - protein, 373 aa, unidentified
MPKYSTAFGMDVHLRSTTVCALDADTGEAVTRRFPGNPWGEIAGWMDGFPGPSLAAYESGYLGFAPQRELAGLGVECVVAAVSKIPRSAADSASKNDRNDAARMAKAILAHDISPVWVPSPEVEGIRDLAGAYDGATARLATAKQRLLAFLARRGFVYGGTTPAGNPRKYWTYDFLRWLDKVRPEDDGGVRALAALRNEVEAAAEARADLLSEYRAAVDASPIAAEVAALQSIKGCAFALAAAFSAEVGDFTRFRSGRQVTSYFGLAPKQRSSGGSVRLGGISGAGNALVRKLAVEGSWCYAAARHQPKLMPRDTGVPLEIRVHGRKGSERLLRRREEMLERGMPQAKANAATAAELVRWLWALGAMCREAGE

SEQ ID NO: 433128 - protein, 424 aa, unidentified
MNLTQNDRLNQVTADTLVVGVDIGSATHFARGFDWRGYEFSKRAFRFNNTKVGFLTFIRWVEEMMKKTEKTKVIVGCEPTGCYWLTFQKFLRDRDILLVTVNPYSVKKCKELDDNSPEKSDLKDPKTIAGLVREGRYSTPYLPEGVYAEIREAQVCRDQIMKQHVRLSNQIQGWLQKYFPEYLECYKDFDTASGMMVLEHAPLPEDIIKLGAGGINGLWRNAKLRGAGIKRAKTLVEAARGSVGLSGGEAARLEIWFLINDYQTKTKQLERLDEFLAKEILKVPHVEKLLAIKGVGLSTVIGFVADVGDIGRFTDPKQVQKLAGLEITKASSGKKKGRPCISKRGRRRLRRTMYESARSLISWNEAFSEVFMYYRYRTRNPLGGMQAKIAVACKAIRIFYTILKTGCEFDAEKLRRDIIRPEAV

SEQ ID NO: 433129 - protein, 401 aa, unidentified
MPELWAGTDAGKAAHHCTVIDADGTKVLSRRVPNNEPELLELIGDVLALAGDGPVTWAVDLNAGGGALLIALLTSHGQRLLYIPGRTVHHASRGYRGDGKTDAKDAYVIADQARMRRDLQPLQEWDEIAVDLKILTARRYDLAADRTRAINRMRAQLLEYFPALERTFDYAASKAALILLTGYQTPAGLRRVGPSRLATWLKNRKVRGAQAMADAAVAAAQAQHTAVAGESTAAAVVNTLARSVLALDEEIAAVDAKIAARFREHRDAEVILSMPGMGPLLGAEFVACTGGDMDAFGTAGRLAGVAGLAPVPRDSGRISGNMRRPHRYHRRLLRVFYLSAQIAARFCLISKTFYDRKRAEGKSHKQAILALARRRLDVLWALIRDQRTFEAEPPQRGLAAA

SEQ ID NO: 433130 - protein, 463 aa, unidentified
MPKAWKSRKKLALKVDVTAGLEALHHHAAGIDVGNAEHYAAVPVGRDPQPVQTFGSFTADLHRLAKWLKACQIETVVMQATGVYWIALYEVLEGYGLQVNVVNAKYTKTLPGRKTDVLECQWLQKLHTFGLLNNSFLPPEEIRVLRTYLRQRENLVAAAGSCIQQMQKVLTQMNVQLANVISDLSGMTGMAILQAILDGQRDPQQLAALADPHVQASRKEIAQSLEGHWREDLLFVLRQVHDLYFTYLENITACDQRIEAHLKTMQAKVDVVAQPLPEARPKDRLPNRKHIPQFGLREELYRITGVDLTRIDGIQVQTAQVLVSEVGVDMTRWPTEDHFSSWLGLSPNNQITGGKVIRRGTKKVLNRAATALRLAAQTLHRSKSYLGAKYRRLRAKLGAPKAITAMAHHLARLIYRLLRFGTQYHDKGVEYYERKYRETEMKWLQKQAAKLNMQLIPTGALTK

SEQ ID NO: 433131 - protein, 343 aa, unidentified
MDHFAGLDVSVKETSVCIVDDTGKIVREVKVASEPEALLKVLRSPSHQFKRVGLEAGPLSQWLYSALAEAGLSVICVETRHMRAVLKAQINKTDRNDARGMAQMMRVGLYRPVHVKTLRSQKLRMLLTHRKLLQSKAIAVDNDLRGTLRNFGLQVGMVGATRFEARVKELIENFSDLAVLVEPLLVVRRVLREQLGILHRRLLTVVRDDDVCRRLMTVPGVGPVVALTYRATIDVPARFRKSKAVGAVFGLTSAKYQSGEIDRSGAISRCGDEMMRTMLYEAAQSMLFHSIRWSWLKAWAMKIARHRGMKKAVVALARRLAVIMHRIWVDGTEFRWTKEAVTT

SEQ ID NO: 433132 - protein, 334 aa, unidentified
MWHVGIDLHRQTLVVAAVDDAGNCWPPRRIDCRDQGAIVEVMRSLDPFRAVIEATGTYRWLYDLLAPLGTVLLANPLRLRAMVQRRNKTDKLDSQLLANLLRINQIPLAYVPPQTYQQLRDVTRHRARLARQAAMAKTQLRSLLAIHNLGPLPFSAVGVRACAWFAQQEFGAAGNWVRDELLLRLDHYRRQLALLDEYLEQLRSQVPQVEAILDIPGVGRYTALLIIGELGEVHRFRTAQQVGGYAGLTPRVHQSGDHCYRGSITRQGSPWLRWILVEAAIKAARQDTRLKSFYARVRKRSGVKIARVAVARKLAEICWKRLIRWHGRPVPSIA

SEQ ID NO: 433133 - protein, 428 aa, unidentified
METSARVPEVVAWMGLDWADQRHEIRLAAAGSAATESFTVEQKPAALHAWVGQLRARFPEGKIAVALEQSRGAVIYALMNYDFLLLYPIPPKTLARYREAFATSGAKSDPSDADLLLELVRTHADRLRAWQPDDALTRQLRLLVEYRRKTVADRTRLTNRLTALLKTYFPQALEWAGDLRQPAAGEFLRAWPTLEAVQGASRAEWQRFYDRHRRLSTPEREDLFGQINQAQPLTRDQALVEASALMAQGLAEQLSAAIAVIARLESELERLFAQHPDHDLFDGLPGAGEALAPRLATAFGSDRDRYHSAEEVQKFSGVAPVTEKSGKTKWVHWRMACPKFVRQTFHEFADASRKKSLWARAFYELQRKHGVDHHAAVRSLAYKWIRILYRCWKDRAPYDEQVYLKSLKRHRSPLWLAVMSLSIQEAHG

SEQ ID NO: 433134 - protein, 350 aa, unidentified
MKTFIRIGVDLAKNFFQVHGIEHEGGLALTRKLTRAKFREFCSRLAPCRVGMEACGSSHYWARELRAMGHDVVLIAPAYAKPYVKRGKNDAADAAAISRRMHSIRPGEAMSWPEMRFVPIKSADQQAVLMLHKTRDLLVKQRTMGANALRGHLQEFGLIAAKGIHRIKELVALALADEGLPEEAKQAAILLAAHGDELDEKIDALEKKIARASAKNPTSRLLDEVPAIGPLIASAMTASFPDPSAFKSASDFSASLGLTPSQHSSGGKERLGGITKKGNRYLRKMLVVGCTSVLRVAHKYKGALADWIAAMKTKKPERVVAVALANKLARICWAIMSTGESFRTELYTRA

SEQ ID NO: 433135 - protein, 344 aa, unidentified
MANLNPFCDFTKLIGIDIAKSVFQIYSCDTQTGEITNVQVKRNKVLESFANCGKCLIGMEACSSSQYWARKLQALGHTVRLMDPKLVKPFVRHNKSDKADAEGIYHAMVAGVRSVAVKTETERDIQTLLTMRALLVKQRTARINHVRGLLAEYGQVMPKNVDQFDKRVDECINGLEGDAVQLVIDTMRDTVKSIRDDDDRIKTLDREISILAKQTRNAKHFLTVPGVGETIMAYMCVLLADPSQFSSARQFAAYLGLVPMHTGSGGKTVNTKIPGRCDKALRAILVQGAHAVARSKYRTDWVKNILAKKAKKVAMIAIANRIARQCWAVASKGQDWRRMPVTAA

SEQ ID NO: 433136 - protein, 352 aa, unidentified
MKTETTALIPKLYIGIDVHKKSWTYHYQTDLFDGKTITQPANPQTLVDWVGKHYPSHEVTCAYEAGFSGYSAARLFQKQKWNVLVLNAADIPRSQKQSIVKTDKIDCRNICKQLKNEALKSITIPEEQRESFRSLFRERNNFVEGLRHIKLQIKSYLMYCGVTIPEEFDNANWSKNFIEWIRQQSQPYETGTLKITFLLKRYDFMYQETLAISNQLRAYAKKHYKKDYDLLRSVPGIGGITASAILAELGDLRKYNRFDDLASSVGFVPGIYSSGDTTIVKGITPRAKSLLRSYIIEASWQAVRFDPVLQEYYRSHYGKQPNKIIVKVARKLLSRIHAVIKTETSYQIGVIK

SEQ ID NO: 433137 - protein, 370 aa, unidentified
MRIIGCDLHARQQTLAMLDTETGEVVNLTLMHEGNNVREFYSKLPRPVLVGIEATGSMHWFLNLMEELGIECRVGHPAQIRAAEPRKQKHDRRDADLILKLLAQNRFPAIWLPSKELLDLRALLLHRHQWVRMRVRMQNALQAIALANGLRRGPALWSYDGQAKIAFLPLLPHAAYRRSALQAMYKNMQSEIENLTRRVAEQAGNRCGARLLMTHPGVGPVTALATEVFLGDPQRFTDSKTLASYVGIIPREYSSGEHQRLGGVTKQGSPLLRFLWGEAGAHAARRDPELKRFYRRKLVQKGLGKARVAVARKLGIRLWIMLRDEIDYQEFCRRGQIQQKTVRPVAGMPETGNGAKSHRPVDEATRLPES

SEQ ID NO: 433138 - protein, 364 aa, unidentified
MFDRIAVGLDVHARSVVAHGVDRDTGEVFDHCFGKDHSDEEIVAWVAGLPGPAAAVYEAGPTGFGLAREFTDAGLTCLVAAPSKLLPLPGDRVKTDARDAAHLAMLLAAGAVTEVRVPSVEQEGLRDLLRAREDVRGDLMGARQRLSKLLLRHGVVYGGKTTWNMVHLDWLAAQRFDQKATQLSFDDNLAAVHQAMARQKHLDEQLDVLLPGSGYQDVVNALSCLRGVSTLTGFGLAVEIGDWTRFTGATIGAYLGLVPSEHSSGQSRSLGGITKTGNQHARRLLIEAAWHHRTEYRPGVSQRLRRQQALVEPRIQARADEANRRLHRQWVKFDARKKRPVTANAAIARELAGFCWSLAMMTNQ

SEQ ID NO: 433139 - protein, 398 aa, unidentified
MTRKNTLKSLPTDTEFRVVGLDLAKSDVSVAAIPVDDNTPSLVDRMTYADLLDWAGKISPTLFAMEPCNGYSLLCLQLENLGHEIKVISGWTVSMWINTHLSGQKTDLNDAIALARLAVSDAELTPIRHKSITEIRIQTVQAVRQQLMSQRSKSIVSFKALAQQWGIPCAAGHRNLKKLRESIEAKVDLITRPVANAMLFLLDAVKSLDRQIGQLNQTLQELVMSDERGRLLQSVLGVGTQISARVITVVGNIERFNSPRSLVAYVGVAPRNFITGHKNLTKKKHGNCPDLSHKGQGKISRRGDKLLRSLFIQGAACLYMQFCKDQLPECQLKRWILKQLAMQKPYGKLIVSLAAKLIRIVWAVLTYGEKFNIQKAGMTRSMWSEMALETPLNKEVPA

SEQ ID NO: 433140 - protein, 400 aa, unidentified
MKGPIVSIDVSNGNSHFQCFTQRGTKMGKVHRISHTVEGFNFLKSKIEELEKKTNEEVVAVYEATGVYTKPLERFLEKNEIKQYSISPLQSAKQRKTEIHNKKTDKKDPESIAEVYYIKELREDEKEADLYHELRTANRVYEDCLVHLRKYKVTFQSHLSIVFPGYMKLFQDGYSQISLQLLEMYPHPDRLKNKQPEKVAKKLNKHTDHSFEVCLKTAEKVIEFANKTYPGCDKEDAWVAVLVDDIHHLQDTMEEAEAKLDKIIELAKATPYYSIILSIDGIGPNLASRIIAEFGDISKFKTRGAMVAYVGNDPNRAESGDIEGYHLSISKKGNKRLRCILYLAVTCSIRSRKENPINAFYQKKRQQSTPLKSKAAKVACITKLIRTIHGMCKTGTVFTS

SEQ ID NO: 433141 - protein, 456 aa, unidentified
MAQRNLSSKSSKSRQALSLTHPNAAGIDIGSASHFVAVPPDRDDAPVREFSSFTANLNELADWLSTCGVDTVAMESTGVYWIPLYELLDRRGFNVHLVNARHVKNVSGRKSDVLDCQWLQQLMSYGLLQGAFRPGDEVCVLRSLARQREMLLKSQARHVQHMQKALTQMNIQLANVISDVVGETGQNILRAIVAGERDGHVLAAMKNARIRASSEEIAKSLQGNWRTEHLFALKQALALFDFYAGQLAECDQEIEAQLQSLAAHDGRPDKGKKRGRARNAPRFDLRERLFQMCGVDLTRIDGIDVTTALAVLSEVGADLSRFPTAKAFASWLGLCPGTKITGGKVMSGKTKRCANRAAQALRLAAAALRTSQSALGAYFRRLCSRMDKPKAVTAAAHKLARLIYSMLTKGESYTDPGQDYFEERYRQRVLRQLSIRAEKLGMKLVEVDQTPEMAHS

SEQ ID NO: 433142 - protein, 347 aa, unidentified
MRFYTKQHPFYCGIDLHARSMYVCLVSHDGEIVLHRNMKAAPEPFLKAIAPYRDGLVVAVECIFTWYWLADLCAAEGIAFVLGHALYMKAIHGGKAKNDKIDSQKIAALLRGGMLPQAYVYPAEMRATRDLLRRRTHLMRKRAELLAHVQNTNSQYNLPEIGKKIAYKTNRDGVAERFDDPAVQKTIEVDLALITYYDELLTDLELSIVHTAKQHDAPTFYRLRSIPGVGKILALVLLYEIHDIHRFPSVQDFVSYCRLVKCARESAGKRYGTSGKKIGNAHLKWAFSEAAVLFLRNNPAGQQYLARLEHKHGKGKALTILAHKLARAVYYMLKRDTVFDMDKFLHG

SEQ ID NO: 433143 - protein, 408 aa, unidentified
MRTIGLDVHREFAEVAILEGGAVRAGGQIATTPEALRLFAQSLAKTDEVAIEATVNTFAIARLLDEHVARVVISNPVRTRAIAEAKVKTDKVDARVLAELLAAGYLPGIWRPGEELQALRRLVARRTGIVRERTRLKNQVQAILHRNLRPRCPAADLFGKKGRARLGEQPLPPDEEIAVASALRRLDVAGEELALVDRELAKVGLASAEVKRLLTIPGVDRTVALSLIAAIGEVERFASPRRLVSYLGLDPRVRQSGNQPAHHGRISKQGRAQARGMLVEAAWVCAKTPGPLRAFFLRVRARRGEQVAAVATARKLAVLCWHLLSTGEDYAYGRPSLLAQKLRALELAAGAPSRRGQRGSTYAYNLKEVRARERALSEQAELAYEKLTSRWQKRRPKPGAGAATGERL

SEQ ID NO: 433144 - protein, 341 aa, unidentified
MKNKSFIGIDISKNVIDASIFCEGTPIKDFPHAVFNNSRKGFGEMCTWLKKNHVVLSNCLFGMEFTGSYSMELEKFLNARNYQFCMLSTHVVKHYPMGSKDKSDKIDSAKIADFLYRYNGTECVKPYKMPDKTMQRLKTLMNERKFLVEQRTCFMNRRQLCTTKEDAQLYDGYIKKLSHDIENIELEEQKLLATDDSLLATYKNLLTIPGIGFVNAINAIVITRNFTAFETARQYASYVGVAPHSHTSGTSVKWRPRPSARCDGQAKADLSMAATVAVQYDAELLSFYNRKLGGKQDSDTKRKALNAVKFKLVLRMFAIGKQNRKWEPLDSKSSNEKLAIS

SEQ ID NO: 433145 - protein, 377 aa, unidentified
MNDLIRIGIDTSKSVFVLHGVNAAEQPILRKRLRRRQVVDYLGKLPPMRIGIEACGAAHYWGRELTALGHEVCLLAPQHVKPYVRRNKNDEADAEAICEAMSRPRTRFVPIKTAEQQAALMLAGVRDQLVRRRTQLSNSIRGYAAEFGLVAARGLDKIEPLLARIAADETLPALARELFAEQAEDYAELTRKLRRIDAKLLAWHRQNALSRRLAEIPAIGPIGASLLAMKVPDPAAFKTGRDFAAWLGLTPKDHSTAGKTRLGTITRAGDESLRRVLVVGATALIQQVRKGRGHPSPWLIALLKRKPPKLAAVALANKTARIAWKLMVSGGHYDRNHAAASRAGRCAPLVGGFAARPALEANTLPRRKVAPAVMPKA

SEQ ID NO: 433146 - protein, 290 aa, unidentified
MSQGLNCAVAVIGIDIGKNSFHVVGLDDRGAIVLRQKWSRGQIEARLANMPPCLIGMEACVGAHHLSRKLKAFGHNARLMPAKYVRPYSKGQKNDFRDAEAIAEAVQRPTMKFVATKTADQLDLQALHRVRERLVSQRTGIINQIRAFLLEQGVAVRQGLRFLRAELPRILATPPDALSPRMVRVIKDLAEDWRLDERIDQLSSEIAVLAQQDTGCERLLSVPGIGPIISSAMVAAIGTGHAIVKGRDIAAWLGLVPNQISTGDRTILGKISKRGKAVTCARAPDAVAGS

SEQ ID NO: 433147 - protein, 401 aa, unidentified
MFVGWDWASTTHDVTVLDEAGAVVDRWALRDTEQDLAGALDRLAWLGEPAALPVIIERTSGLVVDRLLAAGHPVVPVHPTAFWAARPRWGASGAKSDAGDSYKLADYLRTDGHRLRRLDRSDPGLQELQALVRLREDHLRARTAASNQLGALLEAYWPGPKAVFYRLASPIALAFLADYPTPQAAARLGEARMASFCRRHSYRGGKPPAVLLARLRSAPTAPVGIPPATLATLVRAQVQLLRTLLATIAELEVAIAERVACHPRATLLASLPGVGTINLAQLLAEVGPILDRVDSAEQAAAECGAAPVTKASGKTSGVYFRWAANRRARKALTAFAHNSRLASPWAGRLYADARARGKRNPHATRIVARAWLRVIWACWQQGIPYNPALHTAALRTAALPT

SEQ ID NO: 433148 - protein, 366 aa, unidentified
MEKGITFVGLDAHKVAINVALLLPGRGVPVTWECTNEKASVGRMVRKVVRQAPGEVRFCYEAGPCGYALQRWIEGMGPLCTVIAPSLVPRKSGDRIKTDRRDARKLAELYRAGLLTEVHPPTLEDEAARDLCRAREDAHQDLVRSRHRLSKLLLRRGRQWEGGKKAWGQGHRLWLRSLRFEHPEDQVVLDDYLLTIEQIEGRMKALDQEIATLSRKERYAKVVAALRCFRGIDTLTAMSLVAELHDFMRFDSARGLMAYLGLVPSEHSSGGKQSRGEITKAGNGHVRRLLIEAAWHYRHRPGTLSLKKRREGQPRQIVALADRAMHRLHRRFVRLTDRGKARPKIVVAIARELTGFVWAAMRQRSA

SEQ ID NO: 433149 - protein, 363 aa, unidentified
MTKKRLRGNHLLDFLGADEKTPVWIGLDVHKKSYHVALRRADGVCQSWVSPADPIVLAQQLSAISQRISLIVYEAGPTGYCLERVLKENGYKVAVIAPSRIPRPVTNQAKTDKLDCLKLAEYAAKGMIEAITTPTAQESAERSVLRRRNQLVDSTRKTKQRIKSFLLFHGIEEEYGLRYWNRSARAELSKLPLQSDLKFVLKSLLRQLSYEEEALARITNRLARIAKRSQHWEVVKNLKTVPGVGDIVACAFRTELFRPERFRRAEEVCSFLGLAPAIRQSGEKRQGGWLMRSGQKRLKSLLIEAAWMWRAKDPWARKKYQTHLSRCGITQKAITALARRLAVILWRLSVENRAYVMLQVDSV

SEQ ID NO: 433150 - protein, 351 aa, unidentified
MESQAYFVGIDLHKELIQLCVLDAHGERVKEQRFPGGTLKQGLAFVKALGEWKNGGRYAVEAVGMNRWLVNAMREAKMDVVVVDAVKLNLRMLGKKTDRRDAYEIARRLLLGDIDLNATTYYPDEERYGCRKVLRTRHKLVQIRQQLVNQVRGLLNAYRVAAPKGVLYSKRNLEWLAQAELSGNLLTECLRDLGQALRSVQASIDALTLRIKEEASKEGVSSLHENLEGVGPQTALTLVHELGDISRFTSARAVASYAGLAPRVANSADKAHHGKITKRGNSEIRWILSEWAVRLLSRNPLVQRWAAPLLRRMHKNKVRIALARRLLVGVYFMLRRGEAFSLERCLSTKAA

SEQ ID NO: 433151 - protein, 412 aa, unidentified
MEGETVIAGVDTHKDVHVLCLLDGLGRKIWSGSFGADPEGYDRLAEAIGDPGSCMVVGVEGTASYGAGLTRRLVELGYNVVEVLRPKRDKMRPGEGKSDPLDAERAARKAASGRGCSVPKSQDGWVEAVRQLYVARRLAVATSTSCVACAKSMLTTAPSALRERFRGRERPKDLMPLLARGRKAGDALEESVLASLRSVAAVWKEARSQVESLDERIRALLEANAPALLGVEGCGTTTAAALVVAAGDNPGRLKGEAAFSMMCGASPIPASSGKTDRHRLNRGGNRQANWALYEIAIKRMAYDERTRRYVARRTSEGKSRREAVRCLKRYIAREVYHVLMDPNPDGAAPEGPELAKMRKAMRVTQKKAAAELGLSAATLGHLERGKRRSTKLERRYYELLCELERTLPQTAS

SEQ ID NO: 433152 - protein, 343 aa, unidentified
MAHYVGLDVSLKLTSICVVSETGSVVQEGVVDSDPEAIAAFVRSKAPKAVRVGLETGPTATWLWTELKRLGLSVICIDARHARAVLKMQINKSDRNDAAGIARIMQTGWFKEVRVKDVDSHSIRALLASRALLVKIKRDLENQVRGLFKNLGLVIGRATFNVFAVRAEELIENRPELVAAVRPLLEARKAIERQVSDLDRKVLRLARHDAEVRRFMTAPGVGPITALCFKATIDDPTRFKRSRSVGAYVGLTSRRHSSGEVDWSGRISKCGDAMLRSYLFEAAGVLLTRVPKWSALKAWGMKLVKRNGLSKAKVAVARKLAVIMHRMWVDGTEFTWSKKEIAA

SEQ ID NO: 433153 - protein, 309 aa, unidentified
MIVCGVDVSKRRLDAHVAPSGAFESFDNDAAGIAALANFCGRQGVQLVAMEATGGYERQAFLLLWEAGIACGLTNPRSVRRYAEAMGILEKTDRLDAGVIARFAIAKDLKPTSPPTTAQQRLNALVARLRQVTDDLTVQKQRRSSARNEEMITSINEVIALLKRQARTLEGEIGSLIDDDPLWSQLDAAIRTKGLANRTVAWVLAELPEIGIYSNKAVVKLAGLAPIAHDSGTRAGKRHIRGGRAGIRSILFLVADIVRRFDESLADFHRKLTAAGKPKMVVRIALARKLLVRLNAKAREAREQYALAT

SEQ ID NO: 433154 - protein, 361 aa, unidentified
MAQVAELFEYVIGVDTHAATHDYAVLAAATGAVVDQAQFPTHPAGLARAADWIARRAPGRRLVAIECTGSYGAGLARELARREERVCEVKPPKRAQRAVHGKSDPIDARAAARTALASDEAELITPRAEGRRSALRVLLVARRAMDARRTADRNALNALVRTHGLNVDARKALSDAQVRTIAAWRTRASDDLATSTIRSEARRLAKSVESATESLKDNRAALATHVGELMPGLLEIPGVGPVVAATLLTVWSHRGRVRSEAAFAALAGTAPLPASSGKTTRHRLSRSGDRHLNMALDIVAKVRMVHDEETRAYVARRTAEGRTPERSAAASSGTSPASSIGRCGPCRLDTRHRSVAGETRW

SEQ ID NO: 433155 - protein, 396 aa, unidentified
MLAVVVADVAQDEWELERRKFGTAASELKVLEEWLATREVREAEMESTPQYWKPVWQQLEGRYRLQLAQAHWNRAPRGRKRDFEDAERLLRRYVAGEWILSFVPDPEQRLWRTLTRSKQQLMRDRVRLHSQVESLWEDAKIKLATVVSDLLGVSSRRMREALADGETDPTALAALAEPGLRATPEQLADVLHAAVTMSALHRKVLRLFLDRLDLIERQIQTLPETIASAMQAHQQAIMRLAAVPGFGVDSAQQVIAEVGPQAATFDSAAQLASWVGVCPGREESAEVSKSNRTPKGNRALRRILSQSANAAIRTKGSIFQSLYRRLVPRMGHNKTIWAIAHRLCRLAWIILHQHAEYVEYGKERDAKAAQRRTATLIRTLRALGYQVIPPTPKIAT

SEQ ID NO: 433156 - protein, 357 aa, unidentified
MLSSNVKYIGLDVHKEAISIAVLNGAGKLVMESIVETKSCTLLDFLHGLRGELHVTLEEGTWAAWLYDVLKPHVREIVICNPRRNALLKEGSKSDKIDARKLAELLRAGLLRAVYHGENELRTLRELARSYLTISKDLKRVKNRLKALYRSWGISCVGKQVYTPRHREQWLNKIAQVGVRRRAELLYQQLDGLSVLRHTVRGELLAESRKHQAVKILRQVPLIGPLRATLLLALMQTPHRFRSKRQLWTYSGLAVVTHDSAQHRYVDGQLQRSKKPQQIRGLNQNHNHAMKDIFKSTALSASCCAGPLQDFYARLLAKGMKPDMARLTLARKIAAITLTLWKKGGSFDAEHLKSQAA

SEQ ID NO: 433157 - protein, 323 aa, unidentified
MSKIIGIDISKSTFDVSYLEQDKWEHKVFKNQSVGFEQFKKILNSSDWIVMEASGPYYVRLATFLNLGNYNVCVLNPLIIRRYSQTRLYRAKTDKKDSKTIAEYGTQYELKNWHPESKHCIEIKQLYTALELLKKQRHQTKRQLESFEITGLLTNSLKKELKQIILLLERRIDKLEKQIEKIGELAYKDTIQRLKTIPGIGTKTAIMMSVITDNFTKFENHKQLIAFVGFSPRLYQSGTSVKGKGHICKMGKPQIRKLLYLCSWSAKRVNKTCIEMYKRLKEKGKPERVIKIAIVNKLIKQIFSIAKNKQNYNENYQSNFCLN

SEQ ID NO: 433158 - protein, 431 aa, unidentified
MLKINPLSTLYVGIDVSSKSNYVCALDFYKNKYINSSFANNQPGAEELALKILKCLKEHPDITTIVAALESTSVYSIHIANYLSSCEELMRFKPYVFVLNPKCTANYKKSYIGLGKSDPIDAFVIADYARAGNIESEPWRGSQFLALKRLTRHRLHLVECMTREKTYLVSNLYLKFSELQMLEGDDQPFCDIYGATSSSVLMEYFSPEEILDSSEEDLIAFLAKKSRNRIKDISKTADLLKKAARDSYRLDKALYEPLNVSIASSFNCIETFKREIKVIDNAIEKEIKGLNPNAFIILQSIDGIGPVFAGGIIAEIGDITAFHSSDALAKYAGLTWKSNQSGDFDGEDTPMIKAGNRYLRYYLGEAANSMRKHNVEYGTYYRKKYNEVPKHQHKRALALTSRKFVRLVYGLLARNQLYSGVSLDTSIKDSN

SEQ ID NO: 433159 - protein, 385 aa, unidentified
MANQNDLSRSLVAFEQDNTIIAVIEMSLNSWLVAGIVPGIERHPLKKLSCDEQMLLQLLYRWRDEAVKAGRMITRMVVAFEAGRDGFWLARWLRTRGIEAYVIHPTSVAVSREHRRAKTDRLDTELLKRAFLGWLRGEPDHCSMAAIPSLQEEDAKRPTRELENLVGERTRIINRMKACLVRFGIRNFNPTLRRATERLNALCTPEGVSLPPNTLAELRRDMARLRFVMNQINEIEAARLQRLEQAPAEEPHAKVRLLARVIGVGLETADMLVHEVLSRKLRDRRAVARYAGLTGAPDESGSKRREKGLAKAGNARVRRGMIQLAWRFLLFQKNSALSQWYRTRAESAGKKRKTMIVALARKLLIALWRLVTTGEVPAGVVLRAG

SEQ ID NO: 433160 - protein, 430 aa, unidentified
MKQYELLHSLFVGIDVSMKENVVHAMPFSPEDHPGHAHLRFSAPNTPAGSVGIVEKVSDFLKFYPDVIQVIIALEATSVYSFHLATFLSVAHFNGHIPAIVYSVNPKEIHAYKKTFTDVGKDDYVDAMVIADYARSNKIRSRPWKGPELLGLRVLTRLRFRIAKLMGIVKNSTGNSIYLECSGFMTGENPFCNVWTTTCQELLTTFQGPDEILSLSDEELLNFITEKGHGRFSHPLDVVEKVKKAARNSYRLDKRVYEPLTSGLSVSFFIIHSLEAAIKKLDKSIETMAKSFSSDSYQILLSIDGVGPVIAGGLLAEIGDIKRFETDDALAKYIGLTWRGKQSGQSESPVKHLSKAGDVYLRYYVLLATGQIINYSAKYREAYERIRSRKTLFPYRAALNLVARKIVRLIFTLLDKHQLYSDNKVMVTLE

SEQ ID NO: 433161 - protein, 333 aa, unidentified
MEHWIGIDVSSTTLDFALLDRKGSHLESVQIGNDRKAVLKLMVQWRKRHGVDTARSLICLEPTGHYTLMLLNLVVEEQWSTWLAHPLDIHQAMGIKRVKNDKVDALRIAQYARTFHEKARLFTAENLKLDKLKHLLTRRQHLVRSRAKHKAHITDLNRYMDRPVQAEFDRMDKRQIALEDKLVAHVDALIIGQIKADPKTERQYDLLRTIPGVGPQLAAYLVAITDGFTRFNTPRQLSCHAGVAPFERSSGSSVRGRTQVSHQANKSLKTLLHMSALVSVREPGELRHYYERKRAEGKKPILVVNAVRNKLVHRICAVIRNNKPYELRPIATN

SEQ ID NO: 433162 - protein, 428 aa, unidentified
MTDQPHSTAETNLVAIDIAKQWNVVLVQEASGQKRSFKVANNAADHDQFLLYLSSLPGRTRIAFEPTGDFHRPLAFRLLTAGFEVVSISSVAQARFREARYGTWDKNDPKDARVILAMLAHGLVQTYHDPLFHGDHDLQELSNTYYQVTLARTRLQHSLLLHYIPLYFPEFGRYWYSTRSEWFIRFLIRFPIPSAVRMVDRDAFIAEAWDIVGKKWDKRAKLEEIYDLAARSIGLPVALDSPAVETFRLQLERYAEINERRAWLDRRAQEVLASNSDFQRLIKLPGVAAITALTILAEAGDMRRFGHHRQFLKYCGLDLAKSQSGQSRGKDTLSKRGNKRLRMIFWMAGLRAVHLRENEFRAKYQRYLGANPLDADRKRKALTAIAAKMARVAYGIVKNGTEYQPFFEQRLPSGSIPLTRAVEALATS

SEQ ID NO: 433163 - protein, 341 aa, unidentified
MKTHSHIGVDLHQRFCYLTALDASGRRLKQSQVVNEGAALRAWLKQVPGPRQVVVEASGFWPAFARAVAPEADRLVMVHPQRVKAIASARLKNDRVDSETLAHLSRADLLPEAWMANEETQQLRLLVRLRVALGRQRTRAKNQMQSVLHQEGFLKPVTDVFGKRGRAWLATLALSPMGRRTVETWLREVDHLEREIDGLTRELEAMAKLDARAKWLETVPGIGAYSAMLILSEVGEIARFGSKRALASYAGLTPSTRESAGKRSKGSIGHHGSSLLRWIMLQVAQSAAKSSPGARAYLGRMKKRKPMQVAKIALAHKLLTAVWSLLRHGVCFEEDVFARSR

SEQ ID NO: 433164 - protein, 350 aa, unidentified
MLSSNVKYIGLDVHKEAIAIAVLNGAGKLVMESIVETKASTLLDFLHGLSGELHATLEEGTWAAWLYDVLKPHVAEIVVCNPRRNALLKEGSKSDKIDARKLAELLRSGMLRAVYHGENGLGTLRELARSYLTISKDMRRVMSRLKALYRSWGIPCSGKQVYTSRHREQWLNKITQPGVRRRAELLYQQMDGESVVRHTVRGELLAESRKHQAVKILRQIPLIGPLRATLLLALMQTPHRFRSKRQLWTYSGLAVETHDSAQHRYVDGQLQRSKKPQQVRGLNQNHNHEMKEIFKSTALSASRCAGPLQNFYEGLLAKGMKPDMARLTLARKIAAITLTLWRENVSTLNI

SEQ ID NO: 433165 - protein, 307 aa, unidentified
MTQNYIGVDLSKDWLDIFDPRTGHVRVPNTAPRIRTWLRDLGPGDLPVLEATSGCDGHILREAGCANRPVCRLNPLHAWHFAQSLNLPKTDRVDAAMLARLGAERGLAPSAPLDAERAELAELGGRRDQLKRMETQEKNRLGKAASSTVRADIRASLRLLARRIARIEAAIAGFLKRHPESARAVALLETIPGVGRVASVTLIAAMPELGGCDRRAIASLGGLAPKARESGKWRGHRAVGAGRRRVRRALYMAALSALRHGSFCAGFVRGLRDRGKPGKVIAIAVARKLLTVANAILRDQTPFKAPT

SEQ ID NO: 433166 - protein, 408 aa, unidentified
MAAIEFPIYVERGCGLDVHQQTVVASIAGKDIEAQTKTFGTFTEELYQLVGWLQNNGITHIAMESTGVYWKPVYYILEDFFKILLVNARHIKNVPGHKTDKKDSEWIAKLLMSGLLKGSFVPPQHIRELRTLHRHRRKLTGQRTAEKNRLQNILEDANIKLGNVVSDVFGKTGKAIIEALIAGVTDPAQLAELARGSLVKKKDQLKKALNGKITDHHRFMLQLIVNTITHINNQIALLEAQMGIYIESMKQDVELLQTIPGVSIQIATVILAEIGNDMSVCPSHSHLSSWAGVCPGNNESAGKKKSSRVTHGNKFLKTTLIEAAWAASHSKTNPILAIKHRSIAMRRGAKKANLAIGHKILVAAYHILRDKTPFLPSERNQQILQVRRLKRIERLQKELTALKNTSEQ

SEQ ID NO: 433167 - protein, 341 aa, unidentified
MTIGIDLGDIWSHYCTLNEDGEVVDQGRFRSNPSGVDKRFRDLGPARVAMEAGTHSIWVSEQIRELGHEVIVANVRELRAISHSDRKSDKVDAEKIARYARLDPEILRPIAHRTVAQQETLTLIRARDVLVRLRTAAVNSVRGLAKPCGYRLPASSTLTFPKRCQAVLPPGLATALGPLLHQIADMTVKIKEYDRAIKQLTETEYPETQALIKVYGVGQLTALTYVLTLGSKERFQRSRDVGCYLGLRPRRSQSGDSDPQLGITKAGNGYLRQLLVECANHVIGPHGKDSTLRRWGLSLGARGGSHARRRAVVAVARKLAVLLHRIWITQEVYVPFYEKAA

SEQ ID NO: 433168 - protein, 427 aa, unidentified
MSEKKSLELRVSVDVGYRRHSVAIGLSNGEVLEEFEIVHRPEGFGEFFSRIEKHQRERGCAVAVAMEGYNGYARPLDSLVRQRGYRLYNINSLKLARFKEIFPGAAKKDQIDARKGLELFQLSDHLPLAKEVLQEVTGTPVENEVLKRLTRRRRRLVNERVRVINNLQADLQAVCPGLLEITSEAGNQWFLNFLVSADTLPQLVRLRKPRLLKIPAVGRKYASLILDWQKRAQFSDEVEWVNEMIHEDAQRCLELDDKIKALEAKIKEVARNSRIAKILLSIPGFGTICTSELAGEIGTVERFSKEESLALYLGMSTLDNSSGKYQGTKAPKHVNTRAKAAMMIALDRHRKYIPESQKYYEKKRTEGKAHNQAIRALGRHLCRIIYKMLKEEREYQVRPKKGDTQGRVRSRSCVKTKIRRPKISANS

SEQ ID NO: 433169 - protein, 387 aa, unidentified
MPKHNDLSRCLVTLEQASTLIAVVEMGQSSWLVAGIAPGLDRYPLKKLGPDRDALLQLLHRWRNEAAKVGHAINRIAVAYEAGRDGFWLARWLRSQSIEAYVIHPSSVPVSREHRRAKTDRLDTELLKRAFLGWLRGEPKHCSMAAIPTLEDEDARRPGRERQILVGERTRILNRLKANLARLGVHGFRPNLARAPSQLGALRTPEGVAIPTNTLAEMRRDLDRLRFVKQQIKEIEKTRAERLAKAPDERRHAAARLLTRVVGVGIETADMLVQEVFSREIRDRRALARYAGLTGAPDESGQRRRERGLAKAGNARVRRGMIELAWGHLVHQKGSSLTTWYRRRTVDARGGARKTMIVALARKLLIVLWRFATTGEMPAGLLLRPAA

SEQ ID NO: 433170 - protein, 390 aa, unidentified
MEARTLNHLPPAASHDGAEQRCLLAIELSKKSWIVAVNTPLSNKISRHTLQACDWKGLLELIERIRTRVSQTFSRPVEVISCYEAGYDGFWLHRLLEAHGVRNFVIDPASVQVDRRARRVKTDNIDVGRLLRSLMAYLRGEPKVWSVVRVPSVTEEDDRRLHRERDRLINERVQHVNRIKGLCAVHGIYDYEPLRPNRLARLEQLRAAGKRELPPRVKAEIARELQRLELVLNMIKTIEAERDAIASAGKSSTHANAKKIQNLTRLKSIGPEIGTTLVGEVFYRQFNNRQQLGSYVGLTPSHFQSGPLSRDQGISKAGNPKARTVMIELAWLWLRHQPNSPLSIWFRERVGTAKGRIRRIAIVAVARKLLIALWRYLETGVVPTATVLKV

SEQ ID NO: 433171 - protein, 359 aa, unidentified
MQRNKISFKGQKIYIGIDVHAKTWEVCVLTDSGYKERHPQQASAKTLFDFLKKHFPDGEYHAVYESGFSGFSTYYALKEYGINCVVTHAADVPTTQYEEVMKTDKVDAAKLARSLRSGDIRPIYIREKENIDDRSVIRIRKTIQKQLSGYKARVKHLLHCNGVEIPERFARPGTHWSKAFIKWLKEDVVLLSSSRLSLDLLVKQVETIRQTLLDATKSIRKLAQTDRYRNNYELLISIPGIGVSVAMCILTEIYDVKRFRNENQFASYLGLIPTCHNSGEKTASGEKTFRGNKHLGPMIIEAAWIAIYRDYGLGMAYARYKQSMKPQEAIVKIARKMSNIIFSVLKNSRKYEPYRWDKE

SEQ ID NO: 433172 - protein, 387 aa, unidentified
MTVQSPVAAFIPHQYEIFAGLDVDKHSIAVTFTDHTRLLKSLRLPYSSEQLLNYARKHFPDRRLAFVYEAGPTGFGLYDDLRASGHPCLVVAPSMVPTAPGQRVKTNRLDSRRLSEGLRGGQLRSIHVPSPTYRQLRHLVQLRDTHVRQLTATKCRIKALLLYEGISFPEAPAGGQWSARVLRQLEALPCAEAVRFKVNHLIGTLHFHFLSAAAVQKQIRRFCQNDPELRQVVGLLTSLPGVGWIVAAHLIARLGDWREITSVRQIAAFLGLVSSEHSTGDQENRGAITRSGDSRLRNKLIQSAWTTIGKDPELRAFYRRIYQRHPKKLAARKAIVAVARKLTTRIYAVLKQQRPFVLRPDSSSAPLTPEETAGSRGRLDAAQNEQK

SEQ ID NO: 433173 - protein, 345 aa, unidentified
MKHCGGLDVSVKETAICIVDETGKLVRETKVTTEPEAIVAVLTEAEVEYTRIGLEAGPMSQWLVTGLLEAGLPVVCVETRHMKAVLKAQQVNKSDRNDARGIAQMMRVGLYKPVHVKTLASQHERMLLTSRKLLRDKLQDVENELRGTLRNFGLKVGVVSTGHFEARVRALVVEHSPLEAIVAPLLAVQRVLREQFAVLHKMVLERIRRDRLCRRLMTVPGVGPVVALTFRAAVDQPQRFARSKTVGAHFGLAPRRYQSGDTDYDGRVSKCGDAMMRTALYEAAQVLLTRTQKWSWLKAWGMQVARRRGGKKAIIALARRLAVILHRMWIDGSQFRWRKEVNAAA

SEQ ID NO: 433174 - protein, 370 aa, unidentified
MAQSTPLFVGLDVHKDSIAVAHAQGQSADPPVYVGTIGTRQADLSKLIRRLQAKTPTLVFTCEAGPCGYGLYRDLTDQGFDCRVVAPSLIPKKPGDKIKTDRRDAVELARLLRSSDLTRVYVPTVEDEAIRDLCRARDAARLTLKNAKLRLKAFLLRLGLHYVGRADWNDAHRRYLAKVVCPTPTQQVVFQESVRAVDEQVDRLQRLEAELLERASAWRLYRVVQALQALRGVQWLVAITVVAELGDLTRFDNPRQLAAYVGLIPSEYSSGHARRQGGITKAGNGRARRALVEAAWAYRYPAKVSEHIQRRIDHLPKAMQGIGWKAQVRLCKRFRRFTARGKHPNVAVTAIARELIAFMWAIAKEVPVHA

SEQ ID NO: 433175 - protein, 463 aa, unidentified
MNKVRSAENDTDPALEENGLAVLRRNVAGIDVGSTSHWVCAPTVDGTAREVEQFGATTPELEKLAQWLKQRKVESVAMESTGVYWIPLHEVLERHGLEVVLVNTRELAHVPGRKKSDRIDCKWIQRLHSCGLLRGSFRPAEQVCMLRTLVREKANLAAERADWVRRMQKSLDQMNVRVHRAVSDTEGTTGMAIIQAIVKGERDPMQLAKWRDPACRKSVEEIAEQLSGHWREDHLFSLEQSLKMHAAIEERIQAYQTEIQRRLAEMERADREGQQAPALKNKNKAKKIRQRREEPMRQALYRMSGVDLTAIDGVGVGVVEIVLTEYGSDLSCFPTEKQFVSHMTLAPKKPVSGGKPLKKKKRGSASSRVASALRSAALSLRHSQTALGAYFRHIQHRLGADVAAFATARKVATLIYRLLRWGHAYVDEGAEAYEQRYQAARINRLVSTAADLGYQLVAKPTNS

SEQ ID NO: 433176 - protein, 331 aa, unidentified
MTITTMSSNGERFNRVIAFEVSKADLVVYSVPQGVSSVIPNTKSAIRRYLKKQTRTKPETEVSDLLVVCEATGGYERFVLEAAAELGLACHRAHGSRVRAYARYRGTHAKSDAIDAQLLADYGLYSENLKLYQTPVPNQARLRALLARRTDLRRMAEAEQARLDQASDNDVALSIKALIAACKRLLAGIEAKIVLVMKEDAVLAEKARLLQSVKGIGPITAATLLGYVPELGGLSRGAAAALLGLAPFDRDSGNSKGKRHIFAGRSEARSCLYMAAISAMRYNPKFKEFATRLKQRGKPFKLVAVATMRKLATVVNAILRTAAPKIAQTPA

SEQ ID NO: 433177 - protein, 310 aa, unidentified
MKEGAKVYVGIDIAQEHLDAAVGKAERRFGNDAKGVSRLAGWLRQRGAEVQVICEASGGYERRLVQGLQAEGIAVSLVQASRVRQFARASGWWAKTDQIDARLLSAFGEALQPAPRRAWSPEQEKLCELDRQRRHLGRLLVMEENRAAQLEQKELRRLQQRLIGQIKRELAQVDLFIEKLIAGSAALAAKAEKLTAVSGVGKRTAALLLAQMPELGELNRGQAAALAGVAPFNRDSGKLCGRRAIYGGRRAVRSGLYMAALVAARYNPILREFYQRLRAAGKPPKLALTAVMRKLLLVLNSALKPLPMPA

SEQ ID NO: 433178 - protein, 382 aa, unidentified
MTGTEPHAWGTGLMDDIIFVGLDVHKATVCIAVAEGGRGGDVRQLGVFENRPEILNKVVSRLSKGGRRLSFCYEAGPCGYGLHRLLTGYGHECVVIAPSLIPMKAGDRVKTDRRDALMLAKLHRAGELTAIWIPDAAHEAMRDLVRARATAVRVLAKARQHLQGFLLRHERIYRGARAWTLAYRRWLSTVRFEHPAQQIVLQDYIHAVQEAETRRDRLTQQIEELLPNWSMAPVVAALQSMRGVALVVAVTVVAEVGDFRRFANPRQLMAYLGLVPSEHSSGSSVRRGGITKAGNALARRVLIEGAWTYRMSARVSRKLHDRLEGLPAAVRDIAWKAQLRLCARYRRLAAMGKSKVVVTTAIAREMVGFIWAIARLAQPALV

SEQ ID NO: 433179 - protein, 344 aa, unidentified
MHIASIGIDLGKTTFHLVALGERNKVLVRKKFSRAQLLAYTANLPSSLIGLEACAGAHFMGAALREQGHEVRLIPAQFVKPYRKSNKNDFIDAESIAEAVTKENMRFVQIKTQEQLDMQAMHRVRDRLVQRRTALINEIRGFLLERGITFAAQPIYLRKNLPTVIEDAEQNLSPRLRWLLQRMWQEWKQVEIDIKAMTDEIERISNENALCRRLRQIPGFGPLVSTATVAAIGNGAAFRRGRDFAAWVGVVPRQYSTGGKQKLFGISKRGNVYLRRMLIHGARAVLLRVKYDTEGFGQWVHRLAQHAPRNKVVVAIANKLARIAWAVLSTGKDYQHQPLQITAA

SEQ ID NO: 433180 - protein, 404 aa, unidentified
MYNAVGIDVSKGKSTVAVLQPGGVVIHKPFDVPHTSKDLNQLSEYLSSLDGDTKIVMECTGRYHEPMANALHKAGFFVSVVNPHLIKNFGSNSLRKVKSDPADARKIARYTLDNWTELRQYVDMDNTRTQLKTLNSQFSFFMKQKVAAKANLIALLDNTYPDVNKLFDSPVRDDGSEKWVDYAYSFWHVDCVRKIGLKTFTERYKAFCKKHHYNFQPSKPEELFHASKELVAVFPKEKNYKLLIQQSIKQLNLASEHVEQLRKEMDALASSLPEYTTVMNIYGVGKTYGPQLIAEIGDVSRFTHREALTAFAGVDPGVDESGQRKPKSNRASKVGSGRLRKTLFQIMTTLLQNAPADDPVYRFLDKKRSEGKPYYVYMTAGANKFLRIYYGKVKECLRNLEQNG

SEQ ID NO: 433181 - protein, 312 aa, unidentified
MASPDVFVGIDVSKDRLDVHVRPLGQGFSVSNEAAGHAALIARLRPLRSKRIVLEATGGYERALWLALSEAGLVAAVVNPRQVRAFARAAGRLAKTDRLDAAVIAHFAETFVPRLGKPDPVADRLGEHVLYRRSVQDELVGLEHQLRRLETPALRQRAERRVAALRAEVKEIEREMRAIVDSDPAKKALFACLTAPKGVGLILACTLIANMRELGALSRHQAAALIGVAPLNHDSGVRRGYRAIAGGRRRVRNVLYVATLSAVRCNPTIREFYRRLAAGGKPAKVALVACMRKLLVMLNGRVRDQLAVTVSP

SEQ ID NO: 433182 - protein, 450 aa, unidentified
MAAVMIGVDPHKASHTAVAISVAEEPLGELRVRACAAQAERLLAWAAAWPQRIWAVEGAGGLGHLLARQLLAAGERVLDVPPKLGARVRLLAAGDTNKNDPDDARSVAVAALRSAGVREVRPDDHAAVLKIWSKRYRDLGRTRTQVVCRLHAVLCDLVPGGVSRPIYAARAARILEQITPPDAVAAARCELAAAFLEDLRRIDAQIRETRKKLAAVVAATGTSLTGLFGVGPVIAAAVIGDVRDVSRFPGRNHFAAYDGTAPIEVSSGPRKIYRLSRRGNRRLNHAIHMAAVTQVSHRHSDGRAYYDKKLAEGKTRKEALRSLKRQVSNAIFACLQAGARRAAAHAKGPGGQQGNDSAACAAGSHPRHRLFGQATPGPGAHPTTPAASPAPGPASARGRAGHSSIAATLPSATPQVQVERLSTEPEYWIWIWPVFRDGNEPPRGLIPGNP

SEQ ID NO: 433183 - protein, 309 aa, unidentified
MSEYIAFDSHKRYTWVDREDHSTGNSTCHRLEHAPGAVRKYLNGCEPGTAVAVEATGNWYWIIEEIEQAGLQPRLVHPRKAKLMMGQINKTDKLDAQGLNRLQRNGTLPTVWIPPRPLRDLRELTRTRLVLVAQRTRLKNRLSATLAKWGTPASEYSDPYGKRGRAELENHLQRLPEQTRWVSGQLLAQLDFVSAQVRQLEQRLDELVEITPEMQWLLTMPGVGVILAATIALEIGEVQRFPSAMHLASYAGTTPRVHASGGKVRYGSLRADVNRYLKWAFAEAANSVAVRQKQMYQDPALGRGRTSQA

SEQ ID NO: 433184 - protein, 422 aa, unidentified
MSEQEAIAYSVYVGIDWADSKHDVCIQSKSSDEREFAVIRHRPEAIDTWVKGLYRQYGGPIAIAVELSKGPIVSALQNYDFIDIFPINPATLAKYREAFQPSRAKDDPTDAELAVDILLRHPKHFKVLKPQSAKMRALTTMVEQRRCLVSERTRITNRLRSALKQYYPQVLEWFEHIDTPLFCAFVKRWPTLTQAKRARGNTLRRFFHEHHMYREGIVESRRQAINEASPLTLDDAVIVPYRMQMLVLIEQLELMFKAINQFDDEIAKLAFQHPDYALFQSLPGAGPSLAPRLMVAFGEQRERFSSAADIQKLSGIAPVTERSGQKHWVHWRLQCPTFMRQTFVEWAGQTINKSYWASLYYRQQRDKGATYQAAVRSLAFKWIRILYRCWQTGVAYDESRYLKVLERRGSPLVKRQEMLKST

SEQ ID NO: 433185 - protein, 419 aa, unidentified
MSKNMLCGCDVSLENNTVWLMLDDGSQPAKLFNADNNQLGAETLVERIYSIAKEHCVSDILIGTEATSMYDWHLLEYLAESKLALEFNLKLYRFNAKWIKNFKKSLAPKGKTDPIDSFAIAERLRMGRLPKEYIPDTKYQPLRKLTRFRFHLMQQIAREKNFFLANLFLKASAYSRVSPFGSTFSATSLSVINDFFSVDELAAMSVEELTEFILEKGKSHFSKPTEIVDNLKRVARESYRLKPELAPTVNLILASTFNNIRCYKDQVKFVDSAIAENLKAFKHTLDSISGIGPVYAAGILAEIGDVHRFQNDSSLAQFTGLTWPKHQSGKFQAEETRMSHTGNQYLRYYLVEAANSVKRCDATYKAFYEKKYAEANKHHHKRALVLTARKLVRLIWTLLTRGVLYQPGYCSFEDLSKIG

SEQ ID NO: 433186 - protein, 412 aa, unidentified
MELLHRRCCGLDVHKETVVACLRLVSDGKVTTEVRTFQTTTADLLRLSEWLAVNECTHVAMEATGVYWKPVWHILDDGEFELVLANAAHVKNVPGRKTDVNDAMWLAELLAHGLIRASFVPDSQTQEMRNLLRTRKQLVREQSRHLQRVQKTLEDANIKLDSVLSDVMGKSGRAMIEALIAGETNPAKLASLADRRVKASPEELREALRGRVTKHHRFLLRLHLNQIDALDAAMATLDAQVEANLGPFRTAVDLIMSIPGIKNLGAQAIASEIGIDMSRFPSDAHLISWAGICPRNDESAGKRRSNRLRKGAPWLKTTLVQCAWAAVKKKNSYLQAQFYRIKARRGPNKAIMAVAASILTAIYHMLKNGTMYQDLGRDHFDRRSKDQQKNSLLKRLADLGYAVEIKPVAAMA

SEQ ID NO: 433187 - protein, 410 aa, unidentified
MEVLYQRCCGLDVHKETVVACLRAMSGSEVVREVRTFETTTASLMALSEWLAENGCTHVAMEATGVYWKPVWHILDDGDFQLILANAAHVKNVPGRKTDVNDATWLADLLAHGLIRASFVPDTQTQELRTLLRTRKQLVREKSSHILRVQKTLEDANIKLDSVITDVMGMSGRAMIEALIAGESNPAKLARLANYRLRASQEKLREALRGRVTKHHRFLLRLHLNQIDALDASIVMIDEQVEAGIAPFRAAVGQVMTIPGIRDIGAQVIVSEIGTDMSRFPSEGHLISWAGLCPRNDESAGKRRSNRLRKGAPWLKTTLVQCAWAAVRKKGSYLQAQFLRLKARRGPKKAIMAVAASILTAIYHMLKDGTLYQDLGSNHFQNRSKGQQTKRLAKRLADLGYKVALTPLAG

SEQ ID NO: 433188 - protein, 440 aa, unidentified
METTARPEMVLAIDFSLDRLDVALRGPAPPWIWGHRAYANNWTGYQQLKQDLLAELQRVSPVQFTAVGESTGPYWWHAFYQFSHDAELAPFDPQLALLNPAHVKGYRKALAEQDKTDPDDARLIEHYYRSVGVEHPYQFADRYLRLRTFSRAYARVLHTLAAEKAYFVSVLYLWGSEYQRRAVRPFSDLLGVTSQFILDEYADIQQLSAIPEAELAALLEQHSHHTLRQPQETAQKLHQVAQHSYPLPAPLGQALHQVLHLTLELLRVLSDNQNAYRQLLEAELALLPEAQRALAFKGLGPVLVAGCLAEIQDTTRFTTGTKFDRRTQTDRPRTYRDGQAAVAKLAGLWWPKQDSGHAQGIQPHLARERNPYLRFWLVQAAYTLQRYQPEYQQFYWQKYREAHDHHHRRALILTARKATRLIFALLHKGRLACLEEGTLT

SEQ ID NO: 433189 - protein, 356 aa, unidentified
MKVTTFGLDLAKSVFQLHWVDTATGEVCRRRLRREQVLPFFANREPAVVAMEACGSAHYWGRQVRALGHEVKLIAAQFVRPFVPTNKTDAADARAIWEAVQRPQMRFVALKDEGQQSVLALHRMREQLVKARTMQSNQLRGLLYEFGVVLPVGRERALAELPDKLEQLASRLPAMLLTMLERQQARLAELTKDIVAIELRLKGWAKTNAPSRRLQDIPGVGLLTATAAVAMIGEAKHFRSGREFAACLGLVPRQSGTGGRVKLLGISKRGDVYLRTLLIHGARAVLNRRREPEPWLQKLLARRPPNVVAVALANKMARRIWALLAHGRTYEPGYVSTRPVRGTTRPPGTLTRGYRA

SEQ ID NO: 433190 - protein, 339 aa, unidentified
MNRTVVGVDIAKRVFQLHWVELASGEIVSVQLKRAKFLEHFANRLPCLIGMEACGGSQHWARELHKLGHEVKLLSARMVKAFVSGNKNDAADARAIWTAVQQPGIKAVAVKSEGQQAVLALHRMRAQLVKFRTAQVNGLRGLLAEYGEVLPQGRAGIRRDVPGALERVAERLPAMVIETLREQYARVGELDEQVQRIERRLQQWHRQDEASRRLAEIPGVGVLGATAALATIGDAQVFRSGREFAAWLGLVPRQSGTGGRVRLLGISKRGDPYLRTVLIHGARAVMTHSKAPPEWARQVAERRPKNVAIVALANKMARTIWALLAHQREYEPLYASRPA

SEQ ID NO: 433191 - protein, 360 aa, unidentified
MIIIGCDFHPEFQQVAMVDTESGEYRQARLQQQEQARAFYAALVGKPVRVGFEACGYTQWLEPLLSAMGHQWRRGDAAQIRACMTRRQKTDQRDADPILTLLLENRFPAIWVPSPAERDVRQLLMHRHKAVQRRPRVKNQLQALAIHQGLRLRHQMWTQSGQKRLQALELLPYAAQRRQELLALLGTMERVLAPLAAAVARQAAARPAAVRLMTHPGVGPVTALAFVLTSGDVTRLPRARPVASYLGLIPCRGQFGGKQRLGRLSKQGNALLRFLRVEAAHHARRGDAELRRCYSRLLHRPASGVAKVAIARKLAVRLYWMLRCDLEYAQLKVVRMPASPSHPVVARKIDRLSGPLASRS

SEQ ID NO: 433192 - protein, 349 aa, unidentified
MVGSAIDEFSGEVLTRRVGPRTEQIVEWVRSHPGPVMACYEAGPTGFGLARALAAAGICCEVVAPSKLERPAGDKVKTDRRDAERLARLLRIGELPGVRVPTEAEEAARDLVRAREDVRTDLMRARHRLSKLLLRQGLVWEATAWTGAHEQWLRGLRFDRRGVALAFDEALDAVFTVGARRDRLDAAIVEMAELEPLAGPVGRLGCLRGVSTLTAVGLCVEVADWHRFTGATIGAYLGLVPSEASSGARRVQGGITKTGNTHARRLLVEAAWHHRRPLRTSRERARRANGQPAVVRDRAEAGNRRLHQRWTRLDRRQKRPTISAVAIARELAGWCWSLAVLDGPTGLAG

SEQ ID NO: 433193 - protein, 309 aa, unidentified
MKEELVYLGVDIAKSYLDGAIGGEKRRFSNDTIGHRELIKWVKQLSAAVQVICESSGGYERGLVRALVDARVKISLVQANRVRQFARAAGILAKTDCIDAQVLCEFGKVMRPPMVTAATLEQEHLRELESQRRHLTHLLVMEQNRGARVSDVCVRRLNRSLINQIKKQIEQLDLLIKNHIERSKELSAKAAKLTAISGVGARTAALLLAQMPELGELNRRQVAALVGVAPFNRDSGKMRGKRAIYGGRRRVRHGLYMAALVAARHNPILRNFYQRLRATGKPAKLALTATMRKLLIVLNSALKPDLIYA

SEQ ID NO: 433194 - protein, 397 aa, unidentified
MAGVAVGVDVAKEFHWAQAIDTTTEEVLLSRRVENDPTSVAALIVELEDLEAAHGQLRVGIDVLGGIAALLSAMVLEAGIELVHVSGLAVNRARQGTAGGENKSDPRDAAVIADLTRRRDLRAVEAEAELDAEIRLLVGRRRELVVDQTRRIARLRDLLASIHPGLEAVVDPTQKGSQRLLMRYVAPAEIRRAGRRRLIDHIAKAGRLPRAHVEQLADRALAAAKAQTVALPAEGVAAGLVRELAGEAWAARERITALDAEIEVALTRHPDAALIRSLPGMGATLTAEFIAEAGGVERFPTADRLAAAAGLAPVLKQSGKVRYLQRANGGNKALKRVFFQSAFCSLGHPASRAFYSRKRSEGKRHHQAVIALARRRVDVLHAMLRNRTPYEFRVAAA

SEQ ID NO: 433195 - protein, 419 aa, unidentified
MTDPPLQSWSRFIAIDIHKHYLMIGGIDAHKRVVLQPRRVELSRWPQWAKANLLPSDAVVIEATTNAWAIYDLLVTLVGRAVVAHPAKVKLIADARVKTDKVDVLTLAHLLRADMLPEVWVPPPHVRDLRALLSHRRRLVSLQTTAKNRLQSVLHRLNLRPPEGEVFAQKQRAWWEALDLSPTERLCVDQDIATLDHIGPQIAAIDAELRRLSVSEHWAEQVPYLVQLPAIALLSAMTILSAIGDITRFGAAKKLVGYAGLGAGVHDSGKTHRDKGITKQGRRDLRYVLIEAARVAVQTHPYWKREFARLAKRIGEHKAVVALARKLLIVIWHVLMAKSADRRADAEQVAFKLMVWSWKLTDKQRGGLSSRQFIRAHLLGLGLGEDLTHITRGGTKRPLATIEEVLALRPELRDPPNTV

SEQ ID NO: 433196 - protein, 436 aa, unidentified
MRVWLFQQNGKEDIILKRADTRKVRSVGDDTLIVTIDVGMEMNRGYCTTPDGRNTKPFKFDNTREGLDTLWGMVMASKNRFKCNEVIVGYESTGPYGEPLVHYLIKKPVKIVQVNPMHTKRVKELNDNSPLKTDDKDPRVIADIIKLGHALSIVIPEGDAAYLRRLNNSRERHVRERTALVNQLQQLVFLLFPEFKKVIKDIKCRTPLYLLKKYPTPEAISVLETHVLGEEMRKQSRGKFREHHADMLINLAKDTIGIREGVSGLSMDIRHILVQLEMLKNLIAEIESEMEIALGRISYSSKLLSIKGLGVVSVAGIIGEIGDFKKFKTQPEIMKLAGLDLYEISSGKMKGQRRISKRGRSLLRKILYYAAIQTIRKNGILHDYYTRLTDRGMKRMMALIAVSRKLLGIIYAIVRDDSEYSVNFESMKRQVIKKAA

SEQ ID NO: 433197 - protein, 356 aa, unidentified
MQEVKQNSFKGQTFFVGIDVHLKNWEVTIRNNHMVLRTFSMNPSPHELARHLKRNYPGGIYHSVYEAGFCGYWIHRDLENLGIHNIVIHPADVPTSEKEKQNKTDRIDSRKLARELENLTLESIYIPNEAHQHLRALRRLRDRQVQNMTRVKNRIKSHLYMNGIDIPSHTEMSHWSGRFIQWLESLEFSTSAGSDYLRICIEELRACRARIAEIVRLLRSYCKELGITDLIGHLRSIPGIGFITAITFYTEMMDIYRFRTLDHMCSFVGLVPSVHSSGDHEWHGRLTNRKNSYLRHMLIEASWIAIRKDSALLLAFTELTKRMSKQRAIIRIARKLLNRIRYVWLNQESYVYAVVE

SEQ ID NO: 433198 - protein, 445 aa, unidentified
MSELIPAAEPDFAAFIGIDWADREHAWALELSGGSRREKGTLEQRPEAIEEWAQQLAARFPGRPVAVALEQSRGALLYALCKYPHLVLYPVHPYTSHSYRKAIFPSGSKDDPRDAGALLDLLLWHRSQLRPLRQQEAAIRKVQILVEKRRDLVDLRTAQTNRIAAELKLCFPQVLDWFDQLNSPMVVDFLLRWPTLEQLRKEPRDMLRTFFVQHGSRSSARIDARLEQIDTAQPLLNDSAILDSCCVLIQSLLPVVAALNQAIRRLEDALEQTASAHPDFSIFRSFPGAGPALAPRLLAAFGSDRDRYRSAAELQAFSGTAPVIESSGSSRWIHFRRSCPKFLRQTFHEFAAQSIPHCQWAAEFYQRHKAKGKRHHAIIRSLAFKWIRILFRCWQSKSNYQDSLYHAAPALPTPLSSNAPSAGRNPVNNSLQKLADLLKTLPAIS

SEQ ID NO: 433199 - protein, 392 aa, unidentified
MSQHFRFDASRSLTALEQDSTIVAVIEMSQTKWLVAALVPGVERQPLKKFDAQEEMLLKLLHRWRREAGQAGRNIERIVVAFEAGRDGFWLARWLRARDVEAYVIHPTSIAVSREHRRAKTDRLDTELLMRVFLGWLRGEKRHCSMVAIPTIEEEDARRPNRERQNLVTEQTRIINQIKAIFARFGLRTLRPTMRKLAEGLEDLRTAEGTPLPQNTLSELRRHLARLRFVRDQIRAVEQERLRKLAVAPAAETKSPDAMVRLIARVFGAGIETADMLVNEIFSRHWRDRKAVARYAGLTGSPDESGSRRRERGLARAGNVRVRCGMIQLAWRFVRFQKNSALAQWFAARTADGRASTRKTMIVALARKLLIALWRLVTRGEVPQGIVLRPAS

SEQ ID NO: 433200 - protein, 418 aa, unidentified
MKVVYPICCGVDVHKTFLVATIIISQGITPHYSKKRFSTFNNSILQFKQWLIDNNCFDVCMESTGKYWVPLFNLLEDTIHVTVANPKWVQAVKGNKDDTKDSKWIGDLFRLGLVPGSYIPSKPIRILREYTRYRFKLVCCKSSEKNRFQNAFTVCNVALDSVVSDMFGKSASSITDYLLSSDSFDPVHCSSLLHKSLKKKADTVIESIKGYQMTREQKDRIIMVRSHLDFIQQSIAALDEKLDKMVVPYESAIKLLCTIPGVERISAITIISEIGTDMSQFACSKRLCCWAGLTPGNNESAGKKKSVRITRAGVYLKPALVQVAHAAVKSEKAPYYKIKYERISKRRGKKRAIIAIARMILTAVYNMFVTGEEWNPSDLYKIDMPQEILEKQKEKAIKQAIKLLVSNGVIKTRDISLA

SEQ ID NO: 433201 - protein, 430 aa, unidentified
MNCTQNKKIEQVKETTMIVGIDVGSEKHYFRAFNWRGIELTRKPVAFSNSMEGFNSFYNTIVELMQKSELEEALVGIEPTGHYWFDLGQFMGEKDIKFVMVNPHHVHKTKELDDNSPSKNDRKDPRVIAGLVRDGRYFYSYMPTGAYAELRNASNRRFVLVEEQTRAKNRLQKWIAVYFPEYKGIYTHIDAKGGMLVLKKAPTPEEIVRLGVEGIIKIWKDAKLRGNGHKKAMLILAAAMRSIGLKAGLTEARMEIQDLIEEDYELQTKRLERVNDLIKGLCQQVRYADKLLEIKGIGITTVAGFIAEVGDITRFDSTKELQKLAGLELVADSSGKHNGKTKISKRGRKRLRYLLFEAAISVVGKNEEFKEIHRYYTTREKNPLKKMQSLIVVACKLIRVFHAILTKGIRYDASKMLKDIRHPGEQLKAA

SEQ ID NO: 433202 - protein, 355 aa, unidentified
MKNQAIQYLALDVHQATVVASVRNEQGVVVMRATVRTEAGAILGLVRGLGRRVHVAFEEGTQAQWLHDLLEPHAERVVVCNMRGKSEMANKSDRLDADELSARLRAGTLKSVYHGGTSVLTLKELVRNYNDLVEDATRVMLRIKALFRARAIATPGTAVYRPAQRKEWLARLSSPGARARAGSLLAQLDLLLELRPKAKAAMIAEARRQSGWKTLRSMPFLGVVRVSQLLAIIITPHRFRTKRNLWPYAGLAVITRTSAEADFRDGRLRRRARSPQTRGLNRNHNPLLKSIFKGAATAASAKPGPLKDIYDACVARGTKPELARVTLARKIAAIVLRLWKKGELWDPTKLTMQTT

SEQ ID NO: 433203 - protein, 338 aa, unidentified
MEAYAGIDLHSSNSYIGIIDEHDRRHFSKRLPNSLTQILVALEPFKKDLKAIVVESTYNWYWLVDGLQEEGYKVHLANPSAIKQYEGLKHTDDKSDSFWLAHLKRLNILPEGYIYPKEERPIRDILRRRLLFVGQRTAQILSLQSSIARNLSLKMSGRAIKKLKGEDTEELFDSPFLVLAAKSNIAVIQSLTKTIKAIENAVKSQAKLRKEFQLLKTIPGIGDILTLTIMLEVGDINRFSKVGNYSSYCRCVKSARFSDGKKKGENNRKNGNRYLSWAYVEAANFAIRFSPEAQKFYQRKMAKTNKIVAIKALSNKLARASYYIMRDQVAYDKSKLFG

SEQ ID NO: 433204 - protein, 528 aa, unidentified
MISKHRPKKSKSRSAAFLQKPHGVIHPRVQKVGPEHFGIVSVDCAKARSKWLLADFYGKVLIPPTEVAHNRVELEAAVTQVRAALSRFGLLDCLVAIERTGRYHHPVKNTFAKAGFETRLVHPFATKQFRQPADPGNKTDDNDLKAIHCAAVNGFALLENAPSESWRELQLCIRHRRDLVRKCSALACQIREHLDAALPGYAACFDKLWDSNVAFRLVRQFGSAQALLEHGVTGMAQFLRQHKIRFQERTLQTIRVWAQSAAAPDLAAELHRQIALAYEGDRQLKNQEIIALERDIAHRLAQTPFILLMSFPGINVVSAADFAGEMGPISNYANARAITGRAGLFPSRHQSDRVDRPNGPLVRRANRALRAAILGIADNLMLCNSHFRTLAAHWKAAGKDPRHSHVKVAARFCRIAFHMVAGQQVYHHPSQKERNYILDKLLAFHNEHDTPWEPTLRDLHLALEQLPAKEHQAEAEPLLDKQRAAQKRSNRTAGKTGPQPIGELLAIVLARLGVGALPSIPSGVKDPT

SEQ ID NO: 433205 - protein, 427 aa, unidentified
MNEVMAGMDLHRNNVVCGLVDQDGRRVVEKRLPCELETIVQWLEPYRTRLRRIAIESTYNWYWLVDGLQEADFDVVLANPARIEQYSGLKHADDSSDAFFLAELLRLNILPTGHIYERQLRPVRDLLRRRLLLVRQAAALKLSFKSLYARTTGQTLSLSRLQRLTPAEVPGLFAHGAEQLIAQEQLRLIGELGQSIAQIELAVGREVKDWASYRWVQTIPGVGKILGLTIALETGPITRFASAGDYASYCRCVRSQRVSNGKVKGANNGKNGNRYLAWAWVEAAQFARRYYGPCRRFFDRKAGEVNGALASKALACKLAKAGWHVMREGVPFDWSRAFPGGVPGGEPERQVRAAGAPRTPPPPHRPAREKDPTSLTPLGSVSSRVSPGREDSRTAAPSAKTRSKTQAKGAKPPVSTESRTKIMKKRT

SEQ ID NO: 433206 - protein, 433 aa, unidentified
MSKSKSQSVVQTDDDALYYERCAGIDVHKKLLVVCLRIGRKCESRDFGTTTGEIRGMTAWLKDNGCQMVAMESTGSLWKPLYNIFEQAQLPAMVCNAYHIKNVPGRKTDWNDAFWIAKCLSQGLLKPSFVPDREQRELRDMTRFRKSQIEERARNINRLQKFLEGSNVKLGSWLSDVEGKSATALLELVIGKPDFTLADVKSRMHGRMKSSPEMLFASLESCITPTQRMFLTHVMDVIRQQTAQIEKTDAMIRESLSEDQKLAVNALDEIPGIGLISAEQIIAETGTDMSNFRNQHAFSNWTGTAPGNNESAGKRKSGRTNPGNKTLKSTLAQCAKSATNNKRSFFSAQYSRLVSHRGKNRATMAVAHSLAIAIFFVLSGKEFKDLGADYYTQFNREKKINSHVKQLSKLGVTIPGDLLQLPIQHPPESLVSA

SEQ ID NO: 433207 - protein, 442 aa, unidentified
MPEQVVTTHVVGIDIGMESCTMACLTRDKRQIIKSTPFANAVQGFDWLFERLEGLGVVPKQILVGLEATSRDGENLVQALLKRGYQVCLFHPAQMHAFAQQRGLRAKTDQLDAVTIARALLSGEARFGYVPNEQVATYRELMRLQHQLSDDVVRYKNEIHALLAVLKRYPSAQAIAQTEVETLSTFLHELAPRHYGRPTAQELVRLAKASISSGVAVAARSSSLRILCDQLEHTQTNLEQLQREIDQLLDQDPKAKGMLSVPEFGPTTVAVLRAELGDLTRFTRIDQVVAYVGLDLQVKQSGKWKGQTKLSKHGSGRVRRILYLAALRSIHLETSPFGAYYQRLVARGMKKGMAVVAVMRKMLIVAVHLIQTEESYDPGKVAVQAAEPLDDVQRPGETLCAEEASQSFHCTCVGNSLDEGDLTNSMASTQVSYRLANGEETN

SEQ ID NO: 433208 - protein, 338 aa, unidentified
MKVYVGMDLHATNTYVGMVDEENTVLHKQRFRNELPLILASLDPFKKDIEGVVVESTFNWYWLVDGLMDKGYRVHLANVSAIKQYEGLKQIDDQRSAFWLANLLRLGILPTGYIYPKEERPTRDLLRKRLQLVRHRTSHILSVKNILARNLGLRMKSEEVKKLEAPEVKRFFPDKEMQTAVLASLGLIRHLEEEITGIEMMILKKMKIKKEFTRLITVPGIGKILALTIMLEVGNIRRFPTVGDYSSYCRCVKSIRTSAGKVIGYGNRKNGNKYLSWAYVEAAQFARRFHETVRNYYEKKMARTNRIVAIKALSHKLTRASYYVMRDQVGYDPARLFR

SEQ ID NO: 433209 - protein, 353 aa, unidentified
MEYASRVDFTGQPIYIGMDVHKKSWTVSIFLEHLEHKTFTQPPMVAPLVSYLHRHFPGACYRAVYEAGYCGFWIHDQLVENGIVCMVTNPADVPTRDKERRRKGDRSDSRKLARTLRSGQLEGIHVPTRARVEDRGLVRTRQAMVRKQTRCKNQIKSLLFLYGLAVPDAGSSWSRNFIRSLEALRFERDSGNLALKAYLAELMQLRQIIAQLNRDLRALSRTDEYREGVQLLKSVPGISTLSAMVFLTELGELSRFASFDKLCGYVGLTPDTHGSGEKQGIGDITRRCNQMLRSLLIECSWTALRKDPALALAYHCYCQRTRKTKAVVKIARKLLNRIRFVLNHRHPYVLKVA

SEQ ID NO: 433210 - protein, 378 aa, unidentified
MKKGRSNNGKVAASSNTKTKPSKERPMKPPKYIGMDVHKATTVVAVLNSVGKVVEEAIIETNGSRILDFLTSQRGTLHVAFEEGTQAAWLYDLIHPRVASVIVCDPRKISRQGNKADRVDARLLAELLRTGGLKPIYHGEKSTRAVKELALSYIAMVADGTRIKNRLKAIFRGRGIACNGAGVYSPDERKDWLAKLDNAAVRARAATQWEELDLVERLKEEVAEDLVAEARKHADTRILKTVPGFGPIRAAVTLGVAGTPHRFRTRKQFWGYCGLAVVTSTSGEYEIVDGRVYKTKKRPLVRGLNYNYNRAMKAVFKGAAKTVTDGVWKSRFEAMMAEGVTESLARLTLARKIASIALAVWKKGERYDPKRMKSLHAA

SEQ ID NO: 433211 - protein, 420 aa, unidentified
MYVAIQRKGGSRMDVFHERCAGLDVHKEVIYVCALIGRGSGYQKFKLKFGTFHHQLVEMRQKLLELGVTHVLMESTGVYWMPVYDALEGFVEIVVGNAQHIMNVPGRKTDESDAEWLAKLLRCGLVKPSFVPAREFRELRQVTRYRRAVVQARASEQNRVEKHLQIAGVKLSSVASKVFGVSGTDMLNHIAQGTTEPEELAGLARGRLRKKMPLLMNAFAGSISEHTQNLIALQMEQMNRLECTIAEAELKIEEKVKPYAEILARLDTMPGINLCSATDILAEIGTDMSAWKTHRQIAAMAGLCPGNYISAGKRLKNRSRQGNPYLKSILVQAACSAVNMNGSYYQAKYKRLKQRRGHKRAIVAIAHAMLVAIYHMLKKGESYQELGEKFVSDQDHGRKKDDLVKQLQKLGYAVSLTQSA

SEQ ID NO: 433212 - protein, 371 aa, unidentified
MKKNSNCSQSPKRGKKAQRGRMTIGIDLGDKTSRYCLLNEQGEVLAESGVATTKQALGRVFGARQRCRVALEVGTHSPWVSRLLERLGHEVIVANAREVRSISHSSRKDDRRDARMLARLARADPQLLRPIRHRGEQAQGHLLRIRVRATLVEVRAKLVNTARGLTKAWGERLPACDTDTMGVRRLEGLPAPLRVALEPLLREVESLTEKIKACDVELEQIARKEYPETELLRQVSGVGALIALTFVLTLEDANRFARSREVGCYVGLRPRRKDSGERRPQLGITKEGDRYLRKMLVQGAHYILGWRGPDTDLRRWGLKLAERGGPNAKKKAIVGVARKLAVLLHRLWVTGEVYEPLRNNTPGPRRKALAA

SEQ ID NO: 433213 - protein, 428 aa, unidentified
MAYAIAGIDVHKRMLAVVVSDLAADGEDAFERRQFGSTPAQLRLLADWLSEHPVNEVVMESTAQYWKPVWAALERHWTPRARARAGAGPMAGTLHLAHARSNRARRGRKRDFTDAERLVKRLVAQELTLSFVPAPEQRLWRTVTRTKVQLTRNRVQLQNRLEALLEQAHLKLSSLVSDLLGVSARRMLQALADGATDPGALAALADHRLRATPEQLRDALEACQELSPVYRRLLKMVLEELQLLDSQISRLDQEMAELLCPYQDQVQRLAEVPGLGVDSAQQILAEVGPTAATFPSAGQLASWVGACPGEHESAEVNYSHRSPKGNRQMRRLLNQAANAAVKSKGTIFEILYRRYVPRLGHPQTIGVIAHRLCRLIWKILHQGVRYEERGPALSQQSKRHRTARMIRALRSFGYRVELASAQSTVVPA

SEQ ID NO: 433214 - protein, 374 aa, unidentified
MTKLRFIGLDVHADTIAVAVAEPDGDVRSLGAIPNRAESVRKLMKRLGPAESLRACYEAGPTGYVLYWQLTGLGIRCEVVAPTLVPVKPGDRVKTDRRDATKLARCYRAGDLTAVWVPDAAHEALRDLVRAREAAKKDQLRARHRLQKFFLRQGRRPVTKMTAWSSRHLAWVRQVTFEQPAHEATRLDYLHEVDHAADRIVRLERAIDTAVQAAPPTMRAVIDALQAMRGIARISAATIVAEVGTLSRFARAPQFMGYCGMGPREASSGASIRRFGITKTGNAHLRRIAIEAAWAYRHRPTIGSPLRKRQALLNPSILAVAWKAQLRLHQRYRHLLGRGKSSPHVTTAVGRELLGFIWAIGSAVERDHQHAHAA

SEQ ID NO: 433215 - protein, 346 aa, unidentified
MLHVGLDLSRTRVDVHVMDEMGAPVLVTTAAPDSGGLASLVARVGEFGQPVTAAIESMTGARFVHDQLELRGWEVEIADAVKVKGLAPLAAKTDRIDAWVLAELSRRDLVPAIWLPDPAVRAERERARWRLHLVRHRTALKNRIHATLLAFGHPCPVADLFGAAGRRLLAGLELPEPWAGDVAAALRLIDSLDAEIDGCEAALRTAGADHPYVPLLTTVPGIGPVLGYTIAAEIGDIARFPTAKKLVGYTGLCPIVRQSGRKDHRDSLAKNGPKYLRWALIEAATHAARHPAYAERYQRTKIRLGRQRGARIARVDLARRLAEAIWYVLTTSQPFAPAGAAKPLAA

SEQ ID NO: 433216 - protein, 354 aa, unidentified
MKKFFIGVDVSKDTVDVSFFDDDRMKSPEYLAQYSNSPKGFREMVKDLRMCCHGVSSGQWLFCCETTGRYDHPLCHWLVDHGMVVWRESALQIKWSSGIQRGKNDRVDSLRIAEYAWRHQDKMQKFVKPSESLSNLKAAFTHRRRLVEKRTATRCQLKSMSSEKGLSASVARMIVRDLSREIERLSASITTMDESIQKIIRSDSELDRNYRHIISVKGVGPITAVALIVCSGNFKAITSAKKMACYCGVASFRSQSGTSINRKASVSNLSNRQIKSLLSMAARSASRSNPVFAEYFNRTLSRGKPVALVYNNLRNKIITVVYKLIERDCDFDVDYMRMHSTGQRANEPAIREAV

SEQ ID NO: 433217 - protein, 427 aa, unidentified
MNYTQNEKIMSIRETTLVIGIDIAKQFQYARAFDYRGIELSKVKPFENTTEGFRIFKEWIESVAKENQKNNIIVGLEPTGHYWFTLGNFLKSLGIKLVLVNPFHVKRSKELDDNSQTKNDLKDPKTIAKLVIDGRYSEPYIPQGIYSDLRIAMGMRESLSKNIIIVKNKVDHWLDKYFPEFNDVFANWEGKAALISLAEFSTPEKVLSTGVQQIVAIWKKEVKRAVGIKRAVRLVEAAKISIGIKEGLKMAKKELEANLEQYELYQKQNEQLDIEIEELAFQVPGVKEMLSINGVGMITAAGFIAEVGDIKRFSHPSQIQKLAGLNLIENSSGKHKGRTSISKRGRSKLRALLFRVIMPLVSKNNEFKMLHEYYTNRKENPLKKKQSLILLCCKLIRIFFTIITKQVEYNPQKLIKDTGFILLSKVA

SEQ ID NO: 433218 - protein, 411 aa, unidentified
MELLHPRCAGLDVAKDEVVACVRTPDGHGGRHQEVRTFLTFTSGLEALAEWLAGEEVTQVVMEATGQYWKPVWYVLEEAGFQLLLVNARHVKILPGRKTDVCDAAWLAELLEHGLLRGSFVPPAPIRELRDLTRYRKRLIQAHASEGQRIQKTLEDAGIKLDSVAADVLGASGRAMLAALVAGERDPGVLAELAKGRLRAKLPQLRQALRGRFGEHHALLVRLALAHLEQLEASIAELDTHVDRVLAPFAAARDRLDTITGVGKRAAECMIAEIGVDMTVFPTASHLASWAGRCPGNNRTGGKRRSGKPTKGNRWLGEVLIECAWAAARSRDSYLSAQYWRLARRIGKKKAAVAVGHSILVIAWHLLTNDCDYQDLGGDYFVRRDTDRQRQRAVAQLQALGYHVVLEPVAA

SEQ ID NO: 433219 - protein, 346 aa, unidentified
MVTLGGDCHKRTHTLVAVDDNGRELGSKTVLAVAVGHLEALRWASQWVERRWALENCRHLSRRLEADLLLAGEMVVQVSPKLMAGIRRSAREWGKSDPIDALAVARAALRESELPVAQLEGTSREVKLLLDHRDDLVGERTRVQNRLRWHLHELQPDLDVPARSLDRKVVLNRIAKALSVHHGVAAEIAGELLGRVRELTARINELERQIRAMVTQLAPNLLQLDGCAALGAAKLIGETASICRFRTPAQYAMHNGSAPIPVWSGSHERHRLNRGGNRQLNAALHRIAITQMRVGGRGHDYVQRRRTSGDTKKEAIRALRRRISDEVFRRMWQDYLAATEHQSAAA

SEQ ID NO: 433220 - protein, 319 aa, unidentified
MQSKLTFGMDIGKNEVVVACHEGAFAILKMANAVAGLRRWLGSVPAGSRLGLEATGGYHEPVAELAYSLGFTVYILNPKDVHFYARALGARGKTDRLDAQIIAAYVAEHSVRLHPFVPLSADEKLLRELARRRATLVNAKSMLQQSLRVLPGFEREGRELLRAMGSFADRLERKLAQIAARSSERATLVKRLQTIDGVGTLTSIRCATLFTRVPLHSSDAAVAFFGLDPRPNDSGQHRGRRRLSKRGPSEDRRLLYNAAMSAIRTPAWRPLYLHLRNRGLASTEAIIIIARRIVRIAFAMYQNHSNFNPRLVPRPYCPA

SEQ ID NO: 433221 - protein, 313 aa, unidentified
MDQNNYEIVWGIDVSKSWLDISIDGKVTRIDQTKNAINLFIKNNNKENKKILAIVESTGGYERLVANCLTSKNLLVHVAHPNKVRSYAKARGRMAKTDKLDATILEGYGKFIDPTSIHERPSQSNQNLSALSSRLEQLKKIHHQECCRLGLTTDKLIKRSHQKILALLKKEIQKIEDEVMRLIQLDSPLKERYKLLQSMKGVGPAVAMTLICDLPELGQCDKKEIAALVGVAPITKESGQKRGRSMVQNGRSNVRKTLYMGALVAAHHNPLLKTMYQRLIEKGKPKKVALVAIMRKMIVILNAMVHSKTAFHA

SEQ ID NO: 433222 - protein, 415 aa, unidentified
MSYKIAGIDVHKKVLMVVVMDAHAPADEPERRRFATMPSDLRRFATWLREREVKEAVMESTAQYWRSVWLELEPYMRLQLAQAFSNRAPRGRKHDFKDAERLVRRLIADELILSFVPKGEQRTWRNMTRTKTQLTRDRVRLQSQMECLLEEMRIKLSSVVSDLLGVSGLRILWALARGESDPKKLAALGEERLRCSEEQLIDALTGSPQPMHRELLSLQLERLQLIDEQIAKLNGMIAQAMKPHQETVIRLAEVPGFGVDSAQQVIAEVGVKASTFPSAAEFTSWVGTCPGKDESAEENHSSRSAKGNKYLRRVLSQAAHAAVKKNGSHFQAVFRRLLPRLGYQSAIWAIAHRLCRVLWKILHDGVRFIEQGSEPDPQAKKQRARLLARALRKLGYNVAISPMNPPTAESVTPTQ

SEQ ID NO: 433223 - protein, 405 aa, unidentified
MDRLYERCCGIDVHKKMIVACFKRGNDQEIREYGTTTAELRELTAWLLNEKCEMIAMESTASYWKPLYNIFELSGLDAIVVNARDMKAVPGRKTDVKDAEWIADLLQHGLLKASYVPDREQRELREASRYRKSLIEERARELNRLQKMLEGANIKLSSFTSDINGKSSRRILNALLEGKKLDEEQLQELLHGSMHKKIPEIMKAVDGVLTPLQKQLIKNIIDHIDDMSRRIEDMDKLISNYLDKYQKAIKQIDEVPGIGIQSAETILAEIGLEMKRFPSDAHISSWAGLSPGNNESAGKRRNSKTTKGNKTLKTTLIQCAKSAVKKEGTFFYAQYQRLVVRRGKNRAIVAVAHSMLIAIYHMLKENKPYKELGEDYYNQFNKERKINSYLKKLYALGWEPEIDTQ

SEQ ID NO: 433224 - protein, 378 aa, unidentified
MKGVRFVGLDVHAETIAVAVAETDGEVRSLGVVPNRGESIRKLVKKLGPAEELRVCYETGPTGYVLYWQLTALGARCEVVAPTLVPVKSGERVKTDRRDALKLARSYRSGDLTPVWVPDAAHEALRDLVRAREAAKKDQLRARNRLSKFLLRHGKRPAAGVKSSWTGSYLLWVKQEVHFEQFAQEFALLDYLHEVEHAAGRVERLERALEEAVKSAPPQMRAVIEGLQALRGIAQVSAVTIVAELGQISRFARARQLMGYSGAVSSEDSSGERVRRGAITKTGNAHLRRIVMEAAWSYRHRPAVGRALRLRQEVVSEEVKEIAWKAQHRLHARYQKLTARGKNKGQVITAIGRELLGFIWAIGVKVEGAQKEPLRQAA

SEQ ID NO: 433225 - protein, 390 aa, unidentified
MQELRSYGTTTAQLLELAAWLRHWHVQRVVMESTSTYWKGVYYLLEAEGFDCWLVNAREVKNVPGRAKTDRADAVWLAKVAERGMCRPSLVHPPDIRRLRDLTRYRRALVQDRTRERQRVEKLLEDAQIKISSVLSDLHGVTGRAMMDALINGQRDPHTLARLAKGSARKKTARLEEALRGFFTDHHAMILQMMLANSDRLSSQIAELDGRIEEAVSPFCAQSARLADIPGVDVMAAAELIAEVGVDMTRFPSAAHLVSWAKFCPQTHQSAGKSKSQGRGKGNPWLAGTLGRVVFANSRSETFLGARYRRLARRRGKQKAIVATGNSLLTVVYHLLLNSDARFCDLGPGYYESRINKHRRARDLATQLQALTGQHIVIRDGKAVITDTAA

SEQ ID NO: 433226 - protein, 448 aa, unidentified
MGQGRRPASRGVARRNAKLKALRELVGKDQAIVAVDLASQRQAAVVCDHDWVVLARRMFRGSAWCVSEILAWAGPVAAKAGFTGLVLACEPTGHRWKPLVVTARARQIPAVCVQPLLVRRAREGEDFTRSRSDFGDAVIIARLTAELRCYLPYLPEGPWARLRHLGARREGLVERWVAARQQVRDLLECAWPAVLEAAADPLESLTWRAALAVSADPSVIAAMSEQEFLASLREQLVALGGKKVWRQIAVAVHAAAADPGGIAVERDAITERAAFAYQDWMSALAALADIEDRTAAVLGELGLARLVTTIPGSTAVGAAVILAQTGDPARYDTPRAWVKHAGLAPQANESGKYRGKTRHSGRGRPGLRTAAWRAIWGALRCNPVYAARHAQLTTRQANRLTNGQAHAALAAALLRQLHVVVTQRIPGDAAIASGAAAPAQATVVMPAA

SEQ ID NO: 433227 - protein, 312 aa, unidentified
MDAIVIGIDVSKDRLDVAVRPTGETFVVARDAEGLDVLIARLTPLVPAAVAVEATGGYETVVAASLAAAGLAVVVVNPAQVRNFAQALGKRAKSDPIDAGVIAHFLEATKPEIRPLPDAETRLLADLVARRRQIVAMIVAERQRQKRLTNKRLQKSIARLLAALQKELSSLETDIDESVRGSPAWREKEDLLASVPGIGKTIARTLLAELPELGSLDRRKVAALVGLAPWTRQSGKWKGKSFIGGGRADVRAALFLGAMVAARHNPELKAFRDRLVAAGKPKLVALVATARKLLTILNAILRDQKPWRQQTA

SEQ ID NO: 433228 - protein, 368 aa, unidentified
MKTQPTALPKLYIGMDIHKKSWSVHLRTDISDHKTLTIPSNCDVLYDYVEKHFQGHEVSLTYEAGCCGFSASRHFMNLGWNVLVVNPADVPRMDKQNYQKTDKIDCRNLAKQLHAGQLNGIYIPTESQDLLKSLLRQRAETSKQLRGIKSNIKSLLLYHGIEIPKEYDNPNWSIAFLKWIEQIKWTHVTGKICIDSKLRMRAVIHKEYLQLANELRSYCRKHHKKDYYLLKSIPGVGGYLASAILAEIGDLRRFNNETQFASYIGIVPTMRNSGGTEKIQGVTPRCRGLLRSYIIESSWVALRMDPEMQAYYRKHTGRNPKSIIVKIARKLLNRMLAVIKTEKPYHTNYSLNNGKETQKPAMISQQKK

SEQ ID NO: 433229 - protein, 348 aa, unidentified
MIIIGVDFHPEFQQIASVDTDTGEFQEKRLAHRDEAEKFYRSLAGQKVRVGVEASGHARWFERLLAELNFELWIGDATEIARKRERKQKTDRQDAQHILKLMLKDDFPQIWVPSWENRDLRQLLWHRHRMVQARTRIMNQLQAVALNEGLRCKKRLWRERGRQQLESFRLAPWASRRRRDLLELLDRLNPTIVELSQAIEQEVEKCPEARRLMTHPGVGPLTALAFVLIIGEADRFQCGKQVASYLGLVPLEDSSGNRRRLGHITKQGSSMLRFLLVEAAQVTARSLPQWRSKYLHLMMRRGRKTAKVAMARRLAVRLYWMMRQGWDYQQWVKFGSHAGQPGHRDGVR

SEQ ID NO: 433230 - protein, 368 aa, unidentified
MGAALQADGEYEVRVYGLKHQKEKRSMDHFAGLDVSVKETSVCIVDDTGKIVREVKVASEPEALLAVLKNPAYHFKRIGLEAGPLSQWLCSALAEAELPVVCVETRHMQAVLKAQINKTDRNDARGIAQMMRVGLYRPVHVKTLRSQKLRMLLTHRKLLQSKAIAIENDLRGTLRNFGLKVGMVGKAKFEARIKELVENLPDLAILIEPLLIVRRALREQVVILHRRLLAIVRDDAVCRRLMTTPGVGPVVALTYRATVDVPARFRKSKSVGAVFGLTCAKYQSGEIDRSGRISRCGDEMMRVMLYEAAQSMLRSKKWSWLKAWAMQIARRRGMKKAIVALARRLAVIMHRIWVDGTEFRWTREAAAA

SEQ ID NO: 433231 - protein, 356 aa, unidentified
MATYYIGADVHSNSIEMAIQNRKRIVKRYTTPASISAVKQVLNSLQGKKYMAIEEGPMSGWLYRNLHRKVERFVVADPRRNKLISSDGDHDDRIDSAKLAMLLAGGYLREVYHSDDEQRVELKNWVGLYHDRIRDAVRNINKIRARCRMYGINMPRKVLRQPEHRDVWLTKLKQPPLAKQLLMLWVGYDATAKQARMAKQQLINLSKKYPIIRIWKQLAGIGTIRAVTIFAYLDTPWRFKRKNKLWKYCGVGLQRTTSGTDKKGKPKPARLQLPWAANRTLKNAILGAALTAINNKQNAFRADYERMVQNGIIPSNARHTVARKLLTVMWGIWKRSCQFDLSKASLSEPAEECVGI

SEQ ID NO: 433232 - protein, 343 aa, unidentified
MHTTQANRLYAGADLHGNNVFLSVCDLAGTEIFRRRVQANLDAVNAALEPYWARIESVGVESTFNWYWLVDGLQAQGHCVKLGNPAQMRQYAGIKTTDDRSDARWLAELLRLGIFPESYIYPKETRAVRDALRRRQLFVRRRTQVLLSLESLLTRYGVDFPSARGLKRWSPSDIEATGLDRFVQLQIRALLEAIQSSDQQAKEVEAAVLEFVKPTPSYERIQQLPGVGKALGLTIVLESGEFTRFSKAGCYASYCRTVKSERTSNGKKKGENNSHNGNRYLAWAFIEAATFAPRFYPEIQSWYDRKTRQRNGIVARKALACKLAKATWYVMNGKDFDMKLLFG

SEQ ID NO: 433233 - protein, 422 aa, unidentified
MLEETQDDQQIIERVAALDIGKAELVCCVRVPGPGGSRRRVQEVVTYSTMTRSLQVMAERLLDLGVTRVVMEATSDYWKPPFYLLEAHGFETWLVNAKDVKHLPGRPKTDRLDAVWLCKVAERQMIRPSFVPPPPIRRLRDLTRYRAALVSDCTGEKNRVEKLLEDAQIKLSVVASDIFGVSGRDMMAALIAGERDPKVLAQLARSRMRVKIPQLEEAFVGRFGEHHRFLLAKMLQRVDAISGDIAEVDARIEAEIAPFADAVARLDQIPGVGVTAARVIVAEVGVDMTRFPTSSHLTSWAKFAPGVKESAGRKKGRGSTGHGNRYLASALGEAAVGSARTSTFLGERYRRLARRLGGKKAMVAVGRSILVIVWQLLSNPDTQFRDLGPDFYANRLGADRTKRNHIRQLEALGYKVTLEPAA

SEQ ID NO: 433234 - protein, 414 aa, unidentified
MEKVLERCAALDVHKRQVTACAHVPDRLGERAELRAEFQTMTPDLLALRDWLKGLGVTHVAMEATGVYWKPVYYLLEDDFELLLVNASHVKNVPGRKTDVADAQWLCQLLEHGLLRASFVPPKPIRELRDLTRYRKSLVWERQREANRLQKLLEDANIKLASVATRVLGASGRAMLAELCEGRNDPEALAELARGKLRRKLPELRRALTGRFSAHHALLVSQLLSHIDYLDEAIDALSNEIEQRLRPFEHKLELLTTIPGVAQRTAEVILAELGPDMQRFPDHRHAASWAALCPGNEESAGRRKTGKTRKGDSWLRTALIEAANSAAGRTRDTYLNAQYVRIKRRRGHSKAIVAVAHSILIAAYYILQQEKPYQELGGDYFMQRENTDRLTRRLVQQLERLGQHVTLEPALEPR

SEQ ID NO: 433235 - protein, 363 aa, unidentified
MNIITIVGLDVHKETIVAAVLPAGADAVTRQMIIENTPKALEKLVRQTTATGSAEFVYEAGPCGYDTHRQITALGHPCAVIAPALTPVRPGDRVKTDARDAEKLARLHRAGELTAIRVPTCEEEAARDFVRIREDAVEDLQRARQRLSKFLLRQGRIYRDGSAWTQKHELWLRGQKFEWPYLQQTFSGYLRARDEVQAQRKALNIQVEDLAQRAPYKDLVRALMCLKGIGTLSAVTLIVEAQDFRRFRTARQFMSFIGVVSSEHSSGGRIHRGSITRAGNAHIRRVLVEAAWSNRSAGTNAALIKRREVCPEEVVQIARRAQDRLHRKFWRMTGRGKHHGVTVVAVARELGAFAWSIARTMQA

SEQ ID NO: 433236 - protein, 380 aa, unidentified
MKKVRYVGLDVHAETISVAVAEPERNGEVRSLGSIPNRPESVRKLVKKLGSVDQFQACYEAGPTGYVLYWQLTEMGVKCEVVAPTLVPVKAGDRVKTDRLDAQKLARCYRAGDLTAVWVPDAAHEALRDLVRARLAAKRDQLRARHRLSKFLLRHGRRPASKMSAWTAAYLNWVKKGVHFDQPAQEATLADYLHEVEHAQDRIARLEKAIDDSIETMPEKMREVVDALQALRGIAKISAVTIMAELGEVSRFETPRQLMGYSGAVSSEYSSGESTRRGGITKTGNAHLRRIAVEAAWAYRYRPCIGASLKARQKGASQEVKDIAWKAQHRLHGRYMKLMAKGKLKQKVVTAVARELLGFIWAIAVEVEQRHKSSLKKQAS

SEQ ID NO: 433237 - protein, 312 aa, unidentified
MLGLDVSKETLAVALLDPATRKPRWEAEVPNTPAAVAQLLAKVAPECPWVLEPTGRYSVAVAKQARAAGRRVLLAPPRKAKAFLASLQSRAKTDRLDARGLGLYALAADLPPYPLKSEAVERLTQLLTARRGLSLSLASLQQRIVELPHAAAVLKAAVADLRASMHALDRQLAAARRELPLAGRLQKVHGVGPVTATAVAACLTSKHFEKPEAFVAYVGLDVAVRSSGKRKGEWGLTKQGDAELRRLLYLCAQSSLRAQGSPFGAQYEREQAKGMSKTAALCAVARKLAKLCWSLAHHPAASYDPARVYSQK

SEQ ID NO: 433238 - protein, 367 aa, unidentified
MKKVSTVAAKQSKNFRDQKLTIGLDLGDRSSWYCVLNEAGEVLLEQRLGTTPKAMKEVFGSMPRSRLALETGMHSPWVSRVLSELGHEVIVAHARNVRLIGESRKKDDRLDARTLARLARIDPQLLAPVQHRSAQAQAHLMVIRARAGLVRARTALINTARGLTKSYGERLQGCNPRNMNAEKARELSPELQAALEPLLAAIESLSERIHEYNQQIEKIAKESYPQVARLKQVKGVGTLIALTYILTLEDPQRFRKSRDVGCYVGLQPGRRNSGKSEPQLHISKEGDPYLRTLLVQGAHHILGPFGADSDLRRWGLKLAERGGKNGKKRALIATARKLAVLLHRLWVSGEAYQPLRHSRPVRLPAAA

SEQ ID NO: 433239 - protein, 421 aa, unidentified
MIPAVIERCAGIDVGRKFVVVCVMCGDAQATPTLEVRKFSMLTEGLEQLRVWLHQNECTHVVMESTGSYWKPIFNILDDGQLEVVLANSQQVKNLRGHKTDPNDARWLAHLLRHGMIRPSFIPDRDTRELRDLTRRRKKLVECAAEERNRVQRVLQEANIQLGIVLSDVFGESGLNMLDALMNPDASAEQIADLAVRTARKKIPEIRKALEGHRMTEHHRRLIRHSMEHLAFLEEQIAELDREIDDHTHSRPALKSATELVKSVPGIQQTSAAALVAETGADMGHFPSGGKLASWIGICPGNNESAGKRKSGQTRKGNPWAKRALVECAWSASRKKDLETKRYYERLKPRLQHKRALVATAHLMTLKVFEALSTGQPYQVDQQPELTAAKLRRLVRHHTHRLRRLNKWLQGHKKRHAQAPH

SEQ ID NO: 433240 - protein, 315 aa, unidentified
MAVIEPDRPLQRREFANSASGHTALLRWLGKWKAAVRVSLEATGIYSLDLALALDAAEGIEVAVLNPKRIHDFARSLCRSKTDSTDAQVLAEFSMRMDFKPWQRPSRSALALRAISRHIEALGVEHTRAFNRLHAAQGSMGTPRCVIDDMKRSLATLERRILKLRREARAQIDSNDRLREQFRLMIGMPGIGEISALQILGELVLLAPDLKARQWVARSGLDPVHQDSGTSVHKPARISRAGSRHLRRALYMPALAAVRCDPHLKAFYETLLGRRKSKLQALTAVARKMLHAIHGIFKSRTPYDGNKLFPQLKTT

SEQ ID NO: 433241 - protein, 413 aa, unidentified
MSVTDGVGAARPVTVGVDWAQDNHAVCVIDADGEPLERVTVAHTGAGLVRLVRLLAGYAVAGVGIERPDGPVVDALLGAGLMVFVIAPAQVKSLRGRYGSAGNKDDRFDAYVLADTVRTDRRRLTALQPDTMATTVLRTLGRARKDLVEHRIAVANQLRAHLQTALPGLVGLFAALDAPVSRAFIAEFTTQDAADQLTAEDLTGWLRAHKSYNSDPQVVYQRLRTAPRGATGAHGQALAGITRAYLAALTAITEQITALQDQLADALAAHPDRDIFTSLPRAGTVRAARLLAEIGDARGRFPTPASLAGLAGVTPSTRQSGQVRVVAFRWAVDKQLRGAVCDFAADSRHTNPWAAHLYAQARARGHRHPHAVRILARAWLGVIWKLWTTRTPYDPTRHTALQTLPQQDQTKPA

SEQ ID NO: 433242 - protein, 427 aa, unidentified
MKEAPVAGFDISKSSSDICVLAPGNEVVWRSKMAHTSQSMAQVARRLTDIGVQYGAAPVIIMEATGHYHRIVLQFMKNEGFDVVVVNPIQSGALKNISIRKVKNDRVDAYRIALLYRLKAAKRTNLPTDLIADLRSLCRQHYDLTQDLIAYRSRLHAQLDQCFPGFAGVFSSLVNLSALSVLERFPLPSLILSASDQDIEGAILSVVTRKSAYLQKKIHALRQAARNALPIAISTPSCAVIMKNLVSMLQILKKSIREVDLQIRALIRSDAGLRTDAELPKSIPGIADYAAAVILSEIGSVSSFQSAKQLVAFCGLDPTERQSGQFTGTRSKISKRGSKYLRCILNMSAHISIQPGCKGTYANPVLAEYFQRKRQSKPYKSALCAVMHKIVNIIFAVLQDQKPFELRSPELHCQIMRDRAAKLSLAA

SEQ ID NO: 433243 - protein, 342 aa, unidentified
MYYIGLDVHKKTISYCVKDASGQVHREGTIGANRNELDWWMKTLPQPWTVAMEATIFTGWIYDHLLPHAAQVKVAHPVMLRAIALAKKKNDRIDAGKIADCLRCDFLPECHMASTEIRDRRRSLRYRHLLVRQMVQMKNRVSGLLLETGVSHNKQRLHKVGYFRDLISKNEEVPESIRPLLRLSRETIVRCQKTEYALVSSLQRDPLLAERIRRLRTVPGVGPITALTWALEMGDVARFRSVKQAISYCGLCGDEKSSADKVLRTPLSKQRNKHIQSVLIEAAKLAPRHSPELALIHEREKQKGNANRATLAVARKMVAYLLAVDRRGKDFVPSEERSTAAA

SEQ ID NO: 433244 - protein, 384 aa, unidentified
MIKHNILFIGLDTHKTFTEVAYIEDQRGAKTIHLGKILSNKAAFKKLARQLQSKYAHATLHFVYEAGPCGYWIYRLLTNLAHCCYVIAPSLIPKKPGERIKTDKRDALKLAKLLKSEDLTPIYVPEPEDEAVRDLSRARETGMKDLKDAKYQLKALLLRNNINSKVKDNWSLQHLRWLAELVLPHPCQQIVLQEAVSTITERLKRLKRLDNELTHQVKNWRYYPVVKAVQALRGVRLLVATGVIAELGDLTRFDHPRKLMSYLGLVPSEHSSGGKRRLGAITKCGNSRARRLLVEGAHSYKHNANISKEMQLRQEGLSKEIIDMAWQAQLRLCRRYNRLIHRGKHRNVVVTAIAREMIAYIWAISREVVLPVVDVKLRLARMPA

SEQ ID NO: 433245 - protein, 367 aa, unidentified
MIINSIAKDFENIIAIDTAKTSFQVYVVNQKTNRRRNDKVTRKKFVEHITKLGTGLIFMESCSASQYWAREFEKLGFTVKLIAAQHVKAFLYNKKIKNDAKDAEANFKCGMQPDTKFVRVKSVEEQTVALLHTLRKGEIKHRVQLCNRIRGVLAEFGIITDKGRNNFDKNMSELRAQCEKEISNLHLKSAIDALFDEYKESLEREDKYTQQILQNRQDELNKLAMSCHGVGEITASAIVAEVGNAKQFKNGREMSAWLGLVPSQHSTGGRSTLGGITKTGNKYIRGLLDQCANSIYRNAKTHLDKGTDNQLDRFALRLKSKGKPAGKIAMALANKIVRILWAVLSSGNEFKSNINFQDKDIDVLCLE

SEQ ID NO: 433246 - protein, 343 aa, unidentified
MSTTVTIGLDVGDRFIELCSLGSSGEVLERGQLPTRLAALEQRFRGCPPARVVLETGKHSPWISRAVEAFGHEVVVANARRLQLIARDSRKCDRSDAEALARLGRLDPRLLKPIKHRSPAIQSDLALLRGREALVRSRTLQINHLRGVIASSGGQIPKCSAESFHRRAAAAIPEDLKGALAPLLAMVQSLTVQIRAMHTQVEAVSKERYPETELLRQVPGVGPLTALAYVLVLEDPRRFPTSRSVGAYLGLVPRRRASGDSDPQLRITKTGDRMLRCLLVQSAHYILGPFAPPSSLRSYGERISARGGPNAKKRAVVAVARKLSSLLYALWVTGSVYEPVRTR

SEQ ID NO: 433247 - protein, 339 aa, unidentified
MGITTVGLDLAKNVFQVHGINFVGDVVVRRRLRRAQVRAFFTDLKPCLIGIEACGTAHFWARELVALGHEVKIIPPSYVKAYVRRGKNDAIDAAAICEAVLRPNMRFVPIKTEEQQAALMLHKARELLVRQQNMLINALRSHMAELGMIAPQGRSKFKDIIAVIEDGEDESIPPLAKAALRPLVAQFYASGAAISALDDEIMAWHKNNEASRRLATIPGIGYLTASAIAASVPDPSYFRCGREFAAWVGLVPRQNSSGGKERLGRISKQGNRYIRRLLVIGATSMLRYARTRTAPESDWVNSLLERRPARLVTVAMANKTARIAWAILAKREIYQTPGC

SEQ ID NO: 433248 - protein, 363 aa, unidentified
MRNYSRNDDRLKAGRNDLFIGLDVDKASISVAIRERQQLLRTLKMPYDAQNLLSFVQEHYPGKRITFVYEAGPTGFGLYDEIIRVGHSCLVVSPGAIPKAPNDRVKTNRLDSQKLAEMASGLRLRGIRVPPGPIRELRSLVHLRYTYMQDIRAYKCRIKAELLKEGIAFPKAAKCSQWSRKIVAALRILDCTPVIGYKINSMLDQIEYLAKQMHLVEVTLRSHINGDMDLRRCIEYLMSCPGIGWRVACYALARIGDWRCLGVSKESGAFFGLVPTENSTGDAIHRGSITKCGDPRLRSMLIQGAWTAIRKDDELKAFYDRIYASHSKKVAARVAIVAVARKLAERMHCVLKEQRKYELRAVA

SEQ ID NO: 433249 - protein, 414 aa, unidentified
MAVRKKKSGKCTLFPPSRYKCWLGVDVGKLSHWAHAVGAGDEPLLSEPVANTEEAVDELLAKLPERTLVVVDQRRNIGALVIRRARAAGRDVAYLPGVVEHKIAEATPGVAKTDRIDAEIIAVTARGMSHLLRTVPEPAPEVEAARVLAAGRAALQRSRTAEVNALRARLLESCPSFETACDFSSPWVARALAEVGSPWDVADMDLGGWVALACSHGATSVAAARLWRAATGQRPPEPIVAAERSYVRWFARRVAEDTDELARVDRGIEEALAGNEDYRNLMTVPGIGPKTAAQVVVSVDISDFPSHDKLASYCGLVPADRRSGTSVDAQSPARGNRQLKNLMMFSCNSLRKSSCRYGRYMRRCLARGMTYHAAQKATARKRVKAIYAVLRDKVPYSEELADRVPLEPPPRSWD

SEQ ID NO: 433250 - protein, 314 aa, unidentified
MQEYTRREHLKLHQVRTKSFTNSPDGWRHLLDWLIAQKIQRVHACLESTGRYSLGIACALYEADHVVSIINPAQIRDFVRTKLGRNKTDGVDASHIREYCELFKPSPWAPPSKAHRRLGELQTIRSGIIAGLTEWKNRKNSGIVDAEAQALADATISHFTSQLGAVDKAIALTIDNDCDLQSKRDLLLSISGVGETLAGVVLAELPGPDVLRSSAEVVAYAGLNPRRHQSGTCIDRATRISKIGNAVLRAALYMPALSAMRYNSAIVALVTRLKSRGRLKPKQIVVAAMRKLLVLCFGVLKTGRPFDAAIAMGG

SEQ ID NO: 433251 - protein, 401 aa, unidentified
MPEQCIIQRWIGLDIHKAYFVAVGVNAEKSTVFGPHKIPNEQLEGWIAKHLLPTDAVVLEMSTNTYLFYDTLLPHVGSVIAVHPPHVLLVTGVKVKTDKKAALTLAQLHAAGLLTGVWIPPVEVRELRAVIAQRSKMVRLQTQAKNRLTSLLHRTHRERPAQPFKPEQKAWWESLPLSAIEKYIVASDLETLAFAGKQIDAIGEVLRQEAAKDERVPLLTQLPGIAMLTALTILAAIGPIERFEDAKHLVGYAGLGASVHDSGQMHATGHITKAGRRDLRGALVNAANAAVRYHPYWKKEFERLEYRLGRSKAIVAIARRLLVAVWHILTNGVADRHADETGVAASMYKLAYEIKVNNLPKGTTARAFTRQQLDRLGIGQNLDVLPWGGKKVKLPPSQLKT

SEQ ID NO: 433252 - protein, 401 aa, unidentified
MGTVRDNATRVKRFRELKASLRTDRSRLLVGSDIAQAEHVVHLRHAHTRVVVPTLTIPNTTRGFTQLWARIQQAQRTTGCREVVCGLEPTGTYHQAVATFLATQGADVLLLSSSVAYWNRRTQDGTWDKHDRKDAANCADLLEQGKVLFYSQPTGPLAELRYLVKLLRRARGELAACKARWRTTLRPALAPMGEALPQRLWAELPAVLQAWERAAPGRPALAKGRLPLGLASAWADLGAQVTGVQARIAAIEQALTPVAERLPAYPLLRTIPGIGATVGAILLAEIGDIAWYTQFSQLRKLAGLDIVRVQSGQFAGQARISKSGRGLLRWALYHAAIGLARTGAGRTRLAALKAKRRGDRFAGFKAIVELAAKQLRVIWGVWRSGLPYDPRRGGGLSRQAC

SEQ ID NO: 433253 - protein, 358 aa, unidentified
MKYVGIDVHKKMCQVAVLDDDGELLDETRFRNTLEGIEEFAQRLSAYRDEVRAVVESTGNLWIQVHDRLEDHGYDVALSSPANSRLVSESRVKTDRTDARALAQLHRAGVLSTCFVPDEEERSRRELLRHRLRLVKNRTAVRNRVHALLDKHGLRIPYKTKFSKKAVAWMRELSLGFMDDAILRSDLALLAGLDEQISYVEEKLASLAVDDARVRLLMTMTGVDYFAAMLVLAEIVTIDRFSSEKRFSSWMGLAPRVRQSGEKTWIGGVGGPGNRRMRWLMVQCAHTARQHDPRLRRLYERHARRKGGKSAVAAVAHEMARIIFFMLKRNEPYRGVNRGLWERKLKSMERRALSGLRN

SEQ ID NO: 433254 - protein, 391 aa, unidentified
MTRISAGVDVSKNRSTVCIIDQDGKVIMRPFLVWHSTEELDFLADTLKRLNGEVRVIMESTSIYQYPIALHLKEKGIFISIVNAYKVKKFANTDFRGGKTDKKDSRTIASYGISYWYKLVEWQIPKDTYFNLDLLNRTYMNAKKHRQIILQELQHYIDCAMPGMDKELHSLNLSTKKDFMLDFVEKFWHRDEIVNMTEAEFTEVFTAWAKKKGYRPVEGKAAKIYAIAKSCIPYYPANPTVKTILQYIVDKLSGVNRTLVTIVTQMIEEAKKLPEYQIVREMPGVGDPLAARFFGSAGDIRRFKNSKALVAYAGIDSPPDESGDFSSTHRHITKKGSKVFRDTGYEIMMALRAQKRTWEKVRKNPEVYDYMLRKEAEGKPPTKLNELARFN

SEQ ID NO: 433255 - protein, 442 aa, unidentified
MPHATSSAPLEPDWAAFVGLDWGDEKHYWKLRDAHSQQSQEGVLQNTPEALDAWAAELNVRFGGRPIAVCLEQSRGAVVYQLSKYPHLILYPVHPTTSARFRETFYPSGAKSDPQDGDVLLDLVEHHRDRLRRLDPDTPETRLLQMLVEQRRAWVDEKTRHSNRLTGWLKIYFPQVLDWIDDIDSPLGCDLLDRWPTLEELQKSHPGTLHTFFVQHNCRSEKRMQERIQAIYQATPAIRDTAMLEAGPAIVKQIVAVIRALRANIDELDKRIASLVSTHPERALFEALPGVGPALLPRLIVAFGTKRERYTCADQLEAYSGIAPVTQQSGKSKWVHFRWACPKFLRQTLHEFAAHSIAKSVWARAFYDMQIAKGKGHHAAVRSLAFKWIRVLFACWKNHTPYDEQIYLRALQNNGSRLSQILATQLTWKTVGGFQKLCSENA

SEQ ID NO: 433256 - protein, 367 aa, unidentified
MKKVYIGTDTHKATNQLAFAPEGRDTPENIGRVSADLNCTVDAIRRFQKKHELKKEQLHICYEAGPTGFVLARRLIKLGYDCIVVAPSKIPTASGDKVKNDKRDARKLARLHRAGELTEVHIPDVADEAIRDVCRARTDAVNAKVRAKKQLLGFLLRNGYHYKGKANWTEAHMRYLREIVLPTPAQKIVLEEYLQTIDTAVKQVMRYEEQMLELLKTWQRRPLVEAVMGFKGFKEVAAMVIVAEIGDFKRFKHPKQLMGYLGLTPSEESSGGKRRQGSITKCGNGHARWMLVECAGHYQTPPKISKALSKRQEGLDREIREVAWHAQHRLNKRWIKLMFRNVHFNKIRVAIARELSSYIWDVAQLVD

SEQ ID NO: 433257 - protein, 343 aa, unidentified
MEHIGIDVHKNQSQVCILTAEAELIEKRIRTDRDRFAAVLGYRPRAKILIEASTESEWVARCLEAQGHEVIVADPNYAPMYAHRSRRVKTDRRDARALAEACRIKAYRKAHRAADERRHVRGRLAVREALVQTRTKYISLVRALLRREGLRVRPGTSSSFAERVGELEIPKPLGREIGPILRLMAPLNRQIDRATKEVEKIARQDPTVRRLCTAPGVGSITAASFAAVIDTPERFKGAHQVEAYLGLVPRELSSGEKQRKGRITKTGDRRTRSLLVEAAWALLRTRRPAVAPLRAWTERLAARRGRRIAVVALARKLAGILYAMMRDGTEFNDKYWTTEKQGV

SEQ ID NO: 433258 - protein, 409 aa, unidentified
MQVVHERCAGLDIHKKSVYGCALWPGEKGGKQQEIRSFGTMTAELLRLADWLREHGVTHVAMEATGVFWRPVWAVLEGQFELMLVNPQHIKAIPGRKTDAKDSEWIADLLQHGLLRGSFVPPTEIQDLRDLTRYRTELVQAQNRVNNRIQKLLEQCNIKLSSVASDTLGVSGRLMIGAIIAGEEDPERLAELSQRALRKKIPELRLALDGKVRDHHRLLLKEFLGEWKALGARIRRMEKAIDERIVPFEEAVKLWESIPGVDHVSACNLVAEVGVNMAQFRSAQHLASWAAVCPGNHQSAGKRLSGATRDGNKWLRRTLCQVAWAVTRKKDCYLSAQFKRLAARRGVKRAVVAVAHSMLVIGYTMLKTSRSYQELGGGYLEQINKEQLQRYFVKRLQRLGLTVSVESAA

SEQ ID NO: 433259 - protein, 370 aa, unidentified
MGKKSIKLFVGMDVHKDSIDVATGDERGGEVRHYGAIGGELAAVSRLARKLESSGGGPLVFVYEAGPCGFGIYRMLRERGHECWVVSPGLTPRSNADRVKTDRRDSLKLCRLARAGELSPIHVPDAMDEAMRDLVRTREDAVAMQRQARQRLGALLLRNDIRYAGKTAWTPAHRRWIAELKLPYGAQQIAFEEYVQAVDEASHRIQRLTQAIAAELVHWRWLPVVAALQAFRGIQSIHAVRIVAELGDLTRFGSARCLMAFLGLVPSENSSGQRRQQGSITKAGNSSARRALVEAAWAYRYGARVSPIIARRQSGIAKSVTDLAWKAQLRLCARFRRLSTRGLHKNKIVVAIARELSGFVWALGQKVKPS

SEQ ID NO: 433260 - protein, 415 aa, unidentified
MALKIVYKICCGIDVHKTFVVACIASTNSKGVTTYESHRFSTYTKGLKDLLQWLLDRNCKDVCMESTGKYWIPVYNILENDCTIVLAHPKYVKAIRGKKTDKKDAKWIADLFKHDLVAGSFMPPADIRQLRDLMRYRFKLTCFKSSEKNRLQNCLTVSNIQLGNVVSDTFGKSAQAILDKLLENPADTSFDLEPLVYKSLKKKLPELRDAIDGFITPEQAGKLKVIKGHFEDLESRKAELEELILALAAPYQQELAILQTAPGISSIFTAIGIISEIGTNMEAFPSAKHLCSWAGLTPTNNESAGKKKSVRVSKAGCYIKPLLVQCANAVVTSKKHPEIRNRYLRLKKRRGHKKAIIAIARMLLTALYHMLKNGENYNAELYRKSDLPPADREITVEQAIIIARNQGYKIKPATA

SEQ ID NO: 433261 - protein, 371 aa, unidentified
MKVVKKENERTGVRWVGIDMGKSSYVLRLIDENGKITGWDGKTNKEGRKELYRRLRPTDKIAIESCSLAFTMNKEFKTLTGTDFYILNPNKLFQIYMTDKKTDKEDALKLAKEIRDRPEEDLPRVNAPTEKMKAMRSVMSEYREIAKFRTMKINRLHSVYEHAGITDLKRSDLKTKINREKNLNLLSGYEKEEAQRLMQVIDLLESQKIELENKIKEEEKTNEQMQIIEQIPGIGKTTAYCFVGVIGDPNRFTNMTRVSSYLGFTPRIDCSSKMIHYGHITKKGNAYLRGLLVQAAWVIVRSKNGGALKEKYNDLIIHGLSKKKAVVAIARKIAELMYTLLKNNGRYEPRRFVPQVSFTSSLAEEALAVAS

SEQ ID NO: 433262 - protein, 377 aa, unidentified
MSKVRWIGLDVHADTIAVAMAEPSGEVRSVGVIPNRPESIRKLVKKLGPVEQLRVCYEAGPTGYVVYWQLTALGVSCEVVAPTLVPVKAGDRVKTDRRDAEKLARSYRAWDLTPVWVPDAAHEALRDLVRAREAAKKDQLRARHRLGKFLLRHGRRPSPAMRPWTQRHLSWITQAVHFEQPAQEATLLDYLHEVHHVAGRIERLDRAIDEAVTMAPPQMRAVIDALQALRGIAKVSAVTIVAEVGELSRFARAPQLMGYSGMGASEHSSGERRRRGGITKTGNAHLRRIVVEAAWAYRHRPAVGGALRKRQATLSDEVKGMAWKAQHRLHGRYRKLLGRGKCPQQVVTAVGRELLGFIWAIGVAVETEQKNRRPVAA

SEQ ID NO: 433263 - protein, 440 aa, unidentified
MNQEDRTRLEEFRQFRKEVRGSKEYLLVGIDVAKDKHYAFFGTATGKTLFRRLVFENNLEGFRKLLAQAEAMKVREGLKKVVFGMEPTGNYHKPLGEHLMGCGRQVVLVSGVAAHENRKTLDGRWDTNDTRDAANVADLVSQGKCLFYEFPVGALQDLRNLLSLKRRLKKMEHGHRVRIRNHLVAKYFPELDRYYEQSETTALAIVRWCLSPSEIAGLEYPRFVQMVGSSRGRSSQEKRLRAIWELAVGSVGCEAGPVVEFEAQVMVEGLKRIRGDLERIEEKIQEICSRFLEYEFLLSIPGFGPDVSSKVLGAIGDPFRFQNGRQVLKMAGFDLNAERSGKSSERAVPVISKKGKADLRYALYQAALIASTRNPDFIVYFTNRLRGREREPGIKTKMRVKLAAKLLIMAWTLMKKKEPFHPRHLRVEGQSFTGAAGRES

SEQ ID NO: 433264 - protein, 335 aa, unidentified
MRYVGLDVHYRSSTYCVLEESGREVACETVRGHWPQLLERLRTVEGPWVICFEATCGYGYLYRELSRMAARVVVAHPGQLRLIFRAKRKNDRIDARKLAKLLYLDEVPQAYVPSQEVQSWRELIEHRRRMVDRQTTCKNAIRSLLRAHGKIAAPGLWTKKGLAWLRQEERPTPAARLKRDLLLDELAEAKRRVRTVTKALDEIGERHPAVLLLRTIPGVGIRTAETVAAYMDNARRFVRSSQVGAYFGLIPCQDASAGVNRLGHITRQGPATARKYLVEAAWQGVYRSPTIRAYFERVRHGRPECRKIALVATAHYLLRCMHAMLVRGQPWHEAA

SEQ ID NO: 433265 - protein, 415 aa, unidentified
MMEQRNKVCGVDIHKRFLIATILSRDGTKIQKRYGTDIDDLFNFRDWILENNCDCVAIESTGVYWYPVNAVLENKVELILANARQIKHTPGRKTDSIDSEWIAEVALNNLIYPSRIFPKEERDLRRLTRTRESLVKMRSQIKNQVHQGLESCSIKLSSVLSDNFGKSGRHILDGLIKGKSIDHIIEEIPSKRVKKNEDQIRAAIRTGLDETQIFLIQSHLNTIDGLTKKLDEIDSEIKHRISRRKDDLQIAMSVPGIGFKAATTILAEVGNYRDFSTPDKLASWCGIVPNVYQSADKLITGSITKHGSKHIRWMLVQVAQAALKKRGSKLRRFFLRIKARKGHNVAVVALARKILCILYHLLMNQEMYQEDGVTKSRQSKIDWSSARIDKMSLQTMIEIIAKAGYEVKKIEESGG

SEQ ID NO: 433266 - protein, 360 aa, unidentified
MNKNSMFYIGLDLGDKFSYIAILDSEGEQIEETRLPTNKASFQRKFSMLPPCRVAMEVGAQSRWASHMLRELGHDVLVANARKLRAIYHNPRKGDRVDAEILARLARLDPELLSPIHHRSPKAQAHLAVIRSRDALVRSRTLLINHVHGLTKSSGDRLPSCSADCFASKVAHAIPERLLPALLPVLDTIASLSQQIRAYDRQIATLCQEEFPETRQLQSIAGVGPLTSLAFVLTLEEPHRFARSREVGPALGLVPKRDQSGDRDPQLRITKTGDSYLRRLLVGSAQYILGPFGPDCDLRRWGLKLAERGGKNAKRRAVVAVARKLAILLHHLWKTGEIYDPFIQDEDRVTRASTVLAGVR

SEQ ID NO: 433267 - protein, 340 aa, unidentified
MAATSKFYLGIDVSKPWFDVSVLPVINYQRQTMITERFDNSNDGIKLFKSWLKNNAVTCDENTLLVIENTGIYHRLIWSFCSKHNLPLHIGNAAHIKWSLGITRGKSDVIDSRRLCTYCYKQADELKATPALNPVFMKLKDLMSSRTRLVTQLHSTKNYIKEIQCTGDKELLATLQKAHKAALDGIKKSIDQIEVLIEKIIKEDGAIYTNYQLIKSVPGIGHLTAVYIICCTNNFAAKISGKQLASYAGVVPFEHSSGISIKGKNRVHKMANKDLKKMLHLCALTAIKYYPEFKQYFERKKAEGKNGMLVLNAIRNKLILRVVAVVNKQEPYVDNTILAA

SEQ ID NO: 433268 - protein, 412 aa, unidentified
MFKIFRNNCCGLDVHKTWIYACIGITDPNGRTEYKQARFSSFSNGLRELAAWLAKYSCSEVCMESTGKYWIPVFNILENSCFVTLAHPKYTKPQKGNKTDRKDAKWICDLFMCDMIKPSFIPSPEIRQLRDLIRYRVKLTNMLTGEKNRAQNCLTVSNLKLDDVFSDVFGKSARSITNYILEHPGEPFDVSPFVDPRCKTPVSEIQAAVNGAISPEQAVKLRQCLAHIDELEAHRKEIESEILQIAEPFSAVLDLLYTLPGFDKNPMTAIAILSEIGPDMSVFPSSKHLVSWAGCCPRNDQSCQKVKSRRISRAGSYLKPLLVQVANALIKSKKHPEFKERYHRIKSRRGHKKAIIAVCKMLLTAIWNMLSRLEPYNPEGFLEHRPVKQEKILTVSQALELLRLRGYTITNQ

SEQ ID NO: 433269 - protein, 435 aa, unidentified
MYGVDDIRLEQFLQMKKDIRGSEMHLIIGIDAAKEKHNAFFGTARGKTLVKNLVFDNTLEGFQKLLAYVERIKVQYSLTAVVFGIEPTANYHKPLAEHLIKCGYMVVLVGGVAVKNNRPLLDGRWDKHDVKDAANVADLISQGKCLFYEYPLMTLRNIRILNTLKRRLKKQEHGLSACIRNQLLAQYFPELDQHYGPSETLAVVLECLDPSEIAGMEYDDFYRTVAPGKMTLAKGRRVGTIWRAAVDSIGCTMGEAASFEAQVMVDSLKQIRQTIKSVEDKLEDACLEFPEYTFLLSIPGFGPDISAKVLGAIGDPHRFTSAKQVLKMAGLDLCANRSGKKSNSAIPVISKQGKADLRYGLYQAALIASLKNKDFIAYFTNKLKGRAKEKGIGTKMRVKLAAKLLVIAWTLMRKKEFFDPKYLKQVDQETLKKAA

SEQ ID NO: 433270 - protein, 461 aa, unidentified
MQIIHRCCCGLDVHKKLIVACLISLNEAGEFQKEIRHFTTMTKDILVLADWLTSVGCTHVAMESTGVYWRPIWNLLEGQFELLLVNAQHMKTVPGRKTDIKDAEWIADLLQHGLLRPSFVPPAPQRHLRELTRYRSTLLAERARLVNRLHKVLEDTNLKLTAVVTNIMGLSARDMLDALLQGETNPEVLAKLARGKLRKKREDLEQALVGRVDDHHRFLRTRLLTHIDFLDEQVADCNGEIDQFLSAPSDEKAELVSSASDDQRQEQAPLSSTPVGTESMLAQDRVPEDGPKVPLSYQQAIALLDSIPGVNQRIAEIFLAEVGTDMQRFPTAGHLASWVGICPGNHQSAGKQIRGTTRKGDRWLRQARISAAQGAMRTKDTYLSAQGRRLTHRRGKKRAVVAVAHSILIIAYHVLQRQQPYQDLGSNYFDERERSAVARQSVRRLEQLGFKVTLETAGEAA

SEQ ID NO: 433271 - protein, 342 aa, unidentified
MITLGIDNHKRYSQVAALNENGTVVMNVKVNNNKQSFESLLNELGEPCEAVLESGYAWGPTYDLLNDLGVDVTLAHPQKVRAIAAAKIKTDSIDAHTLAQLLQADLIPEVCVPTKDIRRQKDVLRQRCWLVKCRTGLKNRIHALIARNHVDTSGYSDIFGRSGRALLNNLVLPETEQQLLKQDLALFDSINEHIKTTEQWLKGLLSNSRTYEIVQSVPGLGIILSALVALEIGDIKRFRSPEKLASYSGLIPSTYASGGKVYHGHLIQGCNQWLRYAFVEAAWTAIKVSPYYRSYYVRLKAKKQNNIAVAAVARKLSETIYHCLTQNRMYEERNYVYKRSTI

SEQ ID NO: 433272 - protein, 350 aa, unidentified
MRKHNKACERHPAETIGIDLGDKMSRYVILNEEGLAVEEGSFRNHVDSIAKHFGNRGRARVALEVGTQSAWIAREFTKLGHEVIVANARELKWISSSDDKNDRNDARKLARLARADRNLLAPVEHRTAEQQGELAVIRARDALVRSRTLLVNTARSLAKGFGLRLPASITSTFGARALAGLAEHLRAALGGLLEQIDALGVKIRDYDERIGELAARHPEVERLASVPGVGTLTAATFVWTLGRRERFAHSRDVGSFLGLRPRQRQSGERDPQLGISKSGDQYLRKLLVQCAHHILGHWGKDSALRQWGLSKSDGSAAKKRAVVAVARKLAVLLHRMWTTGEDFKPFPKMR

SEQ ID NO: 433273 - protein, 422 aa, unidentified
MLGVGIDWAEEFHDIALGTVEKGVIEQFRIEHGPAGVDRLIGRCLALEPDPAEVRVVLETRHGLLVEALLDAGFTVVPVNPDLVARRRGPARKKDDAEDARICCLLALDRHAGLKALIPHGELGGELRAIARDDERAARDQRRLLNRLRADLQTTYPAALVLAGTDLGAPTMLRLLERWSTQSELTTATRDELVDFARAGHHGWPEKFADRVAAALATPALPTRDYLVRAKAAGIRLAAVELIALHEARRGWHQRMGELLLGGRRSGREHTVKDPDPGKAFPGGEIYLSMAGLGDILAARVAGEIGEHIEQFASPSGLQCYAGQAPVTRRSGKSDFVVARRLAHNRYLGTAVHQWAFCSLTQSGWAREFYDHKIAAGKSHHAALRALGNRWLEVLWHCLTKGVLYDEAVHVANRNRAPGRAA

SEQ ID NO: 433274 - protein, 461 aa, unidentified
MEGFLGIDVSKGYADFVLLGNDGKKLEDTFQLDDTRSGHEQLKQWIENTSTRYAFVQLNCAVESTGGFEDNWYSALIGWSEKLPLRVARLNPSVVKNSARAELQITTTDSESARNIANYIRRFADQVDYQAKDNTYSSFRTLHNHLTLITKQKSQVINELKQLLYITFPELQRYCKKSVPNWVLSLLIQYPSQIKLSKAKAEKLCKIKSITLTKAQSLIENAKNSIAKRHSVTDEFVIKKMALEIEQKQQSIAEIKKYLSENCSGQETLLLESIKGIASYSAAAIMIQIEDIKRFASPKELVSYFGLHPTITESGDKRAVSRMSKSGRPAIRATLYMCANTAVLHDPHLKSIYARHRAKGMAHGPALGVVMHKMLRIIWGVLSSGIPYQASIDENNQKKNLRTQEDNSIEQIKAKRRFQEFDVNAPISRLASKKRKVHVLSQAGNAEQVRDLDHEPSAVNL

SEQ ID NO: 433275 - protein, 317 aa, unidentified
MTPTAIFVGIDIAKADFVVACRPDGTTWTATHDPKGIAATVDRLGALAPNLIILEATGGYETPLVAALAAAGLPVVVANPRQVRDFAKATGQLAKTDRLDAHLLALFAERVHPTPRPLPDAALQQLEALMTRRRQLLDMLTAEGNRLEHAAAPIRREITRHIRWLERRVAAVDRDLDDTIQKSPVWQAKENLLRTVPGIGPVVSRTLLADLPELGRLNRKQIAALVGVAPLARDSGTLRGKRVVWGGRAPVRAVLYMGALVATRRNTVIRAFYLRLVAAGKPKKVALIACMRKLLTILNAMMRTNTQWQQISQPETA

SEQ ID NO: 433276 - protein, 345 aa, unidentified
MTKLIAGMDLHSNNVVIGLMDMDGKRVAHQKVECRLNEVVKFLAPYKKRLEQVAVESTYNWYWLVDGLQALRYPVVLANPAGMEQYSGIKHADDTNDAFFLAELLRLKILPTGYIYDRHLRPVRDLLRRRLTLVHQRTALMLSFKSLYTRTSGQEMTLSRLKELEIKEAQDLYDHPANQLIAGMQIKHIEQLTESIEKVEKVVLDCARELPFYSKLTTLPGVGKILGMTITMEVGDIKRFAEPGNFASYCRTVEAKRTSNSKKKGANNSKCGNKYLAWAFVEGANFARRYDPQCRRWYDRKAAKTSNVIATKALACKLAKAAWHAMAEGTDYDSQRMFGQAASTE

SEQ ID NO: 433277 - protein, 375 aa, unidentified
MKEKVRFLGLDVHAETITVAVAEPDGEVRSLGTIANRAESIRKLVRKLGSAEQLRACYEAGPTGYVIYWQLAELGVKCEVIAPTLMPMKAGDRVKTDRRDAERLARSYRSGDLTAVWVPDEASEALRDLVRAREAAKQDQLRARHRLSKFLLRMGRRPAPGMRVWTTLYLAWVRQLRFQQSAQQATLVDYLHEVDHMTERVKRLEQAIAEAVKLASPAVQEVVKGLQALRGIAEISAVTIVAELGCMTRFEGARQLMAYSGTVPSENSSGQRTRRGGITKTGNAHLRRIVVEAAWSYRHRPAIGHRLRKRLETVPEPVKEIAWKAQVRLHRRYMKLAAAGKEPSKIVTAVARELLGFVWAIGVKAERSVVQQIAA

SEQ ID NO: 433278 - protein, 317 aa, unidentified
MEQRQSSTKVAGIDVGKGWLDVAAHGLEDALRVENDGAGISTLIAWLKAREVGRVGLEATGGYERGVRAALDAAGFEVVVHQPIEVRRFAQLKRWRAKNDRLDARLIAAARAQVEAVKAAQDPRLVELAERLTAYEQITDQAAQLKTFLESVTLKDLDKLLRTQIGSLERTKARLSLDILGRIRAQPDLLARFRLLTSLPGVGAIVAASLVIRMPELGAMKKGQAASLIGVAPFDRDSGQWKGLRFIAGGRARPRRMLYLAAVTAKRFDPGLKAFAERLIAAGKAKKLVTVAVMRKLIEAANLVLSRGQPWQTQPTP

SEQ ID NO: 433279 - protein, 402 aa, unidentified
MADSSTRFFGLDIHKEYFVAVGVDAQREIVFGPQRVSNYQLDDWVSRVLTPQDSVVVEMTANTYLFYDTLLPHVHSVIAVHPPSVALVTCAQVKTDKKAALALAQLHAAGLLTGVWIPPHEVRDLRALIARREKMVRLSTMAKNRLHSLLHRNHLVLAEKPFTPEQRTWWEGLPLSSTEQFLVHSDLDTLEFAQKQVEQVEECLKQVSAQDERIPLLVQLPGVAMLTAITILAAVGDIARFPNAKKLVGYAGLGTRVHDSGMTHNSGRITKAGRRDLRHAMVNAANRAVQHHPHWKKEFERMEPHLGRSKAVVAIARKLLVAVWHVLSKKAADRYADPRSVACSFLAHAYQVGVKNLPGGQSAVAFTREQLDRLGIGKELEKIPWGWKGRKLPPSKLLLEKE

SEQ ID NO: 433280 - protein, 506 aa, unidentified
MAQTAKAARPKEKESVSKRRSTPVTAESKAAKPKGKVKRGDRRRRTQKGEAIENRPVFEPNAAGVDSGAREVYGAVPPDRDKQPVRICETFTADLQELANWLTACGITTVAMESTGVYWIPVYEILEAHGIRACVGNARHMKNVPGRRTDWHACQWIQFLHAVGLLRAAFRPEPEVCALRAVIRHRGELVQMAAKHVQHMHKALTQMHLQIQHVITDLTGLTGWAIGDAILKGERNPSRLAQLRDPRVKASPETIEKSLVGHWQPEHLFTLKQSRRLYAEYQREIGECDAEIERLVGTFQPRVDPEVKPLPPDQKKRNRNYAKSRKRRARPQSSTREFDLRTEVYKLYGVDVTQIPGLEFLALQLFSELGRDMSRWASAACFVSWLALCPDNDISGGRVLWRTKRRVHNRAGQLFRMAAYALDRSPTPLGAYLRRMKAKLGPQAAHTATAHKIAVIFYAMIKNQTEYDETIWEQRDAQRHQRHMTGLKRQAQRLGYKLTPIEEEAA

SEQ ID NO: 433281 - protein, 409 aa, unidentified
MTSAVEEFPRIIERGCGLDVHQGTVVASIKGKDIIERTETFETFTEDLEQLVCFLQNEGITHIAMESTGVYWKPVYYVLEEYFEILLCNARHIKNVPGHKTDKKDSEWIAKLLLSGLLKGSFIPREDIRQLRDLYRHRRKLIGQRTAEKNRLQNILEDANIKLGSVVSDVFGKTGTAIIYSLAAGERNPKKLAGLAKGSLVSKKAELEKALYGRITEHHIFMLQLILSSIEHINHQIALVENQIEKYLIPMREDVELLQTIPGVSAQIATGILAEIGNYMEHFPSHMALASWAGVYPGNNESAGKKFSSKITHGNKYLKTTLVEAAWAASHSKDCLMASKHKAIAARRGSKKANIAIGHKILTAAYFILRDKTPYIQSSQNKNIAVQRRLKKIERLEKQLRNLKSVSLN

SEQ ID NO: 433282 - protein, 408 aa, unidentified
MNPLFVGIDVSSKNNVAYLMKPDGSKHSNFSVQNNLGGAKLLSERIVSALRSMQLSDVVIGLEATSIYGDSLVYALREDGSLGRFQRKIHVLNPKQVRKFKEAYSDLPKNDWVDAFVIADHLRFGRINREVYMDDYRYKALQTLTRARFDVIQNLTREKQRFANYLFLKCSGMAQEKDIQNTSATTIALMEQFETVDDLANADLDELTDFIAQAGRGIFADPDTTAKVVRAAAKGSYRLLKTVNSTVNQAMAVSIASMRALKEQVKVLDKAIEHQFEIIPNTLTSVPGIGKVYSAGIIAEIGDIHRFESQASLAKYVGLVWNRNQSGDFEAEHSQMIKSGNRYLRYYLLEAANSVRRCDSEFRRYYDLKFKEVNKYQHKRALALTARKLVRLVFRLLKDNRLYIPPEG

SEQ ID NO: 433283 - protein, 381 aa, unidentified
MKKELDLGLDVHKDCIIRAVAEEGRKGEVRESGAMSNDLHAVEKWIGRLRKAHGKETLLRACYEAGPCGFGLARRLEQLGVECQVVAPSLTPKGSGERVKTDRRDARKLARLLRAGELTPVYIPEPTDEAIRDLCRARSDAVDDRRRSRHRLKGFLLRHGYRYQGKSNWSAAHERYLRELVLPHPAMKVILEEYLQGIAAAGERIERSQEAMSALLEKWRLVPAVRALMAMKGFQMVAAMILVSELGEVHRFAHPRQVMAYLGLVPSENTSSERRRQGHITKCGNAHARWLLVECAQHYATPPKVSAQLSRRQQGQPALVRAISWRAQNRLHNRYRRLLGRRLQRNKAIVAIARELCGFIWELLRTQPCYQAQTTSVSTKG

SEQ ID NO: 433284 - protein, 352 aa, unidentified
MTMTTLTRSITGGVDTHLDVHIAAALDERGTLLGVESFATNLRGYRQLLTWLESFGEVELVGVEGTGSYGAGLTRHLHDAKVRVVEIDRPNRQRRRRRGKSDPEDAVAAARAAKAGEANGEAKTRDGNVEAMRVMRVARSSARRARTQALNQMRSLISTAPEPIREELRYLNVYRLLEHCVAYRPAEKRDLVSITKRTLKMLAERSVSLEEEIGELDAVLKPLVRVTAPELIACSGVGTDVASALLVAAGDNPERLRNEATFAHLCGVSPIDASSGKHERHRLNRSGDRNANSALWHIVITRVVFDPRTRHYIERRMKEGLTKKEAVRCLKRYVAREVFNLLPRRHFAIDSP

SEQ ID NO: 433285 - protein, 317 aa, unidentified
MAKSTMVCAGIDTGKRKLDAALGEGRERRQVDNSPAGHSSLSGWLRRHRVKRVGIEASGGYEAPVVAELRRAGFVVILFQPAQVRAYARFVLQRAKNDRIDAELIARCTAAAERVHAPPDPRLAPLAEHLTMLDQLREDVARLKNRRENCREPHIRQHWGEQIARLKRLYRSALKSLAAAIRRYPDLAQRLDLIASIDGIGLPTAVAILVRMPEIGRVSREESAALAGLAPYDDDSGERVGTRHIDGGRQRLRKALYTAAFAAAFHWNDQLKALYRRLTAAGKPHKVALIACARKLLIYANTVVQRGTPWRAKPAAA

SEQ ID NO: 433286 - protein, 441 aa, unidentified
MKEEPLLLLSDLQKLINQVVLIDYTIIILEGDFMNPLYVGIDVSSKSNVVYFMLPNGDKHSNFSVANSHDGSTQLVKRICSVLSSESLDTVSIGLEATSVYGDNLVYFLREDASLASFNRKIHVLNPKQVNKFKESYNDLPKNDWVDSFVIADCLRFGRINKEVYIGDYHYKALQNLTRARYFAVCNLTKEKQRFMNVLFKKYSTMTQEKVFSDTFSTTALAVYDEFESAEALAYMDLQELTAFIIEKGKNRFPDPDAVAKAIQKAARSSYRLPKTVNDSVNQVLSISITSMKALESQIKEFDKAIAAQMELLPNVLISIPGIGPVYSAGIMAEIGDINRFDNQASLAKYAGLAWTQHQSGNFEAQNTRLIHSGNRFLKYYLCEAAFSLVRCDKEYKAFYHQKYKEVNRYQHKRALALTARKFVRLVFTLLKDNRLYRPAE

SEQ ID NO: 433287 - protein, 440 aa, unidentified
MDRVIIGVDPHKLSATIEVVDDHEQVLGSGRFGTDQAGYAAMRNYTRAWPGRVWAVEGSNGAGRPLAQRLLEAGEHVVDVPAKLAARVRLFDTGHNRKTDAHDAHAVAVVAVRTQGLRVLAHDAELEALRMLADRREELTRQRVQTVARLQRLLSELTPGKAKKDITALQAKAILATVRPRDLVGKTRRRLAAEQLAELVAVEKKIKPLTAELKVMVQARGSRLMDLPGVGPVVAARVLADVGDVARFADRNRFASWTGTAPLDASSGEQIRHRLSRAGNRRMNHMLHIAAATQIRLDTEGRAYYRRKRAAGKTRKEAIRCLKRRISDAVYRQLIADADRAHRDTAADQAEAGPGGHCGATQQSSAVDLPPHIDTSDQPLPGPAHPTLPASPAAANPSAASAPRPPRRRAGAVNVERPTGRTTLTATSFGAHSKAPKPRP

SEQ ID NO: 433288 - protein, 337 aa, unidentified
MKYSGIDLHSNNAVVAVIDDQDHVLYRKRLVNDLQLVTAALAPHREELQGVVVESTFNWYWLVDGLMAAGFNVRLANTAAIKQYEGLKYAGDEHDAVFLAHVLRLGLLPEGYIYPPQERTLRDLSRKRLQLVRQRTVNILSIESLLARHLNLRMNSEEVRRLECAAVPALHLPPYVQRALEASMAVIRALSGEIDALEQIIHREVKLRPEFAILKTAPGIGEILAATIMLETGTIARFPGPGHFSSYCRCVESRRVSNGRKKGQGNAKNGNRYLAWAFIEAAAAAVRCCPQARRFYERKKAQRLPVVAMKALAHKLARAAWYMMHEGKPFDVSRCFV

SEQ ID NO: 433289 - protein, 400 aa, unidentified
MFCGWDWGSTQHGVCLIADDGALIKRWMIGHTDRELSTVLAELATLGAVASTPIAIERGEGLVVGLIAGAGHPVLMVEPAAFKAARPRWGSAGAKSDLGDAFMLADYARTDGHRLRRVEPVDQGTRELAALVRARTALVEARTAASNQLWAILAEHWPGAALVFQKLTSQIALAFLTDYPTPQAAALLGEGRMRQFCQRHVYRGGKSPAELLGRLRSAPASVNPVAPKVLEAIVRGSTAQIRLLNTEINHLEHEIAAALAVHPKTALLKTLPRVANVSLAALIAEIGPLLERCANPEQVAAMCGAAPVTKASGKSRTVGFRYSANKPARVAITGFADNSRHSSVWAGDCYRRARARGARHPHAIRILARGWIRVIWACWTTNTVYDPHRHRGEQLLVAAT

SEQ ID NO: 433290 - protein, 346 aa, unidentified
MCYSTTVGVDLAKNVIQVSVISARGKELLNRSLTRRKFAEFLGKQQPALVAFEACATSHYWARTAQRHGHVARIIPAKAVAPFRQGHKTDSNDALAVAEAARRPNIKEAPMKTIDQQGMQAIQRSRDLLVQESTALSNHLRGLLMEFGVVIPQGIASLRRRLPEILEDGDNEVPDMYRPTLHRLFGRFLELREDIETMNVEVNELVKEHPDCKRLTALEGVGPISAVLLYASLGTGEAFSGSREFAAYLGLTPRQLSSGGKTNIVGLSKKIGNCRLRSVLIQGARAYVHKLREPKTSKDRWLLDLIERAGHGKAAVALANKNVRTAWAMLTQGTEYQRRPQLKVAA

SEQ ID NO: 433291 - protein, 361 aa, unidentified
MFTERTSVGLDVHARSVVAAAIDGVTGEVFRGRLTPSNEQVVAWVRSLPGPSAATYEAGPTGFGLARAMAAAQIRCEVAAPSKIHRPAGDRVKTDARDAMLLARLLRMDEIVAVTVPSVEQEDARDLVRAREDVRGDLMRSRHRVSKLLLRQGIVYYGGHAWTGTHLVWLRAQHFDTPGLALAFDAEHEAVLAAEARRDRLDEAIAVMAADSQFTPVVRRLGCLRGISTLTAFGLAVEIGDWDRLTGASIGAYVGLVPTESSSGASRSQGSITKTGNTHARRLLVEAAWHHHKPYRTPGATMRARWELAPAAVRARGHAGNRRLHERWLRFTERKKRPVVANVAIARELAGWCWSLAVMDP

SEQ ID NO: 433292 - protein, 446 aa, unidentified
MDHVNGLSRGDRNRNSRLTRLRGLVPPSNAIAAIDLAGEKQMLVVTDHDSRVLARKTFRLAAWHMGSALDWAAEHAARAGFAGMTVACEPTGHRWRVIGQLAADRSMPFVCVQPLLVARSRENENYSPDKTDDRDAVLIARLTAELRCYAPEATDEVWARLRHLGARRTRLADEVTSLRQQMRDLLECAWPAMLDTAARQFKAKTWCAALAVVTDRCNGDPTRLRRLGSERFFTAVRREIPRWQAQRPCRRIVDAVFAALADTTGVTVQRRGILERVGLVLDDWRDLHRRIDDTEARMVAVLDELQLTELVTSIQGLSAVNAAAILAESGDLHRFATGRALVKHSGLAPAEQMSGKLVGRTRLTGRGRPGLRTAAWRAAWGAMKSNTVYQARFTHLTTRENDKLKPSQARCAIAAALLRQLHAVVTTGTRWNATIASTGTRMTLAA

SEQ ID NO: 433293 - protein, 403 aa, unidentified
MNMNAVGIDVSKGKSMVAILRPFGEIVSTPFEVKHTVSGIRSLIEHIKAIDGESRIVMEHTGRYYDPLIRELSQADLFVSAVNPKLIKDFGDNSLRKVKSDKADAVKIARYTLDSWTELRQYSLMDEIRNQLKTMNRQFDFYMKHKTAMKNNLIGVLDQTYPGANTYFDSPAREDGSQKWVDFATTYWHVDCVRKLSLNPFINHYQKWCKRRKYNFSQSKAVEIYEASKEIVSVLPKDDLTKLIIKQAVEQLNMASQTVEQLRTMMNDAASKLPEYPVVMAMKGVGKSLGPQLMAEIGDISRFTHKGAITAFAGVDPGVNESGSYEQKSVPASKRGSGTLRKTLFQVMDALIKTKPQDDPVYLFMDKKRSQGKPYYVYMTAGANKFLRIYYGRVKEYLMSLPE

SEQ ID NO: 433294 - protein, 339 aa, unidentified
MENNNNPYYKHYLSIDWSQQDVSIARMRAGSNQPETKMFPSDIKKIKEYLKGLQGKKILTIEETTGSHWLYVELLESVDKILICDPYRNSLLKEGAKNDKIDARKLCLLLRSGLLKEVYHTSNEDYKIRKLASAYIALVKSGVRIKNQNSALYRGEGLKYKKDKIKKGEEILSFVEEQQKRAIKLYEEEKKKYEEVFKELKKKNEVIKMLCQVSGIKETSAVKIYSVVIEARRFENKYKYWAMCGLVKHDRESGGKNYGKKNPRYSRILKNVYKSAALAAIGGNNDIREYYEVLLQKGHPIAEAKNQIARYIAKVTYAVMKNKKPYKAYQWRELNKQKS

SEQ ID NO: 433295 - protein, 441 aa, unidentified
MANTVSTTPEPVWAAFVALDWGGEKHAWILQPADGGKRNEGWVDNTPEAIAVWAADLHRRFDGQPVAVALEQKRGSVVNLLLPYAHLVLFPVPASMSASYRKTFVPSGAKDDPSDAGWILDLLLRHRDRLRRLEPDDVNTRLLLMLVEDRRQLVDDKTRLALRLQDCLKQYYPQLVQWFDVDTPLVADMLQRWPDLQHLQRCHDGTLRTFFHQHHCHENITGERIEAIRAAVPATNDPAVLEACATKAGHLTALIATLRDQIKQLECRRDELVANHPDAPIFASFPGAGVATVPRLIAAFGTRRERYQSAFEVECDSGIAPVHIRSGKIDRVSMRHACQDFTRQTFHEFAGQSISQCEWAKAFYQAHCHKPEQHHAVVRSLAFKWIRILFRCWKDRKPYDEQLYLTSLRRRSGLLGSGLASVTSIGWATVAGFSKLSEKKA

SEQ ID NO: 433296 - protein, 349 aa, unidentified
MINYAGLDVSLEETAICVVDETGRIVKEIRVASEPQALVTALLSTGLPLERVGLEACSLTAWLHDELRAAGLPALCIETRQANAAMKTMPNKTDRNDARALAQIMRTGWFRQVHVKSRPCRLWRSLLVVRRTVLNEMRTIENVVRAILREAGVKLGTPSRAAFADRVRELAGDDPAVMPLVEPMLTILATMLRELARLTKQVLVIVRDEKVCRRLMSVPGVGPITALAFRATIDRPDRFRHSRDVGAHLGLTPARYQSGETDIQGRISRCGDELARTALYEAAHSLLVRSKKWSSLRAWGMAVAKHRGMARARVAVARKLAVILHRMWSDETEFRFGREPSAAAGLAAA

SEQ ID NO: 433297 - protein, 427 aa, unidentified
MGARDTVQEPGFVAFVGIDWADQKHVWSWQNADSTQHESGELEHRPEAVEAWVGELCRRFGYGPIAVAVEQVKGALVYMLRKYECLHLYPVPSTMSASMRAALYPSGAKDDPRDADLLLELLVLHRNKLRRLTPDNEATRRVQNLVEERRKLVEEKTAQLNRLTGYLKVYFPQMLEWFAKLDTKLVCDFLERWPSLEELQKVASGEVKKFFRHRRGRHGELTEWRMEGISQAMPAIRDRAVIEAKQTVVQVIAQLLRTLLEGIATLDRKIAEAAEAHPDFFIFQSLPGAGAALAPRLLAALGSQRDRYGSANEVQKYSGIAPVTERSGKRKWVHFRWACSKFLRQSFHEWAGHSIGQSVWARAYYQQQRERGNEHHAAVRALAFKWIRIVFRCWQDRVAYDESRYLAALAKRGSHLTSACAAAAVSM

SEQ ID NO: 433298 - protein, 320 aa, unidentified
MEKAKLYAGIDVAKASLDMVVHPSGKRWSFTNDERGISEAVSCLQGLSPALVVLEATGDVEMPLTAALVVAGLPVAVVNPRQIRDFARAMGKLSKTDVLDAQVMAHFAATVQPTARPIPDAQTQELSDILTRRRQIVEMIVAERNRLLTARGVVNEGIQAHIAWLEQELANIDQDLRGKIRKSPAWREKDNLLRSVPGVGPVLSATLLAELPELGTLDRRQIAALVGVAPLNRDSGNFRGKRSVWGGRARVRAVLYMGTLVASRHNPTIRAFYQRLCAAGKGKKVALTACMRKLLTILNAMLRHRTPWCHPNTQIIGPCS

SEQ ID NO: 433299 - protein, 388 aa, unidentified
MNTVFARVAGLDVHLKTIQCAVRCRQESGKLLAPVRSFGTMTRDLRALADYLQALGVTHVALEATGVLWKPVWNVLEGRFTLLLVNPRHLKKVPGRKTDVSDAEWLAQLLQCGLLRGSFVPPRAVRQLRDLTRHRAQLTGEQTRVANRIHKVLEDANIKLGAVASDVLGQSGRAMLRAMLGGEQDPKKLAELARGRLRGKMPQLRLALEGNCTEHHRYVLGRLLSHLSYLEHQADQFSGRIAHRLSELLPAAAAERLDRIPGVNRITIENVIAEIGVDMAVFPDEHHLSSWCGVCPGNEESAGKRLRSRTRKGNRWLRRALTEAAWAASHTKDSYFAAQYRRLAARRGKKRALVAVGHSLLVIIYHVLKEQVEYQDLGPDYFDRLEPE

SEQ ID NO: 433300 - protein, 410 aa, unidentified
MKVLHRRCAGLDVHKAEVVACARVFAGRKVVHEVRRFGTTTRELMALAAWLKSLKVTHVAMEATGVYWKPVWHILEADFTLILANAQHVRNVPGRKSDVNDATWIADLLAHGLIASSFVPPQPIRELRDLTRTRRQAVGEAVRHQHRIEKMLQDANIKLSSVLSDPMGVSGRRMLAAMAAGETDAGKIAELGSPRLECGRGALIEALSGRVSEHHRYLIGWHLRLLDEIEAKIAELDQRIEAQIAPFRSAIERLTGIPGIKQVAASAIIAEIGADMSIFPTAGHLLSWARIVPRLDESAGKKRSRRVKKGGAWLKPVLVQCARAAARKRDSYYGAQYRRLKARIGDQKAIIAVAASILTAIYHMLRDGTEHADLGAAYLSRREGDSKAIAHQLARRIRALGYQVDLREAA

SEQ ID NO: 433301 - protein, 350 aa, unidentified
MIIGVDYHPGFQQIAFLVEETGECDERRLDHSGGEAENFYRELKARGISVRVGLETTGYSRWFERLLAELGFEVWIGDAAEIKTKRAKKQKTDRQDAQLLLKLLLEERFPRIWVPSPENRDLRQLLWHRHRLVQMRTRIMNQLQALAINENRYWKGKLWSEKGRTELEKLPLAFWASRRRQELLELLDQMNPTIEELTAAAALEAKKRPEALRLMTHPGVGPLTALAFVLIIGTPERFGCAKQICNYVGLIPCEDSSGGRQRLGHITKQGSSLLRFLLVEAAQAAVRCNADWRRRYRHLAMRRQRNIAKVAMGRRLGARLYWMWRNGREYSPSLEFGSHAGKLGIGNGGQ

SEQ ID NO: 433302 - protein, 387 aa, unidentified
MIYVGIDIAKEKHFAAAMTADGEVLIQPFGFTNNSEGFKLLISNLKSIDNSNLLIGLESTAHYGENLICYLFDLGYNIAVINPIQTATLRKTNIRKTKTDKVDTLLIIKSLIVNNHRLYTKKDIDSLRLKSLCRFRDNLRKSKARLKIQLVTYVDLLFPELQYFFKSGIHINTCYELMKVHSNPNEIAALHLTYLGNLLHKASRGRFGKEEAIALKSLAKSSVGTGNTAVSIQITQSIAQIELLEKHITELDNAVESIMLEMDSIILTIPGIGFRNGAMILGEIGDISRFSNPSKLLAYAGLDPTVNQSGKFNAKSTRMSKRGSKLLRFALINAAWNVSLNNKTFEDYFNLKRSQGNNHYAALGHTAHKLVRIIFKMLKENVAFNLN

SEQ ID NO: 433303 - protein, 338 aa, unidentified
MNIVFLGIDLAKNVFQLCGLNQAGKPVYTKRTGRKELLQTLTNIPACLIGIEASTGAFYWQREFEKLGHKVKVISPQYVKPFVRGQKNDGNDAQAIAVALMQPTMQFVPPKSPEQQDIQALHRARQRIVNHRTVTVCQIRGLLLDRGIPIGSAVSRARRAIPLIPEDAENGLSSRMRRTIAELYDLFNDLERRIHFFDKEIETVFRQSEVCQRIAKVKGIGPETATAVVAAIGKGTEFKNGRHFAAWLGLVPRQHSSGDRQVLMNMTKKGDKHLRTLFIHGARAVVRVATNNNDGHMNQWVNQLKERRGFNKTTVAVANKNARIIWSMLRNETEYQVV

SEQ ID NO: 433304 - protein, 324 aa, unidentified
MIDAILGIDVSKNTLDVSISRCTKVRTKSFANSSDGWHHLLDWLTTQKIQRVHACLESTGRYSLGIACALYEAGHVVSIINPAQIRDFVRTKLGRNKTDGIDASRIREYCELFKPSPWAPPSEAHRRLGELQTIRAGIIAGLTEWKNRKNSGIVDAGAQALADATISHFTSQLGAVDKAIALTIDNDSDLRSKRDLLLSISGVGDTLAGVVLAELPGPDVLRSSGEVIAYAGLNPRQHQSGTSVDRATRISKIGNAVLRAALYMPALSAMRYNPAIVALVTRLKSRGRLKPKQIVVAAMRKLLVLCFGVLKTGKPFDPAIAMGC

SEQ ID NO: 433305 - protein, 426 aa, unidentified
MSEIGSQPEPEFAAFIGIDWADQKHIWCLQSAGSAKRETGELEQTPEAVESWVAHLYQRFAQRPIAVAVEQSRGALVFMLSKYEPLHLFPVPPQMASSMRQALYPSGAKDDPRDADLLLDILLQHRNRLRRLSPDSEATRRVQNLVEERRKLVDEKTAQINRLTDHLKAYFPQMLEWFGRLDSDVVCALLERWPALEELQKAQPASLRAFLRKHRCRDREQIEHRMEAVRQAIPAIHDRAVIEAKSAAVRVIVRVVRILGEGIEDLDGEIEEAAAAHPDFFIFNSLPGAGPVMAPRLLAAFGSQRERYGSADELQSFSGIAPLTEASGKRKWVHFRWACPKFLRQSFHEWAGHSIAQSEWARAYYQQQRSKGNTHHEAVRALAFKWIRIVFRCWQDRVAYDENTYLAALVKRGSPLAAIVATGKTL

SEQ ID NO: 433306 - protein, 406 aa, unidentified
MDFEVIFPNVVGLDVHSDQITACAISVKADGQPESKFKVFGSTKRERRKLSAWVRHLKADLVVMESTGIYWKSVYRALERAGIKLSVVNARHIKNVPGRKTDMTDSLWLAMLGRAGLLRGSFVVSADLDALRLISRQRQKLTGLLTSEKNRFHKVLADSGVRLSCVVSDLHGQAARRMSNSLIEGGGAEDALALSGQRLKASQDQLKEALEGELTEAHRFVLREIMDHILELEERIHRFDEELLRGLAPYNWALALLQTIPGIDVISAAMLLVEIGVDMDAFGDSAHLASWAGLCPGNHESAGKRKSGRTRKGNRWVRRVLCEAANAARRTSCMLRDKFQTLAIRRGRKRAIMALSHKMLKIIFVMLKRKEPYRDTTVNYEELMVKRNAPRWISALLRYNLLPKTA

SEQ ID NO: 433307 - protein, 413 aa, unidentified
MYNKNYISVGIDVGSAFSFMTIVAPDGSVIQKPFKITHNKPDSLEKAVSAIKKAEELHSLESRTFLESTGIYHFPLFCYLVDCGFHVSIINPIITHSANNTSIRKVKNDKVDSIGIAKLGLSGDIPVSQFPAKLVLEIRSLTRKYYDLTDERSAHINKLKGDLHTVFPQYLDIFCDVTGKTSTMILRQYGTPDKILRGHKKTMIEKISKASRKGLSKAAERYEKLCAAATAAKTFGCQIDSIYFNISLTLDQLVTFNKSEKFIQQIKWLDTIKGVGFLTAVTIMCEIGDFSAFRNPKQLFAYFGLDPEVNQSGKFVGTEMHMTKRGSRIARRAVFAVALASIRTKRNGEGINPYLREYYEKKSGQKPKMVALGAVMHKVCNIIFAVLRDEKEFELRSPEEHCRQYQRPALQAA

SEQ ID NO: 433308 - protein, 407 aa, unidentified
MELLTAILKRVIGLDVHQAQITACAIIEEPDGTVRIEQRQFGAFKRDRRALAEWCASFAPDEVVMESTGIYWKSPYAALEAVGIRAKVVNARHVKNVPGRKTDIGDAQWLATLARAGLLRGSFVPPSKMRELRLISRQRQKLVGNLSSEKNRLHKVLTDGGIRLGVVVSDLHGQSARAMVKAIIDEKPTHEVLGLASNRLKASREELFDALQGDLTDSHRFVLDELMRHIEEIEARIGRFDKRLLEGLAGEQNALALLQTLPGVDLIGAAMLLVEIGDDMTAFGSADRLASWVGICPGNNESAGKRKTGRVRKGNIYVRRLLCEFAHAASRTQSAFKSKFEALIIRRGHKRSIVALAHKLLRTIFFMLDRGEYYRDSATDYEALSVKRNAARWIKSLIRFGFIPKPV

SEQ ID NO: 433309 - protein, 408 aa, unidentified
MGPDPAEVEVLVGLDVGKTSHHATVIDTGGEVLFDRPVTNSQAALEALLDRATEYGVSALVIDQPGSIAALSLAVARDRGVAVAYIPGLVMRRAADLYPGEAKTDTRDSYVLADTARVHRSRIAWLTADDELLERLRVLSGYDDDLAADVVRVANRLRDTLTTLNPALERVLGARLEHPAVRALLARYPTPDALREAGRARLLRLLTRHAPRVGRRLAEEVLAAVASQTVTVPAEQTHGRVVADLAGELDRLHARREQLAADLEEAFLAHPLGPVLVTLPGVGPRTGAKILAEIGDGSRFATGSQLAAYAGLAPVTRQSGSSIRGEAQSRRGNHRLKNAMFLAAFASIRSPASKAFYDRKRAEGKRHNAAVICLARRRCDVILAMLKTATPYDPARHPRQPKTAALAA

SEQ ID NO: 433310 - protein, 409 aa, unidentified
MQIVHERCAGLDVHKKSVYACAIWPGERGAKKQEVCSFGTFTADLLKLADWLRERGTTHVAMEATGVFWRPVWAVLEGQFELLLVNPQHIKAVPGRKTDARDCEWIADLLQHGLLRGSFVPPREIQDLRDLTRYRAELTQARNKVDNRIQKLLEQCNIKLSSVASDTLGLSGQLMLEAIIRGEDDPAQLAELAQRKLRGKIPELRLALAGKVRDHHRFLLNEYLEEWKSLGERIKRVEQEIDHRIPPFEQEVTLWKSVPGVDHTTACNLVAEVGVNMSQFPSGAHLASWAGVCPGNNESAGKRLSGTMRDGNKWLRRALCQAAWAVTRKKDCYLSAQFARLAARRGRKRALMAVAHTMLVIGYAMLKTGRGYHELGGTYFEQINKDQLQRYFVKRLERLGLDVSVTPAA

SEQ ID NO: 433311 - protein, 345 aa, unidentified
MEHYVGLDVSLKLTAICIVDRTGKIEREGVVSSDPEAIAIFIKSHAPHVVRVGLETGATATWLWTELNKLGLPVICIDARHAKAALKMQINKSDRNDAVGIARIMQCGWYKEVHVKDLDSHAVKALLVSRALLVKIKRDLENQIRGLLKNLGLVIGRAKMNVFAVRAAELTEHRPELAAAVVPLLSARAAIEQQIADLDRKVMRLARKNAQARRFMTAPGVGPITALCFLATIDDPTRFKRSRSVGAYLGLTTRRYASGEIDWTGRISKCGDKMLRSYLYEAANVMLTRVARWSALKAWGIRVAKRTGLRKAKVAVARKLAVVLHRMWIDGTEFKWSKEAANQPA

SEQ ID NO: 433312 - protein, 441 aa, unidentified
MSVINPNACGIDVGSKMHYVATGQGSEEVRSFGVYTKDHQEMVAYLKSKGVRTIAMESTGNYWQTLFAALEKAGFEVFLVCGNQTKNVKGRKTDVQDCQWIQWLHSVGMLSNSFIPNEFVSHLRIYSRQRIKYIQVQTRIINQIQRDLRAMNLRLEVALNDVTGKSGRAIIEAILSGERNPITLAGLADYRVKKSKEEIALSLEGNWHEGYLFVLRQHYGEYVQNLDRIQACENEIEKILKESLVCSEINTQDAPLHKKALKKNKNKPVIDFQAYSFQYFGGVDLFAVEGVNQNTVLSIITEIGTDITKFHSANAFSNWLHLCPNQKVTGGKVISNHTKRGTNPLSQALKSVANVIGNLKTVTHLTRFFKKIAYKKGWKEAITATAHKLAVIIYNMLTKYEPYKPFVREVNEQTERTKKLKEVEKILKAHNIKIEEINFSY

SEQ ID NO: 433313 - protein, 389 aa, unidentified
MIYVGIDVAKDKHDCCILESEADKLYPVFTISNNKAGFDELYEKIFTVTDDKTKIKVGLEATGHYSLNLLGSLIDKGLPTCVINPLHTNLYRKGLSLRKTKTDKVDARSIAMMLMTNKTLKPYSDTSYHSEELKSLTRYRFDKVQERAKLKSSVARLVNILFPELEKLVPSLHMASMYALLSKLPGASYITECHLTHLKNLLETASKGHYGRDMAITLRNTARDSIGSVIPAKSMELKHTIHLIEVMTEEIDEIEDSIKSIMDTCNSPIMTIPGISYRMGAMILAEIGDFTRFNYADQILAFAGLSPSTYQSGQLDSSYSHMEKRGSRYLRYALFNAAKFVCKWDENFGAYLSKKIGEGKHYNVAIGHATKKLVRTIYQMELTGEAYRR

SEQ ID NO: 433314 - protein, 408 aa, unidentified
MNAVGIDVSKGKSMVAALRPMGEVALLPQEFLHTEVGLEQMAYAIIALGEDTRVVMEATGRYHEPVAAALHEYGIYVSVLNPLFIKQSGGGSIRKVKTDKADAMKIAKYGLDNWGDLREYTPMDTVRQQLKLCSRQYNLYMKTVVSLQNNLISLTDKTFPGVNELFSSPERADGHQKWVDFVMTFWHCDCICRVSEKAFTERYQKWCKRKGYHFSTEKALDLYAGSCGHFTTLPKNDNTKLLITTAAQQLLAGKMTLAALRAEMTRLAMQLPEYDTVRAMYGVGETTAAQLMAEIGDVRRFPRRSSIVGFAGVDPGVDDSGKHSAKSVPTTKRGSPHLRKTLYQIVCTYLRKAPADEPVYQFLDKKRAEGKPYFVYMTAAQNKFLRIYYARVKECLEAFDAQRDITQS

SEQ ID NO: 433315 - protein, 364 aa, unidentified
MKIVGCDLHAGQQSIAMMDSETGELTEKVLKHEGNAVREFYGSLQGPVVVGIEATGAMQWFLEMLEQLGIECRVGHPAKIRAAETRQQKHDRRDAEVILELLLMKDRFPDIWMPSTEQRDLRSLLRDRHQWVKMRARLQHTLQAIALNHALRKGKALWTVRGRQALQGLALPDYTAQRRDELLRLYTQLEQRIQQLDRQVEKEARARPQARRLLTHPGVGPVTALATEVFLGDPHRFSTANEVANYSGMIPCEHSSGKRRRLGKLTKEGNSLLRYLWTEATLHAAVKDPELKRFYRRKLVQKGMGKARVATARKLGIRLWIMLRDEIDYEEFCRRGRLPQKGKTHAGMPDFNSGPARAGTGSTE

SEQ ID NO: 433316 - protein, 367 aa, unidentified
MEQTTYVGLDVHAASITAAILADESQHAEIVELSSDLMKVRRLFRRLSDHGPVRACYEASGAGFVLQRVLTRDGFHCDVIAPSLIPRKPGDHRKTDRLDALMLARLYRSGHLTPVHVPTEDHEALRRLLRLRTTYHTYCTATMHRISGVLRNHGLVFTEGKSTWTKKHRRWLDMLRQQLDGPLQTALAMEIEHLEYLEAQQHALDAELERFARSDAYRTATEALCCLRGVKVLTALTLLCEIDDVRRFLSPRALMAYFGLVPSEHSSGDKEHRGPITKAGNIHVRRLLVEAAWNNRHNTGAELVLNRRRQGQPPDIVAIALKAQHRLHKKFHHLDQRKHRHVAITAVAREMCGFIWAILRQLPPSSN

SEQ ID NO: 433317 - protein, 389 aa, unidentified
MLLDHPFDGPTAIRTHIAAIFISLELSRSNWLVTSLSPGKGEKMSKHSVAAGDTAELLALFAELRRKAEVRTGHNYPIVTIQEAGLDGFWLHRVLQQNGIESHVVDPASIATPRRRRRAKTDRLDGETLLRALLAYKRGEPRVCAMVVAPSPEEEDRRRLCRERRTLIEERITHVNRIKGLLFAQGISDYAPLRRDRRARLEALRTGDGRELPSHLKAQLGRALDRIELLVDQIKAVEAGQEALLAAARKPASEEAVPDPVTMLLALKGMGANFAAVLWSEAFYRQFANRRQVAAYAGLAATPWQSGGIRHEQGVSKAGNPRLRTTMIQLAWLWIRHQPQSALTRWFKERSQQGRKRAIVALARKLLVALWKYVTQGVVIEGAVMKSAA

SEQ ID NO: 433318 - protein, 341 aa, unidentified
MYFVGADLHKQSIMFCVVEVVERSVRVVQTKRFRCREITKITKFLRSLGKFQVTVEATIGYDWFAALAEEYAERVVIAHAGKLRIIAESTRKTDKIDARILAEFLAHDMIPSAWRPTPRVRAHRSLVRRRNKVQGRITSVKNTMRGILTRYNADRQDLFTRVGWKAAMKTNLLKEERWLLGELRHDLQQGQARLAAVDDRLAEFAAQAPLKEREARAVLATHPGVGPVTIETILAELGDWERFRCADAVVSYAGLAPGVRESDGRRKDLKLSKSGSPLLRWILIQLAHRVKRSTLRWRRVFERLSRRIGNKKATCAIARRLLLVIYAMLRDGQAYRFAAVA

SEQ ID NO: 433319 - protein, 350 aa, unidentified
MLIIGCDFHSRFQQIAMLDPQTGEVIERRLEHENGEARKFYAGLATPARVGMEATGYAQWFERMLAEQGHQLWVGDAAEIRAAMVRKQKTDSRDACHILDLLLRDKFPRIWIASTEERDVRQLLRHRYKLVCLRTSLKNQLHAMAMGQGICRKKKLWTAVGRKELQGLSLGPWASRRRQQLLDMLDQLEPVMEELDRAVIQEAEKRPAAVHLMTQPGVGPVTALAFVLTIGPVERFPKSRKLVSYLGLNPIESSSGGKQRLSGISKQGNSMLRFLLVEAAQTASIYDPELRRDYQRLKFRRGRGVAKVAIARKLAVRLYRKLREAAQPVPPAPMQGSPAHSVVGESLSSF

SEQ ID NO: 433320 - protein, 414 aa, unidentified
MQDLLEVCCGMDIHKETVVACLLIGAPEVKPSCEIRTFSTMASGLDELKHWLEDTGCVHVAMESTGIYWVPVYERLEDSTEPINLMVVNARHMKNVPGRKTDMRDAEWIATLLRAGLLRSSFIPEKSIRELRHLTRYRKSIVHDVTAQKNRIEKFLQSAGFRLSVFLSDVFGVSGRNVMRHLIAHGSIDRDDMERCLKKQARHKLNDILTSVNGTMSAHQRQFLSTMLEHLEWLETHQCQIEVAIESSVSEFHGAMSVMISIPGIGRTAASSILAEIGPNMGCFATSEHLCSWAGMSPGNNESAGKRKSTTINHGNPYVKSMLCEVAWVIAGKRNTYLSNWYWRLKQRKGAKKAIVALGRKLLVIIFVMLTNGTLFDESCFEQRRQHCERRRVTRMLSELGRLGYSVSPPSAIA

SEQ ID NO: 433321 - protein, 338 aa, unidentified
MKTYAGIDLHSSNNYIGVIDAKDKRLYSKRHDNRIEDVLKVLGKFKASLQGVVVESTYNWYWLVDGLSDQGYKVHLANPNAIQSYDGLKHTDDKWDSFWLAHMLRLGILPVGYIYPKQQRSVRDLLRRRLMFVKQRTSQILSLQSMITRNRGLNFSGAQIKRFRDEFIDKLFSDRHLVFTAKRNMATIRFLDQIVSEIEIEVGSQIKLKKEFISLLTTPGIGNILGLTIMLEVGKIGRFPKAGNYSSYCRCVESNKISNGKKKGKNNQKNGNRYLAWAYVEAANHAIRCCPKAQKFFQRKMAKSERVLATKALANKLTKATYYIMRDQVAFDEDKLFG

SEQ ID NO: 433322 - protein, 425 aa, unidentified
MKNIDYLSTLFVGIDIGSRLNVISALNFEQDFLIRMVPIPNAQYGAEQMEQMIAQVLEQHHEFRSLIIGLESTGFYGVHIANYLSTCERLAPFSTRVYCLNPKEVAKYKESFNSLNKNDGIDSFVIADFARVGRIHIQPWRGAQYLALQRLTRHRLHITECIAREKTYMLNNIFLKFSEFAMLDKDEHPFSNKYGATAEAVLTDYLSTEAIVNASVDELIAFISSKSHGRISDPEQTTYLLQKAANDSYRLDKCLYEPLTVSIGCSFNCINAFEKELKAIDDAILRTVKGLNPTEYQILNSVPGIGKVYASGILAEIGTIKCFKNNDALAKYCGIVWKENQSGNFEAEDTPMNKAGNRYLRYYIIEAAGSVIRHCPEYKAFYEKKFAEVRTHQHKRALALTSRKLIRMLFGLLDKSQLYSVEKSR

SEQ ID NO: 433323 - protein, 399 aa, unidentified
MNSVIYCGMDVHKNSFTLCFVYGGGVLGGLVYSKPVQIGNSVSETVKICKQAAEQYKKDYGEDAKVVCGYEAGCLGFTLCRNLGKAGLRCVVLAPTTMLKDQKRVKTDKRDSRTIARCLATGTCSLVTPPSPHDESVRDFVRMRDDHKSIQKTIKQRILAFCLKRGLIYEKTNWTGAHLDWLRKLTFEEPTDRETLDDYLLTYDQFAARISAEDARIDELCEEKEYEESVKKLKCFVGIKNKLALSLLTEIGNFTRFDSAGRFASFLGLTASESSSGEKQRQGGITKSGNSHLRKQLIEAAQGICRGRPGYKSKALKERQADCDSETVAYADKGNVRMRKRYYHLIEKNKSRNTAVTAVARELACFVWGMMTDNTKTPEEQEAADRAEAQALGEALAAL

SEQ ID NO: 433324 - protein, 338 aa, unidentified
MKTYAGIDLHSSNNYTAVIDEHDQRLYRKRLPNRVDTVVSALDPFKQTLEGVVVESTYNWYWLVDGLQDNGYTVHLANPSAIKQYEGLKHTDDQWDSFWLAHMLRLHILPEGYIYPKEERPVRDLLRRRLLFVKHRTAHILSLQSMITRNCGTQMSSRAIKGLEQRDAEILFDHPHLVLAAHHSIAAVRFLKERIVSIEKEVKSVITLRKEFTSLLTIPGIGDILGLTIMCEVGDIARFPTVGDYSSYCRCVKSERLSNGKKKDENNRKNGNKYLSWAYVEAANFAIRFSAHAQAFYQRKRAQRNGTVAIKALSNKVARASYYIMRDQVPYDPDKLFR

SEQ ID NO: 433325 - protein, 345 aa, unidentified
MSVYVGIDVHRKRSQVAVVDESGKVLANRNVPNAVEPFLKVIGGLPPGTPAAFEAAYGTSWLVELLESYGFTPHLVHASRCKAIASARLKNDKVGASILAQLLRVDLLPEAWIAPPEVRQLRALLRHRVALVRLRTLLRNRIHAIVADHGYDRPAGEYWSGPGRAWLASLELPAVSRELAGDDLALIGALETVIDRLDWEIRQRGRSGPRVKVLTQLRGVGPFTALVILAEVGDVSRFGSARKLASWAGPATGRARQRPRRPLRAHLENRGSVLLRWALCEAAQTAKRSPQFAATFQAIAKRRGKKIATTAVARKLLTRAWHLLTDAGHAIPPPAAAPTAPEGTR

SEQ ID NO: 433326 - protein, 343 aa, unidentified
MKITTIGIDLAKNVFLVHGVDGQGRTVLKKQLRRHQVAPFFANLPACLVGMEACSSAHHWARQLERLGHQVKLMAPQFVKPYVKTNKHDAADAEAICEAVSRPNMRFVPLKNGEQQAVLALHRARQGFVKARTAQANQIRGLLGEYGIVVPQGIVHIAKRLPAILEDGENELPGSFRQLLARLGEHLKELDRQVGELEQQIQCWHRENEASRKLEQIPGIGPLSASALVATIGDAKQFENARQLAAWLGLVPRQHSSGGKPMLLGISKRGDAYLRTLLIHGARSVVRVAERKTDEGQRWLVRLIERRHKNVAAVALANKNARIVWALLAHDRDYQADYAALAA

SEQ ID NO: 433327 - protein, 380 aa, unidentified
MVHHREAFVAFDTAKLRNAVAVADSGRKGEIRYVGEIDNTEAATRRLVAQLESKYSRLTFCYEAGPTGYGLYRLIKSLGHDCIVAAPSLIPSKPGDRVKTNRRDAVNLARLLRAGELTAVWVPDTRHEAMRDLVRARDAAAKDYKSKRQNVSSFLLRLGLHYPGKKTWGRSHMNWLTSLKLEHREQRIAFEEMLLAVRQAQERIGRLEQAMREAVEDWTLAPAVEALQAMRGIDLIGAITFLAELGDLSRFDNPRQVMAYLGLTPSERSTGESIRRGGITKAGNTRARRLLTEAAWSYRFPPRVSKDMQARIGAAPRIAREIAWKAQTRLCARFRTLIRQGKRPTIVVIAIARELSAFLWAINREIAMSLAAPMQQSSPA

SEQ ID NO: 433328 - protein, 329 aa, unidentified
MTTNPPQIVFNHIVAFEVSKEKLVVHTLPDDEQWTIDNKPQAVRRLIKAEIKRNRKKQLGRMLVICEATGGYERHVLDVALDMGLSVHRAHGTRVRHFGHYRGLLAKTDPIDARLIAQYGLKTENIRLYSPPPPDIAALRALHARRTEIQQMLIAEASRLDHAQHKSVLKSLKAHIASLKAALAAIEADIAQLVEGSEMLRKKVALMQTVIGIGPISAMVVLAYLPDIGQLTKGQAARLAGLAPINNDSGKKRGARHVEAGRTAIRRALYMAAGVAMRANPILKAFSDRLRGKGYPFKYVVTAVMRKLIVILNAVLRDGQSWKGAQMAA

SEQ ID NO: 433329 - protein, 341 aa, unidentified
MEQYIGLDVSLKDTFISVREGGKRIWRGKCASDPTAITHVIRKQAPNVSRVVFETGPLSVWFYHALTAQGVPAVCIDARHAKAALDMAANKTDVNDADGLAHLAEVGVYREVRVKSFDSMLVRTLVAVRRQMLKMTIQISNQIRGVMKTFGLVVPKSAGSVFDGHIRILLATNAGLERIVLPMLEAWQAVRARVAQLSKQLIASARTNEQCQLLMSIPGIGVVTASSFIAAIEDPANFTKSRSVGAWLGLTTRRYQSGEVDYAGRISKRGDNHLRTLLYEAAMVILTRTTADSALRVWGLKLKERAGFKRAAIAVARKLAVTMHTMLKTGELFDRSAGAAQ

SEQ ID NO: 433330 - protein, 419 aa, unidentified
MGKRRNRVCGADIHNELIVATIQCSDDTTLREEFGTTRSELERFKAWVISNGCEQVAFEATGAYWFPVYDVLSPSIDTVVGNPWMIKGLPKDKSDDHDSKSIASFCLNGQIKRSRVFSTDDRDLRTMTRARSGYVKTRTQFRNRIHKYLALRGIKLRSGIRGIFGKSGRHVLNGLVDGESTDTILDGIPSGRIRKKREIIKDGISIGFDDTTKLLVKDALEVLDNLETRIERMSREILRRTLNKSKNLAIVMSVPGISFVSGSQILSEIGDYRDFSSPEQLARWCGLTPGLNESAGKKRPCGITKQGSKHLRTILVEVAQVISRMKHNRFTGFFNRIMARKNRNVAIIALARKLICIIYHLLINQELFDPGLKKTTKSKSKRNAQAQESSMEDQLQDKVAAIVDAYYRINAKSVSKGGG

SEQ ID NO: 433331 - protein, 388 aa, unidentified
MKNRSDLNQSYAAFEQASTIVSVVELSSKSWLAAGTVPGVKRQPRKNLSCNPDGLLTQIERWRAEAVKAGHEINRIVVAFEAGRDGVWLARFLRARGIEAYVIHAASIPVPREHKRPKTDRLDTEMLMRALLGWLRGEARHCRMVEIPALEQEDAKRPSREHDDLVRQQTSLVNRMKSTLVWLGITNFNIKLVKAGQKLAGLRTPGGEPIPPNTLAELYRDLERLAVIRKQIKAIEEARLQRLKAKPAQGTNPLVLMLAQVLGLGLETADLLVHEVLTRNLRDHRAVGRYGGLTGSPDESGKTRREQGLSKAGNWRVRHSSLQLAWRWLKFQKGSALAQWYRARTAGGGDVTRKKMIVALARKILIALWRYMTTGELPAGVVLKPAAI

SEQ ID NO: 433332 - protein, 353 aa, unidentified
MTHTHQRPAEDIAVVGVDIGKDVFHLIGFDGRGKIVFRRKIKRLALIDTFKALPPCVVGMEACLSAHFVARTLRKLGHEPRIIPAKYSKPFVKGQKNDYNDAEAIAEAALRPNLRTVREKTQKELDLQAYHRIRSRLVSRRTATINQIRAFLIEQGITVRSGAHALRTSLFQILQNRADEISPRMTDLIVELYEDWLWLDERIETITSEIEKIAAEEASCQRLMSVPGVGPIISTAMVAAVGDGEAFERGRDFGAWLGLVPRQYSTGGKPILGRISKQGNRYLRTLFIQAANVILMRPHNWTKFSFGPWLTDAATRLHHNKLATALANKLARISWSVLRHARPFDTHREASAI

SEQ ID NO: 433333 - protein, 391 aa, unidentified
MIYIGIDVAKDKHDCFITNSDSEVLFKAFTIANNLDGFNDLYQKIESVMDDVTKVKVGLEATGHYSYNLLGYLIDKGLPTYVINPLHTNLYRKSLSLRQTKTDKVDARTIASMLMSDVNLKSYSDTFYHNEELKSLTRYRFDKVKERAKLKTSVSRLVCILFPELEKLVPTLHIASVYALLSEFPSAKHVATAHLTRLTNLLSESSKGRYGKDTAITFRDAARASIGSNMPAKSLELKHTIKLIQELDSEIDEIENEIKIIMDEINSPILSIPGINYRMGAMIIAEIGDFNRFDSPDKILAYAGFSPSTYQSEQLDGAYAHMEKRGSRYLRYALYNATKYVCHWDPTFAAYLAKKRAEGKHYNVAISHAVKKLVRVIYHLEKTKQQYIKVA

SEQ ID NO: 433334 - protein, 347 aa, unidentified
MTIVEDTRAITGGVDTHADMHVAAALDPIGGLLGVREFPATAAGCAELLDWLRGFGTLALAGVEGTGSYGAGLARYLAAAGVRVVEVDRPDRQDRARQGKSDPLDAVSAARAALSGRASGAPRGRDGAVEAIRALMVAKRSARQERTQAINQARALIVTGPDDLRVRFTGHTTAQLADAIAALRPRPGDAPGYATRVALRELGRRVRFLDAQLDRLDELIGPLVTARAPGLLSLHGVGPDTAAQLLITAGDHPGRLRSESSWAHLCGAAPIPASSGKTAGRYRLNRGGDRQANSALWRIVLVRLSSHPATRAYADRRSKEGLSKKEIIRCLKRYVAREVCHQLRDGA

SEQ ID NO: 433335 - protein, 343 aa, unidentified
MDKIYDKCCGIDVHKKLIVACFRCGKKQEVREFGATTRELLELADWLKDGGCEIVAMESTASYWKPLYNILESSDLNAIVVNARHMKAVPGRKTDVKDAEWIADLLQHGLLQPSYIPDKDQRELRELVRYRKSLVGERTRELNRLQKMLEGANIKLSGTVSDINGKSARSILEYLLTGKSMDGSKYDEMYEQKIIAHNLKATKEQIVDDLNGVMFPLQRRMMKELLVHLDELNIHIKNLDDEIDNFMKPEEKQASQAIQDVTGIGNTSAQAIISVIGSDMSRFPTDRHISSWAGLCPGDNESAKKRKSGKTRKGNALLRTTLITCAHAAVKNKVSILKVRVNG

SEQ ID NO: 433336 - protein, 414 aa, unidentified
MGPSCEFCIGGMNVNCVGVDVSKGKSMIAVMRPLGELVIPPFEVGHTGIELCELSSRLRELGGETRVVMEATGNYHLPVASFLYDSGFYVSVVNAMLVHSYGNNSLRRAKTDKKDAIKLANYGLDHWLALPRYIPEDEVRLMLKTTYRQYQQCAKVQTMLKNDLISLLDTVFPDENRLFASPARADGSEKWVDFVAAFWHCECVCGLSEKAFAAKYQKWCKKHGYNFSQDKALDIYASACGHFSVMPKTDTAKLLVEQAVSQLRAASAALATLRNEMQSLAASLPEYPVVMGMFGVGPALGPQLMAEIGDVRRFHSKKALVAFAGIDAPPYQSGQMEVRSRSISKRGSSALRRTLFLVMSAILRCSPADEPVYQFMDKKRAEGKPYRVYMMASANKFLRIYYATVKQYLDSLEA

SEQ ID NO: 433337 - protein, 295 aa, unidentified
MSTTIGVDVAKSVFEVAVSNRPGRIVKRHRLSRGQFARFLATRAPATVVMEACGMAHFWGRQAVASGHRVVLLPPHAVRPYVPRNKTDRADATALLEAARNATIHPVPVKSVTQQALTGLHRLRSTWLATRTARINTVRGLLREFGVTIPVGARQVVPRIAALLAGPDDTVPAVLHPALAAVISELRELDVRLRTVEQQLTAIAAAMRAVERLRTIPGIGLLTATGLVAFVGDARRFPTARHFASYLGLTPREHSSGLRRRLGAISKRGDTYLRMLLIHGARAVLCHAKKAITPA

SEQ ID NO: 433338 - protein, 342 aa, unidentified
MELSVLGIDLAKQVFELAGIDGRGKPVLSKRLTRKKLLPFVAQLPRCLVVMEACGASHYWAREIAKQGHPVKLLKAKDVKAYVQGDKDDRHDAAAITEAGTRAHLREVAINSVEQQDMQSLHRIRELLVGQRTALANQLRGLLAEYGVVMGKSLGVLRRRVPEVLEDAENKLSAGFRACVAEMYERLRGFDERVSDYDRRLGAVARADERCRRLLEVEGLGPMSASALVAAVGDARQFDSGRQLAAYIGVAPTHTGTGGKNRVLGLSKSRGNRYVRTLLIHGARSVVRHAANKTDPRSRWINRIVARSGANVAAVAVANKNARIVWALLTRAERYRPAQEAV

SEQ ID NO: 433339 - protein, 327 aa, unidentified
MNHSEQVKAVLGIDIAKATFKVALLRESKFKHKTFPNHQEGFKALTLWLTQHRAQQVHACMEATSHYSEPLAEYLFDQGMHVSVVNPARIKGYAQSELVRTKTDKTDAALIARFCAAMQPALWQPEPQEIRVLRAYVRRLDALIDMRQQERNRLEATDAVLADAIQSHIVYLEQDIQQTQQKINDHIDNHPHLKDKKQLLESIPGIGPATINVILSEFAQVQRFKNAKHLAAFIGVAPRLFESGTSVRGRSRMSKIGRSQLRKAFFMPAMVALRYNPIIKSFGERLRASGKTKMQVIGAAMRKLIHIVYGVLKNEMPFDEKFFVKIA

SEQ ID NO: 433340 - protein, 335 aa, unidentified
MDFCYFIGIDIAKDTLDWAVCTPQGVQLSTHAPNTLAGIKAALSELKTLPGWNPGQAVFCMEHTGIYNAHLLELLHELKLAVWLESSLQIKQAGGMQRGKTDRVDAQRIAQYAYRFRDQMRLWEPPRDIVQKLAFLSVTRQRLNQAYNLLAVPLAEQETFVNRSLQKALKGNVKKSLTALQEEQKAVDQQIQQLIKGDARLKELFDLMVSVPGIGPVIATELLIVTNEMQTINAPKKLACHAGVAPFDYRSGSSIRGRSKVSHQARKRLKALLHLGAMSAIQVKGEIQEYYRRKLAEGKHTMLVLNAVRNKLIHRVCAVVGRGQKYDKNYVPTLA

SEQ ID NO: 433341 - protein, 337 aa, unidentified
MGSYVGIDLHRQRSVIVVLDDDGKRVSWSRIDNSAVNLAREVTAAGPAAEVAMEACWGWYWAADVIAECGARLHLAHPLGIAGYANRRVKNDIRDATLLADLLRMGRLPEAWVAPPEVRELREEVRYRHKLTRLQTGLKCQVHQVLGKEGVIPETKGIWWSGGQRWLDELDLADAYTNRIESLRDLIELNAREIAQSDTRIHMRLKGHPGYEAIQQIAGVGRVLGAVFVAEVGDVHRFPDARHLCSWAGLTPRLRESDAHTRRGHITKQGSRLLRWAAIEAVSGAARDRRVASVKARVGARRGANIGRVAAARHLLTLVYYGLRDGHIRCLATPDAA

SEQ ID NO: 433342 - protein, 364 aa, unidentified
MLGVGHVNDSEEAPVNEQYAGHQIVGMDLHRRRSVLVRMTDTGEHLETVRISNDPEYLRAVMARAGEHPDVVLEAAYGWYWAADTLAELGATVHLAHPLGVKMFTYRRVKNDQRDAADLADLLRMGRLPEAWIAPPATRELRGWVRHRAKLVGLRSNLKCQVHAVLAGAGVQVSMSDLFSPGGQDLLARVALTPESRARVDSALRLITGLDFEVELFGRLVTNRLRRDRGYLAIQAIPGVGPVLAAVFVAEIGDIARFARPEQLASWAGLTPKHHESDTTVHRGPITKQGSRLVRWAAIEAVQRVGGHTRLGQIRDRVAARRGRNIGVVAAARELTELVFYGLRDGRLRCLSTPAASNTVNPAA

SEQ ID NO: 433343 - protein, 331 aa, unidentified
MEVFLERCAGLDVHQASIVCCVLIGVPGRKAQKLLRSFGTTTRELEALRAWLGEHGVTHVGMESTGVYWKPVYAVLEGHFDLIVGNAHHIKNVPGRKTDVKDAEWIAQLVRHGLVAQSFVPPPAIRDLRELVRHRRTLVETRTAGRNRVLKLLEGANIKLPGVASDVSGVSGMAMLAALASGTNNASEMAGLARGRMRRKHAALEAALEGRMREHQCFLLGMQLRSLGTIDRDLDALDARIGAQLEPYQAQHRLLMQIPGVDGVTAASIIAEVGTDMDVFTAARRLAAWAELAKVPRAKRVEYQRRAGSRRATTKARASRRVPAPAGATCS

SEQ ID NO: 433344 - protein, 339 aa, unidentified
MKLYAGIDLHSSSSYLAIIDDKGVRKYKKKLPNNLEGILQQMKLYKKGIAGVVVESTYNWYWLVDGLEAEGYGVHLANPSAIQKYTGLKHADDKHDAFWLAEMLRLGILPEGYIYPKEERPVRDLLRKRGHLVRLRTSLIISLQHIISRNCGIRLNGDEVKRLKTDHVTPLLAQNEDLRLAGAVSKESIDFLTRKINSIEKVIEPKVELKEPYRHLLSIPGIGKVLALTIMLETGPIGRFEHVGNYVSYCRKVGSQWTSNGKAKGKGNKKNGNKYLAWAFSEAAELARRYDAQVRAYYNRKLQKSNLMVAHGALAHKIARAAYYIMRDEVPFMPEKLFS

SEQ ID NO: 433345 - protein, 347 aa, unidentified
MDTIGLDLHKRESQLCIGHDDGTVEERRIVTSRERFTAVLDGRPRARILVEASTESEWVAQHLESLGHEVIVADPNFAPMYATRSRRTKTDRRDARTLMEACRLGAYRPAYRLSDARRHVRAELAVREALVRTRTRYIALAKALVRRDGLRVAASEAHLAARRIGALELSDALRAELAPLFTVLEPLNAQIAAADRRIAAASEGDSIVALLMTAPSIGPLTASAIVATVDDITRFASAPQFAAFLGLVPGERSSGDKRRIGRITKAGNARVRYLLVEAGWRILRAKDGETAAVRAWALQIAGRRGKRIAVVALARRLAGIVYAMWRDGQPYQAAKLHAPRPSMRRSA

SEQ ID NO: 433346 - protein, 484 aa, unidentified
MAKRRMSTFERLRAGRMSRAQRRELGRRVAAGDPGLTVVHANAGGIDVGNESHFVAVPPDRDENPVREFGCWTRALQEMAEWLQSCRVDTVAMQATGVYWIALYDILEQHGIRVILVNAQHTRNVPGRKTDVQECQWLMKLHTYGLLRDSFRLQQEMEYVRTIWRIRDRHVKDAGRAVQHMQKALTKMNVQLANVISDISGLSGQAIITAILRGQRDPFQLADLVDYRVRASREEVARSLEGNWRPDVLFELQQAVDSYHFAHRQMRECDEKLAGYLASLPTRTLEVPVPSESAPETAAQRRKKAKKPRDNEPQMDLKGELQRICGVDLTSIDGINVMTAFTVLSEVGTDMSRFQDEDHFASWMGLAPSRDVSGGKIVGPGKKKVKNRVAVVLRTAATTLLQSDSHLGARYRHLRRQLPSFRAAAKAMARYLALLIYRLLTRGQAWVDRGAAHFEQRRGERELATLHSKARAKGFALVPIAEAC

SEQ ID NO: 433347 - protein, 341 aa, unidentified
MYYIGLDVHKKTISYCVKDASGLVHQEGKIGATRRELDGWIKALPQPRIVAMEATIFTGWIYDHLLPHAAQVKVAHPLMLRAIAAAKKKNDRIDAGKIADCLRCDFLPECHMAPLEIRDRRRTLRYRQLLVRQMVQMKNRISGLLMETGVEYNKRRLHKVGYFGELLSTNEEIKESIRPLLKLSRETIVRLQKTEYALVSSLQRDPLLAERIRRLRTVPGVGPITALTWALEMGDVSRFRSVKQAISYCGLCGDEKSSADKVIRTPLSKQRNKHIQRVLVEAAKLAPREDHKLALVYETEKQKGNANRATLAVARKMVAYLLAVDRGARSFVPAEEHSTAA

SEQ ID NO: 433348 - protein, 451 aa, unidentified
MTKKKMELDIINPNCAGIDIGSKSHFVAVGQAMEDVKEFGVYADDLTAICLHLKEYGITSVAMESTGNYWQNLYVELEKHQMEVTLCNGKFTKHAKGKKTDVKDCRWIQKLHALGLLTGSFLPDETTEQLRTYCRQRTNWIDLAAEASHKMQKYLRLLNFRLDVVVKDICGLTGLAIIADICKGNLDPEKLSLHRHGNCRKSQEEIAKALKGNNRTDFLFGLKQEYDSYLFFQKKIDACDTQINAFLKTQINSNPDKKKLKTDEKLHKRVNKNSIKGIDLNQAAYQYFGGIDLMKIEGLSHSTILTIMSEVGPEGFTKFESSKQFTSWLRLAPNNKISGGKILSNKIPKGSNRLKIALRHAANAIGNLKDTHLADFFKRVAYRKGRATAVSATARKLAVIIWNMVSKRMEYKAPSEYLFLDQKRKMNVIQKIKKNIAKLEIKPEDLGFVTA

SEQ ID NO: 433349 - protein, 419 aa, unidentified
MSFKILKNNCCGLDVHKTWIYACIGITDSFKRTEYKQARFSSFTKGLQELCLWLAKYNCIDVCMESTGKYWIPVFNVLEKNNIFVTLSHPKYTKPQKGNKTDRKDAKWICDLYMCGMVKPSFIPPADIRQLRDLVRYRFKLTCMITGEKNRAHNCLTVSNLKLDDVFSDIFGKSSRSITEQILQHPGEVFDVAPFVDSRCKTPIEEIQAAVDGAISHEQAVKLRQCLKHIDELEMHKAEIEREIFRLSQKYESVLDLIRTIPGFDKNPLTAIQVLSEIGADMSVFPTAKNLVSWAGCCPRNDQSSRKIKSTRISRAGSHFKPVLVQIANALIKSKKHPEFTTRYRRIKARRGHKKAIIAICRMILTAIWHILTDLKPYTPEGFLESRPVNKEKVLTISQALNLIKQRGYIIKDDVGPVT

SEQ ID NO: 433350 - protein, 356 aa, unidentified
MTKVTARFENQKVYVGLDVHKRSWNAAIYLNDQFIRNIHQPPQPQALHHYLTHTYPGARYSCAYECGKFGYWIQREFDQLGIECLVVNPADIPSTHKDEVYKTDSRDARGIGEALSKGQLRGVYIPYEEQEADRHLVRQRKKIWRDLVRCKNRIKGFLDYKGIEVPPQYDNANWSRNFITWLSKLEFAHSSNRVTLDYQLTEMELLRKELLSISNAIRKLMRSKKYNRLYYLLRSVTGIGPLTAASLLTEIGDMHRFKNFYHLNSFIGLLPMEHSSGERELKGRITVRKHRQLRSDLVECAWTAKRTDSALALYYSEQIKRGKNGKAAIVKVARKLLSRIRYVWVSGEPYQPAVVK

SEQ ID NO: 433351 - protein, 343 aa, unidentified
MDHYVGLDVSLEQTSVCVVDGNGKTLWQGKCASNPEALAATIRARAPAAVRVGLESGPLSSWHWHELRKLGLPAVCLDARHAKAALALQLNKTDRNDARGLAQIVRTGWYREVAVKSVDSQLVRSLLTTRAQLVRMRVDLANQIRGVLKPFGLIAGKGGGRAFAERVRELVAGGPLEHVAEALLAAWEAIGNQVAALSRRLVAMARQDQTVRRLMTAPGVGTLVALAYVSVIDDPARFPHSSSVGAYLGLTPRRYQSGEEDYSGHISRCGDRLVRSYLFEAAGVILHRVSKWSALKAWGTRLAKRVGTKKATVAVARKLSVILHRMLRDGSEFRWSAREAQPA

SEQ ID NO: 433352 - protein, 343 aa, unidentified
MHYIGIDVSVKESAICILDGRGKIVREIKVPTDPEIINGFIADTGLAIERIGLESGSTAAWLFAGLQRHGWPVICIDARHAAAALQAGFRNKNDRNDARGIADLMRVNKYRPVWVKSPEAQRQGRLLTARATLQSQLVALENTIRGLLRQEGIGLTDRRIAFEAAVREVIADDYLLQAAVLPLLETRAAVLQHRATLDRQILRIVRVDPVCRLLMTAPGVGAFVSLAFKVGVDDPRRFSRSRDVGAHFGLTPREYSSGQVSYRGRISKMGDSEMRRLLYLAAARILRRDAALWCPLKVWAVRLAQRIGLRKARVALARKLAVVLHAMWSGGQVFQWRRSTTSA

SEQ ID NO: 433353 - protein, 314 aa, unidentified
MKTTDEINIGVDTGKHQLDIYIRPLGDYFTVTNDQKGIKEAIKRIKKYHPKRIIIEATGRMEMPFACAASKAHLPIVVANTFNVHRFIESTGQLAKTDKLDAEMIAYYGEALKPRLTEIKPDNIQRISDLLARRSQLIELRTMEKNRFSILSTEIKRSNTRLIKAMQKEVDWVESTLDKLIEDTPDWKKILCILLSVKGVGKVLAYTLLSDLPELGQLNRKEIAALVGVAPMNRESGDYKGKRRVRGGRAKIRTVLFMAMLSTIQSNPRFKRDYQRLVAKGKPKKVAIVACMRKMITILNVMVKTETMWDENMA

SEQ ID NO: 433354 - protein, 397 aa, unidentified
MIAVGIDISKAKSTVAVIDSDGTVLASPFTMAHTQPEMEAFVTYLKGLGEPTTILMEYTGHYHYPVLKKLQDEGFPVCIVNPYQMKKYGDVEIHKAKTDKKDALRIAAYALEKSYKLVPYSSMEQKYEDLKFLSRQYNQRISYVAKLKVQLIALLDQTMPGITRILPLNSRNPEKCALLLFIKRFKSFDEIQRIGKARFLASYDVLAKKASERNASSKGLSIYELAVDSITTRGEDPYIWLSQNQCVDLLSATQNAADEIISQMRNIAETIPEYKVLRAMHGVGDRLGPIILAEIGDVHRFHSGKALNSYAGNDAPPYQSGQFESRNRHISKRGSSALRKACYEVMQALKLIKPQDDPVYLFMLKKEQEGKPFNVAKMAGVNKFLRIYYARAMELYK

SEQ ID NO: 433355 - protein, 369 aa, unidentified
MGNDSTVFIGLDVHKDSIAIARVGSATSDPVIDVATIGTQQYAIDRMLAKLSGHGPLQFVYEAGPCGFWLQRYLTAKGQACVVAAPSLIPKRPGDRIKTDRRDARNLALGLRAGTLTAVHIPGPEQEAFRDVVRAWQQSKRDVAKAKQRLKAFLLRNDLRYAGKDGWSAEHRRWLARLVLPSGAQQVVFQELVDAISECEARRARFEVQLEQLAPHWPGYPIAQAFIAFRGVQQAVAYGVVAEAGDFARFSHPRRFMAWLGLVPSEHSSGGTRRQGGITKTGNRWARTLLVEAAWAYRHTPKVSAIIETRAQGIDPAIRAIAWKAQLRLTRKYRRLRARGKQHNLIVTAIARELAGFLWDAARLVQQRN

SEQ ID NO: 433356 - protein, 347 aa, unidentified
MDTIGLDLHKRESQLCVLAPDGTVKEQRIVTSRERFTAVLGPLAPATVLVEASTESEWVARHLEALGHTVIVADPNYAPMYATRARRVKTDRRDARTLAEACRLGAYRRAHRLSDARRHVRAELAVREALVRTRTRYIALAKSLVRRDGLRVRGSESERVAERIAALELSPTLAAELAPLFAILAPLNAEIAAADRRIAQLTAADAVVALLTTAPGVGPITASAVVATIDDIARFRSAHEFEAYLGVVPGERSSGEKRRVGRITKAGNARARWLLVEAAWRIVRSRSEETAPLRAWASGIAMRRGKRVAVVALARRLAGILYAMWRDGVAYDGRKVRAPRPRTAAVA

SEQ ID NO: 433357 - protein, 260 aa, unidentified
MNATNPTVVIGIDVAKDTLEVATSTGEHWPCANDPKGHRALRERLMAMNCSLIVLEATGGYEAALVGTLAQAQLPVVAVNPRQVRQFARAVGKLAKTDRIDAAMLVRFGEQTSPEVRPLPDEQTRLLDALLRRRGQLLEMIQAERNRLLQAVGPVRTDIRETIHFLVKRLKQTDRDLDDQLRSSPIWREKEKLLKAIPGVGRQTVLTLLATLPELGRVPRKKLSALVGVAPYNCDSGTLRGQRHCWGGRTHHVECSTWRH

SEQ ID NO: 433358 - protein, 405 aa, unidentified
MNSVGIDVSKGKSMIAVLRPFGEVVSKPFEIRHTASELRELANSLKSLDGDTRVVMEHTGKYHEPVAQTLCSAGIFVSAVNPLLIKSYGNNSIRKVKTDKADALKIARYGLDNWADLREHTVMEKHREQLKILNRQFSLYTKNKTALKNNLIALLDQTYPGVKNFFDSPVRDDGSQKWVDFAYDFWHVDCVRDLSEKAFTKRYQKWCVRHGYNFNSSKATAVYEDSKELVHTLPKNDYTKILVCQAVNQLNAISTTVEVLRSEMNSMAEQLPEYPVVMALFGVGISLGPQLMAEIGDVLRFAHRGALTAFAGVDPSPNQSGTHERKSNPASKRGSPYLRRSLFLVMTSLLQNAPSDDPVYQFIDKKRSEGKPYYVYMTAGANKFLRIYYGRVKEYLNSLDKVDLS

SEQ ID NO: 433359 - protein, 249 aa, unidentified
MLELGAFYAPLERRAKSTGETIRVVMESTTNARAIQRLLTQYGREAGIDLTAEVLHARKLRVIAESVNKCDRVGANILTELSRSNLQLPVCYMPDDEEFALREHLRARTDLVRIRTMVKNRVHAVLHRRGILTPMGELFGRIGEGFLDQLELDEAGQVILQRFRTLIGQLDETINESTALLQTMPGIGLITSLTILAELGDLTRFRSRAAVANYVGLVPRHRNSDQKYWSGRITRRGPAHLRGVLMEAA

SEQ ID NO: 433360 - protein, 345 aa, unidentified
MTEAYDGRQVVGMDLHRRRSVLVRMTGDGRKLETVRITNSPAALRREIARAGKHPRVVLEATYGWYWAADVLEEAGAEVHLAHPLGVKAFTCRRVKDDERDAADLADLLRMGRLPEAWIAPPEIRELRELTRYRHKLVQARTSVKDQVHAVLAKLGIPVTHTDLFGVHGQAWLDELKLSQPYAGKIASLRQLAGELTAEITLLEQVLGDLLAGHEGYAAIQQLPGIGPVLAAVIVAEIGDITRFRHPGQLGCWAGLTPRHRESDGKVTRGHVSKQGPRILRWALCEAIQHQPGGTRPRQVKDGIIARRGPQARNIAKTAAARELLTLIFYAMRDGHVRRAASPAA

SEQ ID NO: 433361 - protein, 426 aa, unidentified
MYRIAGIDVHKRMLAVVVSDVEVAGDYEFESRRWGTTPAQLQALAAWLVEQHVQEVVMESTAQYWRPVWESLEHYWKPICKKQEGARPRSGRLHLAQAQSNRGPRGRKNDFADAERLVKRLVAGELILSLVPDAEQRLWRTVTRAKVQLSRNRVQLQNRLEALLEQAHLKLSSVVSDLLGVSARRMLGAIADGESNPAALADLADPSLRATREELCDALSACQELHPTYRELVKMALEELQLLERQMEKLDQKMATLLSPYQDQVERLAEVPGLGVDSAQQILAEVGASAATFPSAGSLSSWVGACPGQEETAGVNRNHRSPKGNRQMRRLLNLAAHASIKHPGTIFAILYRRYVTRLGPIQTIAVLAHRLCRLIWRILHQGVRYQERGPAVNEKTRRRRTARMIRELRRLGYRIEPTNSQLPVPA

SEQ ID NO: 433362 - protein, 357 aa, unidentified
MKNLTVIGIDIAKTIFQIHGADRDGKVLVKKRISRSGFLAYMADLPRCVVGMESCGGSNYWAKELLKLGFEVKLMSPFQVKKYTDHQKNDARDAAACCEAVSRAGTRFVAVKNEVQSDMQALHRVRSHYVEERTALMNMIRGLLLESGIAIAKGQTHLMKKLVELVYGENEQLRPTEKRLFQRLKEDLDKVEEEIVHYTSQVEKYAKEDEACRRIQSIEGIGPVSATALIAKVGNCSEFQKGRDLSAFLGLVPKQYSSADKQVLGGITKHGDRYIRQLLIHGGRSCVQAASRVDKRTGEFCKNDPHSVWIRKLKNEIGVNRASVAVANKNARMVVAILKNKTTFCPEMAHYSESIGV

SEQ ID NO: 433363 - protein, 370 aa, unidentified
MEKKILYVGMDVHKKSIDVAITDERANGQVRSYGKIDGTLEALDKLIRKLKSNASDLHFVYEAGPCGYPIYRHLTSKGHSCSVVAPSLIPKRSGDRIKTDRRDAVNLVRLFRAGELTSIYVPTVEDEAMRDLLRCRVDIRQIERKTRQRLLAFLLRHGLYYPGKKNWTKGHMNWLADLKLTHRAQQIVLQEYIDAANECTRRIQRITEQIQGLVPQWSRAPLVRAYQALRGVSLIVATTVVSEIGDMNRFKNPKQLMAYLGLVPSEHSSGNRIRRGSITKTGNSHVRRVLIEAAWTYNLRARKTKIILKRQQGLDDRICEISWKAQLRLCNKYRRLFARGKSKPAITTAIARELSAFIWAIDKQVQQLTA

SEQ ID NO: 433364 - protein, 380 aa, unidentified
MTKKHTQNSLDTSIQWKAIGVDLAKYDNTVVAISEDGEIQHIERISTDDLLKLSTELQPTTFAIEPCNGANLLSLALQKNHEVKTISGVAVKNWVKVHCAGQKTDRNDAMALAFLAMDTMLKPIRTKSLAQMKMLSIFAARKQLVSCRSSILVSLKGMAQAWGILFSAKRRNLDQMKERFNEQKELLSESVVNAFEKMIEMVRKLDEQICDLEKVMVEQLKDDPRSERIMKVLGIGLIGTHRLLSTCGNVDDFKGPKSFAAYYGLVPNNRSTGHNYRVGKCSCHGDVEMRCSLFQSAATLYILNARHRLTNCALKNWIDKKMAQKMVWGKLMVALAAKLARILWALLKYGEDFDINKAGVSRSLQAQNVKIASNWNGCRN

SEQ ID NO: 433365 - protein, 346 aa, unidentified
MCSLPVFVGMDYHDSFVRVVVQDTDGSEMGNADRTNHWKAIADFGDRFGRPVRAAIESCCGAADLAEELVSCAGWSVALAHPGYVQRMKQNPDKTDCQDAQLLADLERVGYLPRVWLAPRYIRELRHVVRYRLQLTEQRRATKLRLRALLREQRCHAPEGLNAWTKAWQHWVRHTAELSAQGRWLVKQHLRELARLAIRIHEVEKRLEHLTTNDVEVQRLQQQPGIGPVTAWMIRAEIGHFDRFRTGKQLARFCGLSPRNASSGQRQADAGLIRAANPALRTVLIEAAHRLVQYDPSWQKFAQRLRARGKPGSVVAAAVGNRWMRRLYHEMKTSSGELAIAVGPAR

SEQ ID NO: 433366 - protein, 323 aa, unidentified
MNTRPVLGIDIAKDNFQITLRQGQHLARHEFTNDPAGFSRLAAWLRRQRVHQVHACLEATGLYGEALAEYLYAAGHVVSVVNPARTRAYAESQLTRNKTDPVDADVIADFCLRQEPGPWVPPPPEIRALKALLHQYEALQAMRTQELNRQQAGLVNATVEQLLKEHVAFLDAQLAELQRLIEEHIQQHPHLRQQQELLDSIKGIGPLTAAFLVSLQLERFESSRAATAFVGLNPRVRQSGKSVRHRSALSKMGDPQFRAILYWPAVTAWRFNPIVHTFCERLVTNGKTKMQVIAAAMRKLLCLAYGVIKSGQPFDPNYAQSVS

SEQ ID NO: 433367 - protein, 391 aa, unidentified
MNSLTTAVSKIKEAEELYSLESRIFLESTGIYHYPLFCYLRDKGFNCSVINPIITKNSTNINIRKVHNDRFDSKKASLVGLKPDLKGSLMPSDLALNCRNLCREYYDLMDNRSAYVNKLQGELRMAFPQYLGIFSKVTTNTSLTLLDKYTSPNAFLEADMQEIIDTIKSTARFGLTYAHNKYNAIIQAAHDANEFGHIIDSNIKRIRLYISFIRKYDEEIESILDAMHELVDTNEDTDFVKQIHLIESFKGAGFLSAISLMGEIGDFSAFSKPKQLFAYFGLDPAVKQSGKFEGTKIQISKRGSSIARRVIHTLTLQSISVSRTGEAKNPVLRDYYLEKCKSKPKLVAMGAVSHKVCNIIFAILRDNKPFEIITPQEHIKQYNAAKCDMAA

SEQ ID NO: 433368 - protein, 345 aa, unidentified
MEPMYYIGLDVHKRKISYCVKDSSGQVCAEGSLPATRFDLDRWMKALPQPWSAAMEATMFTGWIYDHLKPHAASLKVAHPLMLRAIAAAKRKNDRIDANKICDCLRCDFLPECYMAPTAIRERRRTLRYRNLLVRQMVQMKIKISSLLMEAGVSYNKQRLHRAGYFRELLATNPAIDEGLRSLLRQCRETVVRLSKTESALIRSLEDDRLLAERVERLMSIPAIGPITALTWALEVGEVQRFSSIKKAISYCGLCGAEKSSGNTVQRTPLSKQRNKHLQTTLIEAAKMAPRYSPTLALLYDREKQKGNANRATLAVARKLVAYLMSVDRGRCHFLVLDQETSTAA

SEQ ID NO: 433369 - protein, 446 aa, unidentified
MRYVGLDVHKHVVQAHFCGERGGELQSVRFELTAASLSQFAHDHLGPDCSVALEATTNTWAVVDILEPSCAKVVVSNPLKTKAIALSKHNSDRVDACMLAQLLRCDFLPDVWIPDADTRAARSLAERRSSLVRHGTWVKNRIQSLLHERLIHTPFDPFTLRGRQWLQELSLPVRDRGELETLLRILDAVAQEQAKLAELINADAYGRDGVKLLMTLPGVGAVIAQAMMAAIGDIRRFESPLKLACYFGLIPSVHQSAERAYHGKITKQGNGNVRWLLVEAAHHASRHPGPLGHQFQRIARKKGVNVARVAIARKLAVLAWHLLTKGEPYRYASPAATEKKLADLRRSQRVLHPPHLGNRGSHWGHSTRLRKSLATVLATESLPAASPPPAAETRVFAPLGTTTLLEHLGREQRVEIPHQKRCPGHQAHAPSNARKRTPGEKTLTAS

SEQ ID NO: 433370 - protein, 337 aa, unidentified
MTIIRIGIDTAKYVFQVHGVDENETPVLRRQVRRGEMAKVFGKLAPTRIGLEACGAAHHWARMLRGLGHEVVLMPAQYVRPYVKRGKNDAADAAAICEAMSRPGMRFVPVKSAEQQAGLMLLKVRDLLVKQRTMLINAFRGHAAEFGIVGAKGTQKLAALQQRAADEAAPVPALAREMLNLLADQLVALEARLKTIEARLMSWHKQSLVSQCLATQPGIGPIAGVSFALKVSDPKAFRSGRHFAAWLGITPRENSTGGRARPGKISRAGDEGLRRLLVLGATAVIRQAKPGRTSPWLIALLARKPKKLAALALANKMARTVWAMMASGEIYRQPQEA

SEQ ID NO: 433371 - protein, 354 aa, unidentified
MTSVKYIGMDVHTESISIAVRNSIGKIVMECVIETKASTLLQFIDGLRGGLRVTFEEGTWAAWLYDLLKPHVTEVLVCNTRENTSKGGSKSDRIDARKLSEQLYMNNIKSVYHGEHGLRTLKELARSYLTISKDLTRVMNRLKALYRSWGIPCAGKEVYAPRHRAEWLGKISEAGVRRRAQHYYQQLDVLRPLRQEVRRDLLLEAKKHKAWKLLRQIPGIGPIRAAIVIAVMQTPHRFRTKRHLWTYSGLALETHDSAQYRVAEGQLQRSKKPATIRGLNKDHNHDLKDIFKGAATRVSSSRGPLRDFYENLLAKGRKPTMARLTLARKIAAITLIVWKKEVRFDANYLKPQAT

SEQ ID NO: 433372 - protein, 269 aa, unidentified
MDEIKRIGMDTSKHVFQLHGVNAAEQRVLRKRFTRKAMEEFFAKLSPCVIAIEACGASHHWARKLGSFGHEVKLIAPQHVKPYVKRGKNDAADAEALCEAMSRPTMRYVPVKSPDQQAALMLITVRDRLIHTRTQLSNAIRGHASEFGITAARRFAHVGPLLERIFRDTAPPDLAHWLFARLGVAYAEQETRLDEIDTELAALHKADERSRRLEKIPGVGPIGAVLLSMKAPAPEQFRSGRDFAAWLGLTPKDHSTGGKVRLGGYYPRR

SEQ ID NO: 433373 - protein, 330 aa, unidentified
MTFVSNKRQVIMEATNKIEFEQVVKRGCGLDVHKETVVATVAGEGIKEETRTYETFTSSLKDLKRWLRYKKVTHVAMESTGVYWKPVFNILGEHFEILLVNARHIKNVPGRKTDKKDSQWICKLLMSGLLKGSFVPPEQIRELRDLSRYKTKLTQQAAAEKNRIQRILEDANIKLSSVLSDTTGVVATNLIDGIIAGRKDLDRLIAENYHGKLKASRELLKKALEGRVTEHHKFMLRQIKTTLSHLEEQIDLLDKEMDKKLEDHNEQVELLQTIPGVGKSGAKAIIAEIGTDMDVFPDEKHLASWAGMSPGSNESAGKKKAPEPGKETNT

SEQ ID NO: 433374 - protein, 371 aa, unidentified
MDSVNGSADAMEKDTVYSGLDVAKATFDAGLWLPLPEGRDRPVRDIPVRTFSRTREGVRDYLQWADHRIGPADGLSGGTLHAILEHTGRYSAELIAWLLEERPTLRWTMLQPQRAAHYARSLAASTKTDKTDARALTHYGVERRPAGDKPIDPQRAELREMSRYRTTLVEMRTAEGNRAQESCPSPWVRQLQNRRIAQLDRDIQRIEKRMKELIKKMPDLHRDAQYIESIAGVGFVTAVAIVAELGDLRRFARARQLTAFVGVAPRVADSGSSVHRPVHMSKAGDSRLRSLLYMCALSAITYNPHMAKVYQRLTADGKTKKCALGAVMRKLLVLMRALVISGQPYQPDYRPCGKPADKRGNNSTTTKENCA

SEQ ID NO: 433375 - protein, 372 aa, unidentified
MRHHSEAFIGIDTSKSRNAVAIAEDGRGGEVRFLGEFPATEAAMHKLVARLAAKYNRLTFCYEAGPTGYGLYRLIKRLGHECIVAAPSLIPKKPGDRVKTNRRDAVSLSKLLRAGELTAVWVPDERHEAMRDLSRARLAANKDLQGKRQQISSLMLRLGRCYPGRTTWGPAYMKWLMSQKLEHREQRMALEELLEGVRQEGERVVRMEQAIREAVPEWSLAEVVTALQAMRGIDLIAAVGVLAEIGDLSRFQNPRELMGYLGLVPSESSTGDRVKRGGITKAGNGRARRILVEAAWAYRHPARVGREKQPKVAAAPRRVREIAWKAQTRLCGRFRSLLRKGKLPTVAATAVARELSAFIWAINREVMRTRGA

SEQ ID NO: 433376 - protein, 433 aa, unidentified
MGDRLSRGRRRGRRAAKPVTPSLLKRINLNAAGIDCGSEAHHVAVPPERDAEPVRSFKTFTANLRLLADWLESCGVKTVAMESTGVYWIPIFEILEDRGFEVVLVNARHVKNVPGRKTDVLDCQWIQELHSVGLLRGSFRPAAEIVTLRSFLRHRQKLIQCAASHIQRIQKVLVQMNLQLHNVISDVTGVTGMRILRDIIAGVTDPMALAAHRDRRCRASQEEIAASLTGNYRAEHLFVLRQELELFDTFQKQILACDAEIESVLHTLAANQRSPKAPLPAPRCRLRFCDNEPRFEIRDPLYRLTGADLTQIDSIGPYTALKLIAEIGTDMSRWPTYKHFTSWLTLAPKNKITGGRLISSRTQPSANRAATVLRMCAMVVGRTSTALGAYYRRLAYRIGKPREGPHFSDSLLRWLRSAEDRRRSHEKATEIRT

SEQ ID NO: 433377 - protein, 355 aa, unidentified
MNQEKYIGMDVHQATISVAVMDSKGKVIMECVLETKAATIVEFIQGLHGGISVTFEEGTSAAWLHDLLKPHVRRLVVCDPRKNALLKDGSKSDRIDARKLAELLRGNQLSPVYHEEHGVRTLRELGRSYLTLTQDVSRVMSRIKALYRGWAIPCSGTTVYASRHRTEWLAKIQEPGVRLRAERCYQQLDLLQPVRQEARCQLLLESRKHPAVKLLRQIPAIGPIRAALLVGLLQTPHRFRTKRQLWAYSGFAVETHDSGEYRYVGGKLQRNRERITVRGLSDNHNPDLKNLFKGAAISASARPGPLHDFYVALLEKGMRPTMARLTLARKIAAITLTMWKKGVDFDPKQLHRQAA

SEQ ID NO: 433378 - protein, 412 aa, unidentified
MRRVIGIDTHRTFGEVVIWEDGRLRHVGRVDMTRTALEGFGKKLLATDEVVIEATGNCMAVSRVLTPFVKRVVIANPLQVKAIAHAHVKTDKVDAGTLASLYAAGYLPEIWTPDAATERRRRLVARRYQVVRHRTRIKNEVHSILYAHLIPRCPHADLFGHLGRTWLTSQPLPDDERAAIERHLRELDRLGDDLRVLDQEIAQSALDDAAIKRLITITGVNLTVAAGLVAAIGDIGRFSSPQKLVSYFGLNPRVHQSGLGAAHHGRISKVGRSHARAMLVEAAWATAKAPGPLHAFFVRIRARRGHQIAAVAVARKLAVLCWHMLTKQTDYHWARPALIANKRRAMELQAGRPQKKGNKRGSTYAYNVKALRDQEMRLAQQAEQSYENLVAHWQPRPAKKQARGRLKPAGLE

SEQ ID NO: 433379 - protein, 353 aa, unidentified
MKTYYVGMDVHRASIVIVVLNGAGKVVMQSVIETGAERVRGYLKQLRGQVYVTFEEGTQANWLYEVVRPLVTEVVVCDPRHNKLMQSGNKSDRVDAQKLAELLRLGSLKAVYHGENGVGALKELVRSYDCLVSDTTRVMNRLKAIYRGRAIGCAGHDIYRQDRRQQWLDKLTERGAKERASFLYRQLAALKPLRHEAKRAMVKEARQQRAYPWLMSVPQFGSVSVAQLLAIVSTPHRFRSKRQFWTYIGLAVVTRTTADHEVVNGVLRRSRRPVSTRGLNRNHNHLLKRVFKNAANGACHSGPFKAAYELRVKQGMVPSLARLTLARQLAAITLAVWKHGEQFNPERMKQQAA

SEQ ID NO: 433380 - protein, 309 aa, unidentified
MKEELVYLGVDIAKSYLDAAIGSEKRRFANDAVGHRALIKWIKEIEGLVQVICEPSGGYERALIRALVGTQIRVSLVPANRVRQFARAAGILAKTDRIDAKVLCIFAEAMQPGTISASQLEQEHLRELESQRRHLTHLLVMEQNRGARVSDVCVRRLNHSLTNQIKKQIDRLDLLIKQHIEQSAELSAKAAKLTAITGVGARTAALLLAQMPELGRLNRREVAALVGVAPFNRDSGRMRGKRTIYGGRRPVRHGLYMAALVAARHNPILRAFYQRLRTAGKPAKLALTATMRKLLIVLNSALKPDLTYA

SEQ ID NO: 433381 - protein, 415 aa, unidentified
MKHQKMLYTYVGIDSHKDTHTAVFLDCFYDKLGEVSFNNLPSEFGKFLSQAEKLKSCDTMLLFGLEDISVYGRTLAIFLKENGMTVKHVNAMLVARERKNQNIVQKTDSIDAECAAKILLSKLNELPSFDTQDKYWALRTLVSRRNFIVKNNMCLKNSLHTLLTQHYPNYRNFFKVLDCKTSLTFFMHYPSPSTLKDTTLEELTAFLREPSQGKVGIARAREILSSLEDTTADTREHQEIRNMAVRSVIRQIEFTLLELQRVEASMATFLEKFNCTLTSMRGIDVVTASQMLSCIGDIRKFKTPAKLARYSGIAPVTYASGKKDFQFSNQRGNRELHSLFFNLAVRVSSTVGITNKALNPFFYRYYRRKLSEGKTKRQALKCVERRLVNIIWTMLMHNEEYINPAMYDVPKEDEK

SEQ ID NO: 433382 - protein, 391 aa, unidentified
MGKKPKREAAFLAFDVGKSSHRACAVDAGGEVLFNREVANRPADVDRALAEAGPGARVVVDQKRNIGALVVARARAKGNPVSYLPGLAMKKARDMFPVTAKTDAIDAEVIARTAAGMPWTLREVAEETPASASLRMLAAQRDFAVASRTRAANRLRAVLLEADPAFEAQVDPSSRWQLAVLAELGGPFGIRAAGLRRFRSVAERGGGAKRAAADRLWAAAAASASSGRPELAAESELVRSLAARVAADSAEAARLDALIADSLAGDDTYEALLTVPGIGPKTAAALVTLVDVSLFRGHDELAAYTGLAPCNRQSGTSLSSSSPSRGGNRTLKNLLIYSCTSLVGTDNRYGRYYDACRARGMRHNKALKAVARKRLKVIYAIMRDGVPYREG

SEQ ID NO: 433383 - protein, 347 aa, unidentified
MQSTISKEPISTLAIDLAKSSFHLHGADTSGHQVVSKPVSRQKLFAYVAQLPPCTVVMEACGGANYFARQFSEQGHSVKLIAPQFVKPFVKSNKSDAADAQAICEAAQRPTMRYVQHKSINQQDIQSIHRARSLVKSQRVALSNQIRGLLSEYGIVFPVGLSVLRKQIVELLSGTDRLTPLFIEMLTHHYGTLCHLDAEIEFFDRKIDHIARADERCRRLMTIPGIGPIAATALLVALGDGSSFASGREAAAYLGLVPRQHSTGGRSNLLGISKRGDKYLRSLLIHGGRTVVLHAAKHDDYRSQWITEVAQRRNVNIASVAVANKNVRTAWALLTRNSEYKTTPLAA

SEQ ID NO: 433384 - protein, 350 aa, unidentified
MLIIGADYHPGFQQIAFVDTDTGELQERRLEHREEAERFYRDLAKQGMRVRVGMEASGHARWFERLLSELQFELWIGDAAEIRTRRVRKQKTDRQDAQLILQLMLEGRFRQIWVPSWENRDLRQLLWHRHRMVQARTRIMNQLQAVALNEGLRCKKRLWRDAGREQLESFPLAPWASRRRRDLLELLDRLTPTIAELTQAIEQEVEKFPEAQCLQTHPGVGALTALAFVLIIGRADRFQCGKQIASYLGLVPLEESSGQRRRLGHITKQGNSVLRFLLVEAAQVTVRSDQEWRNKYFHLAIRRGRKIAKVAMARRLAVRLYWMWRQGWDYEQWKKFGSHAGQPGNRHGVQ

SEQ ID NO: 433385 - protein, 353 aa, unidentified
MLADQADYVLGIDTHRDSHSAAILAADTAVVQGQITVAANERGYRRLLRFARESAPGRRAWAVEGTGSYGAGLTVFLQREGELVLEVDRPRRPARRDRAKSDELDAIRAAREALTREHLARPRQRGEREALRVLLATRDSAVRSKRAAITLMKGLLVSAAPALREGLRSLPTNEQLTRCARLRISPTQDSEQRATTIAIRASARRALALAEEAQDLEAEIKPIVARLAPCLLAEMGVGTIVAAQILCAYSHHGRIRSEAAFASLAGVAPIPASSGQTMRHRLNRSGDRQLNRALHTIVLCRMRDDARTRAYTTRRKAEGRSTREIKRCLKRYTARHLYRLLQASPPNLANSET

SEQ ID NO: 433386 - protein, 355 aa, unidentified
MSQEKYIGMDVHQATVSAAVRDRNGNLLMECILETKADTLLEFVQGLHGTLSLAFEEGTLAAWLHDLLKPHVNRVVVCDSRKAALLRDGNKSDRIDARNLSELLRTNQLKPVYHGEHGLRTLKELGRSYLTVSKEMTRTMNRIKSLYRSWAIPCPGTTVYAPRYRRQWLAKITEPGARMRAEHLYEQLDHLQPIRVRARREFLQESNKHDAVKRLRQIPSIGQIRAALLVALLQTPHRFRSKRQIWAYSGFAIETHDSGEYRYVRGKLQRNRERITVRGLNRNHNPDLKNIFKGAAISASSRPGPLQDFYETRVAMGMRPTMARLTLARKIAAITLTLWKKGANFDPQQLSRQAA

SEQ ID NO: 433387 - protein, 353 aa, unidentified
MTDTTSIAWLGLDAHSRNCVLAHLDDHGTELNCWRFPTHPQPLLKHVQAVPATVKRLMLEESNLARWISQLLKPVVQQVIVCDARRNRLISQDANKHDRRDAFALARLLRLNEFKPVWQPTDDQRVLFKRAAQAYENSVLRQTRLKLQIKSLFQHWGFFPAGAIVFSKAGRSAWLQKLPYDPLRSQARLLYELLDQALAGQAQARRLMCQAGRPFPEILHLRTAPGVGLVGAHLFVAYVQDPHRFAKFSRLSKYCRLSIRDRTSDNKPLGFKQLDRQGNGVLKAISYRAFLQATKRRSGSLWDFYQASLRHTGSTTHARLNTQRKILLTLWTLWLKGEDFDPNQFSRSQPIDV

SEQ ID NO: 433388 - protein, 331 aa, unidentified
MNFSTIIGIDVSKLTLDLHVLPTNHDYQTKNDEKGFKEIVKWLAKVGQIDFSATLFSFENTGFYSYKLSLWLQDKGYHFVMLSGLELKRSLGISRGKSDEIDALKIAEYTFLRRDSITQTILPEQDIIRMKRLLSLRNKLIRQRSGFMATLREAKRAFSRKEDPLYYKIQEDLLKKLSIQIERIEKELHQIIENNSTLKEQYHLILSIKGAGPIAAFTFIAITHGFQKFQTWRKFACYAGIAPFPYRSGTSIIGRNKVSHLANKKIKSLLSNMAVSAVQHNTELKLYYNRRLDDGKNKSSTLNIIKNKLVARIFAVIERGTPYVNTAKFAA

SEQ ID NO: 433389 - protein, 424 aa, unidentified
MNCNQNFKISQVTEGTLVLGIDVGSNTHYARAFDWSGLELSKVFKFKNSFEGFQSFVLWVNDLCCKYNKSKVIAGLEPTGHYWFSLGELLKENNITIAIVNPYHVKQSKELDDNLQTKNDSKDPKVIAKLVIDGRYSFPYIPEGIYGELRVADKLKNDITQQIISIKNKIYRWLSIYFPEYEKIYSSIDSKSGFLLLKETPLPKDIVELGSEGIVERWKQTKLRAVGLDKAKKLEEAAKKSIGCKNITSSARFEIKLLIEDYEYKQNQLNSITEELNKLCEKIPMIKEIAEIKGIGIATAISFVAEVGDIRRFKSAKQVQKYAGLALKENSSGKHKGLTRISKRGRKKLRTILFRATIPLIGFNKEFSSIYNYYIERKDNPLKKKQALTAICCKVIRIFFTILSKGIKYDETKMLHDIKRPVAA

SEQ ID NO: 433390 - protein, 410 aa, unidentified
MSYNVAAIDVHKKLLVVVVADAAEPDVTLQARRFGTGAAELCRLAHWLGEFGVVEAVMESTAQYWKPVWMELEPHMRLHLAQAQSNRAPKGRKTDFGDAKRLLRRFVAGELMLSFVPDTEQRAWRMVTRARLQLVRERVHLQNQIESLLEEGRIKLSSVIRDLLGASGRRILRALSNGETNPEALADLGDPHLRCGREVLMDALTGSMNGIHRQLLQQHLDRIELVDRQIEELNQLAAAQMREHQEAVVRLIEVPGIGAEAAPEILAEIGPAAAAFPSSAQLASWIGVCPGSSQSADHNHSGRSAKGNRFLRRLLCQAAQAAARTKGSRLESLFKRLIVRLGYVKAIWAIAHRLCRIAWNILHQGARYIEPGDAINPKAVQRCIHHHLKALRRLGYQIPAVTAPAMPRSR

SEQ ID NO: 433391 - protein, 408 aa, unidentified
MRIIGLDIHRAFAEAVAWKDGKLSRLGRVIMRREQLEEFAKQLSNSDIVVIEATGNAASVAAVIGPHVSRVVIANPKQVRLIAHAKIKTDKIDAGVLAQLYASGFLPEVWIADEATQALRRQVTRRNQIVRQRSRLKNIIQSILHAHLIPSCPHQDLCGPMGRAWLCQQILPGDERLAVERHLREFDRLTDDLKVIERDLAQSALADDRATRLMTIPGINMVVALALIAAIGDIKRFAKPEQLVGYLGLNPSVRQSGPGPAYHGRITKQGRGHARGMLVEAGWVAARCPGPLRSFFLRVQSRRGQHVAAVATARKLAILIWHLLAKNENYLWSRPALHARKLRDLELKAGHKSARGQKGTAHAYNLKSQRDQERRWVEQGETAYARFVAGWNARGPKARTGAAKEKRQ

SEQ ID NO: 433392 - protein, 323 aa, unidentified
MTYIGIDISKDSFVAAFPKVSGYQTQTYPNTVKGIRKFIGLLSATEHHCVMEATGNYGFLLLYLLDRQRIAASMVNPKQIKHFSRMMMTVTKTDPKDACMIAMYGEKMNPPVYKMPSETVMLLKQKKTIIRQLKKQLTASKNLKGSLVALPFQDKNGIKALDKTISFLASQIESLESELADLASSEFDRQVKLLTSIKGIGITLATALIVATGGFSYFNNAKQVSRFIGICPTYQLSGTSVHIKGGINRNGDASLRSLLYVASWSALRSNTTCKECYVRLKANGKPSKVALIAVANKLVRQAFAVIKSDAPYVDGFVSTRQTK

SEQ ID NO: 433393 - protein, 350 aa, unidentified
MLYIGIDYHRSFSYLTTMDEKGEIIGQKKLPSNGEIVDFLKEFDEEMEIAVEATPSWYWLYDHLESEGFQVKLSHPLKTKAIAYAKVKTDKVDSATLAHLLRSNLLPLSYVPEKVVRLNRELLRYRASLVKIQTRVKNKIHTILAKNNVTHSYTDLFGKQGIAFLHSLPLAEHYKIALEGYLTVLDAVRQEIREASKKVRQVAEEDHDTLLLMTVPGMGYYSALLTKSEIGDVRRFRSAKQLCSYAGLVPSTYASGNTCFHGHITKQGSKWLRWILVEAAIHAVKRPGVLRHFYFKVERKKGGQIAKVAAARKLLEWIYHILRDGRTYQEMEKIADLLGRGEPDKKSGSE

SEQ ID NO: 433394 - protein, 354 aa, unidentified
MQIQKQELWVGIDVSMKSFHAALDFPMLFSNQQKIPVSDLPNREFKLTSAGVRSFLNWIQLQQSDFFAQYSDEEQNNLPVVFLMEATGLSSTTLKKMLYASVPDAKVIVANPEPIKAFRISLNIKNKTDKSDAQVIARYGRERSPDSKPEMSAEMAKLRELARTRLFLKDQRTAIDNHHDNIDSSLPKRMCTAVVKAINKEIDGLDREIEKIVSDTPEIKHEVEIMTSMPGIGIGTAVVLLCELGSLKNYPTRQKITAMCGLNPAKKQSGTSVNSTRLSKKGSPVVRRFLYMCSKTAVPRIPLLQDLYNRLLARGNTRMQARCAVMRKMLLILRGMVIADKEFDKNYKNISKSA

SEQ ID NO: 433395 - protein, 350 aa, unidentified
MNSTILAVDLGKYNSVLCWYQPDNRDAAFRTVATTPDELRRELTRQPVAVVVFEACSQAGWVHDLCEQLGLPPLIASTTGAAWQWKHVKRKTDRDDALKLARLAAVGEIDGVPVPPRAVRQWKSLIGLRKRLVGERVRCQNRIRGLLVCQGLSAPLGAQAWTEAGLTAIGLLARPLAECSSDELWCGELHLLLGRLRFLETQTREVESRLDILSKSDSRVSLLATMPGVGPRTAEVIVVHLFDARRFHSAEQVSAYAGLVPRQYQSGETDRRGRITRRGPKLLRAALVECAWCSLRYNAWARVTWLRLQQNGCSKKKAIVALARKLLVRCWAILKSGQPWRQPTAANSAA

SEQ ID NO: 433396 - protein, 399 aa, unidentified
MFVGWDWASATHAVTVLDDAGVVVDRWAFRHTEQDLVGALERLARLAEPAALPVIIERASGLVVDRLLAAGHPVVPVHPTAFWAARPRWGASGAKSDPGDSYKLADYLRTDGHRLRRLDPPDTGLQELQALVRLREDHVRARTAASNQLGALLEAHWPGPTAVFFRLASPIALAFLSDYPTPQAAARLGQARMASFCRRHSYRGGKTPAQLLARLRSAPTAPVGIPAATLAILVRAHVELLRTLLGTIAELDAAIATRVPCHPRAQLLTALPGVGTINLAQLLAEVGPVLDRVANAEQAAAECGAAPVTRASGKTTGVYFRWAANRRARKALTAFAHNARMQSPWAGRLYADARARGKRNPHATRIVARAWLRVIWACWHTGTPYDRHAHLAEQRHAAA

SEQ ID NO: 433397 - protein, 372 aa, unidentified
MSAAFKPTKKNRGEVEMSVYVGIDVHKRFCQAALMGEDGAILHELKFENTQEGARNLVDLAKSINPHVKAVIEPSANYWIKVYDRLEDEGVEIKLSNPLRTKAIAEARVKTDRLDAKTLAYLLRGDLVAESYVPTRKNRERRALIRHRASLMRMRVETKNRIHALLDKHALPYEYTDLFGKQGMEWLRSLQLPTPDHQILQSNLQILETLNAEVQNADIQIAKDAVHEEQAKILMTMPGVDYHAAMVLLSEIGDVKRFSSDEKLVSWVGLAPQTHQSGETQWTGHITRKGSKRARWILTQCAQSARQHDPRMREFYERIERKHGSSKAVVAVARKMLAIMYVMLTRNEPYHGENRQLTEQKHKRLNTLANTT

SEQ ID NO: 433398 - protein, 303 aa, unidentified
MDKITTVGLDLAKQVMAVHGVDATGRMVARKVLRRDQVLSWAAALPPCVIAMEACGGAHHWARELSRQGHTVRIIAAEFVQAFRKSGKNDANDAEAICTAARQPNMRFVAMKTVAQQAALCVHRLRQGVVEERTALINRLRGLLTEFGVVAPLSPEKLRRELARCLDPDVGPTTAAAFVATVGAPQEFRNGRQFVAWLGLTPKQHSTGGKTRLGRITKRGDAYLRTLLILGAKSALQAALRKPPERRHRLQQWIVAVLARIGYHKTLVAIANKHARIIWALLVKGEDFDVQHVTPKVLAVAAA

SEQ ID NO: 433399 - protein, 342 aa, unidentified
MKFYCGIDLHATNSFLCVIDDKDKILLKEKLKNDLGAILYALESFSPRPSVVVEATINWYWLIDGLQEAGFDVKLAHSMALYMITGAKVKTDRRDAFSLAKLLRLDAIPEAYIYPKAKRPIRDLLRKRKQVVSLRANAYGALRRVLLQYGIYGYSQATIKSLTEAQLDQHLEHFATQAGCHLEVQRISFYSDQIKTLENIILSSVSDDHRFELLQTIPGVGKILALTILYETGDIDRFQSAKHFCSYARVVPGVAQSSGVSKRGRGSKQGNPHLKWAFCQAAALSVRYNTGIRKFRQRHLARRRSKAKKLVTLCIVAHKLAIASYNVLKNRVPFKQELMFGS

SEQ ID NO: 433400 - protein, 351 aa, unidentified
MKILSLDLGKNKTVGCEYERESGQHRFQTAFSTRSGLQQMVKEIKPDRVVIEVCSIAGWVCDFLREMGIEVQVANTSDDAWRWRKVRKKNDRLDALKAAQLSAVNQLREVHVPRIEVRQWRALIRFRQHLVRRRTKVKNHIRDLLLREGEILPPRQKCWTQMGMARLEAMARPLSELGLNEMWRGELDIELRQLRAAQQEIEVVEEQLDAIAAADPRVQLLRTIPGVGPRLSEAIVALLDRPERFRKASEVSAYIGMVPKELDSGETQRRGRITRQGSRLVRTLLVEVAWTGLRHNAWVRETYQRIHGGKKSRKKIAIVAVGRRLLVRCWAMLRDGTAWQWPESAAGAGTK

SEQ ID NO: 433401 - protein, 360 aa, unidentified
MRLYNQPHRFYCGIDLHARTMSLDILDQAGQVVLATTIPCEPRTFLDAIAPFRDDLVVCCECLFCWYWLADLCAKEKIAFVLGHALYMRLIHGGKTKNDPLDAHKIAVLLRGGMIPQAYVYPKGMRETRDLLRRRNYLVHKRAETITHLQNTNSQYNLPPFGKKLGYAANRAELKVAQRFADPSVKKTTEIDLALLDHYDTLLGDVELYLTRTARVDDPQAFARLQSIPGVGKVLALVLLYEIHDVGRFQSAGQFLSYARLVRCCHESAGKKQTTGGKRQKIGNAHLRWAFGEAACLFLRASPRAKQWKQRQQKKRGEGKALAILAAKLGRAVYHLLRKGLVFDEDRFWGSKAAAAPASR

SEQ ID NO: 433402 - protein, 361 aa, unidentified
MAGTMTWVGLDVHARSTHAAAIDAMTGELSRVRFGAGVEASLAWLRSLPGPVRACYEAGPTGFGLYRALTEAGIAAEVIAPGKTPRGPSDRVKTDRKDAELLARQLLAGSLTAVVVPSPEVEAAREMTRAHDVCRQELMRARHRVSKMLLRHGRVYPKQKTWTAEHRRWLSAQRFPEAPSDAVFADLLAAVDGITSRKSTIALTLSHLAADERWWPTVARLRAFRGIDTLTAFSIHLELGADWRRFEHAPALSAWLGLTPSLNQSGESSRQGAITKTGSMLARRLLVESAWHYSRPPRLGATLANRQQGQPDHVLAISNRAQQRLYRVNRRMRARGKPHNVTVVACARELACFLWAAATAD

SEQ ID NO: 433403 - protein, 390 aa, unidentified
MSQPFDASRSLTAFEQDTTLVAVIEMSQSKWLVAAVVPGVERRPLKKLDADAGALLKLLRRWCEEARKSGHTVKRIVCAYEAGRDGFWLARWLQGQAIETYVIHAASIAVSREHRRAKSDRIDTELLMRSFLGWLRGEKRHCSMVAIPTVAEEDARRPGRERESLVAEQTRIVNRIKAVLALFGIASFNPRLRKAAQKLETLRAADGAPLPENAHAELRRDLDRMRLLHEQIGAIESERLRRLAQAPAAATGPHAMVRLIARVLGLGIETADMLVSEVLTRNLRDRRAVARYAGLTGAPDESGKRRREKGLARAGNGRVRRGMIQLAWRFLIFQKESRLVRWFRERTADGRRNIRKTMIVALARKLLIALWRLATTGEMTEDIKLRPAGA

SEQ ID NO: 433404 - protein, 344 aa, unidentified
MKKNLFFIGLDIAEADFAASIYKTPDQPIVTKEAIPNNPEGFDLLLLWLKEHHIDKTNSRICMEATGVYSQAIAYYLLFAGFPVSVEPPLKVKRAFDPVGHKTDPVDSKQIAEYAYRFQDELTSWQPRDEILEKIRQLLSVREQFTKQKVALKNAMQAYSKQRVQVALIKKTHQETLAQIEKQISRIDKELAKLIKQDPQILQKADYLKSIPGYGMLLATHLLVITENFTKIQNSKRLASFVGIVPYQHQSGTSVFKKAKIRHFGPGPSRKLLRLAAQSVATHDVTFRRYYLRKLAQGKAKALVLNNVANKLLKVACAMIRNNTRYIKENRSIHPMYLKSLKSA

SEQ ID NO: 433405 - protein, 353 aa, unidentified
MKYVGLDWTYRVAQWCALSPGGEIAGEGRIAADRDGLARLVLELGDEVKACLEMMSGALWVRDELVACGWQVEVADARKVKTVAPLAAKTDKVDARLLAELSRRELVPALWLPSLDERALRERLRRRMHLVRLRTSAKGRIFGLQTQWGIRISLRRLRRADGITLLERAGMPAVWRRSISECLVLIDFLDKRIAPLDAELRPFAKADPRAVLLDTIPGVAELLALTIAVEVGEISRFAGPEKLVSYGRLAPRVHQSGDGRPHTGPLSKSGSRLLGWAAVEAAQQAWRESNPWHQLYLDVAGRSHNHNSAKAAVARKILIAAWHMLSRNEPFKPAPRSTADTSVPASSRFALAA

SEQ ID NO: 433406 - protein, 394 aa, unidentified
MKLVGIDVGKNSHHFCVMDKETGEFNVAPSSFSNNKEGFDFLINSLKTYSKKSILIGMEDTGHYHVALLKFLLSNGYTVALINPKTTDLTRKMEGGITKNDKLDTITICDVLDTPERKKQYRITKVDRFDLYEQRQLTRHHHNLKEELNVYCNRLQKSIDLVFPEFNTLFSSKYSIVYMNLLKTFGSAEAIASTDIRTIRKCFEIKGRGNRISLTPEKLKECAKNSIGISSEVETIQIKHLVSQITLIKEQIAEIDKKIEEFSITNNSPILSIPGISHFSGTSILAELGDIGNYSKPSQIIKFAGVAPYHYESSQYNAQHTGITKKGSKYLRKTLYQIILTVINNNPVFKKYYLLKISQGKGHRCAQGHCIRKLLRIIYHLLETGQSFDPALLR

SEQ ID NO: 433407 - protein, 404 aa, unidentified
MWYAGIDWADDHHDAIVVDDGGRVVLTLRVSHTPAGLARLTTALEQICGATAKEQLVCIVETNRGLLITALLEAGFPVYPVNPKTVDRRRNAAGVKTDQIDAYLLAKTGRSDLADLRRLRPDSPLIQELMALTRDQDSLIQSQTRLLNQLTACLKAYYPIALELFSKLHQRSTIAFLRAYPTPEDARAASVEAIAAILKAAGHTRAAQAAATLHQQLHQPHLVADAVTTRTKARLLLALLAQLQPVMDQIAEYDQEIERLFLSHADSALFASLPRAGKRLAPRLPSEIGDERTRYADAAHLQALAGTAPVCFESGKYAKAHRRYACLKPLRNAMQHFAWQSTLQEPWARAYYQRKRTEGKSHSVAIRTLANVWLRIIYAMWRDRTAYARATFEAAQQQKLRKAA

SEQ ID NO: 433408 - protein, 344 aa, unidentified
MEYLGIDVHKVESQICILTESGEIIERRIRTERERFGAVLGARPRAKILIEASTESEWVARCLEELGHEVIVADPNFAAMYATRSRKVKTDLRDARTLAEACKLGAYRPAHRTSDRQRHVRAQLSVREALVQTRARYISLIGSLLRREGLRVASGNAVSFTKRVAGLALPVQLKSEIAPLLAVFVSINRQLVWIDTRLEHLAQSDETVERLCTAPSVGPVTAAAFSSTVDDAHRFKSAHQVEAYLGLTPSEWSSGEKQCKGHITKAGNSRMRRLLVQVAVSILRLRSPRTEALRKWATGIAARRGKKIAIVALARRMTGVLFAMMRDRTCYFQAALPEPSAQVA

SEQ ID NO: 433409 - protein, 344 aa, unidentified
MTFVGCDLHTRKQQVAVLDTDTGEISEHQLVHAGTAVEDFYGALARPVTIGIESTGYALWFHALMQRLGHTLLVGEAAKIRAMVVRKTKTDRRDALHLLDLLTHHRFPGIWVPDPATRDLRTLLMHRMRLVRIRTMVKNGLHAIALNYRVTYGPKLLRRAGLAQLQTLALPPHTAQRRDQSLELLAGLNTQIRELDDAITTAALAHPDAPRLITHPGVGALTALATVVVLGPVARFSDSKHVVSYVGLAPAVHASADKYHHGHITKQGSTLLRFVLGQAAAHAARMDADLKRTYFTLVHRRGRPKAKVAVARKLLVRLLIMLRDQIDYAEFRRRGCRTPTLTSA

SEQ ID NO: 433410 - protein, 338 aa, unidentified
MTIVIGLDQHRAQITYVLLDTETGEVRGGRICPADLESVRAFLGWFAGQRVRAATEATTGWRFLVEELEAAGAEVHLAEPAETSERRGRKKRAKTDRADARHLRELLLIGQVPESWIPPAHILELRSKVRLRHTLGEQRSEWQQRIQAQLYHHGVPRRRQLLTGDNRAWLDELDLPDAARLQVQVALRMVDQLRSEIEPIERDLRAYARRQPGCRALMTHYGIGELTAVTILAELGDVRRFGSSRRAVRYAGLDITVSQSDQRRAPGHLSRQGPPALRWALYEAAQVARRPSSPDRTYYEQASERLGGNRACLAIARKLLQRSYHSLRELGEEALQPA

SEQ ID NO: 433411 - protein, 335 aa, unidentified
MEGSPAQSPATHSPVATRPVAFVGIDLAKQSFQAATDADTPAARFNASFSYDAAGMAQLLERLKTFEVALIVMEATGGLERKLAAELSDAGHAVAVINPRQARDFAKALGTLAKTDKVDAAVLAQLARILKPQARPLPSAEQIRLKDLAARRRQLIHMRTQELNRAQQATLKDVSKSIKHLITTLDREIAKIEKQVADLIDSNSDWKKKVDLMDSVKGVGIDTAHALLAELPEIGTLSKRQVTSLAGLAPHAFESGKFKGKSKIWGGRATVRSALYMGTLAATRCNPAIKRFYDRLLADGKQKMVALTACMRKLLTILNAIVRTGVKWNPELVNG

SEQ ID NO: 433412 - protein, 428 aa, unidentified
MDVEESNRLEEFRQLRKEIRGSEEHLIVGIDIAKDKHHAFFGTATGKTLLRRLIVENNKEGFGRLRTRTEAIKLQHCLSKVVFGLEPTANYHKPLAEYLIKCDHSVVLVSGVAVSKNRELLDGRWDKNDDKDSANVADLISQGKCLYYDYPSMPLRDLRNLLSLKRRLKKQEHGTRVRIRNHLLAQYFPEFDRYFGKGCSESLPIVKWCLNPSMIAGMEYDEFVQLIAPRMKTIGQEKRLKSIWGMAVDSIGCEVGQALDFEAKLMVEDLQQMKDSIRAVEDHIKDICLGFPEYSYLLTIPGFGPDVSSKVLGAIGNPFRFDNGKQVLKLSGYDLSANRSGKTSESAVPVISKRGKAYLRYALYQAAFIASTSNRHFIIYYTNKLRGREREKGIKTKMKVKLAAKMLIIAWTLMKKKEPFDPEFLNIE

SEQ ID NO: 433413 - protein, 367 aa, unidentified
MIFIGIDIAKNSHFASAVNSDNEVIVKPFKFTNDDKGFNLFINTFKNFDLSNCLVGLESTGIYGDNLTTFLFSKGFKIGRINPIQTDSLRSSNIRKTKNDKIDTLLIAKCLMLGNYTLVTEKDIEIIKLRTICRFKFDVKKSQSKAKVQLVTCLDIAFPELSNFFNGNLHSKSSYALLTKYPTAKIIANTRIDALTNLLYSASKGHFKTDKAIALKALAKHSIAMDNPAIGKQIQMLIEQIQMLQKQIDLLDIDITNIMEKLNSPILSIPGIGIWLGAIILSEIGDITRFSSATKLLAFAGLDPSVRQSGNFNATNTKISKRGSKHLRFAINYAAELIIWNDDTFYQYYTMKLAQGKSYLNAMYEFF

SEQ ID NO: 433414 - protein, 391 aa, unidentified
MDIFVGIDVAKETHWVCAVDHAARVLLDRAVANDQAAIDRLVEDVHKLGGDIVIGLDITGSLARFLEAILLADGLRLVHVPGIAVNRAGHGFAGGERKSDPRDARTIAELVRTRPLRPILPDDETVIALRLKVTRRRELTDDQTRRVARLRMLGAIHPGLEQQLDLTAKGPLALIARYVTPAEIRRVGIKRLVAHLKKTPRLHAAEALARRALDAAEAQSIVVPGEAVFADMIRELAAEALKAREAIARIDRDLEALLIRHPDGALIRSLPGMGAVLSAEFIACVGDIRRFASANALASAASLAPVIRQSGKSKGWRRANGGDKALKRVFFQSAFCAVSTKDPLSKAFYDRKRREGKHHTQAIIALARRRVTVLWTMLRTGQTFTPIKKAA

SEQ ID NO: 433415 - protein, 343 aa, unidentified
MQVTTIGIDLAKNVFQVHGVDANGKVVFNRPLQRSRVLSFFAKLPPCLIGMEACASAHYWARELKKLGHEVRLMPARDVKAYVKRGKNDSVDAAASCEAVQRPTARTVPVKTPEQQAQLMQHRVRDLLVRQRTQAINALRSHMAELGIVAAQGYDGLKELLAIIADAGDGRLPENARASLSGLVQQIASCQAEIGALEKRLVTQHRKCADSQRLETIPSIGVIGATAIVATVPDASIFKTGRDLASWTGIVSRQNSTGGKQRLGPISKQGDRYLRRILIVGAFAVLRQARAHPEKYPWVAQLLAHKPAKVAAVAVANKTARIAWAVLTKKENYRAHPTTAAAA

SEQ ID NO: 433416 - protein, 326 aa, unidentified
MEGIWIGIDVSKKKLDAAVWVVGKKYRTLKVDNDAAGFAALLLWSRALASGLELRFCMESTGDYGFALALYLVEEGEWVSVVNPAWIKHYGRALGRLNKTDTADAKLIAQYALERKPHEWTLKEPGLRNLFRLHRRREQLKTMVAMEDNRTECPQAVGPACMASVKRVLKALKAEQRDVEKQILQLINEHSKLKTDVQLIHSLPPLAQNSAVAILAEMPDVNECQAAPNYAAQAGVNPTLAQSGSSVRGSSSMSRGGRKVVRAVLQMPTLRAIKTMPEVKAIYDRLRARGKKHRQAMVAAMRKLLMIVYGVLKHRRPYIPNFNLNT

SEQ ID NO: 433417 - protein, 364 aa, unidentified
MRFYGEQRRFYCGIDLHASKMYVCILDEQGKVVLHRNMRAEPEALKRALAPYRESVVVGAECMFSWYWVADWCREEGVEFVLGHALYMKAIHGGKAKNDRIDSEKIARLLRGGTFPLAHVYPKEMRGTRDLLRRRNLFVRRRAELLAHVQNTFTQYNVSTESGKGRDRILEGDVGSFFDDPSVGLMLDADVEVVKQLDETIAVLEAHVLKHAKVHDPARLQLLRTIPGVGKVLSLVMLYEIQDVDRFDNIGQFASYARLVACAKESAGKKQGSSGRKIGNAHLKWAFSEATALMIRSSPEAKTFMEKMTRQRGKARAVALLAAKIGRVAYWIMKRKQPFDARQFWNSCMPKGASVAEGASMTSQ

SEQ ID NO: 433418 - protein, 343 aa, unidentified
MDHFAGLDVSVKETSVCIVDNTGRIVREVKVPSEPEALLVVLKNPAYHFKRIGLEAGPLSQWLYSALAEAGLPVICVETRHMRAVLKAQINKTDRNDARGMAQMMRVGLYRPVHVKTLRSQKLRMLLTHRKLLQSKAIAIENDLRGTLRNFGLKVGMAGTVKFEARIRELVENLPDLAALVEPLLIVRRVLHEQISVLHRRLLAIVRDDAVCRRLMTIPGVGPVVALTYRATIDVPARFKNSKAVGAVFGLTPSKYQSGEINRTGAISKCGDAMMRVMLYEAAQVMLTRTNKWSWLKAWAMKIARQRGMKKAIVALARRLAVIMHRIWVDGTEFRWTRKVVAA

SEQ ID NO: 433419 - protein, 438 aa, unidentified
MLLDMNVLSKIYPNSAGIDIGSEKIYVSVENQSVRNFRTFTSCYKELSAYLKECSITHVAMEAMGVYWITLYDVLEADGFEVTLVNPADSKNLPGRKTDVQDCQWIQQLFSYGLLRKSFVPEDIVRKLRVYTRMREDKLQMASSHVQHMQKALTLMNIRLPEVLSQTHSASGMAMIQAILEGERNPEKLLACCTTSLIKNKGKDILLALEGNYKEEYLFELQQAYDGYMFYIDQVSKCDIETGKVLQDYNNSSNKDYKDGHPVKPIRHNKPNIDQLHQLLLGIHGANPTTLPGLTDYSLMRLTAELGNNIKQWPSIKNFVSWLGLAPGKHQSGKMNKRSKKKPLTRAGQIFKQAAQSILLSKQPGLGAFARRLKAKKGSGIAIKATARKLAELYYRIFDKGMDYVEQGVKRYQEKLKEQQIIFLQKKANELNLQLIEN

SEQ ID NO: 433420 - protein, 307 aa, unidentified
MPQNVIGCDLSRAALDICILPSGDTARVVNTPDVLASWVENLPDDSIVVFEATSGCDAHLMAALSIREIAFSRVNPRQAREFARAIGVLAKTDRVDARVLAQMGKCLPLALTSLPSQARLRLADLLRRRKQLVAMRKAEKLRRHSAGQEDIMNDINAMISMLDCRVRDMDEQIASLIARDHTLKRQADLLICVPGVGPTVLATLLGELPELGTLDRRKIASLAGLAPHARESGTWKGSRRIWGGRRKVREALYIAALTASRRVPALMAMQERMREKGKAPKTILIAVARQLLVILNAMIRDGRPLQV

SEQ ID NO: 433421 - protein, 419 aa, unidentified
MSFKIIKNNCCGLDVHKTWIFACIGITDSNNRTEYKQARFSSFTKGLNELCDWLAKYNCNDVCMESTGKYWIPVFNILEQRSLWVTLSHPKYTEPMKGNKTDRKDAKWICDLYMCGMVKPSFIPPADIRELRDLVRYRFKLTCMITGEKNRAQNCLTVSNLKLDDVFSDVFGKSSRSITEQILQHPGETFDVAPFVNSRCKTPIVEIQAAIDGAISKEQAVKLRQCLDHIDELNKHISEVEQEILRLSDKYEVALNLIRTVPGFDKNPLTAIQVLSEIGGDMSVFPTAKHLVSWAGCCPRNDQSNQKIKSTRISRAGSYFKPVLVQVANALIKSKKHSEFTNRYKRIKARRGHKKAIIAICRMILTAIWHILSDLKPYTPEGFLESRPVKEEKVLSTSQALNLLKQRGYIIKDKPLAVF

SEQ ID NO: 433422 - protein, 355 aa, unidentified
MKENTSETIGCDLGDKRSAVAVLNTDGEVTLRTSLRTTTKAMREFFTRTPAHVVIEVGTHSRWVSGLLKELGHRVTVANPRKVKLIAESDNKDDPHDAELLGRLGRVDVKLLAPITHRGAQAQADLAVPKARDVLVATRTKLINHVRGTVKCFGDRLPKCSSEAFARRTRELIPTALKAALEPVYQVLDRIDEQIREQDKMIGRVAKRYPDVEVVSQIHGVGVLTALSFLLTLEDKERFTDSRMVGPYLGLRPRKRKSGDDHPELPITKAGDPFVRRLLVNAANHILGPFGKDSDLRRWGLELAKRGGKNAKKRAIVAVARKVAVLMHRLWVTGEVYEPLGYHQRQIQERQAAAA

SEQ ID NO: 433423 - protein, 401 aa, unidentified
MSESKQLFVGIDTSKKNHQVSMLNPTELKKDLRITNDRGGFEELTTDLNSYHNEGYEVKVACEPTGHYWENLGRYLKEEGFDLEVVNPFHTSRYKEIVDNSPQKDDLKDSRIIAQLLKEDYTLNENLPERPYAELRELTHLREELLEDRSRSRNKLHKWLDRHFPEYPKLFSDLLGTTCLGLLTEYEGPEGLREASLKELTEKIISLSSGKLGVKRAKEVKRRAKETIGNRLAPQAARLRLNLLTTRLNSLAERINQVEKMIKDQLDDLEESTYLLSIPGVGWWGAAVFLGEVGDPTRLPRAKSVVKLAGMNLYKTQSGQSESPLSITKRGRSLLRKVAYQLAVASVEKNEEFTDYYRRKLDKGKAKLSALIAVGAKILRVMYGVVKNEESYKPLDRRVNN

SEQ ID NO: 433424 - protein, 408 aa, unidentified
MRYYIGVDWADEEHAVWVEDEQGQRVSAGMVPHSAVGFSEWGRELDEWRAQGIVLWAAIERPEGRVVDCLLDHGGRHPVNPKALDRARDRFRQSGAKDDLFDARVLAGFLRTDHAHLMALEPSSEASQELKLRTEDYQRQVRTQTRLVNQLTATLKAYYPRALDVAELTTALASAFLQAYPTPAALMVLTERQWQRWAKAHHLSEARTMELWTSLKAPQLPVPPHVVRAKSRLMQALVTELAAVVAVVASYRQAIDAFCATMPAAAWARTLPVGEHGVTVPTLWARLGDAPGRWESFRHLQAQAGMVPITVRSGKQVVVRFRFACDKQLRYAVDQLAWLSLQRSEWARAYYDQQRARGHRHRRALRALGAKWLKIIFIMWQRQVPYSEEHHLATMARQALRRPEKKIA

SEQ ID NO: 433425 - protein, 359 aa, unidentified
MKTYYIGADVHSNSTELAIEHKGSIVSRYSVPTTIPAIRNVLSSIDGEKHLTMEEGPMAGWLYRNLNNAVDEMIICDPRRNKLISSDGDADDRIDAGKLASLLRGGFLRAVYHNDDMNRVTLKEWVCLYYDRVRDAVRMINKIRARCRMNGISIPRAVIREPSKRKLWLSEIHNSALAAQLNMLWLNYDSVVKQVKISKRQLAILSRQHDIIKLWSELPGIGTIRAITLFASLDTPWRFKKKNKLWKYCGVGLERSASGTDKKGKPKPAFLQLAWHVNKVLKYVVLGAALSAINQNKNVFSCYYERMLHEGIMPSNARHAVARKMLTVMWGMWKQNSRFRENMVMPVSKSSAVSPARGK

SEQ ID NO: 433426 - protein, 341 aa, unidentified
MAIIRIGVDLAKNVFALHGVDESGRVKMARMVRREQLLEVLSAVPPCVVAMEACSGAHDLARRVTALGHSARIMAAKFVAPYRMSGKRGKNDANDAAAICEAAGRPNMRFVPVKSAEQQALLAVHRVRQGFVEERTATINRLRGLLAEFGVVLPLKAATIRRQTAQHLDALPVWAQRALTDLLAHLSHLDGRIQEYDTHLKLSARADPRARRLMTLRGLGPVSASAIVATVGAAHEFKSGRQFAAWLGMVPGQFSSGGKQRLGGITKAGDGYLRALLIMGARAVLAAAPGRTDRISRWALALQARRGYMRALVAIANKNARLAWAVLRHGEDFRMHEIATP

SEQ ID NO: 433427 - protein, 346 aa, unidentified
MLGSLVALQERLSLYKIKVVKMNEQINYCGIDVSNETLDLYFVNKEGTHQHLQISNTITGFRNMLKETGRKVHFVMEATGVYHLNLIFFLEQKKMRYSVVNALKIKRYIQMHLERNKSDKKDAKRIYEYGVDRDPELYQMPDMAYFECRSLNNAIDDLTKEITKFSNQIHSLKKCPFDAKSIEKSFTKIIKKLQEEKQNLEVELQRKLVEWDGETLELVSSIKGIGKRASAELLIYTQGFKDMNSYKQLISYAGLSPTEYRSGSSIRGRVRICKQGGKQLRHILYMCALNAKKTNAQCRALFDRLVEKGKNKKAAVIAVCNKLLKIVFGVVKNREFYDENFIQKTT

SEQ ID NO: 433428 - protein, 272 aa, unidentified
MEWSEHTTPEAIRRLGRKLQRIAPGEVRCCYEAGPTGYGLQRMLEAVGVICEVVAPSLTPVKPGSRIKTDRRDARKLAELLRADVLTQVHPPNPADEALRDLCRCRDDVRVDLLRARHRLSKFLLRRHCIYRQTKHHWGTRHWAWLLEFRFEDPVSQATFDSYLLAVQQLEERQRQLDLQLEHYGNQDPYREPVGWLRCFKGIDTVTAVALVAELHDFRRFRSARELMSYVGLVPSEHSSGGRERRGPSPRPAIVTCEDYWSRPPGTIAIGR

SEQ ID NO: 433429 - protein, 323 aa, unidentified
MSQPNPLCVGIDVSKTTLDIATANNEFAQFTAGNDTDAFELIIAELRKHSVALVLMEATGGLEAAVACSLQAEGFDIAVINPRQARNFSRAMGYLAKTDRIDAKVLSQMAEVINRHPERERFIKAIPDAERQILAAMVVRRRQLITMLVAERNRLHPAHPQNRKSINTIIKALEDELSRIDKAMNNHIKTHFKELAARLSSIKGVGAMTVATLLSEVPELGSLSRREISALIGVAPVNRDSGTMRGRRTIFGGRAGVRTALYMAALVATRFNPVIKAFYTRLITAGKVRKVALVACMRKLLTILNAMIRKNEEWSDSYHKFSL

SEQ ID NO: 433430 - protein, 362 aa, unidentified
MAVAEPDGEVRSLGAVPYQEDSVRRLVKKLGPASRLRACYEAGPHGYGLYWQLSKLGVHCDVVAPTLIPVRSGDRVKTNRRDAEKLARCYRSGDLTAVWVPDAEHEALRDLVRAREVAKKDQLRARHRLGKFLLRRGLRAAAGVKSWTSKHLLWVKTLRFEHPAQNVTFLDYLHEVEHAAERVTRLEQAIDEAIDSAPAEMRSLIAALQALRGIKSVSAATIVAEVGPLSRFPRPKQLMGYSGMVSSENSTGSSVRRGAITKTGNAHVRRIIGEAAWAYQYPPAMSPVLKKRQEGLSEEIKEIAWKAQHRLSSRYRRLLAKGKPRQKAMTAIGRELLGFVWAIGIQVAKEQQGPTKGRHRVA

SEQ ID NO: 433431 - protein, 321 aa, unidentified
METWVGIDISKDTFDAAWIMDGKKNHLKLENSSNGFKRLLNEVPAESRFAMEATGEYHLNCARYLSSRGNPVAVLNPFAVKMHMQSDLRRCKNDRADAYSIAKFAAEKNTDCWTCPTDDEIRLKHLDAVIDNLQKQIRQSKNILHSLTQVNLRDDQAVSIIKKTISSLEALMEKARNRQLEMVETGKKEEIALACSIPGIGLETSLKFFTHVGNIERFGSSRSLISWIGLTPRNAQSGTSIHKNGSISRMGCTRLRGQFYMCAVVAIKYNPDCRSFYTRLKESGKPSKVALIAVANKLLRQLYAVLTKKEAYVPNFCTKAS

SEQ ID NO: 433432 - protein, 354 aa, unidentified
MSQKLNAAIAVIGIDIGKNSFHIVGHDHRGAIVLRQKWSRGQVEPRLANLPPCLIGMEACVGAHHLSRKLQMLGHDARLMPAKYVRPYSKGQKNDFRDAEAIAEAVQRPTMKFVATKTADQLDLQALHRVRDRSVGQRTGVINQIRAFLLERGIAVQQGLHSLRSELRGILATRTDVLSPRMLRIIEDLAGDWRQLDARIEALSSEIETLARQDKACERLMTVPGIGPIISSAMVAAIGTGDVFSKGRDFGAWLGLVPKQISTGDRTILGKISRRGNRYLRALFVQAAWVVLVRVKCWERYGLKSWIEAAKKRLHHNVLAIALANKLARIAWAVLNKGRAFECVKTEETASRAA

SEQ ID NO: 433433 - protein, 346 aa, unidentified
MKINRVGVDLAKNVFQLHGADYKGKTVWKRRLSRGKWLKVLFDTVEPGTEIGMEACAGAHHWARQLMQRGYPVKVIPPQFVKPFIKSNKNDANDAQAICEAMGRPNMYPVKVKTVEQQDLQAMHRIRNEIKSHRIAKANQIRGLVTEYGLVAPLQLHALRRAIPEWLEDADNGLTFLFRQLLQGLWGDLYALDQRMTELDKQIAVVAQEDPTARRLQQLRGVGPLIATALVATMGDARQYPKGRDMAAAIGLTPKQHSSGGKDRLLGISKRGDAYLRCLLVHGARSAVRTAKDKEDRLSRWIISLQARRHPTVVAVALANKMARMAWVMMTSGVDYEPDLAAASVN

SEQ ID NO: 433434 - protein, 367 aa, unidentified
MIHIGIDHHKKFSHAVAMTDSGEICWEGRLASDKAAFECLKQALPTGEPIQSVLEAGRNWGILYDALEELDLHPKLANPLKTRLIAESFIKTDKIDATTHALMLRAGITPLVHVPPKEVRAQKNLLRQRFWLVRLQTALKNRVHNVVDRNHVQPPEKTDLFGSHGRAWLNALNLPDPDGKILSADLALLDTIRAQIRQTEKWVEEALKANADIPILMNLPGVGKLLAALMALEINTIGRFLTPAKLVAYSGLACSTYSSAGKTVHGGLLPTCNHHLRYAFIEAAWTAIRVSPYFTDYYRRLRFHKSSQKAIPAVARKLCEVAWYCLMKHKNYEEKPYQFKFVRPMANMVRVTASVGAVSGTQINASC

SEQ ID NO: 433435 - protein, 416 aa, unidentified
MDTMYERCCGLDIHKKTIEACFRSGKKKTHMSFGTTSAELRKLTMWLVENDCQSVAMESTGSYWKPIFNILELSGTDMEIIVVNARHMKNVPGRKTDVHDAEWIAELLQYGLLRPSFIPDREQRELRELSRYRKSLVGERAREINRLQKMLEGGNIKLTSVVSEVTGYSSRRLLDRLLRSDAPMTEDVISGLVHTSLVGKSKELEIALDGLLSELQKELLIKVLDHIDDMSRRIADLDDFCRKQMERYEDALDKLDEIPGIARRTAETILIETGLDMSRFPTAKHFARWAGLAPGNNESAGKRSSGRTTKGNPTLKSTLIQSAKVAARKKDSFFKARYQKIAARRGANRASVAVAHSMLIAIYHILKSGERFKDLGEDYYNQFNREKKKNYYLKKLTKLGVNLKEATLSISIQAAT

SEQ ID NO: 433436 - protein, 421 aa, unidentified
MNGVRAKRVRTVKEGTLIATVDIGVTSNTGYYTTLDGRGTGSFRFDNSKEGFEKFWGMTIAGKNRFGCNEVLVGYESTGPYAEPLVHYLANKQVKIVQVNPMHTKKMKEVNDNSPLKTDDKDPRVIADIIRLGRALTVVVPEGDAAYLRRLNNARERHVREQTALLNQLQQLVFLIFPEFKTVLKNMKGKTAQHILKRYTIPERIGTLSKEALGEEMRKRSMGKFGIKEAESLIGLARETVGIKEGLGGIFMDIRHILLQLEAEGRFISEIEAEMGAALERIPWSARLLSIKGLGTVSVAGLIGEVGDFSKFSTQSEIMKLAGLNLYEISSGKRKGQRRISKRGRSLLRKILFYAAIQMVRKNGIMQDYYAKLIGRGMERMRALIAVSRKLLRIIHAIVRDNRDYVGQYQAPERREIKMAA

SEQ ID NO: 433437 - protein, 428 aa, unidentified
MSQEDRTRLEEFRQFRREVRGSKEYLLVGIDVAKDRHHAFLGTATGKTLLKRLVFENNVEGFRKLLAQAEAMKVQEGLKKVVFGMEPTGNYHKPLGEHLIRCGHLVVLVSGVGAYENRKTLDGRWDTNDTRDAANVADLVSQGKCLFYEFPVGPLQDLRNLLSLKRRFKRVEHGYRVRIRNHLLAKYFPELDRYYEQSESTALAIVRWCLDPSEIVSLEYKQFAERVSSTRWRYSQEKRLQAIWKLAVDSVGCEAGPVVEFEAKVMVEGLKQIRESIRQIEERIQEVCSLFPEYECLLSIPGFGRDVSSKVLGAIGDPFRFQNGRQVLKLSGFDLSAKRSGKASESVIPVISRRGKADLRFALYQAALIASVKNPDFVGYYTAKLRGREREPGIKIKMRVKLAAKLLLIAWALMKKKEPFNPDYLGTE

SEQ ID NO: 433438 - protein, 324 aa, unidentified
MKKEKKTFIGVDVSKKTLDVTLLNEKGGKRRKRVANTEEGIRTLLDWLQKLSVSQAHICMESTSVYWEDLAEALNEATYTVSVVNPMRIKGYAMSQLRRSKTDPLDGDVIADFCRTQVPSSWTPPTTEQKKLRALVRHLEALKKSRTQQSNRLGTCKDEEVKASLQTLLDTINVEIEQVKKRIDDLLDQHPDLKEKKELLVTIPGIGDQTAIHILAEMYDIATYDNAKAVAADVGVTASHYESGTSVRRRSKISRMGKSAIRAALYYPAITAMRCNPIVQNLVKRLKSRNKNKAVIRAAVMRKLMHLSYGVIKNKQSFDSAYTG

SEQ ID NO: 433439 - protein, 370 aa, unidentified
MAHTSTLFVGLDVHKETIAVAYVAEEREAELVSWGTIGTRQCDIDKLIRKLQAKGKTLHFVYEAGPCGYWLYRYLTKKKLTCRVVAPSSIPKKAGDRVKTDRRDAVQLARLLRSKDLTPVYVPAVADEAIRDLVRAREDSLKDGKAAKARLKAFLLRQDIRYEGRANWGPAHLRWLAKVVCPTPAQQIVFQEYVRAVSEHVERLQRLEADLQTQVKTWRWLPVVEAIQALRGVQFTAAVILIAELGDLTRFENPRQLMSYLGLTPSEHSSGERRRQGAITKTGNSHARRALVEGAWAYRYPAKVSRHLQLRLEKVPKAIQDISWKAQVRLCKRYRRLVARGKNANQVVVAIAREMAAFVWAIAREVEVAH

SEQ ID NO: 433440 - protein, 376 aa, unidentified
MNKCHSNTELSSHEGTRSQFNGGTGAIKSAVGRMRPVCALGIDVHQDFYVVVEQVDGTNPKPPQRFPKQAFLRWAARLKENTGAEVHAVYEACGFGFSLQRQLSSLGVQCHVVCPQKLDEQNRRVKTDGLDAKALVLKLDRFVQGNRSSLALVRVPTEEEEQKRAIHRQREQLVKARKQLEAQGRSLMVNHGLEPVQSWWKPRAFAALPVPQWMKELLANSQPILVALQQKIASLTIQLQSSATPKQPRGLGLMTSVIIDREIGDWRRFSNRRQIGSYTGLCPGEYSSGNTRLQSCVTKHGNPRLRAALVELAWRLVRFQPNYKPIVKWRQILAKGALATGAARKKAIVAVARQLAVDLWRIKTGRLRAEELGLIN

SEQ ID NO: 433441 - protein, 358 aa, unidentified
MKKHIRIESTGQFTIGIDVSDRSSCYCILDRGGEICGEGKLRSSPEAYRQQFGGRAPAVIALEAGTHSRWMSALLRECGHEVIVANPRRLRLLTTSDKKNDPQDARTLAEMAWAKPALLSPVRHRSAEAQRDLNLVRARDLMVEARTKLINGVRCLVKGFGARVPKCASGQFTKHADLHLPEEARPASAPLLELIDELSERIQEYDEMLEHEAQTRYPQTALLTQVSGVGTLTAMAFVLTIEDPHRFARSRDVGCYLGLRPKQRDSGDRSPQLRITKAGDSYLRKILVSSAHYIIGPFGPDTDLRRWGLKLCERGGKNAKKRAVVAVARKLAVLLHRLWVTGEVYEPLRNQAKEVVAA

SEQ ID NO: 433442 - protein, 354 aa, unidentified
MRMVAQAERRSYVGKQVFVGIDVHKESWHVTVRSSGEEIFNGRIPGQYQSLKRILERYHDARIKVAYEAGPFGFWLLDRLVQDGIETIVVPPSLIPIESGNKVKTDKRDSRKLATLLESNMLKHVYVLTSEEREHRDLLRTRRQIVEHRNNVARQIKSKLMFYGIRSPFTSATRWSLQYVAWLKTITFETSYLKEAFELLIQMYEYLTRQIARINRTVVLLCRDKRYRGRIKLLCTAPGIGRLTAIELLVELQDMTRFKSAEELASYIGLTPSEYSTGERTRQGRITRCGNKRVRTYLVESTWVLITKDPYLRAKYLRLKSLRGGKRAVIAIARKFLIRLRRMLLDNVPYRMAA

SEQ ID NO: 433443 - protein, 420 aa, unidentified
MSKTVEIVYPICCGMDVHKNFLVACIAVTDEHSHTVHHIKRFSTFTGDLRRLANWLASYNCRDVCMESSGKYWIPVFNILEKTCNVCLTHPKYVKAIKGKKTDKKDAKWISELFKCDLVRSSFIPPPDIRQLRDLCRYYVKLTGFVSGEKNRAQNCLTMCNFKLDDVFTDVFGKSATRVLDALLEHGNGNFELDGLISAKCKSSLEKVREALDGELNPVQIEKLNLIRQHMNDINSLKDSLENLIYSLAAKYKPQIDLLMTVPGISTQLTAIRILAEIGADMSVFETSKHLVSWAGLSPQNQESAGKKKTTRIGRAGAYLKPLLVQIALAVSKSEKHSELRNKYLALKKRRGGKKAVIAIARKLLTAIWHILTKREVYNAKLYITADKPPAVRELTTAQAVTFLRNRGFVIVDGITGEVA

SEQ ID NO: 433444 - protein, 433 aa, unidentified
MIRYVGIDLHKHLIVGHVVDPAGKTLDTFRYESVGAVTLEHIGRYRLKPEDQVVMEATTHCWAVVRALEPFAARVTVSNPMATKAIAKAKVKTDKVDAAVLAHLLRLGYLPEVWQPDQTTQVLREWTARRSRIIGQRTAVINRLRSTLAQRLLDCPHDMTSQAARDWIAGQIVDADTRWLLESDLRLMASLQVELDAMEKLLAKRGHIDPRVKLLMTLPGVSQHTAQALLAAIGDISRFPDADSLASYLGLVPTTRQSASHCYHGHITKQGRGHTRSMLIQASHSMRTNPGPLGYFFRRLRKHKPYSVAVVAVAHKLALLAWHLLTKGEPYRYALPLATKTKLQKLRVRATGQKHRTGPVPGKKPRTKVLGGSHLTKPLGTVYEIEGVPAASPAPTGERRHLAALKLESFVENLQQEHVIPRRTGKKATARDA

SEQ ID NO: 433445 - protein, 362 aa, unidentified
MEYFAGLDVSLAETSVCVVDEKGAVIMTNSVATEPQALADLLRPYAARLRRVGHEAGSLSPWLHAGLQALGLPVVCLETRHVRAAMAAQRNKTDANDALGIAHIMRTGWFRSAHMKSESSYRLRLLLIQRRNLKRKFLDLENSIRHSLKVFGLRFDRVGRGGFEDAVRKAVKGDLLTEALIECMLRARAALWAEYLTLNKLAVKIVMQDELCRRFLAIPGVGAVTALNVACAIDDPARFRCSRDVAAYFGLTSKRWQSGTSIDVKGRISKVGDGDVRRSLYEAATVMLKRFKGKDAIKSWGLKIAKRRCHAKAAVAVARKLATVMHAMWRDGTYYLGDHGLSDAEAASWMKEKLARVNYARS

SEQ ID NO: 433446 - protein, 452 aa, unidentified
MAQPQVQEWSVVQADMAGVDVGDTLVVAALPPGRGGVGPAVREFGTLTDDVQALAAWLLGAGIKAVVMEATGVYWMPVYSLLEQAGLRVQLVNPHEVMKVPGRKSDVSDAQWLQQLASYGLLRAAYVPDALTQTLRCFLRQRQLLIEQSIQQVQRLQKVLVRMNVRLHHAVSDVTGKTGLAILRAIVAGERDPAKLAAMRDPACKKSAAEIARCLRGDFRAEEVFVLTQTLATYDHLHTQLAACDHAMAAALRDALAQRGAPPPAPPPGRKKPEQGNPLAFDGRTLLYQYVGVDLTAVPGINSVTAWTIISELGRDFAAFPTVGCFTSYLGLSPDNRVSGGKVLVHGRRQVRSRAAKAFRLAANAVQRSDHALGAYFRRMKARHGPAFAVIATANKLARIVYCMVTRRDPFSLEQVVGDCQRAATDQLKRLTRQAQKLGFTLAPVTPAALGG

SEQ ID NO: 433447 - protein, 356 aa, unidentified
MKQYVGLDVSQKETSVRVVNEVGQVLFEGKAKSDPGALTALLRKRAPHAERIGFETGAMASWLWHELRRVDHPVVCIDARHAHAALSVRMNKSDQNDARGLAELVRVGWYREVKVKSEKKSQKIRAMLVARPRLVAIRRDIENQVRSLIKEYGLLFPRAIGLQFRNQVRELLGEDHQLLSVIAPLLSIHEQVCKQQSKFDNEIRQLAKSDETARRLMTVPGVGVVTALTFRHTIDDPSRFRSGSSVGAYLGLTPRRSQSGGTDSNGKISRWGDRLLRTYLFEAATVLLSPDEEMVFSQGLGNEACQADWHEKGKSRHRPEDRRDPPLRLGRWHVVRLGSGEGSVILFLGSWSGPPD

SEQ ID NO: 433448 - protein, 388 aa, unidentified
MQSNDLSRSFTAFDQDNTLVIVIEMSEASWLVLGLVPGVERQPLKKLDADKDNLLKLVNRWREEAVKAGHPIERVVIAYEAGRDGFWLARWLRARGNEAYVMHPSSVAVSREHRRAKTDRLDTELLMRAFLGWLRGERRHCSMAAIPTLEEEDAKRPSREHEKLVGERTRIINRIKSTLARLGIKGFKPTLRNAEEKLGQVRSAEGTPLPENTREELRRDMARLRIVRMQIKEIEQQRLSKLKAAAPAEKGRHAMIELIARIVGVGVETADMLVVEILSRNLRDSKAVARYAGLTGSPDESGKRRREKGLARAGNARVRRGMIQLAWRFLRFQKDSALAEWFHARAVDGRKGTRKTMIVAVARKLLIALWRLATTGEIPAGVVLCPAA

SEQ ID NO: 433449 - protein, 355 aa, unidentified
MNSEKYIGLDVHQATICVAVMDPKGKVVMESILETKATTILEFLAGLRGTLSVTFEEGTWAAWLYDLLKPHVANLVVCNPRKNALLKHGNKSDKIDARKLADLLRLNDLEPVYHGETGVRMLRELARSYLTIVKDVSRVMNRLKALYRSWAIPCAGRDVYYTRHRGEWLGKIPEAGSRRRAEQLYQQLDMLQPLRQQARRELLAESRKHTITAKLRQIPSLGPIRSALAVALIQTPHRFRTKRQLWTYSGLGLETRDSGEYHYVQGQVRRRKKQVFIRGLNKDHNHDLKGLFKAAATRASVRPGPFQDFYQRSLAKGIQPTMARLTLARKIAAITLTLWKKGENFDAEKLKAQAA

SEQ ID NO: 433450 - protein, 339 aa, unidentified
MQLYAGLDLHSRNTYIGIMDKEFKRVFGKRVANKLPVILKTLAPFQDRLKGIVVESTYNWYWLVDGLMDAGYRNLHLANPSAIKQYEGIKYTDDQHDAFFLAQLLILNILPEGYIYPKENRPVRDLARKRLFLVRHKTSHILSLQSLITRCCAQRVSASEIRNFTSNNLQQLLKEEYIVLSAQANLNTIGFLTQQIRQIEKAIKKKVKLKKAFHQLQTVPGIGIILAMTIMLEVGDIGRFPQVGNFASYCRCVSSDRLSNGKSKGHGNRKNGNRYLSWAFTEAAHLSRRYNERFRSYYNRKVAQANTSLATKALSNKLARICYYIMRDQVPFRENLLSQ

SEQ ID NO: 433451 - protein, 348 aa, unidentified
MRNYSSSKAIKTIGIDLAKSVFHLHGVDDQGKVLVRKRLSRSKLAEFMAKQAPCLVAMEACGGSHYWARKFQGLGHDVRLISPQFVKPYVKSNKNDMADAEAICEAVQRPNMRFVPLKSVEQQDILSIHRAREQVVRRRTAQGNQIRGLLMEYGLVIPKGMRALHAQLPDILADADNELTLMFRELLHGLWEELVNLDKRVALYDQQIIALSEQSEACRRLMTIPGVGPMVATALLASVSDGKAFKNGREMAAWLGLVARQHSTGGKPRLLGISKRGDVYLRKLLIHGARAALRWTDKKHDKRSMWAESLKERRGQNIAAVALANKIVRTAWVLITRDENYRASVATV

SEQ ID NO: 433452 - protein, 422 aa, unidentified
MESVIVAGVDVSKYFSDMCVLSADNLVLKELHFTHDHAGLNKAADTLRQIEKKSGLNVVIIMESTSHYHRLPYYFFRNSGIDVIVINPLQSNAIKNISIRKVKTDKVDAYRIALLYRLQHFEVTDQPIDILFDLRNLTRQYGDIVKSRTAFSNQLVACLDQAFPSFRKVFKSVTTVTALSLLQHWQAPQSILSADRTQIYELIRAVSRSGSAYALRKTDMLYQLAALDSQINLQAESNGILIRSIVSIILSLNENLKLLHDEVKRLINTDRFAFTQVTLLSTIPGISWFGAALLLAEIGDFTRFKKPAQLVAYCGLDPSQRQSGMFKGTKNKISKRGCRYIRRLLNMSAVTAVSKNSTGEYNNPVLAEYYQGKCLSKPKKVVLCAIMNKIMHIVFAVLRDQKPFELRTPEEHAIKLHQKNVA

SEQ ID NO: 433453 - protein, 344 aa, unidentified
MEQIIRIGMDRSKSVFQLHGVNVMEQPTSRKKLSRKEMLKFFANTPPTTVAVEACGGSHHWARLLGSFGHDVKLIAPQLAKPYVKRGKNDAADAEALCEAMSRPTMRFVTVKTADQQAALMLIGVRQRLLHNRTQLANAIRGFAMEFGVVAATGMCRIEPLLERLAADESLPELARELFAMHGEEHRELLRKIEEVDERLMKLHRADECSKRQAEIPGVGPVSASLLMMKTPDPRMFKSGRDFAAWIGLTPKDHSTAGKVRLGVITRAGDEMLRSVLVVGATSLLQQVRSGRRRHASSWLLGLLQRKRPKLVAVALANKIARIAWKLMISGETYQRAEGQRPTA

SEQ ID NO: 433454 - protein, 436 aa, unidentified
MRSGLLGNPKVLFASQVIRKGVIFMLYVGIDVGLKENKARFIDGSGNDCWNRLAFPNDADGAVALVRETCRALTRHGFATVAFGLEATSFYAWHLALYLSEAPELASFGPQVYIFNPKMLKAFKKSFKNLPKNDWIDAWVAANRVRFGQLPKPFAPDERYLPLQRLTRHRYHLVQQLTREKNYFLSYLFLKCSRLAQACPLSSPLGASAAALVTEYYSAEEIAAAPLEELAQFLAEKSRNKIASPEVIAAEFQKAARDSYRLPDKLKDPVNRILASTLQTIRHLQNQIKELDKAILREMTGLNNPLLTIPGLGPVLSAGIIAEIGNIKNFPDDDAVAQFAGLTWKENQSADFQGEETPLTKSGNAYLRYYLIEAANCVRMHNAEYQEYYQRKHNEAKKHHHKRACVLTARKLVRLVYALLRDNRAYTKPERRVVNQ

SEQ ID NO: 433455 - protein, 424 aa, unidentified
MNLTQNDRLKQVTSDTLIVGVDVGSQTHFCRAFDWRGFELSRRVFKFSNTGMGFLTFLRWTEELMNKTEMKKVIVGCEPTGCYWLTFQKFLQDHDVQLVTVNPFTVNRSMELDDNSPEKSDLKDPKTIALLVKDGRFSTSYLPSGVYAEIREASVCRDQIMKQHVRLSNQIQGWLQKFFPEYFECYADWDSTSGLMLLREAPLPQDILKIGAGGINQIWRDAKVRAAGIKRAQTLVEAAQNSVGLEAGEAARLEIWVLVNDYILKAEQLKRLDEYLEEKVKEVPNVEKLLAIKGVGMSTVIGFIAEVGDIGRFTDPKQIQKLAGLEIVKKSSGKKKGQPRISKRGRRKLRRTMYESARALMIWNPVFQDVFLYYRNRTKKPLGGMQAKIAVACKAIRIFYVVLKTGCDFDEEKFRKDIIRPEAA

SEQ ID NO: 433456 - protein, 415 aa, unidentified
MKVVYPICCGVDVHKTFLVGTIVSTTGGAEPHYQKKRFSTYNSDLHKFCDWLHTNNCLDVCMESTGKYWVPVFNILEERGIHVTIANPKWVKAVKGNKDDTKDSKWIGDLFRLGLVPGSFIPSKEIRILREFTRYRYKLVSMKSSEKNRFQNAFTVCNVALDSVVSDMFGKSATAITDYLISGDTFNPEYCVSLLQRSLKKKADSVLDSIEGYSITPEQKFRMRIVRSHLDYIENAIAQVDSEIDMMVLKYESLISLLCTIPGVDRRSAITIVSEIGTDMAQFGSSKRLCCWAGLTPGNNESAGKKKSVRITRAGVYLKPALVQVAHAAVKATDNSYYRLKYEQIAKRRGKKRAIIAIARMILTAIHQMMTTGEVWNPIDLFKVDMPETLKEKQLAKAVKQATRFLEKQGLTVAS

SEQ ID NO: 433457 - protein, 331 aa, unidentified
MKFKEALGIDVSKKTIDVNLYCKRDYLQFENTVKGYKALLVWVKRQTGLAMDQVLICFEHTGLYSLPLAVFLTGQNITFCMEPSLQIKRSLGLVRGKDDKVDARRISEYAYLRRKLLKPFVLPSLSVLRLQKLLSLRERMVKQRAGYISSLKEHKCKLKQKDYELYFSTHKKMVHYLGKQIETIEKEMKELITHDEKMNELYLLMVSVKGVGFILASTLLVATNCFSSFSDSRKFACYAGIAPFEKQSGTSLNMKSRVSHYADKRIKSLLNLAALAAIRSDPELRAYYQKRVEMGKSKMSTLNIVRNKIVHRIFAVVKRRTPYVPLYQHAA

SEQ ID NO: 433458 - protein, 344 aa, unidentified
MSEAFIIGLDIAKYVFHAHGVDERGRAIFSKRISRKKLLDFFAAQPSCTVALEACGGAHHWARQLSQLGHEVRLIPPAYVKPFVKRQKNDAIDAEAICEAAQRPNMRFVAVKSEQQQAAGLVFRTRDLLVRQRTQLINAIRGHLTEFGWIAPKGPSHVAMLAGLIEEEEMASSLPEAARAMLRLMLDLLADLDGKIADLDKEIARRAREDEVSRRLMTVPGIGPISATAIAALAPPAETFAKGRDFAAWLGLTPLQRSTGGKQKLGATSKMGERTLRRLLIIGSSAVVLQASKRGAPKGSWLEQMLARKPRMLVTVALANKTARIIWALLVKKENYRAPVAAKA

SEQ ID NO: 433459 - protein, 411 aa, unidentified
MQVIHARCAGLDVHKKTVVACVWLTANNGRATKETRTFGTTTGELLALCDWLKAQSVPIVAMEATGVYWWPIYNVLEGAGIAALVVNAHHIKAVPGRKTDVADAEWIGDLLRHGLVRGSFVPPRPQRELRELTRHRASLVVRRASTVQELHRALESTNIKLGSVASDLTGVSASLILRELVAGRGDPAALAQLAHGKLRAKLPALQAALVGVVGEHHRLILSHLLADIELFDEQIAAVGLAVEARLSSERDLMERLDEIPGINRRVAEVILAEVGSDASRFPSEGHLISWAGLCPGLHESAGKRRSTRVRNGNRALKQALIEAAHGAARTSGYLGAMCRRLSVRRGKSRAIVAVARTILATAYHLIARGTHYQDLGADYFDRLQAPRVVKRLTARLSQLGYTVTPNPSFSG

SEQ ID NO: 433460 - protein, 475 aa, unidentified
MAARKNDNAKVSGAAGQHGGDGAEVTEERVEVVTYAAAIDVAKGFGMVCTRVPGSRADRKRQKVWRVDASYGAVVALMDHLRSEGIQRLVLESTSDYWRIWYYLAEAAGLQVWLVNARDVKHLPGRGKSDREDSVWLCKLNERGMLRRSFVPPEGIRDLRSLTRTRSRLAQDQARHRSRVEKILEDALLKISVVISDLFGTSGRRFPGALVAGQRSPKALAALGDYRLKASTAELEAALTGRFREVHAFEIATHLRLIDAINAEIARLDARIEQQLASIPGVAPACGDCGLIGGGHSPGCASDGTPVLGLVERLDEVTGVGVRNAQVTIAELGTDMSVFPTPGHAAAWARLTSRTLQSGTTTKNGRTGKGNPYLRGALGQSVMAAAKTDTRLGEQYRRIARRRGKQKAIVAVSRVICEISAILIADPGARFTDPGADYYSRVNPARQTRSKIRDLERLNPGMKVTLTPVETAATA

SEQ ID NO: 433461 - protein, 367 aa, unidentified
MAKVRTWVGLDVHAAKTVACVVDAESGEMIARRLPGDTAAVVVFCAGLLGPTRVAYEAGPTGFGLARALHAVGIECVVAAPGKIERPAQDRVKTDQRDAERLVRLLMIDGLYAVRVPSGEEEALRDLVRAREDLRGDLMRVRDRLSKLLLRHDVRYDGDGDNWTRRHRDWLSKRQLAERGAQSTLLDYLGAIDAVIIRRDTVEATISQLVPNSPWAQDVARLRCLRGIDTLSAVGLCAEIGDFHRFQRPSQLMSYLGLVPSEASTGEKRRQGAITRSGSQHARRLLVEAAWHYRRPPRLGSTIERRQQGQPAAAIAIAWSAQQRLHRLWRRLDLERGKRRTLVAVAIARHLAGFCWAIVTTTTDQNA

SEQ ID NO: 433462 - protein, 310 aa, unidentified
MANQYVGIDVAKATLDVAIGSDGELVQVENNEAGIARLLERLGEVEPTLVVLEATGGYETVVAGAIVGRGIAVAVVNPRQVRDFAKATGVLAKTDRIDARVLARFAEAVRPEPRPLPTAEAKELEEYLSRRRQLVDMLTMEKNRQSIATTERMKKSLKKHIDWLEEALRRANDDIDKAIRNSPAWREQEDLLRSMPGIGPVSARTMLAELPELGRLNRKKIAALVGVAPLNRDSGTLQGSRTCWGGRASVRQVLYMAALSAVRCNPVIRRTYAALRARGKKHKVALVACMRKLLTILTAMVRDKRHWSPS

SEQ ID NO: 433463 - protein, 417 aa, unidentified
MKAWTELTHFAALDWADDHHDLVVVDAQGQVALELTFAHNAEGWQQAQQALAAWPGLPVAIETSAGPAVDQLLQRGFVVYPVMPKAAVRYRERKRPTGSKDDRHDAWSLADALRTDGQGWSALSPLDPLTGELRALCRDEITLIEQRTALINQLQAALKEYYPAALEAFEDWTAPYTWAFVLAFPTPKALTAAGKRKWEKFLHSHKLWRPQTSSQRMEIFARAMAFSGAEAITAAKSLLAQSLARLLQTLEQQLANYRARIQALFDQHPDHDLFGSLPGAGAKLAPRLLAELAGADWSQLSQVQARAGTAPVTYQSGKIRRVKIRRACTHPLRATLHLWADLSRHYSTWAAAFYRAHRDKGQSHSCALRCLAHRWLEVIGAMSRTHTIYNAEQHLREIQKHGSYVLRLISSPDPKPL

SEQ ID NO: 433464 - protein, 341 aa, unidentified
MLYAGLDLSRQRLDVHVLDEDGRTVEMTAVRPDGDALRSLVGFVGRHGDQVTAAIESMNGARFVHDTLELAGWDVEIADALKVKGLAPLAAKTDRIDARVLAELARRDLVPAIWLPDPGTRAERERARFRLHLVRHRTALKNRIHATLIAFGHPVSVSDLFGVAGRELLAGLEVPEPWATTLATSLRFVDELDAQIDACEQELRALGADHPDIELLRTAPGIGWVLGYTIASELGDIRRFSSPKKLAGYTGLCPFVRQSGGRDDRGPLAKNGPKTCAGRSSRRRLTRLGTRHTRSGTSGRRSASAASAGARWPASRSPASCPPPSGTCSPSVSRSLPAGPT

SEQ ID NO: 433465 - protein, 346 aa, unidentified
MLADELDYVIGVDPHRDTHALAVVDVRSGGVVFEATAVADGEGYASVLRLADQHAPGRRAFAVEGTGSFGAGLARFLVSHEERVLEVGRLRRERLSGKSDALDAIRAARSVLGQSRPAQPRAGGEREALRALTAAREGAVTARRAGLCQVRGLLVSAPEPLRAELRSLTRAQLLRRLAAVRPEGRQDPELRGTLLALRALARRVKALTVEERELAREIETLTRKLAPQLLEQPGVGPLAAAQVLISWSHRGRITSEAAFARLAGCAPIPASSGQTVRYRLDRGGDRRLNRALHMILVTRRRSHPETIAYIERRLQEGKSRREATRCLKRYLARNLYRLLENPQMPT

SEQ ID NO: 433466 - protein, 390 aa, unidentified
MSSEKYIGLDVHQATISAAVMDGQGKVVMESILETKASTLVEFFAGLRGSLFVTFEEGTWAAWLYDLLKPHVSEVLVCNPRKIPRHKQGNKSDKIDARKLAEGLRLHDLKPVYHGQTGIRMLRELARSYLTLVKDLSRVMNRLKALYRSWAIPCAGRDVYYRRHRSEWLNKIPEAGTRRRAEQLYQQLDMLQPLRQQARRELLTESRKPAITAKLRKIPSLGPIRSALAVALIQTPHRFRSRRQLWTYSGLGLETRDRGEYHFVKGQPQRRKKQATIRGLNKDYNHDLKGLFKGAATRASVKPGPFQEFYQRSLAKGIMPTRARLTLARKIAAIYADTVEERRRLRHRETKIASRLSVSGESPHLQSFLFWWWSSVLETLGFESEYPNRL

SEQ ID NO: 433467 - protein, 362 aa, unidentified
MAKSTTVIAFDQHAATTVAAVLLPGQRTPALQTLASDSPTILRFVERLRRQGPIACCYEAGPCGFELQRTLSAHDIACEVIAPSLIPRRAGDRIKTDRRDASQLAVLYRAGALTAIHIPTDQEEAARDLLRCREDIRTDLLRARHRLSKFLLRHGRRFTATKKAWSKRHQAWLRSQTWPLAALDQTHRAYLRAVDEALARLHSVEQDLRALLDLEPLRPRVQRLRCFRGIDDLTALTIAAELGDPRRFATAPSTMAFVGLVPSEHSSGPKRAQGSITKTGNAHLRRVLVEAAWHYRHHPFVGDALRARQRGAPDTVIAQAWTAQHRLHRRYHRLAARGKPKPHVVTAVARELTGFVWAALTQ

SEQ ID NO: 433468 - protein, 339 aa, unidentified
MNEISTVGLDIAKTVLQVHAVDAQGAVVVRRALRRAQVLAWFARLPRCLVGMEACATAHHWARELGKLGHEVRLIPPAYAKAYVRRNKNDPADAAAICEAVGRPSMRFVAVKTEAQQAAAGIHRVRDLLMRQHTMLRNQLRGLMAEFGIVAAKGTKGLNELLATLADAEDRRIPSPLREGLLLIAETLRGIDRRLERIDRQIVAAGRDNAIYRHLITAPGYGPILSSAMAAMVIDPGAFRRSSDFAASLGLVPRQDGTGGRVRLGPISKRGNGYLRRLLVNGATALINSQRARQDPWLARLLATKKRKVAAVALANKLARIGWALMRRQEDFRRLPAAA

SEQ ID NO: 433469 - protein, 368 aa, unidentified
MMGWMAPLRHLGAKVLVGRGPPANREPSMNEITTIGLDLAKHVFQVHGVDAAGATVLRKQLRRAQVLAFFSRLPRCLVGMEACATAHYWARELSALGHEVRLMPAQYVKAYIKRNKNDAADAEAICEAVVRPTMRFVPGKTAEQQAAVLLHRGRERLVRQRTMLVNAFRAHLAEFGVIAPQGLRNVGKLIAIIRDEEDARLPSLARQVLQVLATQIEQIEAAVTVLEKQLMAWHKSNPVSQRLATIPGIGPIIATAVAAMVAEPSGFRSGREFAAWLGLVPRQNSTGGKNRLGGISKRGNQYLRRLLINGASANLLRSKATNADPWVIGLRRRRPSLVVAVALANKTARIAWAVMHRQENYQRMAIAA

SEQ ID NO: 433470 - protein, 336 aa, unidentified
MHGKNMKKFYIGADVSKKTIDCVFYDANMEKMKSSYIKISNDKDGRDALIKWIKEHKIVKKDAIVCMEYTGKYSYDFAQLLDKKDMDFVLIPALKIKGFFTGARGKSDKVDAIRIATYAYRFQEEIVPANLKDDNLMHLRDLMNDRKLAVKHAAAYKSIMKEYTDKRSSSRYKRAAKMVAEYKKQISAIEKEIKKMINKDEKMKKNYELLTSIPGISLVNAVNLIVFTGNFEFFEDSRKFASYCGVAPFEYSSGTSVNRGTHVSRMANKMLKSDLSQAAKAAINFDPWLKGYYERKRKEGKSSGCVLNAVKFKLICRVFAVVKRGTPYVNTMKYCA

SEQ ID NO: 433471 - protein, 355 aa, unidentified
MTMTARISKNYDTFVGIDVDMKKFAFSVIDKEIMNRTRSMPSSPKMLYNYIHKRFPNRKVLFAYEAGPTGYHLYDYLASKECDCLVVSPNTIPKAGNENVKNNNIDSRKITENLSAGQLKSIRVPMGEYRELRNLVKMRENYADARKVAKQRIKSLLLHANLYPSLADNETNWSNRFIHNLRNIVCSPAVRARLDMLLMDLDYARTQLLRSHRQLREFVLMNPGIQRNFEYAISVPGIGFVTAVTFFAKSGDPVNLVNPREIAGFVGLAPTEHSTGDTENRGPISHLGDHGLRSLFIEAAWVAIRHDIVLRQFYHRIVRRNHPRGAAQKAIVAVARKLTERLYRVLKDQRKYVAH

SEQ ID NO: 433472 - protein, 391 aa, unidentified
MTKRKTETVNDLSRCLDPLDMDATLIAVIEMSQSSWLVAGIVPGVERQPLKKIAIDEHALLRLLSRWREEAEKKGHKITRVTVAFEAGHDGFWLARRLAALGIEVHVIHASSVAVTREHRRAKTDRLDTELLKRGFLGWLRGERGHCKMVVVPTLAEEDAKRPSRERETLVGEASRIITRLKAAFVRLGIRSFNPKLKAATERLGTLRTPEGEPIPANTLAALKRDLERHQIIKRQIREIEQTRLDHLAQAPAKGPHAMVLLLARVVGIGVETADMLVQEVLSRNMRDRRAVARYAGLTGSPDESGAKRREKGLARSGNARVRRGMIQLAWRFLMFQKDSALAEWYRQRTANAPSMRKTFVVALARKLLIALWRLARDGVVPEGVRLRPAA

SEQ ID NO: 433473 - protein, 344 aa, unidentified
MKITRVGLDLAKRVFQVHGVDELGRAKVRKRLSRAEVLEFFAQLPPCIVGIEACGGAHYWARELAKHGHTVKLMAAQFVNPYRKSGKNDENDAEAICEAVGRPNMRFVTVKSDEQQAVLMMHRTRNLTVSNRTAHANQIRGLLGEFGLVVPVGLKRLRKQLPEILADAENGLPVLARQILANLLQELHHFDEQIDRYDRELVQLASHSEPAQRLMAIDGIGPITATALVASVGNAQTFKNGRQFAAWLGLTPRQHSSGGMNRLGRITKRGDRYLRMLLVHGARSRLRCVDRKTDPKSVWAKRLKERRHVNVAAVALAAKHARIMWALLAKGASYQSPMASATGA

SEQ ID NO: 433474 - protein, 455 aa, unidentified
MYKVKLKKTKAKSLIEMPIVNPYSSGIDISDKEHMVAVPEGVATDRVRRFGAMTCDLEEIVKWLQECEIQTVAIESTGVYWKPLFSALTRHGFEVYLVNANYVKNVTGRKTDETDAMWIQKLHSCGLLRSSYLPDDEQEVLRTLVRYRRTLVQDSSRFVNRMQKSLELMNIKFHTVIADIIGKSGRRVIEAILQGEREGKNFLPFIDKRVKADSQTIVKSLEGNWRTEHLFTLRESYEMYQIYKDRIAVCDQEIEKQLQQYEAKRNDGVIETDQKPKKKPIQKKKDKNHPHFNVRGYLERIHGVDVLNIYGLSETCGLELLAETGTDLSKWENDNHFVSWLNLCPNNKISGGKLISSTLLKKKSNPASQAFRQAANAVQKSNHWLADYFRRMKAKGGHKYAIVATANKIARIYYKMVRYKQEFNPVDLEHYQQKYKQAKIAYLERKLSQLKKEVA

SEQ ID NO: 433475 - protein, 424 aa, unidentified
MKVTYQTCCGVDVHKSFLVATIVKTTGGIEPSYQKKCVSTFINSILEFKRWLLDNDCHDVCMESTGKYWVPVFNLLEDKINVVIANPKWVKAVKGNKDDTKNSKWIEDLFRLGLVKGSYIPCKKVRILREYTRYRYKLVSCRSSEKNRYQNALTVCNVALDSIVSDIFGKSSTSIIDYLLEQSGTSINHEEIASKLLRSLKSKEDAVIESVEGYQMTDTQKYRMRLVRAHMDYITAEINDVDKMIENMISSNPDFENAVQFLCTIPGVKRDSAITIISETGTDMSQFSSSKRLCCWAGLTPDSNESAGKKKSVRITRAGVYLKPALVQCAHAAVKSDKSPYYKKKYEALVKRRGKKRAIIAIARMILTAIYQMLSTGEEWNPSNLYKIDMPVALVEKQKAKAIKQAKKLLQREGLLPPDEPLAS

SEQ ID NO: 433476 - protein, 412 aa, unidentified
MQTLVERGCGLDVHQATVVACLLIVCKDGKVQKQLRTFGTTTRELLRLREWLLSEGCTHLAMESTGVYWKPVYAILEGALQIVVANAQHVKKVPGRKTDVKDAEWIAELLCHGLLRSSFVPPQPIRELRDFTRYRRKLVESRSSERNRLLKVLETANIKLASVATDVFGTSGRLMLRALIEGKSTPQEMADLAKGLLRKKIPELELALEGKLEEHHRFLLKLQLDRLERVESDLAALEQRIQEKLQPYATQLALLQEIPGVERTLAAVIIAELGVDMSVFQSVSQLASWAGVCPGNNESAGKRKSSRIPKGNVYLKTALVEAANSAARAKGTYLRDKFYRLKARRGYKRAAVAIAHKILVSIYHMLSQNVSYNDLGDCYLDNLNKHHLTRNLVHRLERLGYSVTLTLEQEAG

SEQ ID NO: 433477 - protein, 371 aa, unidentified
MKKSSTVYVGMDVHKESIDITLAEVEGEVRRFGQIGGDRVAVLKMVRKLVSSAKELVFVYEAGPCGFWIQREISALGHRCWVVSPSLVPKRAGDHLKTDRRDSERLAKLARAGELTPVHVPDIADEAVRDLVRSREDALIAQRRARQQLKALLLRNEIRYVGKTSWTEAHRRWLADLKMPRPAQQIAFEEYIGAIKGATERMERITKAIESEAQGWRFLPVVQAMQAMRGIQFLHAVTLVSELGDLKRFASARQLMAYLGLVPRESSSGEQRWQGSITKAGNSHVRRTLIEAAWAYRHPARVTRIIAARQTDLPEQACKIAWDAQVRLCARYRRLMARHLNHNKIIVALARELAGFVWAMGQAISPKGGGA

SEQ ID NO: 433478 - protein, 328 aa, unidentified
MYYSGIDQHKLFSVITTVNDDGIIVKQAELKNNDFDILNYFASLGNTHSATVETTGGWYWMNDLLSSHGINLKLAHAKYVKAIAYAKVKTDKVDSHTLAQLLRMDYIPSAHKISNHNRTLRDALRARIKIVQRHTSVTNSMQLLLAKYNLSSPYQLEEIPRYQYEQLSEVESLLKEQMLDLEKQLYPFLIPNEDIQRLLWIPGIGKMNAFTILLEVDDINRFEDVKNFFSYCRLVPSARNSGGKSKQRSSKDGNKYLKAVFSDAAVHACHYYPPIRKYHNSKLRKKNKSVAKTIIAKEIARIVYYVLKNKSDFNNTFKGHQLELKSFQ

SEQ ID NO: 433479 - protein, 370 aa, unidentified
MKSIIYVGMDVHKASFTISCFSVTTQETFATVKISPDAKAIKKYLDGVSLSRSEECEFVCGYEAGCLGYTLYHQLTAMNIRCVIMAPTTILRNSKRVKTDRIDAENLARCLAYGGYKSVYIPTAQDEAVRDYLRMRDDHKLMLKKIKQQINAFCLKHNKIYPGNKSKWTQAHVKWLNALEFDGYLQDAFNEYMITYRELADKVERLESQIEQLAELEEYRDKVKKLICIKGIKTHTALSLIVETGDFSRFQSAERYASYIGLVPGEHSSSEDQNRLGITKAGNRHMRMLLIEAAQCYSRGVPAKKSKNLKSRQKGASPEVIAYADKASIRLRRKYIRMELVNKKKANVAKTAVARELACFIWGMMTDNIA

SEQ ID NO: 433480 - protein, 355 aa, unidentified
MNSEKYIGLDVHQATISAAVMDSQGKVIIECILETKASTILEFLSGLRGSLWVTFEEGTWAAWLYDLLKPHVAQLVVCNPRTNALLKHGNKSDKIDARKLADRLRLNDLKPVYHGETGVRMLRELARSYLTIVKDLSRVMNRLKALYRSWAIPCAGRDVYYTRHRSQWLGKIPEAGTRRRAEQLYQQLDLLQHLRQQARRELLAESRKHAITAKLRQIPSLGPIRAALAVALIQTPHRFRTKRQLWSYSGLGLETRDSGEYRFIQGQPRRRKQQVTIRGLNKDHNHDLKGLFKSAATRASVKPGPFQDFYQRSLAKGIKPTMARLTLARKIAAITLTLWKKGANFDAEKLKSQAA

SEQ ID NO: 433481 - protein, 487 aa, unidentified
MEPQVFVGIDVGKSQHHATAVNQQGRVVHDKPLPQSEPKIQELLTDLVAKHGELLVVVEQPKTIGALVVAVAQQMDTQVAYLPGLTMRRVADLHPGQAKTDARDAYIIAETARTMPHTLRGITVAEEQIAELSMLCGFDDDLAAQLTQVRNRLRGLLTQIHPALERVLGPRLAHPAVVDLLGRYPTPAGLKRAGRGHVRARLKKLAPRMAARLTDEIFRALAEQTTIVTGTHAAEHIIGRLAAQLQQLTQQRSDVEAEILLVVDAHPLTEVLTSMPGVGVRTAARILTEVVGKDFQSAAHLASYAGIAPVTRQSGTSIRGESPSRRGNKVLKRVLFLSAFASIKGDPASRAYYEKNAPKANATTKPSSPSPDADPTSCSPCSETARSTNLAQHNLFQQLDENDRSTPRCDSAALYAFGQLDPTAPTWQIPHRRPPNEGHHAERKAEFDASELDPRHTGDALRPAPISHRLRAHGSRILLVSTTVTDS

SEQ ID NO: 433482 - protein, 434 aa, unidentified
MEEVTDEPLYRDRVCGIDIGKAQMAATIRVPSDSNPARRASETRSFGTTKREVLALADWLRCWQVPAVVMEATSDYWKGPFCRLEAEGFECVLADAKQVKNLPGRPKRDPSDSRWLAACFERGAVRPCFVATPEFRIIRLHTRYRRDLTEERTREKQRTEKLLESAGIKLSSVISRLHLVTGRDIMDHLIAGERNPKVLAQLARTAARRKIAELEEALEGAEFFTAEHAALLAMMLARIDRLTAGIDELTTVIERLLAPYEEQLQQAESMPGWQRRAAQDALAETGVDMTRFPTGAHLASWAGRTPVDHQSGTRKGRAKAKKGNRYLAGITGETAVAAGRTQTRDGVRHRRLARRRGTAKACVATGNTQLKASQLLAGPGTRYQDLGPDYYERQASIRRQIAHHVGKLGALGFEVTLCRIPEPDPDPAGQTQAA

SEQ ID NO: 433483 - protein, 343 aa, unidentified
MYYIGLDVHKKTISYCVKDAAGRVFQEGKIGSTRRELDAWIRMMPQPRMIAMEATIFTGWIYDHLLPYAEKVKVAHPLMLRAIAAAKRKNDRIDAAKIADCLRCDFLPECHMASTAIRDRRRTLRYRSLVIKQMVQMKNRVSGLLMETGVSYNKQRLHKLGYFEELMTTNEDVHDSIRPLLKLSREMISRSQKLDYALISSLERDPLLKERLRRLRTVPGVGPITALTWALEIGDFTRFTSNKQAISYCGLCGDENSSADKVLRMPISKQRNKHIQRVLIEAAKLATRESPELAMIRARELERGNPNRATLAVARKMVIYMLAVERRQQDWVPAEQFSRTAAA

SEQ ID NO: 433484 - protein, 376 aa, unidentified
MKKASTKTVRFVGLDVHADTIAVAVAEPGGEVRSVGTIANREESIKRLVKKLNGDGIWKACYEAGPTGYALYWQLEKLGIECEVIAPSLVPTKAGDRVKTDRRDAERLARSFRAGDLTAVWVPDVKHEALRDLVRAREAAKCDELRARHRLGKFLLRHGRRPPEKLRPWTQRYLEWVKREVIFEEQAQQWTLEDYVNEVEHCALRIARLEAEIDAAVESAPPAMKEVIEALQALRGIAKVSAVTIVAEVGQLSRFATPRQLMGYSGAVSSEYSSGTKTRRGGITKTGNAHLRRIVGEAAWCQRHRPIVSRALKLRQEDLDPEVQEISTKALHRLHKRYVALLSKGKSSQQVATAVGREMLGFIWAIGVAVESKHAA

SEQ ID NO: 433485 - protein, 487 aa, unidentified
MKKRAYRSTTVKSVKVAEVLKALPDGPVWIGLDIAKAEVLAVLRDATGQVLRPWKTKQPSEIRDLTALLSQVAETHEVNVAMESTGTYGDALRQALEDAKLPVYLVSAKFTHDFSEIMDGVPSQHDGKDATIVAELAAMGKASPWPCPTLSADEDALHEEVQWLDAQQAILQVWLGRLEALLARHWPEATELLALDSVTLLRTLTEHGGPQALAQDPQARQKLAKWGGRLLLPEKIAAVLESARTTVGVRMTAATQKSMQRCAEAAHQARTAVRRTKASLTRRAKKHPILSRMAKAVGHATACVLWAAVGNPQDYHCGEAYRKAMGLNLKERSSGQYVGQLKITKRGSSMARRWLFFAALRILQQEPVWTWYLKKKHKDNERGGKAVVAIMRKLALALYAVANGDVPFEVARLLPGRPAPKPRREVKSILGALPPAPRDLSPSCRSRTNGAAQTRGLAPPKRSVPAPELALGSVPTGALSSAQARQS

SEQ ID NO: 433486 - protein, 315 aa, unidentified
MHQHTEQSRAVAGIDVSKNELHVAMGNEVVTLPRTPQGLRKLTKHVAHAKLVVMEASGGWEQSVFKALHAQGIAVAVINPRQAREFAKALGRLAKTDRVDAKMLAAFAERMDPRQTALKSKELEHLCDLLTRRQQLLDMRTAEKSRLGHGRWDESIGAHLGWLEEQPQQLSGDLEQCTQQTHAIRQRVGRMQTIPCVGPILSMELTGFAPELGTLSGKQISALVGVAPMSCDSGTRQGKRRIWGGRARVRRVLYMAAVVGTRFNPVLKIFYQRLLAAGKPKKLAIVACMRRLLVWINAMERDQCDWNPALFSAPV

SEQ ID NO: 433487 - protein, 331 aa, unidentified
MPLYAGIDLHSTNNCLGISDENDRRIFKQKLDNNLKSILLLLEPYKDKLEGIVVESTFNWYWLVDGLMENGYEVHLANPSAIKQYEGLKHVDDTRDSFWLAHMLRLNILPEGYIYPKEERHLRDLLRKRMRLVRERTSHILSLESMVNRNLGLQISGNSIKCLEERDAEKLFKNPHLIMSAKSSIAIMRLLTEHIKAIEKEVKSQVKLRKPFQSLLTVPGIGDILGLTIMLEVGDIGRFPKVGHYSSYCRCVTTARLSNGKSKGKGNSKNGNKYLAWAYVEAANLTMRYCPQARRFYQRKMEKEGGVVAIKALANKLARATYYLMLRSGSI

SEQ ID NO: 433488 - protein, 495 aa, unidentified
MLSLIWAVKADKFMGRLIPRLKPANIPRIRDCVIERVWEIIPYKGMIICPYQAETYMKKRRERVCGADVHKDLIVATITGDEVPSIRENFGTTKSELDRFRNWLADNKCEQVAFEATGVYWIPIYDVLSRTIDTIVANPLQIKSIPNDKSDSKDSKRIATLCLNNQIKRSRVFPDEDRELRNLTRARSGYVKTRTQFKNRIHKYLSSNGIKLSSSMDDIFCKSGTHIIRGLAEDKPVEEILKGIPSGKIRKKQDEIRSALANELSETNRMLISDSLEIMDNVESKIEKTSLNILKKIQNKSKDLAIVMSIPGIAFISGSVILSEIGNYRDFQTPEQLAKWCGLNPGENESAGKKRKCGITKRGSKYIRVVLVEAAQTIANMKNTGLSRFYKRLSKKKEHNVAIVAVARKLICLIYHLLINQEFYQEVDCRKRKKGRNESCHEPSLKDEHLTDKVAAIVDAFYGMSDSSRKKALLRALEDISVNKPDQKRSSDGGG

SEQ ID NO: 433489 - protein, 422 aa, unidentified
MEDERNWFVGVDWASETHHVRVSDARGRKLGARAFAHSGEGLAAMAAWILEVTGAPPEAVFVAIEVPYGPVVESLMERGFRVHAINPKQLDRFRDRFSPAGAKDDTRDAEVLGDALRTDPRCFRALQPLDPVVVELREASRMAEDLKQERNRLGNRVRELLWRFYPQMLGLTDDVAAPWFLDLWRLIPIPEKATRVREVTVDRLLKRHRIRRLSAADVLEALRRPAILLAPGTVSAAVSHREAIAKRLDLVNRQMLAVDERLDRLTQSLAGAQERAGGQRPEPCDVTILRSLPGVGRIVLATLLAEAVEALQRRDDRALRCLAGVAPVTKRSGKSRIVLMRQAAHVRLRNAVYHWARVAVQHDPRSQAKYAALRARGHGHGRALRSVADRLIGVACAMLKAKTIFDPNLASQRALNLTKPTC

SEQ ID NO: 433490 - protein, 395 aa, unidentified
MFIVGIDVAKRSHEVCMITSDGQTVQRPFSIRNNCTGYNLMLEKIRKHTNIKSQIVFAMESTAHYWLALFTRLRKDGYHVILLNPIQTSAMRDMFIRKIKTDAKDSFIIAELIRFGRYAESNVAQDRLLALKELCRNRFYLVDMAGDLKRKLIALIDRVFPEYEAQFDTIFCKSSVAVLKKYPTPQKLSNAHLDKLTELLWNSSNGHFGEWKARELKELARNSFGVEDCDGAYSTLILLMLDQIQSLSGKADALEKEISRLFQSFDTTVTTIPGVGPIIGAVILSEVGDISRFSSADKLAAYIGVDPSVNQSGEFQAAHAHMSKRGSPYLCRCIWMASQVAVQCDPMFRAYYEKKAAEGLKYMTIIGHVTRKMTAVIFAILRDHKVYEPVLPTAA

SEQ ID NO: 433491 - protein, 323 aa, unidentified
MLIRAKGAGMKKEVEIFVGIDVSKGWLDVAVHEQKETDRCSNDEIGIGSLGKKLRKLKPQLIVVEPSGGFEMLVVAELSQAGLAVAVVNAKRVRDFAKSTGQLAKTDKLDARVLAHFAAVIRPAVRSLRTEEEEQLTALLTRRRQVLDMLTVEKNRLVTVRAKMRPDLETHIHWLSTNLKELDQEIEEFVKGSPIWKEKDTLLQSVPGVGPVTSATMLGMLPELGLLNRQEIAALVGVAPVNKDSGRKKGKRRIYGGRGDVRSVLYMAALSAKKHNPFIRTFYEKLIRHGKEKKVALTACMRKLLVILNAMVRSNQPWRSQAA

SEQ ID NO: 433492 - protein, 359 aa, unidentified
MTIVAHAHPFVVGVDTHARTHTLAILVASTGELVATEQFPATNAGMDRAIAWAARRTGGDLAALWVIEGVATYGAQLAAAVSRAGYELVEAARMDTRAHRGTGKSDPLDARRIAAAVLSLEPGQLRRPRRDDGTRAALRILVTARDHMTTERTATINALTALLRVVGLGLDARKPLTAGQVNEIGRWRSRTEDLATATARAEAVRLARRVADLDKELSANHAQMTELIRDSKAAVLLEKTGIGPVTAAVVLAAWSHVGRVRSEAAFAALAGVNPIPASSGNTTRHRLNRGGDRRLNRALHMAVITRMTHDPATRAYVERRRAEGRTTKEIRRSLKRYLARQLYRTLNALHSPEVEPQNA

SEQ ID NO: 433493 - protein, 340 aa, unidentified
MNIKRIGLDLAKNIFQIHAVDHHEHVVLRKTLRRDRMTAFFSQLSPCLIGIEACGAAHYWARELTRMGHTVHIIPPQRVKPYLKGQKNDANDAEAICEAISRPGMRFVAMKTERQQTLQAEHRVRARLIRARTALSNEIRGLLGEFGLVLPVGIRQLRKALPEILSQQELWDDRFIRLLSELAEELQMLDERVARHDRRLEQSARDDVRIKRLLAIEGMGPVVASALVAAVGDGRQFKSGREMAAYLGLVPRQHSSGGKARLGSVSKRGDSYLRTLIIHGARAVLNACPNKTDRRSQWLQALSERRNRNIATVALANKNARIAWAILSREEDYHGLQAAG

SEQ ID NO: 433494 - protein, 345 aa, unidentified
MNVLIGVDPHKATNAAAILNDHGELLECANFAQDRAGLRALERWAKRFPERRWAVEGANGLGRPLAQKLVAAGETVVDVPPKLSAKVRVLSTGNARKNDALDATFTALAALRNERLARVHPEDRTEVLRLLSERREDLVAERTRLLNRLHGLLRDLVPGGVPGTLSADRAARILRRLRPRRKWRSAAGSVRRQLASELLRDVRALDRRISDLDERIRKEVEESGTSLMEIFGVGPILAAKIIGMVGNVTRFPSKAHFASYAGVAPVEVSSGEVVRHRLSLAGNRRLNWALHMIAINQARYKGQGGSYYRKKVAEGKTHREAMRCLKRRVSDAVFKKLMLDLEEAA

SEQ ID NO: 433495 - protein, 427 aa, unidentified
MIARLWRGWAASTEAADLYEAFLRTEFLPSAHAIEGYRGALCLRFMPEWLRCGAGSAARPRDAIGRPFGHRTNSTRSVAPIAACYNPNSCLGSQPRTSKAGSFSMAQPIWVGIDVSGKWLDVGTYPTRETMRVPYTDAGIADLLGWLAARTITGVAMEATGGIERTIAYALADAGYQPRIVNPKRVRDFSKAISPIKNDRIDACRIAHFAATVAVEPIERDKVRERLDEMVTTRQFLMGQLIAARNHARLLRVPTMRAHMASQIKAARTRMAAVERDIEVIIQGDEAINQERDLLCTMPSIGAVVGAAVVAWLPELGRLSAGKVAALVGVAPYDDDSGDRSGKRHISGGRIGLRNLLYMAALSAIQHNPVMKAFYERLLAKGKLKKVALVAVMHKMLTRLNAMKRTGRAWNTDHVCVRAQQPTPAYA

SEQ ID NO: 433496 - protein, 413 aa, unidentified
MDVLHPRCCGLDVHKNSISACILVQVAGQVQKHQRRFGAMTQDLQELANWLRQFEVTQVAMESSGVYWKPVWNILEGQFTIVLANAQHIKNVPGRKTDQKDAEWIAQLLQHGLLRPSYVPCEVIRDLRDLTRMRASLSQEASRISSRVQKVLEDANVKLASVATNTLGKSGRAMLEEIIAGQNDPEYLASLALGHLRAKTPQLRRALEGKIRPHHRFLLRRLLDQLRFVEHEIVLLDEHLEDIGRERPELSQAVDRWDTIPGIDQVAGWSLLAEVGDTMAQFPTAEQLASWASLCPGNHESAGKRLGGTTRKGSPWLRRMACQCAWAAARTKNTYLSAQFRRLAARRGIKRAIIAVAHSLVIIGYHLQKSQRNYEDLGGDYFDRIDSDGLKRYFIRRLEKLGHKVTLVPIKAA

SEQ ID NO: 433497 - protein, 427 aa, unidentified
MKYTQNEKIMQISEEILVVGVDIASEIHYARAFSNRGIEVGRLIRFTNSEEGFNAFETWAEELKAKYNKKQVIVGMEPTGHYWFNFAQHLKDHGIKIVLVNPFHVKRSKELDDNNPTKNDRKDPKTIAMLMKDGRYMVPYIPEGIYSELRTAMETRWQIVKQLNTIRNRVKRWISIYFPEFNTVFGDWEGKAALIALKEFPTPVRVVEIGVEGIVSYWKKEKIRAVGKRRAVELIEAAKESIGIREGLTAANNELLTLLEDYEMKIKQYERIMALIEQLTLQIPGMEEILKIKGVGLTTAAGFIAEVGDISRFEHPKQIQKLAGLSLKENSSGKHKGKTAISKRGRRRLRALLFQGIMPIVATNEEFGELHRYYTTRDKNPLKKKQSLILLCCKLIRIFYALLTKKVAYDPQKMMSDIKRPILQEVA

SEQ ID NO: 433498 - protein, 405 aa, unidentified
MWYAGIDWADQHHDAVVIDEAGQRVATLRVAHTAEGLADLTTFLRGIGDVAEHPEHLACLVETSHGLLISALLEAGLPVYPLNPKTVDRHRKPAGAKTDAIDAYLLARTGRSDLADLRRLAPDSPLITELKVLTRDQDTLIQSQTRLLNQLTACLKAYYPVALDLFGKLHQPTTLAFLQAFPTLEQARAATVEQMAAVLTAAGHPHAAAKAQQIGQQVRRPQLQADPALTRAKARLMLALVAQLQPLIAQIAAYDQEITRLFRMHSDSRAFASLPRAATRLAPRLLAEWGDDRARYADAASVQALAGTAPVAFQSGKFATVHRRYACSKPLRNALHQFAWQSTQKEPWARAYYQRKRREGKSHSMAVRALANQWVRIIYAFWVKHEAYDATIFLAAQQAHAPRAA

SEQ ID NO: 433499 - protein, 351 aa, unidentified
MDIWSLKTVLEQGSLHRLPSNPNGCRGIEARILQDRVLEDVMKTKVFVGVDVSKDSLDVAISAEEQILTFSNDQKGVDALVKKLSRIDVELTVFESTGGYELLAASSLAEAGLPVVIVNPRQVRNFAKATGILAKTDAIDARVIAHFAQAVKPDVRPLKDRATSELTALVTRRRQIVEMIVAESNRLKLANKRNKKDIKDHIRWLEKRLDKIETDIGQTIQNSPIWHCKDNILRSVPGIGPITSATLICDLPELGVLSPKKIAMLAGLAPLNCDSGKFKGRRRIWGGRAAVRSGLYMATLAAIRCNPAIKGFYQRLIAAGKCHKVAATACMRKLLIIANAMLRDQTLWQQN

SEQ ID NO: 433500 - protein, 386 aa, unidentified
MQRLNDLSRSLTALEPDGTLIAVIEMSLSSWLVAGIVPGVERQPLKKLAVDESALLKLLHRWREEAEKAGRRIKRIAVAFEAGRDGFWLARWLKARGIEAYVIHASSVAVSREHRRAKTDRLDTELLKRSFLGWLRGERDHCKMVDIPTMKDEDAKRPNREHDSLIGERSRIVNRMKAALVRLGIRGFNPKLKRATTRLDGLRTPEGEPIPPNALAELRRDMERRRLVNNQIRQIEEERLERIEQAPCDGPHVMVRLLARVMGVGIETADMLVREVLSRNMRDRRAIARYAGLTGSPDESGRKRREKGLARSGNARVRRGMIQLAWRFLLHQKNSALTKWFRSRTENARGTRKPMIVALARKLLIALWRLVREGIVPDGVILRPAQ

SEQ ID NO: 433501 - protein, 411 aa, unidentified
MDEIKTSTNRCIGLDWADEHHDICVITDVGKQIGSLRIAHSPQGFENLKEFLLSITGPNKEEVACIIETNHGLLISWLLEAGYPVYPVNPKTIDRHRRPSGAKTDKIDAYLLAKYGRSEIADLRRLEPDSAIVAELKALTRDQDSLVRSQTRLVNQLTACLKAYYPVALNLFSKLQQHSTLAFLQAYPTPQDAMAASVGQIAQVLKEAGHPTATKVAPKILETLHQPQLTADAITLRTKARLMQVLVKQLLPLVEEIAHYDKVIEELFLTHADSKMFRSLPRAGKRLAPRLLAEIGDDPDRYAEAASLQALAGTSPVLFESGNYSKPHRRYACSKPLRNALQQFAWQSTQRAGWARDYYQRKRKEGKSHTVAVRALANVWVRILFAMRSSHSCYCAATFEEAQRKHAPRAA

SEQ ID NO: 433502 - protein, 454 aa, unidentified
MPKTTSGGRPEFKPVNVRAAAIDIGSKMHMAAVDPACTDTPVRAFGTFTQDLHDLADWFKACGVTSVAMESTGVYWIPAYEILEQRGFEVILVNARYAKNVPGRKTDVSDAAWLRQLHSYGLLRGSFRPDAEIATLRAYLRQRERLVEYAAAHIQHMQKALMEMNLQLHHVVSDITGVTGMRIIRAIVAGERDPDVLATHRDVRCHSSIETIRAALVGNDREEHVFALTQSLELYETYQAKMLECDRKLECLIAALSNGGTKPVGKLPKPRVKNKQVNTPSFDVRTALYGVLGVDLTEIHGLGPSLSLKLIGECGTDLSAWPTAKHFTSWLCLAPGNKVSGGKVLSSRTRRSSSRAAALLRLAATTVGRSDTALGAFYRRLALRAGKAKAVTATARKIAVLFYNTLRHGMTYRDPGADHYEEQYRSRVVANLRRRAKSLGFVLHAAPGGQLAVS

SEQ ID NO: 433503 - protein, 347 aa, unidentified
MNFYNNLHPYYCGIDLHARVLYVCIIDQDGQICVHKEISDSPDTLKSILEPYLGNIVVGVECMHCWYWVSDFCEAIGVDFILGHALYMKAIHGGKAKNDRIDSFKIATLMRGGNFPLAYVYPKEMRATRDLLRRRTKLVRHGAHLKAHVSNTTSQYNLPPNKVNLKNSGAREQLKSTFPDRVVQRSIDLDMAVLECYARELSQVECFLEQQAKQHNPVHWHLLKSISGIGRILGLTIIYEIGHIERFESVQKFASYARLVKCKAESAGKSYGTQGNKIGNAHLKWAFSEAAVLYLRGNKKAQKYLLKLQRRMSKAKALSVLAHKLGRCVYFMLKNGTVFDESQFLKG

SEQ ID NO: 433504 - protein, 360 aa, unidentified
MNNHKYVGLDTDQATIIARVEDAKGNFIMEAAIETSASSIRQFFKGLDGTIHVAFEEGTQAAWFYDVIRPLVAEVTVCDGRRNKLIQSGNKGDRIDAAKLTRLLRLGELHAVYHGERSTRGLKELVHGYESLVTDTTRAKNRLKAVFRSQAIRCRGDLVYSRQERKQWLGKLEAAALNARASILYEQYDCLTKLRDKAHKAMTTEARTHPAYKRIKKVSGLGEVRTAQLIAVVGSPHRFRTKRQFWPYCGLAVVTRTSSEYEIVDGQRRRKRNKQAQTRGLNQNYNRTLKAVFKGAAATAIERPPFKQYRQRLIDKGIRPELALLTVARKIAAITLTIWKKGEEFDPERVNQAVPGTGNK

SEQ ID NO: 433505 - protein, 416 aa, unidentified
MKIIRFNCCGMDVHKNSVVATIGITNKDTQITRYIQETFSTLNTDLLRLKQWLIDHQCFDVCMESTGKYWIPIFNILEDTVKVHLTHPKYVKAIRGKKIDKKDSKWICDLFKHDLIRFSFIPTKEIRALREIARYRYKLVAMRSSERNRYQNCMTVSDIGIGSVFSDPFGKSAQAVMKEVLESKVIEDDRILKCIHGACKNRDKILDAIKHCYVESDQRFKMNESMRHLEELQIHINNCEIEMIKRASRMFDSFMHITQIPGINTLSAILIISEIGIDMTQFESDKQLVSWAGLAPANNESANKKKSVRISKAGQYLKPLLVQCALGAIKDKESYFGIKYARIKKRRGHKKAIIAIARMILVSIYHMILTGESFNPSDYQSFKAPNSKKVIELTKESAIEFLRKSGFDVSKLTKLE

SEQ ID NO: 433506 - protein, 427 aa, unidentified
MQRLVPARAGKVVNMRRVVMEAIYQCVGGLDVHQKVIVACRRRLIGEGKVESEVEKFGTSTRELKRLGRWLSEWGVRQVAMESTGVLWQPVWNVLCEEFELVLVNAQHLKKVPGRKTDVTDAEWIAQCMQCGLLRGSFVPNEQIRQWRDLTRQRTKLLDQRTSIVNRIHKTLEGCNIKLSTVASDVMGVSGRAMLKALSEGEQDAEKLADLARGRLKSKYDELVESLEGSVSEHHQWLLKRMLKQVEFLDEETAAYDQRIEEMMRPFELALERLDTIDGVGRRTAEVILAEIGSEMSQFADDEAISCWAGMCPGNNESAGKRKSGRTSKGNRWLRRALVEAAYAAARKKDRYLAAQFARLARGGKKRAAVAVGHTILVAAYHILKEEVDYKDLGGDYFHKRNQEKTTRRLIKQLEQFGYQVELKRVA

SEQ ID NO: 433507 - protein, 400 aa, unidentified
MLSIGIDVSKGKSTVCGMKPGGEIVYAPFEVQHTREGMSELVSLLRSSGEEVRAVLESTGSYHCPVVSALLENGIFVSVINSLRMKRFCSQSIRKVKTDRIDAMQIALYGLAYWQELQPARLPEDTYRELQLLARQYYQMTSMLIKAKVDFNAICDQVLPGMQELMSDHAGRHKLSDFVLRYRHTTHILEMGETRFRKDYCKWAEKKGYRNCERMAALIFATAQNGIPVLPNAPSTQIVITEAIRVLHTVEASRDAILTQMQALAKTLPEYSLVREMPCIGDTLAPRLIAEIGDVRRFHSKRALIAYAGIDAPPYQSGKFCANNRHISKRGNRYLRKTGYEVMQSYVMHKPANDPIFTFIEKKRSEGKCGKLAMMAGLNKFLRIYYGKVTELYRSSSAIE

SEQ ID NO: 433508 - protein, 433 aa, unidentified
MKVLYERVAGIDVHKDMIKVAIRSPGDKPWTRKTEILEYRTFYGVLQAMARELRRRGVTHVVMEASGVYTEPVYYALCEQDFTGVAVINPAHAKALKGHKTDARDCARLAELFECGLLHGSYIPAPERKEVRDLTRYRMKTVQARTSEIQRLGKALESAGIKLGSVASSITGASATAMIEALIDGERRGGVLADLARGRMRDAGKLADLSMALTGRFTEHHALLCRLHQDRIAGFDAAVAGLDDRIAGKAARWQREADLLTSVPGFGDVVAQAWLAEIGPAPHRHFATCEKLACWVTLCPGNNISARKRKHGRTGDAGTYIKPMLVQAAWNAIRVRGRLQARYNRLVRRFGGDKNPGAKKKAIIAIAHTLLKIAYQVLKSGTPYQDLGADFYTRRESPEQKQAWLERQLQKLHPGCTITITVSPPEAALAPGA

SEQ ID NO: 433509 - protein, 404 aa, unidentified
MSESMGGKDDSAASVVIGMDPHKRTVTIEVMSASEQVVGHGRFTTDEAGFAAMLDYASRWAQRTWAIEGCEGIGRHVARRLLPLHETVVDVPAKLSARMRVYATGQGRKTDDTDAHSIALVGVRMAGLRTVKHDERLEILRLLVDRRRRIGADHTRMICQLHGLLLELIPGGAKRDLSAAQARKLLASVRPRDAVGKTRKRIALELVADLEKTYQRKKAANKELVELVRDTGTALLGLHGIGPSGAARLLVEVGDITRFPDRGHFASWSGTAPVDASSGDNTRQRLSRGGNRNINQVLHIMATVQLRTRTTQGRAYYDRKVAAGKTPNEAMRCLKRRLSDIVYRTMLGDVIAAAATKPGTGPGGHRGASLTSSAAGSQPHTGTSDQSLPGPVTTKATTTLPRAS

SEQ ID NO: 433510 - protein, 334 aa, unidentified
MENIALIGIDLGKNSFHIHCQDHRGKAVYRKKFTRPKLIEFLATCPATTIAMEACGGSHFMARKLAELGHFPKLISPQFVRPFVKSNKNDFVDAEAICEAASRPSMRFVQPRTESQQAMRALHRVRESLVQDKVKTTNQMHAFLLEFGISVPRGAAVISRLSTLLEDNSLPLYLSQLLLKLQQHYHYLVEQIKDLESQLKRKLDEDEIGQRLLSIPCVGTLTASTISTEIGDGKQYASSRDFAAATGLVPRQYSTGGRTTLLGISKRGNKKIRTLLVQCARVFIQKLEHQSGKLADWVRDLLCRKSNFVVTCALANKLARIAWALTARQQTYVA

SEQ ID NO: 433511 - protein, 385 aa, unidentified
MRTSNVRTPIAGHNGTIFVALELSQRSWLVTMHSPDKDRFSRHKLEGGDDVGLLGLIERIRGRATQALGAVPSVVSCYEAGYDGFWLHRRLFGAGITNFVFDPASIAVDQRARRVKTDRIDGELLLRTLMSHWRGEPRVVRIVHVPTPEQEDARRTTRERERLIKEQTAHTNRIKALLRLVGVGAGNPRRRDWMAWLKAQRERNGDPLRPHLVAELAREHARLKLVGEQLRELGQATDAAPVSDAAAEMARRSAMLQRLKSLGPVFTATLTNEVFYKDFHNRREVASYVGLAPSPWRSGGTNREQGISKAGNPRARQKAIELAWLWLKHQPDSALSRWFHERTAQGKGRIKRIAIVALARKLIAALWRFLTTGLVPEGAVLKAVA

SEQ ID NO: 433512 - protein, 365 aa, unidentified
MKKIANVGVDYHLNSLSIAVLAEGEKEFHQSIHLKNDDRLIAKYLKKLSKSFDLRICYEACSSGYAFQRKLNAWGYHCDVIAPSLIPRKPGDRRKNDFRDARNLAQHYANGMLSVVHPPTEEEESVRSLIRCRLAFKEDARRTKHRINSFLLTLGYSWKKSTWTKQHRWWLSKLEMPYEYLHKVLDEHLGQLEYLESRLKHLDQQIEEVARSEIYAPSVNKLRAFKGIGTLTAMLLIAEITDFRRFPTPRALMAFLGLIPSEDSSGDKTKGGSITKAGNIRCRTSIVEAVQHYVKKPYISAQMKANLAEVDGKSANVALHCMYRLHKRFWALSMKGKIRPVAITAIAREFVGFIWAMMRPELVEA

SEQ ID NO: 433513 - protein, 353 aa, unidentified
MTSLTDLVDVVIGVDTHVHTHSAAAVDARTGAVLGEITVEATADGYQRLAEFADEHLTLRAWAIEGTSGHGAGLARHLAHREELVVELDRPERATRRNGANSDPLDAIRAAREALARTRLGAPRSSGQRQALSVLLTARRSAVDAATEAQQQLFSLVIAAPETLRARFRNQKLPAMVNTAAALRTHRSWDIETTTTVTVLRELARRTQALRAEAAEHKKAILAIVRDWRPDLLAQPGVGPIVAATVLCAWSHPGRIYSEAAFAMLAGVAPIPANSGQTTTRYRLNRHGDRQLNRALHTITLSRQRYHQPTRDYTARRTAEGKTSREIKRCLKRYIARDLYRLLENNTEPLDRP

SEQ ID NO: 433514 - protein, 347 aa, unidentified
MQIQSIGIDLGKTTFHLVALGSRGQVVVRKKFSRQQLLLYTANLPSSLIGMEACVGSHFLGRALREQGHEVRLIPAQFVRPFVKSNKNDYRDAEAIAEAVERENMRFVAIKTEDQLDVQALHRVRERLVSRRTSVINQIRAFLLERGISFRKGPASLRRQMPEILENADEKLTTRMRRLLDFLWQEWKHLQLQIESLSEDLELIANSDEACARLQQIPGVGPLVATAVVSAIGNGAAFHKGREFAAWRGLIPGQWSTGGKTKLLGISKRGNPYLRKMFIHGARAVVLRAKREGSYLGQWMKGLEGRAARNVVIVATANKLARISWAVLSSGENYHPMPVLAVASQTK

SEQ ID NO: 433515 - protein, 408 aa, unidentified
MQVLHPRCCGLDVHKDSVVAAVLIDDRAAEVRSFATTTAQLLELGDWLGSCSVTHVAMESTGVYWKPIWNVLEEHFQLLLVNAQHIKKVPGRKTDVQDCQWIAQLLRHGLLKASFVPDRGQRQLRELTRQRAQLVADRARVASRIQKVMEDANLKLGSVVSDVLGKSGREMLRALIEQPQVTPDTVAQLARGAARRKIPQLQQALNHSLGEHHRFLLAQLLEQVEHLESQITRFEQRIGEVMNSDPFEQAVAKLDPIPGINRRSAQAILAEIGCDMSRFATAAHLASWAGLCPGNHQSAGKRRSGRCRDGNRWLRQMLTQCAWAAARTKASYFHQQYHRLKARRGHKRAVIAIAHAQLVTIWHLLSTPQPYTDLGPDHFHRLDGDRRRMGLIRKLEQLGYNVHLTPAA

SEQ ID NO: 433516 - protein, 335 aa, unidentified
MTKVMGAVCVGIDVSACTLVVALERDHQPGRQRREFPNTAAGHKVLIQWLSRSATAVQVCLEATGLYSLDLALALDRAEGIEVMVANPRAIADFAKALLQRSKTDQLDAEVMLEFVRRMPFVPWQPPKPHRLDLRALMRRITALKLASQQEKNRLHSVSQSAEITPWVRKDIQSHLVQLERHVEKLEQQAVTIVEADPELAQQFRHLVSVRGIARVSALHILAELVVLAPDMTARQWVAHAGLDPRHHDSGTSIHKPARISRAGNRYLRAALFMPALVATQHDPNIRAFYQKLVDRGKTKMQAIVAVMRKLLHALHGMLHTDSDFVGEKFYVIPS

SEQ ID NO: 433517 - protein, 348 aa, unidentified
MKNAIRQIVGIDVAQDELVVCLSRMDEELHQECYARKVFTNNVKGFGFLTQWASKHTDAAVELRYVMEATGVYHENLAYYLEEKGCLLSIVLPNKISNFFRTLDVKTVTDKTAAETIAFFGLTRKLTDWKKPRPIFQQLRQLTRERGQIIDERTVLKNQIHAQKAGAKCSESSIARSKKRIDLLNKQEKEVREEMDQALKGDGEVKKLVKIICTIPGVGLLTAITVLAETNGFDLIRSKKQLTSYAGLDVREKQSGTSVKGKPRISKRGNKYLRKSMHLPALAAIRHDERYKAIFARLVARHGIKMKAVVAVQRKLLEMIYTVFKKNEEYDKNYFLHQDEKNEAAIKN

SEQ ID NO: 433518 - protein, 426 aa, unidentified
MRVLYDRVAAIDVHKDMVKVAIRVPGAKRGTRKTDVLEFRTFYGVLQAMARELRGRGVTHVVMEASGVYTDPVYYALRELDFEEVMVINPAHAKALKGHKTDAKDAIRLLDLYECGLLSGSYIPDPDLREVRDLARYRMKTVQARTSEIQRLQKTLETAGIKLSSVVSDVTGTSATAMIEALISGERRGTVMAGLAQTRMRAAGKMADLSMALTGRFTDHHALMCRLHRDRITIFDDAVKDLDAKIAPLVARYAREADLLKSLPGFGDVIVAGWLGAIGPAPHQHFATASRLASWATLCPGNYMSAKKSKGGRTGDGGAYIKPLLIQAAWAAVRVPGRLQARFGRLVRKFGGPRNKGAQKRAITAIAHTLLKIAYGVLKTGTPYADLGADFYTRRESPDARQDYLMRQLQKLNPGCVITITPTEAA

SEQ ID NO: 433519 - protein, 340 aa, unidentified
MYFTGIDVHSNQSTLQHMTEDGYLGVDLELKTREECFNEFFSQFDQQSIVVLEAGRHHWWLNNILEQHPNISEVKVVDARRSRKIAEELSVQRGYGRAKNDRIDAEMLAELARQDLAPEIHVPTLEQLAPRSIVRHRSRLLVQHTRAINTLHGLLGMHGVILNTKDFFEQYAAKADAVKTLPPYCLIIIDDLLSQIQLYDTQIGTIEAELDTLLPPDHPQIKLLMTAPGIGIVLARIIYTEIRDIRFFKEPKYLISYSGLAPFDQESNGKKGTIKLNRYSNHWLKYAFVEAAHHARTHEKYKHKYEADVKKHGKIRAKLNLARRLTKAVYWMLTRQQPFV

SEQ ID NO: 433520 - protein, 325 aa, unidentified
MMKLEKQEFERYIGVDVSKATLDVDDSARKIDLKIPNLAEAIVHNVVGQIDSPERTLVICEGTGGYERQLVAAMHAAGIPVVVANPRQLRSFAIGHGILEKSDPIDAAVIRRFGQDVRNLTLATPKSEDQEKHGALARRRKSLLDMINQEENRLKQTTDPEVRQWIEQSVKSLKEQLKTVDERIRKMVAREAETNPTVGVLQSIPGVGPVTVSTLLCDLPELGRLSRGEIAKLVGVAPMIHQSGRKDGYRCIMGGRGYVRRVLYMATLVATRHNEVIGQFYRRLLAKGKPKMVALTASMRKLLTIMNHMARTGECWRGAASSEVK

SEQ ID NO: 433521 - protein, 321 aa, unidentified
METHANYIGVDISKASFDVSAGRRHYQFSNETTGFDGFLKLLDTDSHIVMEASGPYYLRLACFLHTKGIKVSVVNPLVIRRYSQMRMSRAKTDKKDALLIAEYGAMAKPEQWAPPQQHVVELQQTEAILSGLSKQHTVLSNQLESFTATGMMQKALRQTIQKELCHLKQLISRLSANMEKIVLEHYGQMLSGLKSIPGIGKKTAIMLILVSGGFERFGDCSKLSSYIGTCPRLFESGSSVKGRPRICKMGMSAIRASLYVCSWSAKRCNKACRELYERLLAKGKAKKVALIAVVNKLLKQAFAIAKTNSTYQENYSNIICF

SEQ ID NO: 433522 - protein, 365 aa, unidentified
MTTMTQPAADARRVFGGVDTHKDVHVAAALDEVGRLLGTGSFPTTAAGYRQLWRWLRSHGDVVAVGVEGTGAWGAGLARYLSAEGVDVREVMRPNRQHRRRYGKSDEADAVGAARAVLAGEAVGTPKSQTGTVEAIRLLRVARRSAMKARTQAGNQIHAIVDTAPEQLRRRFVGKPTAEIVAEVARFRRRHLPDSPLEAARLSLRTLARRWEYLNDELAELDAQLDELTASVAPTLRAINGVGAQVATALLAAAGDNPQRLRSSSSFAALCGVSPIDASSGRQQHHRLNRYGDRHANWALHVIIISRLRWHTPTKAYMARRLAQGRTKKMIIRCLKRHLVREVHRAITTDLGHQIEPAEPSRVAA

SEQ ID NO: 433523 - protein, 322 aa, unidentified
MVTFNLGIDVSKAKLDCALRLQNGKLRNKVVANSKDGFETLRAWLHKQGAEQIHVCMEATGTYWEAVAEFLAGVAGCTVSVINPAQIKAYGASVLVRTKTDKVDSQLIAEFCAERNPKPWQMPPAAEQALRALVLRLEALQAMHTQESNRLDVARPVVQAGITSHLEWLNKEIKAVIEQIKNHIDNDPGLHDKQVLLDSIPGLGERTIAILLAFYAQPERFGNARQAVAFAGLDPRQHESGSSVKGKPRMSKVGHSFLRKALYMPAMVTIFKTDWGKKFHAHLAASGKAPKLIIGAMMRKLIHVAFGVLKSGKKFDPALHGA

SEQ ID NO: 433524 - protein, 343 aa, unidentified
MQIRSVGIDLGKTTFHLVALGAGGKVLVRKKFTQKQLLAFTANMQASLIGLEACAGAHFLGRALRKQGHDVCLIPAQFVKPFVKSNKNDFVDAEAIAEAVERKNMRFVPIKTDDQLDLQAIHRVRDRLVSRPTAVINQIRAFLLERGMVFAQKPAKLKAAMADILENAEDDLTPMMRNLIDMLWGEWNTVEQQIEELTDKLEQISASDAGCCRIRKIPGIGPIVATAIVAAVGNGAAFRKGRDLAAWLGLVPRQYSTGGKAKLLGISKRGNVYLRKILIHGARAAVLRIKSDRALIGAWLDALDARAPKNVVVVAMANKLARIAWAVLSSGQDYQPTANVIPV

SEQ ID NO: 433525 - protein, 310 aa, unidentified
MDAIVIGIDVSKDKLDVHVLPAAQAFAVARNGAGIEELAARLAALAPAVVAIEATGGFETIVAAGLAGAGLPVVVVNPAQIRAYAKAIKQRAKTDPIDAAVIAKFARATRPEVRPLPDEATRQLADLVARRRQIVEMMAAEGQRGRRVDHKRVARSIARVKKTLEAELAELDQEIGDQVRGSPLWREKEDLLVSVPGVGPVVARTLLAELPELGRLERREIAALAGLAPFTRQSGRWRGRSFIGGGRATVRTVLFLAAMTAARHNPTLKAFRDRLVAAGKPKMVALIATARKLLTILNAIIRDNRPWQNA

SEQ ID NO: 433526 - protein, 390 aa, unidentified
MIYAGIDVAKDKHDCFICNSDGEILFNAFTIPNTMEGFDNLHQKILSVTDDLSKVKVGLEATGHYSYNLLGYLLDKGLATYIINPLHTNLYRKSLTLRKTKTDKVDAHTIAMMLMSDVNLKSYSNTLYHNEELKSLTRYRFDKVQERAKLKQSISRLVNILFPELEKLVPTLHMKSVYALLSEFPSAHHVAEAHLTRLTNLLYEASKGRYNRDTAVRFRDCARNSIGSVMPAKSLELKHTIKLISELDTEIKEIEETINSIMDKINSPILSIPGISYRMGAMIIAEIGDFDRFSSPDKILAYAGLSPSTYQSGQLTSSYSHMEKRGSRYLRYALFNATKFVCNWDSSFGEYLSKKRSEGKHYNVAISHAAKKLVRLIYHLEKTGQLYKTV

SEQ ID NO: 433527 - protein, 350 aa, unidentified
MQGTGRWIGLDLSKETYEMCYFDQKGKVGRSGGETTKGGRAKLYAKLKAEDIVAMEVNSLAFVMEKEMRTIGCAVGILDASQLSIIYASTKKTDKEDALKLARLVKIYEKEDLPIVDVPTEKEYYRRKLTKECKTLKDDRTQEINRLHALFLQCGITTMKRSNLQTDANRQKVLPQLFGYEVGQAKRVCERLTLLEAQIKELEQTITKECKADKDIERLKTIPGVGDKTALAFTAYVGDGKRFNNGDEVANYLGLVPRVDCSGSINRYGHITKKGNRIVRALLYQAAWSIVRSKHGGALKAKYFYMTEHGKGKKISITAIARKMAKLLYLVMKNKQMVYQELPFPDLQAG

SEQ ID NO: 433528 - protein, 423 aa, unidentified
MAGVMIGIDPHKGSHTAFVIDGREKPLGQLRVRASCEQAEALLGWAGRWRQRTWAIEGARGLGQLLAQQLLAAGERVLDVPPKLTARVRLLESGQINKTDENDARAVAIAALRARQLPQLTVEDQTIVMRVWARRYHDLGRLRTQAVCRLHTVLCELVPGGVRKQLRTSQAIAVVDSITAESPVAQAKLELAHDLVADLQRLDAQRREVKRRVSRAVAAAPTSITEVYGVGPIVAACVLGYVRDIRRFPSRDRFASYNGTAPIEVSSGDRKIYRLSRRGNRQLNHAIHIAAVSQISHRGSEGHAYYQRKRAKGMTGKCALRALKRKISDTLYERMLHDIRPRKDPGGHSGNDAASSVAGSHPDGPALRTSHSRATANSKTATTNQRPLTSPPAPDKRRTSRSGTGVKLQPRPRPRRGRGQERA

SEQ ID NO: 433529 - protein, 368 aa, unidentified
MQSKAISFKGQKVFIGIDVHKKTWSVTTLLEVGMPKTHSQKASAKELFDFLNRHYPEAEYHAVYEAGFSGFSTYYALKEYGIECTVVNAADVPTTQYESVMKSDPIDSDKMARALRAGMIKGIYIREKDNLDDRGLVRLRKSIQQDLTRYKNRVKHLLHANGVEIPELFDRSPNWSKAFINWLREEVVLLSSTRASLDMLIEQVETLRQNLLIVTKKVRNLRFKEEYAEKYDALTSIPGIGPICAITLLTEIYDVKRFRNERQFASYLGLVPTCHSSGEKASFGEMTFRGNKHLGPLLIEASWVAIHWDDALSVAFTNYRRKGLMPQESIIRVARKLSNIIFSMLKTGNNYAPAVNCHRKVNSFANES

SEQ ID NO: 433530 - protein, 413 aa, unidentified
MEWVACVGIDWGDKQHACTIQTRQGTKQAMTFGSSPEDVHRWVREMRERFADGTIVVGVEQGQWSLIYALMAYEFLALVPINPRASKSYRTSLRLSGASDDPADAALICDFVVKHLGELHVWRPDDVRTRKMRLLCEQRRSLVDQRTALTHILSATLKEYFPQVLQWFGETSRYLRAFLTHWPTLEQARQASVDDLTSVLKASRRRKASAVALELIEKIRVAVSLTHDTAIIEAHSLYGLSLVALIDPLDQQITNYDQVIAAGWANHPDRKTFGSLPGAGAVMAPRLAVAFGLDRSRYDEAREVQQYSGIAPVMEKSGKQVWIHARWGFPTFLHQTFHEFAETSIPYCQWARAFYHQKRERGAGHHQAIRALAFRWIRILFRLWKTGEEYDDNRYIEALKRKHSPIVRRLAAA

SEQ ID NO: 433531 - protein, 455 aa, unidentified
MPKRTTGDRPELNPVNVGAAAIDIGSKMHMAAVDPTCADRPVRAFGTFTQDLHDLADWFKTCGVTSVAMESTGVYWIPAYEILEQHGFEVILVNARYAKNVPGRKTDVSDAAWLRQLHSYGLLRGSFRPDAEIATLRAYLRQRERLVEYAAAHIQHMQKALMEMNLQLHHVVSDITGATGMRIIRAIVAGERNPDVLATYRDVRCHSSVETIRAALVGNDRDEHVFALTQSLELYDTYQAKMLDCDRKLESSIATLTDRGAKPVSKLSRPRVKTKQVNTPSFDVRAALYGVLGVDVTEIHGLGPSLALKLIGECGTDLRAWPTAKHFTSWLCLAPGNKISGGKVLSSRTRRSSSRAAALLRLAATTIGRSDTALGAFYRRLSSRAGKAKAVTATARKIAVLFYNTLRHGMTYRDPGADHYEEQYRSRVLANLKRRAKSLGFVLQEVPCGAEVTVS

SEQ ID NO: 433532 - protein, 455 aa, unidentified
MPRRRPSTRPVTMPVLLPHAGGIDVGATDLYVCVPLDCDPQPIRRFGTFTEDLHTLADWLTQCGVTSVAMESTGVYWIPLYQILESRGFAVCLVNARHVKNVPGRKTDVQDCQWLQYLHSVGLLRASFRPPETVCAVRSLLRHRETLVQLAATHTQHMQQALNQRTLQLHHVLSDVTGVTGLAILDAILAGERDPQVLAQHRDGRIKASRATIAKALVGDYRPEHLFTLCQALASYRHYQRLIAECDSEVQRLLGAVASQVDLARSPLPPAPAGRRKPHRKTSPFDLRAELYRVLGTDLTQVPGLQTPTVHTLFAELGADLSAFPSGAHFASWLGLCPDNRISGGKVLSVTTRPVKHRVAQALRLAAQSLGRSQSVLGDFFRRLRAKFGAPKAITATAHKLARIIYHLITTRQPYDESRLAAADAAYRRHSESRLRAQARALGYQLVPAPEQAVS

SEQ ID NO: 433533 - protein, 341 aa, unidentified
MNIITVGIDLAKNVFAVHGVNDNGKPVLVKPKVARADLLPLIAQLPPYLIGMEACSGAHHWARLFRQHGHTVKLMAPKFVAPYRMTGKRGKNDAADAAAICEAVTRPTMLFVPVKEEHQQIILCLHRTRQGFVEERTASYNRLRGLIAEFGIVLPQKVVCLRREIGAHLENLPGYANLCVGDLLAHADELDKRIEEYDRAIAKAARDDARSKRLMKLPGIGPVTASALLASMGSGHDFDNGRQVAAWIGLVPGQYSSGGKARLGRITKAGDGYLRSLLVMGARAVLNSLGDKQDRFSRWARSLEERRGYWRAVVAIAAKNARLAWAVLKYGEDFRLEPGKD

SEQ ID NO: 433534 - protein, 347 aa, unidentified
MRFYTKQHPFYCGIDLHARTMYVCILDQAGETLLHRNMQATPEALLKAIAPYRDQIVLAAECMFTWYWLADLCAEHGIPFVLGHALSMKAIHGGKAKNDKIDAHKIAVLLRGGMLPQAYVYPAEMRATRDLLRRRMPLARKRGELLAHVQNTNSQYNLPAIGKKIAYKANRDGVAERFADPAVQKSIEVDLALIGYDDELLRDLERAIVKTAKHHDANTWYLLRTVPGIGKILRLVLLYAIHDIARFPRVQDFASYCRLVTCAKESAGKRSGTSGTKIGNAHLKWAFSEAAVLCLRDNPAAQKFLARLEKKHSKGKALTILAHTLARAVYYMLKRQTAFDLTQVLHG

SEQ ID NO: 433535 - protein, 353 aa, unidentified
MAIFIASDFHCKYQKVAWMDSTDGELHIADVHHQDVNEVAGFYRQFPAGSILGMETSGYSHWFEELVVGLGLELRIGNSQVIAGKRPRRQKNDQLDAEHMLCMLLENRFPSIWRPTPENREKRVLIRQRCRLVKMRTQLINALRALVYNHNLHLKRGQLSKKRRQQIADLAMSPILDQQRREMLGLIEQLDVSVKAKEAQIEQWARQDEAAARLLTIPGVGACTALTAVLILGPVGRFPTAKKVVSYIGLACSEHSTNNGYQKRRYGQISKQGNKLLRWLLTEASGTAIRTDVQRKRYYARLKYRKDWRVAKTAVARKILVCIYVLLRDGIDYPEFLRRGPSFGMPAETAGRK

SEQ ID NO: 433536 - protein, 411 aa, unidentified
MIKEDYVYVGIDLHKETHTAVMIDCYNQKLGEITFLNRPADFPKMVTKVKKCNTDGKTIVFGLENAYGYGRALAVWLIDKGYLVKDVNTAISHRQAKHRGAMYRKSDSDDAEAIALATLNMLDKLPDACPNDAYWSLGQLVHRRDNIMKQRTRLVNQLHEQLHIAYPSYKSFFNDISRPTALYFWENYPSRKYLKGKSVEDLREELVPVSHNKCSTKTCQAILDAVAGDKVKNIDYQDARDMVTLSIVSDLQHYDSQLTEVDKMLEQMYKMLGCTLTTIPGVNVITAVKILAEIGDIKRFSNANKLAQFAGIAPLHLSSSGKGKDVATKQGNRRLQATIYFLAIQMVQVSSKGTPRNPVVRAYYEKRKAEGKTSQQALICISRRLIGIIYGMLKNGTEYRMPEVENAGENR

SEQ ID NO: 433537 - protein, 352 aa, unidentified
MSSLFVGCDAHKHYSQLEVQDSSSQVIHRLRIDHSRGALASFFSKLPAGTPVALESVGNWYWIADQIEAAGCRPLLTNPAKAKLLMGHVNKTDKLDASGLTTLLRLGSLPFVWLPPAELRDQRELPRTRMTLCAWRTRIKNRIHSLLAKYALSPQDGSTLFYRRGRTWLDSAIPSLPPETARCLTQHLQLLDYLSLQISQLEDRIRTQIAITPAMQLLKTLPGIGDMLAIVIERELGSISRFPSAQQFSSYCGTTPRVSSSGGKTRYGKMRTESNQYLKWAFIEAANAVSAHHAQRGWTNRHCSQLYLRVRSRKGASVAVGAVARHLAESTYWVLKKNEPYKEPVKVSPRQG

SEQ ID NO: 433538 - protein, 453 aa, unidentified
MAQRNRSLSLKSPKSRQALSLVHPNAAGIDIGGASHFVAVPPDRDEEPVREFASFTADLNALADWLEACGVDTVAMESTGVYWIPLYELLDARGFTVLLVNARHVKNVSGRKSDVLDCQWLQQLMSYGLLRGAFRPADGVCALRSLSRQREMLLKSQARHVQHMQKALTQMNLQLANVISDVVGETGQRILRAIVAGERDGRVLAAMKNVRIHASTDEIAKSLQGHWRGEHLFALKQALALFDFYGTQLAECDRELEQQLHSLQVHDGEPAKGKKRSHARNAPKFDLRTQLFKMCGVDLTRIDGIDVTTALAVVSEVGADLSRFPSDKHFASWLGVCPGTRITGGKVLSGKTKRCANRAAQALRLAAAALRTSQSALGAYFRRLCARMDKPKAVTAAAHKLARLIYSMLTKGEAYTDQGQDYYEKRYRERVLHQLAKRAEKLGMRLVATEQPA

SEQ ID NO: 433539 - protein, 341 aa, unidentified
MDEVSTIGLDIAKSVFQVHGVDAAGAVVIRKRVSRAKVLEYFGELPPCLVGIEACPSAHHWGRELQGLGHTVRLIPPSYVKAYLKRGKNDANDAAAICEAVTRPSMRFVPIKTKEQQTALMLHRARQLLVRQRTMLSNALRGHLAELGIVSAKGRNGTAELLRIIADGRVSPAVCGILKVLARQYGAIGTEIASIDKSIMALHRGCEASRRLAEIPGIGPIGATALVAEIGDWKTFSSGRSVAAWIGLVPKQHTTGGKDRLGSITKQGNRYLRWLLVVGAMAVIRYARRHGTQKRPWLGRLMERRPTKVAAVALANKIARMAWAIMVRGERYKEPKLLLAA

SEQ ID NO: 433540 - protein, 409 aa, unidentified
MERVIERGAGLDVHKKTVTACVRVPGPAGGRRQEVQTFGTTAAALLALRDWLHAHGVTHVAMESTGVYWKPVYYVLEELFTCLLVNAAHVSKVPGRKTDVRDCEWLAQWLAHGLLRGSFVPPVAIRELRDLTRYRAVLVQDRSREANRLHKVLTDAGIQLASVATNVLGKSGRAMLAALVEGTTDPGVLADLAQGKLRRKLPALREALVGRFRKHHSLLVSHLLAHLDYLDEALEDLTAQIEEALRPFAAEAARLDTIPGIGPRTAEVVIAELGVDMRQFPTARHLASWAGLCPGTHESAGKRRAVRTTKGHRWLRATLIQAALAAVNVRDSALAGRYRRLVPRCGPKKAIVAIAHKLLTTAYLLLADERTYHDLGAGYYDARRKDRDVRRALHALERHGYRVSLEPAA

SEQ ID NO: 433541 - protein, 339 aa, unidentified
MESFVGVDLHKRISQLAALREPKPASQLRFPNHTVSVEKVLKKLPQGSKIALEATGSWWWFVDLAQRTGHEVVMSHPKQTKAIASARLKSDKVDALMLAKLLKADLLPTVWIPPATQRYVRELLTHRARLVRQRTAVINELHALYAKRNLDPGMIFHWVRPPAFRVEDLSGYGPRIVEEDVALLGFVNRQIGGLDKELKKTAEEDPESKRLMTIPGVGPVGAVAVNCWIGTIERFSNAKKLSSYFGLAPKVRQSGDRERHGHITKEGNRMVRSLLIQAALWHIRIGKGDARKHYLGVLKRRGKQIARVAAANKLLGIMFHMMKERIDYEEFLRRGGNAQ

SEQ ID NO: 433542 - protein, 361 aa, unidentified
MGQFIGCDQHKMYSVFVSMDEAGQVGEAVRVMHDRSAIQKFLAQLPAGVEIAVETSGHYYWLVEEIEKAGHQARLAHALEVKKRIGRKGKKTDKEDATGLAMLLRNGTLPEVWIPPGELRDRREMFRMRMFLSQQRTRVKNRIHGALSRYNVRLSGDAYSVQWREQLRARLPELPEFTRQSVQWQLRTLDFTLAQMKQAEGRLLKVLTDIPEVDLLKTLPGVGPILSMVLMLEIGKVERFPSSAHLASYCGLTPRVSSSGGRTHLGQVCGDVNRYLKWAFVEAANLIVTQQKKWKGSHVLGLYRRVQKKKNHQKAAVAVARHLAEAAYWILKKQEVYLPPQFPKRTAERSFVQTRVSAKRS

SEQ ID NO: 433543 - protein, 320 aa, unidentified
MGKSIQKLSSVTLVGLDLAKRVFQVHAVDANGEIVVARKLTRGRLIGFFSELPRCVVAMEACSCAHHWGRQLLALGFEVRLIPPAHVKPYVRRNKNDAVDAAAICEAAGRPSQRFVSVRSIENQAELMRHRARELLAGQRTAGLNALRGHLAEIGVIAPQGVQHAYELKRLAVDGFDEYGEVVVADCVRVALRPLVSQIDALDAAIGAIDNEIAMSVKADETAKRLMTVPGVGPVTASAIVATIQDMGDFASGREFAAFLGLTPRQSSTGGKPRLGRITKMGDRSLRKLLVVGACATLRHRKGHNDALRLWASGMLERKK

SEQ ID NO: 433544 - protein, 356 aa, unidentified
METAYDGRQVVGMDLHRRRSVLVRMTEDGRRLGMARITNSPAELRAQIARAGKCPRVALEATYGWYWAADTLAAAGAEVHLAHPLGVKAFTYRRVKNDERDYADLADLLRMGRLPEAWIAPAEVRELRELTRYRHKLVSLRTSCKDQVHAVLAKLGIPVTCTDIFGRAGSAWLDGLGLPQPYAGKVTSLRQLTGELTTEIAMLGDVIADLLAADRGYQVIQQLPGIGPVLAAVITAEIGDVTRFRNAGQLCSWAGLTPRHRESDTKVARGHVTKQGSRLLRWALIEAIQRIPRDCLIGAAKDAIIARRGKEAKNIAKVAAARRLLTLVYYGMRDGQIRCLSKSPGELPVTPAGRAA

SEQ ID NO: 433545 - protein, 352 aa, unidentified
MRTIIKQVVGIDVAQKELVVCLGRMYNDWRPELYAYKSFVNTSKGFDALTKWVGQLVDNTVPVLYAMEATGVYHESLAYYLHEAKQEISIILPNKISNYARTLTVKTITDKTASEAIALFGLERHLEQWTKPKDIYKQLQQLTREREQLIAERTVLKNQLHAELAQAIPYKKSVDRIQKRIDLLDKQEKEIQQEIEVLIKTDKEVQQNVLLLCSIPGVGILTAATVLAETNGFELIRNKRQLTSYAGLDVREKQSGTSVRGKARISKKGNRYLRKAMYMPSLAAIRYNNGFKAIFARIVARHGIKKKAGVAIQRKLLELMYTLYKKQETFNKHYILPKEECMEEAEILGGEH

SEQ ID NO: 433546 - protein, 459 aa, unidentified
MKARKVSAPRSKRGLRRASGAEPQVVGLTPQTTNERRTDTMKTYILREPNSVEPQVARLLATPDPQTAALVERIVATGRKPALYVGLDVHSDSIAVSLAPSDSTEVRRYGLIGGTHDDVLQLAKKLQAAHPDTGLRFCYEAGPHGYPLARCLRAHGYDCILVAPSKIPRQPGDRVKTNRRDADQLARLYRAGELTAIYVPDPQDEAVRDLIRARYQVQKQQHRARQQLKMFLLRQNIRYAGTKPWTLKHLRFLATVKLPFAEQQFVFQEMVHVITEAGQRLERYEKQIASVVEGWRWQPVVQALMSLRGVALLTGATLVAELGDLERFASAPQLMSYLGLCPGEHTTGADRRQGGITKLGNGIARKAMIEAAWNNRTPARISRTVLARQEGLPKAVTEAAWNAQTRLHQRYKHLTGVGRKKSQVAAAALGRELAGFVWAIGRMVKPQPVKPEPLKGKAA

SEQ ID NO: 433547 - protein, 344 aa, unidentified
MEYYAGLDVSLRSCAVCIADTKGKVVFERDLACEVGDISNCLREFAHPIERIGFEAGTMSQHLFFGLQAEGFDVVCMEARQVNAALSAMRNKTDKNDARGIAQILRTGWFNPVHMKSREAHGQRALLSSRKALLNKTIDLANEVRGLLKIFGLRLPKTVSHGSFDGVVRPLVQMDDVLTHALLPLLDARVALYQHYLELDRRVKRAASHDEVCMRFMTVPGVGPIAALTFKAAVDDPSRFKSSRTVAAHFGLTPRRYQSGESDNPGRISRAGDRDVRSTLYSAANAMLMRTMAASQLKSWGMRLMRTKGRRRAVVAVARKLAVLLHRMWIENTEFRLEGVEGIK

SEQ ID NO: 433548 - protein, 417 aa, unidentified
MQTELSQFTAIIGIDWGDKKHDVCVQAIGSDKRQFSKIPHQVDKIDEWAQAMYLRHGGQMAVALELAKGPIVSALQKYNFFVIYPINPTTLAKYRQAFNPSGAKDDPTDAELALDLLFSHPHHFQPLNPQSVEMRTLMTLVEQRRRLMNDRVRITNRLRNALKQYYPQALDWFDHIDTPLFCAFIRQWPSLTQAKRARRTTLEKFFHQHNLYRKPVLERRIGAIKSATPLTRDEAVIMPYRLQTLALVNQLEVALQSIGMYDDEIATLALQHPDYALFSDLPGAGPLLAPRLLVAFGEQRERFASAAEVQKYAGIAPVTERSGQKSWIHWRWQCPTFLRQTFVEWAAQTINKSYWAGLYYYQQRAKGCSYQAAVRSLAFKWIRILYRCWVTRTPYDETRYLKALKDRGSPLLSVKNT

SEQ ID NO: 433549 - protein, 374 aa, unidentified
MSSNVCHQIIYLAIELSSSSWVIAYRVPRNDKAKLHRLEAGDGTGLLAFIAGLRHRLDPPDDASTLVVSCFEAGRDGFWLHRLLTAHGVINHVVEPTSILVTRGARRAKTDRLDAVGLLRVLAAKFAGDPGACRTVVVPSAEEEDAKRPHREREFLVQERVRIENRIAALLATQGVRERPSLRSWDADMRALRTGDGRPLPTHLVAELNRLRRRLSLTLEMIRELDAVREQALEAQHDSASRTVKALCTIRGIGVNFASVLTREVFYRTFDNRRQIASYLGLAPTPFQSGGMDRDRRINRAGNSRARKTLVQLAWLWLRYQPESSHAAWFRDRVGSLQGRIRRITIVALARKLLIAIWRFVTLGLAPEGAIIAA

SEQ ID NO: 433550 - protein, 360 aa, unidentified
MTDGSRELPNMTAGLDIGDKYSYLCLIDTDSGEVIEEGRLRTTPEALRRRLASEPSLRIAIEAGTHSPWVSRLLEECDHEVLVANSRKLRLIYANKRKTDEVDAENLARLARVDPKLLYPLKHRGEESQAHMAIIRSRQALVDCRTQLVNHVRGAVKSFGHRLPKCPARTFHKRASEHIPEALLAALGPILEQIGSLTERIRQYDHQLEALSMEHYPETELLRQVEGVGPLTALTFVLTLQDPYRFEKSRSVGAYLGLVPAKDQSGDRDPQKRISKEGDEMLRRLLVSGAHYILGPFGSDSDLRRHGQKIASRGGKNSKKRAAVAVARKLCVLLHSLWVSGEVYDPLRNTHRRERREEAA

SEQ ID NO: 433551 - protein, 420 aa, unidentified
MEVAIANVCGLDVHEALVVACVLIGDGPRPAKTIRTFSAMRRDLIALREWLITLKVTHVVMEGTGIYWRPVYEVLEGAGGALDIAVVNARHVKNVPGRKSDVIDAEWLARLLRSGLLRKSFVPAPAIRALRDLSRYRRMLVQAQTTEKNRILKLVETMGIKLASVASDVFGTSGTAMLEAIAEGTKSTEQIAQLARSALRQKLPELRLALECTIQSHHRTMLRDQLARLHATAAEIAKYDCILQEHAAPYAEWIALLGTIDGVKHTAAIEIFAEVGPDLASFPRESNFASWAGTSPGLNESAGKKKRGRRRRGNPYLTSILVECALAATRKKGTYLSDKYRRLKARRPTLVALFAIANKLAGAVYRAIATRASYRDLGAAYLDRRNPVRTARTLLKRLLDLGLDRSALLQLLPSPGPSPT

SEQ ID NO: 433552 - protein, 414 aa, unidentified
MTVDIKVSVGLDLHKKFILGTVLWQTGQMIQERFDRTKEGLFSLKAWVMGHHADVVACESTSDYWVQVYDLLNGIIPVIVGNAHDIKVLSHKKTDKIDSEMIARLALHGMIQPSRVFAQKHREFRKLVRLRHALVQKRTDIKNQIHHILDSELLQLSAVISDLFGASGMTLLQGLVNGIPLDELIPMLPPRIKKRKEEIRSVLSHALSPDALFRLDCCLRLIRCLDEQIEVITKSATTYAYENHKRQMEILLSVPGIGKIGALTLLAEIGDVRDFSSAEKLASWVGIVPRVAQSADKLHTGSITKRGSVHVRWILTEIAHAAARCRMNGLRAFFERKKKALGTGKAIIALARKIISLVWHLLSNDELYSDPQFPPKHTTDLVSVKVPKSLTLDELLQILVEANVYLKKKDPDIL

SEQ ID NO: 433553 - protein, 482 aa, unidentified
MKEKELSMQIVHPNAAGIDIGSKTHWVAVDQIPGNVREFGVYTRDHQRLIDHLKSHQISSVAMESTGSYWQTLFHALQKAGFEVILVQGNQTKNVQGKKTDVLDCMWIQKLHSLGLLSSSFLLSDYFQTLRSYYGHREHLIEQTAMYINKMQKALRLMNIRLDVAIRDLAGKSGRAILDAILAGHTDPNYLASLAHFRVKKSPDEIAAALHGNWREDLLFELRSCLAFYDAYRKEILICDQKIQTIMLEFIPDAEALTLDSNTAEKPIRKQVNRNSPSFNIRHLAFAHLKIDLFQIPGVSHSTALCILCNMGNDIKRFASAKRFASWLRLVPNNKLSGGRIISSKTPKGKNAIALALRQAANSIGNQKEHPLTPFFKRIAYRKGRNAAITATARKLAVIIWNSSERAALDFGRQLKLLYFRVPSEEAKIIYWFHRDLLELRPGCIIPGFNLVFVDFTGDAVFPSNPAQNNFTSKYTFPEGFY

SEQ ID NO: 433554 - protein, 322 aa, unidentified
MATLCFVGIDIAKLTFDVCIHGSKSTRQFENSPQGYRQLLTWLKPHARQHIHVAMEATGRYHLGLASLFVAEGLKVYTLNPKRLKRYSQSQSRRSKTDSADASLLATYVCKHHELLHLYRPPSAQLAKLRLLVRRRHQLKEHRKQELTRSKELESTHAPCLKSTKRFAAFLSKELKRIDKEIQEAVKEDEDFARDYKLLMSIPQVGDVLATTFLTEVDPQNFNWGKDITAWLGLAPLEYSSGSSVYRPGRIGKGNTRLRQALYMASIGAFSNDTWKPWLEPQQARGKEGNKLVVALMDKLLRVCWGVLKHQQPFCHKTAFGA

SEQ ID NO: 433555 - protein, 338 aa, unidentified
MTVVTVGIDLAKNVFAVHGVNAAGKAILVKPLVRRAKLLELIATLPACLIGMEACSGAHYWAREFQKMGHTVRIMVPQLVSPYRMGGRHGKNDAADAAAICEAVARPNMRFVPVKSIEQQGQLFVHRAHQSYVSERTTLINRIRGLLSELGIVLPQAFKVFLSGVAQVLEDLPGYCNQVIGDLLNELFHIEEKIKNSEKLIPQLARDNSAAQLLMQFRGVGPMTATAIVASIGNGHDFRNGCQFSAWLGLTPRQQSSGGKARLGRITKAGDSYLRTLLVLGAKSVLLGAAKNDDPVSKWALQLKERQGYGRALVAIVAKNARMCWAMLHLKDEFRFPS

SEQ ID NO: 433556 - protein, 341 aa, unidentified
MNIKRVGIDLAKQVFQIHGVDSQEKVVLRKQLRRAQMLSYFKELPPCLIGMEACSSAHYWARELQKLGHTVKLMAPQFVKPYVKSNKNDANDAEAICEAVARPTMRFVAIKSIAQQDIQAVHRVRSELVQQRTAKVNQIRGLLAEYGLVVGQRIEVLRKSLPLLVEDAENGLTLDFRELLEGLKQDLIALDKRVDELDKKIKTLASSNEDAKRLQQIPGIGPITAAALVCAIGDGKQFKRGRDLAAWLGLTPRQNSSGGKDRLLGISKRGDAYLRTLLIHGARAVLKVASQKDDPRSRWLQGLCGRRNKNIAAVALANKNARIVWALLTKKTDYQPEGKPA

SEQ ID NO: 433557 - protein, 365 aa, unidentified
MSKIAYVGIDYHQSFLAVVVLPGDEAQPTDKAKLENNPKKIKKFISKLSQRFDIQTCYEASSSGYVFYRHMRDWGYPCQVVAPSKIPKKPGDRVKTDFKDAENLAYQFRNGSLSFVHVPNEEEEAVRALVRCRRALKEDSKRAKLRIFALLKTQGLHYPRTSGTLKHTQWLDSLELPHCVDRVFAEYRTHLEYLNTRIADLDQEIQRISQTEPYAEAVHALMSLRGIGTLSAMTLISEIVDFSRFPTAKALMGYLGLTPSEYSSSTSRQYGRITKAGNSACRRILVECVQHYRKRPVPTATLRTKWKNQPAERVRVAMNCMQRLHKRYWTLEQRKPKNVALVAIAREFVGFIWSLMQDPKPSCAA

SEQ ID NO: 433558 - protein, 368 aa, unidentified
MQELITGFVGLDAHAESTAIAVAEVGREAPRFVGTVSARLVELTKALQKLGGPRSLQVVYEAGPCGYALARELIRLGYRCEVVAPSKIPRRPGERIKTDRRDALNLAGLARAGELVSVSIPDERDEAIRDLSRARVDAVRARLKARQQLKALMLRHGRRFSGKTSWSAAHERYLAEVSFAHPAQNIAFTEYRQAVAEGAARVQRLSESLTGEVEHWRMHPLVAALMTLRGLDMVAASTVVAELGDLRRFAHPRELMGYLGLVPSEHTTGSKRRLGAITKTGNTHVRRVLVEAAWNYRYPARISRVLQLRQECQPAAIRAIAWRAQLRLNHRYRRLKARGLQHNKICVALARELAGFVWDIGRHVAPKP

SEQ ID NO: 433559 - protein, 343 aa, unidentified
MGQYIGLDVSLKDTAISIREDGKRIWRGKCPSDPGIIAQAVRKHADDPLSVVFETGPLATWFFHALTGEGLRAICIEARHAQKILGETLNKTDANDAEGLAKLAETGFYKAVRVKSFEAMLIRSLVAARTQLLAITTQLTNQIRGLMKTFGLVVPKSKGRVFIEKVNDLLDGHVELKGIIYPLLEAWQAVRERASTLSRQLLLAARQCQSTRLLMTIPGVGAITAVSYVAAIEDPKNFPKSRSVGAWLGLTTRRYQSGEMDFNGHISRRGDQRLRGLLYEAATSLLTRTRAETVSDLKTWGLQLRERLGFKRAAVAVARKLAVIMHSMLKTGQTFTPTREELA

SEQ ID NO: 433560 - protein, 354 aa, unidentified
MLADQADHVLGVDTHRDSLSTAILAADTAVVQGQITTAANERGYRRLLRWARENAPGRRAWAVEGTGSYGAGLTVFLHREGELVLEVDRPRRPATSRNRGKSDELDAIRAAREALTREHLSQPRQRGEREALRVLLATRDSAVRSKRAAITLMKGLLVSAAPSLREGLRSLATREQLARAARLRVNPAQNSEQRATIIAIRASARRALALAEEALELEREIEPIVARIAPALLVEMGVGPIVAAQILCVYSHPGRIRSEAAFAALGGVAPLPASSGQTVRHRLSRSGDRQLNRALHTIVLCRMRDDPRTRAYTARRQAEGRSTREIKRCLKRYTARHLYRLLNSTTPNPANSET

SEQ ID NO: 433561 - protein, 470 aa, unidentified
MSKLSRRHRAASSQGEARPFAGMRKITAQAAGVDIGAHEIVACVPDGEDQQIVRTFGTYTADLQTLADWFVDRGIQTVAMESTGVYWIPLFEELEARGLHCCLISAASIKRVPGRKSDVLDCQWIQTLHSYGLLTASFRPEADLVALRTLLRHRAQLLEHRAPHVLHMQQALLQMNIQLSQALSDITGLTGQRIIRAIVAGERDPQQLAALRNYRCKKEADEIALALTGTWREEHLFVLTQALALFDFYTTQLSACDAQIERVFSVIKPRFETAGEAAEPAPLSTPPRRKPHSHSKNAPEVNTRAHLLRITGVDLVAVHGMSDSIAQTIVSEIGTDMSKWPDAKHFCSWLGLAPKNDISGGKVLKSRTMKNRNRAAQAFRMAAQSVTRSHCAFGAFYRRLKGRLGPAQALVATAHKIARTVYHMLKQRVPYHDIGAAEYTQRFRERELQYLQKKAAKLGYTLSCASPITR

SEQ ID NO: 433562 - protein, 419 aa, unidentified
MTTNSSDTTFIRIIHPVCCGLDVHKKNISACLLTVDEHGKENYEIKEFGTFTDDLETMKKWLTDNNCPIVAMESTGVYWRPVHNVLEGFMEVILVNARHIKNVPGRKTDISDCKWLAGLLKHGLLKGSFIPEKQIRQWRELTRLRRKYTESMADYKRRVHKLFETANIKIDSVISDLFVVKGHNLICLLCNESELNESTIKANSKRGLKEKSEELYRSIQGFFEEHHRFQLIGMMEMIEAIENQIAKITKRMENLTEGHHDLLNRLDEVPGIDQKSAQAIVSELGVTLEEFPSMAHLASWSGLCPGNNESAGKRKSGRTSVRNHPFKTILIEVAWAAVKKKGSYYRVKYFKLKARRGAKKAIVAIAHRISKAIYNIIKHGAVFTDLGENYLTVQTRQREIKNIKRKAGQLGYKLVPCED

SEQ ID NO: 433563 - protein, 435 aa, unidentified
MRKTLEIMNPDAAGIDIGSRNFFVDAGEEEIKVFPTYTEGCNAVRDYLLQRKIKTVAMESTGVYWVILHSILEEAGLEVYLVNGRDAKNVPGRKSDVKDCQWLRQLHSYGLLRKSFIPDENIRTLRNYMRLRQDHIRATATQIRLMQKALTLMNIRLAEVISDITGASGIKMIEAILKGVRDPEELAAMCHQKILLNKKEVLLKSLEGTYREDHLFALEQAYKTWRHYNEMIVECDKVMEELLNKMSISKPEVEIKNKRKPVRYHPPQIKDLPKLLLKMTEGKDPTTIAGITDYSFLQIISEVGTDLSAWKTEKHFVSWLKLCPQRNSSGNMMKKVNVKHHNKASLIFRNIAQGMLSSKHIAIGSFARRIKSKRGSGVAIKAVARKLACYFYRVMTMGGGFVEKGIEMYEERYKEQKRRYLKRQAYLLNMQLVDL

SEQ ID NO: 433564 - protein, 412 aa, unidentified
MDVLVERVAGVDVGKAIVVVCVRTPGPDGRRVSETRTYRTMSRSLEAMADWLVECGVTLAGMESTATYWKPVFYALEDRMGTWLLNAAHMKAVPGRKSDVRDAEWIAQLLEHGLVAPSFVPPPEIRRLRNLTRYRVQLMGDRTRDAVRLEKLLEDASIKLSVVASSVTTVSARQMLAELVAGNTDAAAMADLAHGKMRRKLPDLAEALTGHFDEHHALLVGAMLHRLEHVDAALRDLDVRIAAATTPWAHELQLLQTIPGVGPKTAQVIIAETGADMGRFPTAAHLAAWAGVAPAMHESAGKRSPAGSRKGNKWLASMLVEAASSVSRSKDTYLAAQYARIAARRGKKRAAMAVAHSMLVSAYYMLERDEPYREVGNDWFDQRHADAHTRRLVAQLKRLGHTVVLDPVDSPA

SEQ ID NO: 433565 - protein, 360 aa, unidentified
MRILALDLGKSKSVAYTVDTATGECGFKTVRTEPAVLGRLFAEGRPDRLVFEIGPLAGWVHDAARETGIRQIEVANVAHEAWRWRHTRRKTDRVDAVRLADLSAAGQLPTVHVPQAATRQWRGLIAYRARLVARRTAVKNRIRAILASVGETMPRGAGGWTHQTLASLEVLARPLADVGPEDLWRGELALELEALAHLEAQVATVEAKLDTLAEADERVARLRTIPGVGPRLAELLVALFDDPHRFRSGRQVGSYLGLVPRQFQSGAMDRHGRITRHGNPLARALLVEVAWLGLRWNGRLRAIYERVHRGSRARRKVAIVAVARRLAVFAWAMLRDGTTWRPYRPAETPAQHPVEAGVLA

SEQ ID NO: 433566 - protein, 402 aa, unidentified
MITCGIDIGKGKHAVAIIDELGRQLVRTRFYDNTMAGAEKLMEELARHAEPAQVHVGMESTGNYWRAYYDFLSKKGCVVDVINPIVTSASSAGDIRGRKTDKRDAECIAEVVMRGKYVRRRDEGLQERKLRALTRQRGFIVEERSAAKLHLSSMVAEAFAEFESLFEDPYGPLALAVLSKYPTACHMARARKPSLAKIVRAHTRGRDADAEARRLVDAAKDSISLACEITDALARCIVSSIQTITALDERVKDIEKTIMDFDPPDLAAKLMAIKGSGKVMPMVVASEFGDISRFRTNPKNGSETGMHKRLLAFAGCEPRIRESGKWRGRKFISKRGNRQLRTALYLIANNIRQWDPYFKAVYDRKVEAGKHHNVAVFYVVAKLLEVLCALYKSGRSYAATQP

SEQ ID NO: 433567 - protein, 444 aa, unidentified
MRIVYRVVAGLDVHKKVVVATRMRVDEGERLLWETKSFGTMTTDLLTLLDWLMEWGCTHAAMESTGDYWKPIYNVLEGALEVYLVNAQHVKHVPGRKTDVKDSEWLAELMLHGLLRPSFIPPKPQRALRELTRYRGKLIEERSRTVNRIQKLLEGANIKLGSVVSDVMGVSARAILAVLCDGHMSPQAMAELARGSLRRKLPELEKSLTGLVDPHHRFLLSKQLAHVDFLDEQIGDISTEIARQVEEMSGPPSSPPEAGTDTDRTTTPGWDDTMSPLSWQEAIALLDTIPGVNIRTAEGILAEMGLDMSRFPTEKHLTAWAGLAPGNYQSAGKRYSGRRRKGNRCLAATMVQAAWSAVRTKGTFLNTRYHRLAARRGKKRAIVAIARSMLVSAWHMLTRRQPYQELGADFFDQRRKESKIAYHTRQLEKLAGGPVHIELPVPAV

SEQ ID NO: 433568 - protein, 416 aa, unidentified
MKGCPRTCRLWGDTEPRARKETAMRRAQRIASGGMDVHYNFSSVSWCDASGHRLARERLEHGDREVLRRRIGRWPQDVPVVMEASFGWGWLSDELDVAGIDVHLSDCLKVDQMRRARGGVKTNQKDADLLAQLPLERTRWWEVWRAPPQVRDRREWMRYRADLVRVQTETKNRIHALCHRHGVFYPMKCLFGGEGRRFLHGVAADGRHAGGVLPSGALATLRGLLRLLDHLRAELATVARCLKGMLARDPVTRRLDGIPGIGLTLAHTLQAEIGRIERFRNHKALASYACLAPKAADTGEAKPGEKPKGRRLGRRGNRVLKWAFVEAAHGAVRRGGRWRAMWDRVTDGGTRDKNRGYIKVARELVKVVYVVWHREVEYREEPPRRPGATTRRRRSTSRPGTGQPSPALVHAAKPSA

SEQ ID NO: 433569 - protein, 384 aa, unidentified
MNKHSMIFIGLDTHKEFHEVAYCEEQRGASAVHYGRISSSKVSVKKLIRQFESKYPGATIHVVYEAGPCGYWIYRLITSLGHCCYVVAPSLIPKKPGERIKTDRRDALKLVRSLKSEDLTPIYVPEPEDEAVRDLSRARELAMKDLKEAKYQLKALLLRNNIRYEGTANWSKKHLRWLTELILPHPAQHIVLQEYLQTIEERIRRLERLDNELTHHVHQWRYYPVVKAIQAMRGVRLLVAVGVVAELGDLHRFDHPRKLMAYLGLVPSEHSSGGKRHLGAITKSGNGRARRLLIEGAHSYRYPANVSTNIQIRQEGLPKDIVDIAWKAQLRLCKRYQRMSKKGKHYNLIITAIAREMAAYIWAIAKEVVLTPVNPKLRLSRVPA

SEQ ID NO: 433570 - protein, 345 aa, unidentified
MLTIGLDVHWSRTSVCILDAQGNTLRQQEVKGGHEAVAQCLAKLEEPFQVCYEASTGYGALYERLLPLAQRVEVAHPGRLRLIFKSRKKNNRADAQKLASLLHLNQVPQVHVPAQEVRSWRGLIEHRRSLVDRGVAVKNQVRALLRCQGIKGPQSERQWTKAGIKWLQEMKWPTEMEKLRLEVMVEQLEDLRRKLARVTQTLDEMAAQHAGVALLMTIPGIGPRTAEAFVAYVDDPHRFSAGTIGAYFGLVPREDSTGEHRRLGHITREGPPTVRKLLTEACWCGVSKSRRIREVFERHLKGDRGRRKLALVATSHWMCRVMLAMLKNGEEFREAAPAAAETNQR

SEQ ID NO: 433571 - protein, 376 aa, unidentified
MKNLIFVGLDVHAETIAVAVAEADGSVRSLGVIPNRAESVGRMIRKVGKPEQLRVCYEAGPTGYVLYWQLSELGVKCEVLAPTLIPVKAGDRIKTDRRDAEKLARCYRAGDLTAVWVPDAAHEALRDLVRARLAAKRDQLRARHRLGKFLLRHGRRTPEAMSAWTDKHLAWIKTVHFEHSAQETTLLDYLHEVEHVAERLVRLERSIDTTIETLPVKLRAVIEALQSLRGIAQISAVTIMAEVGELSRFEHPCQLMGYSGAVSREHSSGPRVCRGAISKAGNAHLRRIVIEAAWAYRHRPAVGTTLAARQRRSDPAVIATAWKAQHRLHQRYLRLIGRGKSKQQTVTAVGRELLGFIWDIGVQVERQTQLPLKQVV

SEQ ID NO: 433572 - protein, 409 aa, unidentified
MLFGGIDWSDRFLDFHLRTADGRVLAQGQVESDVEGLTELFMALESHGPATEIGIAIETCHGAWIQPLLDRGYQIYPANPKTVERFREALSVAGNKSDKIDRKVLAMFLVTFHQDCIPLRPDAPEIVSLRVACQDRVRMVEERSAKLCELKAILKCYYPAFLGLFGNLKSTIALQFLAKFPTQKQMKGLTERRFRNWLKRHRYSWSQRIDDMIDVLTQPALPVAEHLQQAKAPLISYLAASIQILNSEIAKRDQWITEHLDQLPEANWVRSLPGAGVVLAPALLACLGRDPQRFASVADARALMGTAPVTKASGTVRVVQFRRGCWKFARRTLQLFADQSRHQCPWARAFYSKQRNSGHNHHAALRALAHKWLKIILAMRRGSTLYNERIFANSQRRYLLKIPVLHKAI

SEQ ID NO: 433573 - protein, 309 aa, unidentified
MLFIGDDWAEGHHDIELEDEAGRRLARARLPEGLEGITRLHALVAEHAPGSWAELPPDQVAGQVIVGIETDRGPWVTALRAAGYQVFAINPLSAARYRQRHSTSGAKSDAGDAHVLAEIVRLDRDHHRPIAGDSDLADAVKLLARAHQIAVWERTRQVLRVDEHFARHPAADIYLSQPGFGVVLAARTLGEFGDDKDRFATARARKNYSGQSPITRASGKKSVVLARYATNRRLGAALHLQAFAALGASPGARAYYDAIRARNIGHHAALRQLANRFVGILHGCLKTGTLYDENTAWQHHRTDIQPAAA

SEQ ID NO: 433574 - protein, 319 aa, unidentified
MNSHRKNEMAEPPVNFVGLDVSKATLDSFATGGKPRVDDNTPQGHAALIKYLRRLQNPRVICEASGGYERALVAALLSAGIGVCVVPPGRVRHFAHAEGLLAKTDRIDAALLARYGEKIRSPLELPADPSAVRLREMLDYRRILSDRRVATASQLALAQGYLRDGLQSQLDGLKAALRQVNKDIAAHLKGDPVLRAKAKRLRQLCGVGPVLASTLLAYLPELGLAGDKTIASLAGVAPHPADSGQYRGKRRIRGGRAVVREVLFMAAVTAATHNPILAAFYQRLKGKGKPVKVVLVAVMRKMLSVLNRMIADPQFSLAG

SEQ ID NO: 433575 - protein, 476 aa, unidentified
MGKCKRNSTAEVKQRKPLHAAKARISAPETTVRAQYRSAIGIDVHLNLLVCNFQTQLDDHREIRESREFYADRTSLDEFAQWCSEKKPEIILMESTGVLWYSPYEALEHVGFQNSQLALINARDAKAAAGRKTDYKDAARLSDLARAGHFSRSFVPPKAFRIQRLLARDIQKNKADLSRCTNRYQKMLNSTGCRASTVFSDVRGKAANAILEAKISNAPNLEDIIKKNCRRLRATPEEIHSALNFVIDSAISEQLAAIRKKIAQLESYDADAFSRLSELQKPYAKDIKFLMSISGIQERSARLIYAELGPNLLEYFPDSEHFCSWLGICSGSNTSAGRQSSGKCPKGNKWLRRTLIECANGLSLSKNFAGMDKFFAHKLVRGRRRAIVELAHFLARVIFSVLTHQKPYEERTTTAVRDVLVKRFNRVARQLSGRTDLVVQGDCLVEKATGAILAKISEFSPKPRSEPNVIEVIEPS

SEQ ID NO: 433576 - protein, 482 aa, unidentified
MKNSSIYPNRSQELATLFEKAGNPSKLICVPIDYAKKDHLVMFCNGNGEVLRKPFSVKNTVDGVEYLLGQVNRSCRYRHIQSDHVFFGGEDVNSYAENFANTIRSKGWLVANVNAHDAKKQRENLQASTDRLDLMGIATMLLNRRANCCPAQSGVYRNLRTIMRHRRKLVKMKTEVRNRIHTLVDRLFPGFLNEKKSGILPFSNSSLYLMEKRFSAPQIRRRRRSVLIRNIEKRGTKKAEQVAAKLQEYASQALTTPDEYTATLQVSLASHVMHYRCLFDSAEQLVNEMAQLLAQTQGAFLTSIKGIGIVLAAGVTAEIGDPLVQRPTDQLASYAGIVPKVKPSGGSQGPSITSHVSKRSNHILKDFVVQSAFHIGRYGPKDLQDDYSRREAAGQHADFGIARRFIRMAMCMMRTSQVYLPPDMRSTHIKPEQRADYYLAMWPYLRDKWSKAGGLEVAFAKDKPLGQWRYIVQEVYGIKLKM

SEQ ID NO: 433577 - protein, 314 aa, unidentified
MSACAAGIDVGKNFFDVGMAPTGHAFRVPNAPKGVAVVIDRLRRVKVRRVVLEAIGPYAAPLIAALRSNGFEVGVVNPRRIKAFRDAEGRRAKTDRLDAGLIARFALTMTDIVRPLPSADQLALKALATRRRQLVEIIAMEKTRLKQATEPLILASHRAAIAALTLERRAIEGEIEQRIAQNAVFRRRQEILMSIPGIGPQVATVLLTELPELGTTDRRAIASLAGLAPHPNQSGASQGRAQIAGGRPCVRAALYMAGLASCRANARAHDTYRAMRDAGKPAKVAIIATARKIVILANTLIKADHTFDPNHTIA

SEQ ID NO: 433578 - protein, 314 aa, unidentified
MNTQGIVAGIDVSKDWLDVALGAESLRVANEVAGVSSLIERLQAMSVGLVVMEATGGYETQAASAIAGAGLRLAVVNPRQVRDFAKATGRLAKSDRIDAHVIAAFGQAIEPQIVRLPDEQTRELQGLLLRRSQLIGMRVQETNRLGLMQGAMRKQIKSHIAWLDRAIDEVNTDLTARLRSSPAWREKDELLRSLKGIGPITSGTLMTSLPELGQLNRRSIAALVGVAPFNRDSGTFRGRRAIWGGRAQVRHMLYMAATAAIRSNPVIKPFYERLIARGKPHKVAMVACMRKMLTILNAMTRSNTPWNPTYQGAN

SEQ ID NO: 433579 - protein, 421 aa, unidentified
MEKTIELVARIGLDWADDHHDFCLQEAGSSRIETGRIEQTPQAIAEWVAGLRQRFGGRHIGICLETKRGALVAALIEHAFIVLFPVNPRTLKRFREAFAPNGAKDDPGDAGLLFELLNKHESRLHRWDPDDAETRAIARLVESRRKAVDLRTRLTNQLKAELKGYFPQALSWAGELETQLATDFLQRWPTLKDVQREKVQTIRKFYYGHNCRRADLIEQRIEEIRTAVALTNDSAIVETSALNVQMLARQIDALRPSIGRYDKEIANRFGKHPDAHLFESLPGSGAAMAPRLLSAFGSKRDRFQAASEVQEYSGIAPVTRRSGRQSQTTWRWGAPKFVRQSFHEFARLSIHHSAWARAYYDLQRERGKSRHAAIRALAFKWIRIIYSCWKQRVAYDEAQYVQALLQRGSTLAKRLALPPAT

SEQ ID NO: 433580 - protein, 392 aa, unidentified
MVISVGIDVSKDKHDCFIVSSEGEVLADVFTIPNNMDGFRCLLQKIQACAAPQDKIKVGLEATGHYSYNLLGFLLDNGLTTYVLNPLRTNLYRKSLSLRKTKTDRVDARTIASMLLSDAGLKPYTNTAYHNEELKSLTRYRFDKVKERAKLKSSVSRLVCILFPELEKLVPSVHIASVYALLEEFPGAKQVASAHLARLKALLETASKGRYKREMALAIRNAARNSIGSRMPAKSLELQHTIRLIRELDAEIAEIEEQIQAIMDELDSPITTIPGLGFRMAAMILAEVGDFSRFDSPDKLLAYAGISPSTYQSGQLKNCYPHMEKRGSRYLRYALYNATKYVCLWDSNFAAYLAKKRAEGKHYYVAISHAAKKLIRLIFAMEKSGTPYHSSV

SEQ ID NO: 433581 - protein, 348 aa, unidentified
MRTMMVVLGVDAHKKTHTIVAADEAGAELGSITVKATAEGHLKAAKWAARWEVRRWAIEDCRHLSRRLEADLLAGGELVVRVPPKMMAGTRRSARTRGKSDPIDGLAVARAALREPDLPVAQLDGPSREVKQLVDYREAVVKERTAAQNRLRWRLHELDPTFDPAPGSLDRYCVLDEITAFLEAHDGVVADLARRETDRIRQITTEANTLEKEITRMVTQIAPSLLLLVGCGGLTAAKLVGEAADITRFKNRDAYAMFAGTAPIPVWSANNQRFRLNRGGNRQTNAAIHRIAITQIRCHPDAKTYMERRLAVGDTKREALRALKRRLSDVVYRTMIKDTQQHQLANAA

SEQ ID NO: 433582 - protein, 408 aa, unidentified
MKRYYIGVDWGDRLHQMYIGDDEGKKVREMKVQESPEGLAEIGRWLDERRAEGIELWAAIEKPAGRIVDFLLDHGVEVYPVNPKAVDRVRDRYRMSDSKSDAFDAYVLAEFLRTDQAHLKVLRPSSEKAQELKMLSRDQRRVGRHKSRLLNQLTTTLKEYYPRPLEVFEDLETGIALDFLQQYPTPAHLGALKRKEFNRFATKQHHLSKQRCEELWEKLHKPQLAVPEHVVRAKAQWVEVLIEQLRAAIKAVKIYNHKVESFFASSPAAQLAKTLPGGKSGTLVAAIWAELGDAQGRWESSRHLQAEAGAVPVTKASGKSRVVHFRFACNKHLRHAMYWFSFVSVNHSEWAKLYYRRQRDKGHSHHQALRALGAKWLKIIFVMWRDHKPYDENYHLANIARQKMRQAA

SEQ ID NO: 433583 - protein, 336 aa, unidentified
MEKRYIGIDLHRDRFTCCMRLENGRTYLTTWRLDELPRFVKKLRATDQVAVEITGNTRLFYDAVAPHVARVVVVDSNQFRVISRSVKKTDPNDARLLALYLSKDLLPEVRMKNKQQARVASLTQTRDTLVKQRSALKNKVNNMLSARGLNLPKEALSSEKRLAEVLSLPFDELLLVELRVIVDQIRSLNQSIGELDKAIAEASSELEGHTSLTSIKGIGATTSAILLSVIGDVNDFPDEGRLASYFGIVPRVSNSNQTEHSGRIHKRGSKLGRTALVQSALIAANYSPYLKRFYEQVKARRGAGKAIIALAKKFLGIIYRTLKNKDFPNFVLAEAS

SEQ ID NO: 433584 - protein, 339 aa, unidentified
MMIIGCDYHPSWQQICWLDTATGETEEKKLEHASGEAEKFYRQLPGPALIGMESTGNCQWFVEMATTLGHEVWIGDAAKIRASEVRQQKHDRRDAALILKLMLEKRFPRIWAPSGEEKDLRQLLIHRYKLVRIRAQVKTELQHLALNQGVTKKRKLWSKAGEKVLRELPLKPWASRRREDLLKVREMLNGQIVLLDQAVVEAAEKDEKARLLMTQPGVGPITSMAFVLTMGDVNRFQRVKQVASYLGLIPREYSSGGHQRFGSISKQGNRFLRMLLVEAAQGAVRCDPGFRNEYLHRCHKKAKGVAKVAAARKLAIRLYRMLRTNTGYPEVVRVESSAS

SEQ ID NO: 433585 - protein, 422 aa, unidentified
MCLPFILARGLLWFWPEQSRTNGRDTRVPEALQCKQFELANTPMNSELYLGLDVDKEWIVIAVAEWGRNAPVHDLGALSNDLHALEKLLVRLRKRYGPDVMMRACYEAGPCGFGIARRLHQLGVQCAVVAPSLTPTRAGDRLKTDKRDARKLARLLRAGELTPIYIPEPADEAIRDLCRARSDAVDDRRRSRHRLKAFLLRHGYRYHGKSAWSAAHERYLRELVLPHPAMKVILEEYLMSVQLASERIARTEAAMSDLLGKWRLEPAVRALMAMKGFQTVAAMIVVSELGALDRFRHPRQVMAYLGLVPSEKSSSDRRRQGSITKCGNAHARWLLVECAQHYAAPPKISKELSRRQQNQSRQVRLISWKAQNRLHQRYCRLMARRLQRNKVIVAVARELCGFIWELLRTQECYHAPSPSAMN

SEQ ID NO: 433586 - protein, 366 aa, unidentified
MKKTSTVRVNGNMNFKGQKLTLGMDLGDHWSCYCVLDEAGKIILEQKVAMTPEAMKQTFAKIPQSLIAMETGTHSPWVSRLLTELGYKVIVAHAQKVQLITKSNRKDDRHDARTLARLARIDPELLGPVRHRSAQAQIHLTVIRARAELVRARTALVNAARGLVKSYGQRLPKCGTQRVNRELAAGLHAELREVLEPLLQEVESLNERIQEYEVRMEKIAKENYPHVELLKQVKGVGTQIALTYVLTLDDPHRFPKSREVGCFLGLCPGRRDSGESQPEMNISKEGDRYLRTMLVQGAHYILGPFGADSDLRRWGLKLAARGGKSAKKRAVVAVARKLAVLLHRLWVGGEVYEPLRNSQKAMRAAA

SEQ ID NO: 433587 - protein, 348 aa, unidentified
MNHVAIDLGGRESQICVRGPDGMILEEKRHATRLLETLMTQWPPSRVILETSAEAFRIADAAKAAGHEVRVVPATLARTLGVGARGIKTDQRDARALSEVSCRIDLPSVHIPTPASRELKSICGAREEMVEVRTKLINNVRGWLRGQLWRIRSGATESFHERVRAHAASLSTELPPHVVRNLDIIEVVSKQIRASNEQLRQVVKTDTTCQAIMTVPGVGPVTSARYRAAIDDVSRFTSAHRVASYLGLTPGECSSSDRQRRTGITKAGPSAPRRMLIQSAWTAFRSYPNEPMVQWAMKIAARRGKFVAIVALARKISGIMFAIWRDGTTYHADRSTAPKRIARRVAMT

SEQ ID NO: 433588 - protein, 363 aa, unidentified
MIVIGTDTHKRTHTCGAVSAATGQLAGELTAPAREPGFRELLAWGRSLEEERIWAIEDCRHVSGALERFLIASGERVVRVPPKLMGESRRGERSAGKSDPIDALAIARAALREGPETLPAAHLDEDALQVKLLLDHREDLVKARSEDQCRLRWHLHDLWPELEIPAGALDRMVWLERVARKLARAEQGARVRVARELVTEIRRRTRRAAELEREIGALVKAQAPELLALEGCGALTAAKLIAETAGAKRLASDAKFARLAGVAPIPASSGNRVRHRLDRGGNRQLNCALHRIAVTQGRCHAPAREFLAKKQAEGKTRIEALRCLKRHLARRVWKLLVNPEREISMSTVDTQRGKLPPQFAVAA

SEQ ID NO: 433589 - protein, 333 aa, unidentified
MVEGTKGSHHKEGTTKMAKHSMVCAGIDTGKHKLDVALDQGPEQLQVDNSPDGHKSLAAWLRQRRVRRIGIEASGGYEQAVVAALRRDGLVVILFQPAQVRAYARFILQLAKNDKIDAALIAACTAAAKTIREPPDPRLTALAGHLTMIEQITEDIARLKTRGESCRDERIRQYWKDEITRLRAMARSEFKQLLAAIREHPDLAERLDLMVSVQGVGLKTAVDVLIRMPEIGSLSREEATALAGLAPYDDDSGTRTGQRHISGGRERLRTSLYAAALPAAFKWNPQLIAFYQRLIAKGKPHKKALVACARKLLIFLNTVVARRTPWTSNTAEV

SEQ ID NO: 433590 - protein, 387 aa, unidentified
MPQPNDLSRSLVALDQDSTIIAVVEMSQSSWLVAGVLPGVERQPRKKLEPSAERLLGLLHRWRDEAVRAGKKITRIALAFEAGRDGVWLARWLSARGVEAHVIHPSSVAVSREHRRAKTDRLDTEMLKRGFLGWLRGERGHCSMSRVPTIAEEDAKRPNRERECLVGERTRIINRMKATLARLGIRNFKPTLRKAAERLATLRTPESTPLPPNVLAELQRDMARLGFVVSQIREIEEARQKRLEQEPETGPHAMVRLVARVVGVGIETADMLVHEVLSRPMRDRKAVARYAGLTGSPDESGAKRREQGLARAGNARVRRGMIQLAWRFLRFQKQSALAQWYQARTADSRAGTRKTMIVALARKLLIALWRFVTTGETLEGVILRPAG

SEQ ID NO: 433591 - protein, 343 aa, unidentified
MARELAFVRMSQNTSISMKPKTAAVHVGVDVAKATLQVHCQGRQSEIKNAPKDIAKLCKKLKAIAGSHVVCEATGGYERAMVQALQEAQIPVSVINPAHARAAAQAQGQRAKTDRIDAAMLTDYGDRFEPEPTPKVSQTQRQLVELTQWLKQLIDAQAVAKAQGEHDDNPFVAKQRRALLRHYQSQIKKVEAQLKALQEKDVELRQRVECLDAIEGVGRRTSWLTLAQMPELGRLNRHQTGALAGLAPWTRESGAMKGKRCIGGGRPNVRTALYMAALSASRCNPVLSVFYKHLVDKGKPHKVALTAVMRKLVIYMNQSLKTLAAKSAPAEIPPKPDEKSCKN

SEQ ID NO: 433592 - protein, 354 aa, unidentified
MFFAGIDAHTRYVVVVIINRMGERVLGPTRVRVDQRERLVTLLAPYRPMDAIMETSSSWPWLHEVLTGAGVQFVLAHARRLRAIAEANYKRDDIDAELLARMRLAGLIPAVYATPAAQREWGTLLRHRTTLVTKRTALVNRIHAQLHMRGLHLARGRLLTRAGRQWVRTEAWPHLGREQRALVRSHLRVIAGLRPLIRALDRHIAQVAATIPQAQLLATIVGIGPQRALMLCAEALPIARFRTPGHLASYAGLVPRSKQSGVRAVRHGAIPAGANRWLRGALVRAVVAHVQHAPDSWLTRYYVTQKARVGWPTARVAAARKLARAIHAMLRTNSSWTNDPARGELVRTHAAQTA

SEQ ID NO: 433593 - protein, 353 aa, unidentified
MRGIFEGGCDYHPGFQQIAFVSTDTGKVGERRLEHTEEAEQFYREVGKHGEVVRVGMEASGHARWFERLLHNLQFELWIGDAAEIRTKRVRKQKTDRQDAQLILQLMLENRFPRIWVPDAENRDLRQLLWHRHRLVQMRTRVMNQLHVVALNEGLRRKKALWRPEGRAELQALSLAPWAGRRRQDLLDLLDRLTPKIHELNGKLEQIVEQRPVTRQLSTHPGVGPLTALAFELVIGTPERFACAKQIASYVGLAPSEESSGDRRRLGHISKQGNVLLRFLLVEAAQVTVRSDAQWRSQFFHLAMRRGRKIAKVAMARKLAVELYWMWRRGWDYRQMQQLGSHAGEPGNPHGVQ

SEQ ID NO: 433594 - protein, 339 aa, unidentified
MWFSGIDQHKAFCLITTYGAEGPGVKQARVASTPLALQQYFAEFPGPHKAVVESTGGWYWLADTLAALGVDLVLAHATRLTAIAAAKVKTDQVDSDTLAVLLRADLIPMAHMIAPAQRGPRDLMRTRLRLVEKSVSAQNSIDRLLEKFNAAEVAALDQLYQLHAACHTAQLHLLAEQITTLERALYPYLIPDVDVQRLLWIPGLGKVNAFTIYTEIDGIARFPSERQFFSYCRLVPGADNSGGRTRHRSGSKAGNRYLKLAFSHAGIRAVQYYPEIRAFCKAKARKKPIRIARTLVALELARIVYQVLTKQEDFNGQFKGRPLSRRKLAQWPRRASPSV

SEQ ID NO: 433595 - protein, 351 aa, unidentified
MMIIGVDYHPSFQEIAFLVEETGECDERSLKHSNGEAEKFYRDLKARGISARVGMETTGYSRWFERLLAELGFEVWIGDAAEIKTRRAKKKKTDREDARLLLKLLLEDLFPRIWVPCPENRDLRQLLWHRHRLVQMRTRIMNQLQALAMNENRCWKGKLWSERGRTELEKLPLAFWASHRRQGLLELLDRMNPAIDELTAAAEREAKKRPEAVRLMTHPGVGPLTALAFVLIIGTPERFGCAKQICNYVGLIPSEDSSGGRQRLGHISKQGSSLLRFLLVEAAQAAVRCNADWRRRYRHLAMRRQRNIAKVAMGRRLGARLYWMWRNGCEYSPSLEFGSHAGKLGTGNGGQ

SEQ ID NO: 433596 - protein, 344 aa, unidentified
MVYYTALDVSLRSVSICIIDDSGAIQFEDKVVSEVDEIVSCLERFSSEVKSIGFEAGTLTQYLSYGLQAAGFEVICMEARQVSAALSAMRNKTDKNDARGIAQILRSGWYSRVHVKSLDSHLTRALLTSRKTVLKKCIDIENEIRGLIRLVGIKLPGTVKHGPFDELVRPLIQPHSTLADALIPLLDARQVLYQSYLKLDSQVLAIARKDAVCQRLMTVPGVGAITALTFKAGVDDPSRFKHSRTVAAHFGLTPRRFQSGEMDNPGHISRAGDADVRSALYVAAHSLVCRSEHWTYLKAWGLRLSKTKGHRRAVIAVARKLAVILHRMWIDEVDFRYSSTEVKP

SEQ ID NO: 433597 - protein, 348 aa, unidentified
MRTYNTQHLHYCGVDLHARSLFVNVLDDKGCTRLEQDLPASPQAFLDAVKPFRDGLVVGCECMFAWYWLADLCEAERIPFVLGHALAMKAIHGGKAKNDRLDAQKIAGLLKGGFFPMAYVYPKAKRQTRDLLRRRSFFVRQRAQLIAHIQNTNSQYNLPPFDKKLTYKGNRTAPIADRFEHPSTRLSITTDLNLIESYDTQIAALESHLVKSAKVDDPATFQFLRTVPGIGPILGLVMLYEIDSIRRFAEVGNFLSYARLVACTHESAGKVKGVGGRKIGNAHLKWAFSEAASLMLRSFPAAKSWMQRQSKKRGAKKAHAILEAKIGRTVYHLWRKQTAFDGKKFLAS

SEQ ID NO: 433598 - protein, 426 aa, unidentified
MARYVGLDVHKRTIAACMLDSEGRPVRRASFDCTRTAISKFAQEQLEHSDVVALEATTNSWAVAEILEPYVARVVVSNPLKTKAIAESTVKTDKVDSQTLAQLLRVGFLPEVWHPSGPFQLLRQLTVFYASLINDRTRVKNRLQSLFHRRLIHCPVSTLFSQAGVRWMDSLELSEHDRLILELAKQQVFDLNAKIAEVEQRIARLAQNDHSIKLLMTLPGVSLMTAACLVGAIGEVARFRDGDHLAAYFGLVPRVKQSADHCYYGSITKVGNNQVRKMLVLAARNLRTHPGPLGAYFRRMAKHKHINVAATATARKMVTVAYLILKNGEPYRYAQPATTSQKFGQLHMLATQSKRAAVRVEAQPGEPVPPAGYRLERKPSLDQVLVRDGLSPIRWQAVPKGEQVVIEKFRDYIEGIGKPSATVRKG

SEQ ID NO: 433599 - protein, 416 aa, unidentified
MNAVGIDVSSRKSTVAVLRPLGEVVCLPFDVTHDIAGLASLAEKLKALDGETRVVMEHTGRYYEAVEKALHEAGLFVCAVNPLLIKEYGANSLRRVKTDKADAVKIARYALDNWADLRDFTPMDAIRYDLKTLNRQFQLASKQRTASANNLIALLEQSFPGIRKCFDSPVRSDGTQKWVDFAHSFWHVDCVRKQPFPAFCERYRKWCKRHAYLFKLSNAEEVYALAKRAVVLTPKSKVVKVLVQEAANQLSSISRSVEVYRAEMDRLAAMLPEYPVVMAMYGVGKSYGPQLMAEIGDVRRFERKQALVAFAGIDPMPNQSGDKNVRSNKSSKRGSPYLRKTLFNVIRTYLQCAPQDEPVFQFLNRKRAEGKPFYVYMLAAANKFLRRYYAKLRDYFALLDTLQPVAPIPAILKATL

SEQ ID NO: 433600 - protein, 398 aa, unidentified
MSMFFVGIDVSKDYSSAQGLDREGKKLFYLEFAMNGEGFSQFLRVLKAHCEDLSGVTVGMESTGCYHINLFAFLCSEGMVGVVINPLLISNFARLSLRKTKTDKKDALTIAQFLLAHRGELSRVSYCQSSQDLKDLARERESLAVMIVAGLKNDVRRLLQMTFPELEHRCKLFTETMLRLLVKFPSARTIRMAKPKEISKALIHAEGKRKRVFISAEEIIKLAKASVASESVAKEWILSEKIETLLYLEQKKARMTEALVEACRSMRVDELDIITSVDGISKITGSTFLAELGDIETFRSYKHVIAFAGLDPSIHQSGQYEGISRLSKRGNRHLRRVIFLMTLCAVRSQNIFREYFLKRKGEGLPAKKAILATAHKLLRVLFAMLTSKSYFRKEVVKV

SEQ ID NO: 433601 - protein, 345 aa, unidentified
MEIRTIGIDLGKTVFHLVGLNARGEVVVRKKCSRTQLPRFTSNLRKCLIGMEACGGAHFLGRALREQGHDVRLMPAQYVKPYVKTNKNDYIDAEAIAEAVTRPTMRFVPIKSDDQLDLQSLHRVRERWVIRRTAVINQIRGFLLERGITMRKGRKHLEASLPGILEDAENKLSGALRALLTQLRIEMQYLDRQIEECDQLIVRIASELEPCRRLLAIPGIGPVIATATIAAIGNGAAFKKGRGFAAWLGVVPGEHSSGGKQQLTGTSRRGNKYLRKLFVLGAHTVLLQRTKQSPGLSTWLASLIARKRKQVATVALANKMARMVWAVLFKGEAYRPPLVPQLNAA

SEQ ID NO: 433602 - protein, 349 aa, unidentified
MTNIQLKETVNELKPSLFAGIDVGAEELVLVIRKNGKPFDPQKFANSPADRARLVKKLVKLPGIIVCLEATGVYHFDLSIALHDAGVLLMVVNPKASHNFAKVLMKNGKTDAVDADTLAEYAARMDFVAWTRPSDETIALRSFARRINALTGQKADAKNYLHALIATQETPKSVLRDARLAITQLEKRIDRLTAEALILIGKHPELERILTLLIGIKGIAETSAIALMGELLLLPPGLSHREWVKFAGLDPQAFDSGKSVHKKTRISKAGNRHIRSALYMPALSAKQHDPHVKAYFQHLVANGKTPLQAVCAVMRKLLHAIHGMLKHDKPFDNSRFYAIPTIAGLSNSM

SEQ ID NO: 433603 - protein, 415 aa, unidentified
MEVVHPRCAGIDVSKRDAKVCIRIQGSSGRRTSSTVTTWGSMTNQILALRDHLAAQQVTVVIMESTSDYWRPFYYVLEADFEVMLVNAREVKNVPGRKSDVSDAAWLADLGAHGLLRASFVPPEPIRQLRDLTRARTHITAERTREVQRLEKLLESAGIKLSSVASDITGVSGRLMLQALIDSHGAADPAVLADLAKRRMRSKIPVLTEALNGYFTEHHAFMTRLFLDRIDAHTRDIELLSQRIDGLMTPFLPARALLESIPGFSQTVAEIFIAETGGDMTQFPTPEQLASWAGVSPGSNESAGRVKSTKTRPGNRYLKGALGVAALNQAKSKKTYFSAKFRHLAPTRGPMKAIVAVEHAMLIAAWHMLTNSEFYRDTGADYYTRRDPARTKTRAVKQLEALGYTVTLQPLPQAG

SEQ ID NO: 433604 - protein, 317 aa, unidentified
MAKHTTICAGIDTGKRKLDIAIDGRAEQLQVNNTAHGHEKLIAWLRQHRVKRIGIEASGGYERAVVAALRRNRFVVVVFQPAQVRAYAAFHLQRAKNDKIDAALIASCTAAVKKIHAPPDPRLEPFADHLTMIDQISEDIARLKTRREPCRDPRIRQLWKEEIARLKKLEKTELKSLVAAIRQHRDLAQRLDLIYSIDGIGLRTAVAILVRMPEIGRITREQAAALAGLAPYDDDSGNLVGVRHIAGGRERLRGALYAAAFAAAFHWNTQLIALYKRLNRAGKLHKVALIACARKLLIFANTVVARGTPWTTQAATA

SEQ ID NO: 433605 - protein, 441 aa, unidentified
MKTYYLGCDVSKGYADFVILDSNKKIVENNFQLDDTFNGHNQLYQILTDFYKQNPSSSILSAVESTGGYENNWFNTFAKLGEVLNLSVVRLNPLGVNYSQKANMNRAITDEISAYNIAEYLINHQSKIKPNTKSYYSSIRKQWIFVKLLVKQRVQLLNQLESIVYTANTEVLIYCKHSTPNWLLLVLKQYPTAKRLARANVSSLVKIPFVSREKAEILIAKAKLSISSSNDQTTETIIKATVGQILQLAKVIAYHEKLMSESCNIPEVKLLESFNGIGAYSAVGLLLEIGAVERFASSKKLASFFGLHPTLKNSGDGRAASRMSKKGRREPRVILFNIARTSITYNPLIKEIYEKHVKRGMPKMAALGVVMHKILRIVFGMLKNKQSFDPTIDRKNQEKCEPKKEVEKISKARRYQSYDTQAPVSRRQGSKRKEEKKSQVL

SEQ ID NO: 433606 - protein, 395 aa, unidentified
MLYLGIDIGKNNHEAGLVDEDGAHRGKSLRFSNDQKGFSSLLRFLEQKVGENEDLCVGMEATGHYWLSLYSFLHGQGFRLHVINPLQSDSFRNFHIRQVKTDSVDCFLIADVIRFGKFSETRLADEDVLVLRNLARFRESLKDSCSDYKRQVVTVLDQVFPEYDSLFSNVFGEGSKAFLKTCGTPEQALDLDTKSLAALLRTASRGRHGAEKADEIKSLAGRSVGMTLCKDAFAFQLKILIEQIEFTERQIGEIDKRLAAQLKKLNSVILSIPGVGPATGAIILGEIGDINRFENPKKLVAFAGIDPTVSQSGNFCGTHNRFSKRGSPHLRRALWMSAVVAARFDPVFKAFYEKKRSEGKAYGTAIGAVARKLTYAIFAILKTNRPYEVRMNPEA

SEQ ID NO: 433607 - protein, 419 aa, unidentified
MRRMLERCAALDVHKAQVTVCARTLGVGGEIEKLISEFSTMPIDLLALRDWLKQLGVTHVAMEATGVYWKPVYYVLEDDFELLLVNAAHVKNVPGRKTDTLDAQWLCQLLECGLLRASFVPPKPIRELRDLTRYRKTLIKERSQEANRLHKVLEDAGVKLACVATDVLGVSGRLMLEALVSGTRDPQVLAELARGKPRAKLPALKQALNGTFKPHHALIVSHILAYLDYLDETIAALSEEIDGRLSPLAKKAENLCTITGVAERTSQVILAELGADMSRFSSDRHATSWAAVCPGNDESAGKRRSGKTRKGNPYLRTALIEAANAAVRTKNTYLRAQYEQVKRRRGHKKAIGAVAHPILVAAYHILKDDVPYQDLGGDYFARHADPARITKRLVAQLERLGHTVTPQTSTTPQTATAPA

SEQ ID NO: 433608 - protein, 424 aa, unidentified
MRSIGLDVGRQFAEAAAIEPGGEVHRLGRITASPAGLRAFAAGLGPNDAVVLEATANTWAIAELLAEHAGRVVVSNPLRTRAIAAAKTKTDQIDAATLAQLLAADYLPEVWQPDAATQALRRMVAHRAGLVRGRTGARNRVHAICARRLLSAPVSDLFGVAGRAWLDRLVLEPDERLALDAQMRLLAALEVEIDAAERAIAAHVLDDRRVRHLLTIPGVGLATAASLVAVIGDVGRFPRPHKLVSYLGLDPRVRQSGARPAFTGHISRAGQAHARGLLVEAAHAAVKVPGPLRGFFVRTRGRRGTGVAIVAVARKLTVLAWHLLTDDVDYRWAPAVRSAEKLRRLELLGGASKRFDLRGRREGVKARRAAELVRERVVLEQAEAAYVALVAARRTRHAKDAAATNGERLDGPALNGPGPAARRS

SEQ ID NO: 433609 - protein, 322 aa, unidentified
MAMLSFGGIDVSKDRLDITVLPDEQCSSVSNDAAGWAELVEQLRGSSITAIGVEASGGYERGVVRALLAANLSVRKINPFKLRQFAKASGTLAKNDRLDARMIASFVAIMPTRPAQRQAPMIEQLAAMLTVRRQLSDHKVATENASKLLEDAMLRRLSRRRVARLTADIELLDQRLVEIVTADAALAYRFRLLTSMPGVGAVLACTLIALLPELGQMSRKQVAALVGLAPYDFDSGKLKGRRCIWGGRARVRHVLYMAALSASNWNPELKAFHDRLEATGKKPKVVIVAVMRKMITMLNAMLRDGTTWVDRYNGRRSVPTAR

SEQ ID NO: 433610 - protein, 351 aa, unidentified
MTQQTATEAIATIGIDLGKTTFHLIGMDARGRIVLRRKVSRGQLLPCLANVPVCLVGMEACAGAHHVGRQLAALGHDVRLLPAQYVKPFLKGHKNDYRDAEAIAEAAQRPTMRPVPLKSAEQLDLQALHRVRSRLVGQRTAVINQIRGFLLECGIAVRQGPAGLREALPTLLAQRTDVLSPRMIHLIEDLAGDWHRLDERIDAITRDITALARQDVGCQRLMGIPGVGVITASAMVAAIGTGAAFAKGRDFAAWLGLVPKQISTGGRTILGGLSKRGNRYLRTLFVGGAQVLLQRPRRWDGHGFGRWLQAAEPRLHRNVLAAALANKLARIAWGVLSHVNGYDPEFAARTA

SEQ ID NO: 433611 - protein, 407 aa, unidentified
MVAVMIGVDPHKGSHTAVAIGAAGEALGELRVRASAAQADQLVAWAAGWPERTWAVEGARGLGSLLAQQLVAVGERVLDVQPKLAARVRLLAAGDTNKNDPNDARSVAIAALRSSARREVKLDDHAAILKVWSKRHRDLGRTRTQVACRLHAVLCELVPGGLSKDITAAHATRVLESVKPSGAIVLARCELAAEFLDDLRRIDAQMHDTRKRLTSAIRATGTTTTGIFGAGPVIAATVIGCAADVSRFASRDHFAAYNGTAPIEVSSGNRKIYRLSRRGNRRLNHAIHMAAITQIRYRHSDGRAYYDRKLAEGKTHKEALRSLKRRVSDAIFARLQADARRAAASARTEGPGGQPGSDSVASAAGSHPEHRLFGPATPGPQSTLRPRPDPQTGKAHARAKRKTTRTP

SEQ ID NO: 433612 - protein, 371 aa, unidentified
MSESKGITYAGLDVHKSGINVAVILPGSKQVDEEWQLVNDARSRARMVRKLERLGGERVCVCYEAGPCGYALQRELRDAGLECTVVAPSLIPAKPGDRVKTDSRDARKLAELFRAGLLTEVHPPTVEEEAVRDLTRAREDAVHDLLSARHRLTKMLMRHGFVFRQGTNWTQRHRAWLKGVRFEVRELQEVLDNYLLGVEQVEERLKHLDDRLVAVAQSERYADRVGWLGCLRGVDTVTAMTLLAELHDISRFTNARELMSYLGLTPSEHSSGGRTRRGSITKAGNGHVRRVLVEAAWNYRHRPAVSAHLARRRKAQPAQIIAIADRAQQRLYRRYYRLKEGHHKHHNVVTVAVARELVGFVWSILQHGKAA

SEQ ID NO: 433613 - protein, 344 aa, unidentified
MSEVSMIGLDISMHVFHAHGVDGRGRAMFRKRISRGKLLDFFATQPSCTVALEACGGAHHWARQLAQLGHQVRLIPPAYVKPFVKRQKNDAIDAEAICEAAQRPSMRCVAVKSEEQQAAGMVFRTRDLLVRQRTQLINAIRGHLTEYGWVAPKGPSHVAMLAGLIDEEEMANSLPGAARMMFRVMLDLLSGLSRKIADLDKEIARRAREDEVSRRLMTVPGIGPISATAIVALAPPAESFAKGRDFAAWLGLTPLQRSTGGKQKLGAISKMGERTLRRLLIIGSSAVVKQAGKRGAPRGSWLEQMLARKPRMLVTVALANKMARIVWALLVKQETYRAPVAARA

SEQ ID NO: 433614 - protein, 314 aa, unidentified
MDVLGIDVGKDFLDCELLTGKPARKKVPNTIRGFEQLAKWLLNRKVKKVHACMEATGGWSEELAFFLYERGHVVSIVNPMQISAFGQSELSRNKTDKVDAGIIARFCQAMKPKAWDPPTPGERRLQHLVRRRRGLIEMRTQELNRLEAPGVDDIRESVTSLIEVLNGQIEVMEAEIRATIAKDDDLRGKRDLIESIPGIGEVTSSTLLAEAPHIENFQKKALAAFVGVHPQLRESGRSKKKSRRTRIGKQAIRPVLFMAAMVALRTNPIVRSFGIRLRERGKTEMQIIVAAMNKLLTLVYGVLKTGRPFDPHWA

SEQ ID NO: 433615 - protein, 422 aa, unidentified
MKVVYPICCGIDVHKTFLVATMIKTTNAIEPSYSKKRFSTFNNAILQLKQWLLENDCHDVCMESTGKYWVPVYNLLEDVIAVTIANPKWVRAVKGNKDDVKDSKWIGDLFRLGIVPGSFIPEKNIRILREYTRYRAKLVSCKSSEKNRFQNAFTVCNVALDAVVSDMFGKSATAITDYLMTSDTFDSKTCTSFLKRSLKKKSDAVIESIQGYQMTCEQKDRMIMIKSHLDFVENSISEIDQKLDQMMVPHEHLITLLSTIPGVKRSSAITIISEIGTDMTQFSSSKRLCSWAGLTPGNNESAGKKKSVRITRAGIYLKPALVQCAHAAVKSKDLPYYRIKYERIFKRRGKKRAIVAIARMILTAIYHMLTTGESFNPCDLYKIDMPQEIKDQQKSKAIKQAFKLLISSGYLASDIQKLSTGS

SEQ ID NO: 433616 - protein, 358 aa, unidentified
MKYVGIDIHKKMCQAAIIDDEGELLDEIRFRNDVEGIEDFAMKLTTFRDEVKAVVESTGNLWIQIHDRLEEHGFNVVLSNPYKTRLIAEAKIKTDKVDAKTLARLLRADMLSTCYIPNKEERSRRELLRHRMRLVKTRTEVKNRIHSLLDKHGLRMPHKTPFSKKNVAWLRERSLGFMDDAILRSDLAVLESVDEQVGLMEEKIAVLAAEDPRVRLLMTMTGVGYFTAMLLLAEIGDIDRFGSDKRLASWAGLAPSVHQSGEKTRIGGVGGPGNKRVRWVMVQCVHSACRSDPRLRSFYERYSKRKGGKKAVVAVAHEMIRIVFYMLRDGEAYRGGNRGVMERKFKSLERMALNGLRN

SEQ ID NO: 433617 - protein, 451 aa, unidentified
MAKKTLEMDIVNPNCAGIDVGSRSHYVAVGQSLDDVKEFGVYADDLTAICLWLKEYEITSVAMESTGSYWQNLYAELLKHGFEVLLVNGKFTKSAKGKKTDVKDCRLIQKLHSVGILTGSFLPDEITEQLRTYCRQRGNWLDLAAEASHKMQKFLRLLNFRLDVVVNDVCGLTGLSIIADICKGNLDPEKLSEHRHHNCRKSKEEIAKALKGNNRTDYLFGLQQEYDSYLYFQKKIEACDKEINKFVKTQINQDPDKKKLKTTEKKHKKINKNTPKCMDINQMSYQYFGGVDLMAIEGLSHSTVLTIISEIGPEGFKKFETAKQFTSWLRLAPNNKISGGKVLSHRTPKGSNRLKIALRQAANAIGKLKDTHLSNFFKRIAFRKGRSAAISGTARKLATIIWIMVTKKIPYTPPTEYLFLDEKRKLKLVKQIRKNITKFDIKAEDLGIVTI

SEQ ID NO: 433618 - protein, 313 aa, unidentified
MEMSESVVVGIDVSKDRLDVALHPSGEHFAVSNDHAGLEELIARLGASRPTIVGLEATGGYEMLAAGSLSAAGFGVVVVNPAQVRAYANALGRRAKTDPIDAAVIAAFVLATKPAIRPLRDAETQALSELIARRRQIVQMVVAEENRLRMALAKQAQKSIKRLLTALRRELENLDADLDSHIRKSPVWQVREALLTSVPGVGPTTARTLLAELPELGSLDRRQIASLAGLAPWTRQSGKWKGKSFIGGGRGKVRAVLFMAALVASRYNPDLKAFRDRLVAAGKPKIVATVATMRKLLTILNAIIRDGRPWQNA

SEQ ID NO: 433619 - protein, 359 aa, unidentified
MNHTVTLNPTPSIAWLGLDAHSKNCVLGQLDEQGREVKWWKFPTQPAKLIAQIHAIPAPDKRLMLEESNLARWLGQLLQPHVQQLVVCDARRNRLISHDHHKHDRRDAFALARLLRLNEFKPVWQPTEPQRVLFKRSAQAYENAVQRQTRLKLQLKAVFQHWGLFPTGRPVFSQTGRAPWLKQLPYDALRSQAEILYALLDQALASQTQCRRLLVQTGWPFPEVKRLRTVPGIGLVGGHLFVAYVQDPTRFKKFSQLTRYCRLGIRDRSSDDKPLGYQQLDRQGVGTLKAITYRAYLQAAKRRSGPVWEFYQRSLRHTGSSTHARLNTQRKILLTLWTLWLTGREFDPVKFSRSQPNDV

SEQ ID NO: 433620 - protein, 318 aa, unidentified
MNSPSVTVGIDISKNRLDLARFPQGDTFSVAYTDTGLAKMLKRLRSWSPQVILLEASGGYEYGVVAALVAAELRPVLINPRQVRDFARSLGILAKTDKIDAKVLAEFAFRVQPEPRPLPAAQQQELNHLLSRRRQLLEMIQMEYNRREVSPFPRVRQSIDHNLDSLRRQLADLEREIDDFFHQSPLWVQQDALLRTVPGIGPQTALSLQAWLPELGALTRHQIAALVGLAPFNRDSGVFRGRRMIRGGRHKVRQALYMATLSAVRFNPVIKALFNRLTNHSGKPGKVALVACMRKLLIILNAMVKNDTPWHCITPLTS

SEQ ID NO: 433621 - protein, 343 aa, unidentified
MEHYAGIDVSLERSSVCVVDATGKIIREAKVASEPEALAGFFAGLGLAVTRIGLEAGPLSQWLHAGLSETGFEAVLLETRHVKAALSAMIVKTDRKDARGIAQLLRMGWYRPVHCKSPPAQEVRALLVGRKLLQGKLLDVELGIRGLLRGFGLKLGEVSKGQFAARVRELIAGQPMLERVVEPMLRAREALRCEFHVLHRAVLAIVREDAVCRRLMSVPGVGALVAITFTSAVDDPARFRRSRSLGAYFGLTPKRYQSGETDVTGGISKAGDTMVRTALYEAANVMLTRAGKFSTLKRWALEVAKRRGPRRAKVALARKLATVLHRLWVDGREFRFGKEVAAT

SEQ ID NO: 433622 - protein, 391 aa, unidentified
MDKAWVGVDAGKEFHWAHVLDDSGRELLSRKIENDETDILKLIDEALLLAEEIVWAVDQPRGGAALLLALLWERNQRVLYVPGLSVDRARDAYRGESKTDARDAHVIADQARMRTDLGELEPGEQEIVELQLLLGRRRDLVTDRGRTITRLREALVASFPALERALDLNRKGPLTLLTHYQTPMHLRRAGHKRIAAYLRNRGVKGANEVADKALAASKAQSVTLPAQEVASRIVADLAGEILALKGRIEGIDEEIGRRFLARAEARILTSLPGMGPILGAEFLVAVGDVSAFESADRLAAYAGLVPAARDSGKRVGNNKRMRGGNKALKRVFYQSAFASLRGSPESRAFYERKRAEGKRHTQALIALARRRVNVLWAMLRDGTTFESRSAT

SEQ ID NO: 433623 - protein, 348 aa, unidentified
MSEHYAGRQIVGMDLHRRRSVLVRMTDTGEQLETIRISNDPEYLKAVMARAGEAPEVVLEAAYGWYWAADTLAELGATVHLAHPLGVKMFSYRRVKNDQRDAADLADLLRMGRLPEAWIAPPATRELRGWVRHRAKLVGLRSSLKCQVHGVLAHAGIWVPMSDLFGVAGQQLLAELSAGTRLSVESRSRLDSALRVITALDFEIDLYTQLVGGRLRTDPGYRAIQQIPGIGPVLAAVFVAEIGDITRFHRPTELASWAGLTPRHHESDTTVHRGRITKQGDRLVRWAAVEAVQRIPGHTRLGQVRDRVGERRGRNIGVVAAARELITLVFYGLRDHHLRCLPARARAA

SEQ ID NO: 433624 - protein, 374 aa, unidentified
MGHDSEAFIGIDTAKLRNAIAVAEAGRNGEVRYLGEVDTSEAATRKLVAGLSARYRRLTFCYEAGPTGYGLQRLIESLGHTCIVVAPSLIPKKAGERVKTNRRDAVGLARLLRAGELTAVWVPDGRHEAMRELTRARDAGRGDLTRKRQQISSMLLRLGRYYPGIKTWNARHRSWLANLRLDHPEQRFVLEEMLQAERQAVERIGRLEQAIREALGDWSLAPIVPALMAMRGIDLVAAVTVLAEIGDLSRFESPRQLMAYLGLVPCERSTGESVKRGSITKAGNGRARRVLVEAAWAYRHPPRVGYEKQALVSAAPRPAREIAWKAQVRLCKRFRALSRKGKTSTVVATAIARELAAFIWAIAREVGKTPARAA

SEQ ID NO: 433625 - protein, 363 aa, unidentified
MNEITTVGVDLAKEVIAVCAADGSGKTVFTRVFHRDAFAAWAVQLPPCGFGMEACGAAHHWARWLTSHGHTPRLMAAEFVQPFRKSRAAKNDRNDAEAVLTAVRQPNMRFVAVKSLEQQACLSWHRMRQGFSEERTALINRLRGLLGEFGVWRGRSAEVFTRALPLLEHDEALPLMVRRLLTDTGPHLARLNEAIAACEMEIKSHIKTNVAAQRITAISGVGALTAAAVIATVTDARDFKNGRQFAAWQGLVPRQDSSGGKARLGHITKRGDTYLRGLLTQGARSALQAALTKEPLRRTRLQSWMVQLHARVGYHKTLVAIANKHARMIWAILAKGEAYDPDAWRRWTRSAPATPPAVCSIAA

SEQ ID NO: 433626 - protein, 338 aa, unidentified
MSLYAACDLHSNNTVLAVIDDTGSLRCRQRLPNELGLIDAALAPFRDGLCGVAVESTYNAYWLIDGLQAAGYPAQMVNTLAVPQYAGLKFGDDDSDARHLANLMRLGLLPTAYIYPREQRPLRDLLRRRMLLIQQSVRLLHSVQGYWARATGHRLSANDFRHLTRSQLSQTFRDPTELFAVVSLLQAWRSLQEKAHAMEEWLAEDLRRRSDLVALRTVPGIGLVLGLTIVMESGNVSRFDDVGQYASYCRLVPAGRYSNGKLKAAGNRKCGNRYLAWAWMEAANFAIRFDPAIRGWYQRNAARKPRLVALKAVAHKLARAGFYLLRDGGRFDVHRAFA

SEQ ID NO: 433627 - protein, 418 aa, unidentified
MKKHSKSAQRSEPSVKRAKARGPAQRDVKEVLAEVLGKLTGKLNAPAISTSAKENHRANTVAPNRDRLTVGVDLGDRWSQYCILGLEGETLAEGQLRTTQEDVKEFFQALTAARVVVEVGTHSAWVQDVISEWGHEVLVANPRLMEGSKRRKRKSDRIDAHKLARLGRVDPQSLHPIRHRSREVRQDLVVLRARDALVSIRTELINTTRGLVKSMGTRLPRCSSPSFAEKVKDGIPDEVREALLPLVQLTETVNDGIARYDQKIEELGQKKYGHTTLLRQVKGVGPITSLAYVLTLEDPRRFSSSREVGPYLGLVPKQEDSGDSQPQLGISKAGDRMVRRLLVGSSQYMLGAFGPDSDLRRYGLRLCERGGKNAKKRAVVAVARKLAVLLHHLWVTGEVYEPLHHTGAETRTAQAAAA

SEQ ID NO: 433628 - protein, 342 aa, unidentified
MSTIQTIGVDLAKNVFSIHGVDAYGKCVLRKTVKRNKLLDTFAKLPPCLIGMEACSGAHHWARELLKLGHNPKIMASKFVIPYRQNEKNDANDAEAICEAVSRPKTRFVSIKSEEQQAVLCLHRIRQGLIKTRTATINQLRGLLSEFGIVMPQGRYSAQNTIGSVLEDAENGLPILARELLQDLSNKIQNLNLEVLHYDRRVSALVHEMASAKALMDIPGVGEHSASAIVATVNDAKQFGSSRQFSAWIGLVPRQYSTGGHVHLGRISKRGEKHIRTLLIHGARAVIARCKEKTDRNSIWLNQLVERRGYKRAAVALAAKNARIIWALLTTGKEYKINYVNG

SEQ ID NO: 433629 - protein, 402 aa, unidentified
MDVHKNFIIACIATTNGNGVTTYESKRFSTFTGDLRRLADWLAGKNCRDVCMESTGKYWIPVFNLLEQSCNVVLAHPKYVKSIRGQKTDKKDAQWIADIFKHDLISPSFIPPFDIRQLRDLSRYYTKLTGFTAGEKNRAQNCLTVSNIQIDQVFSDVFGMSASAITEQLLEHPNGDFDVAPFVNHRVKTPIPKIQAAIEGSICLQQAEKLRLIRQHMDSIQSCKASLDAFIDKCALQFQPQIELVMTVPGIQRFSTISIISEIGVDMSVFPTAKQLCSWAGLVPQNDQSAGKKKTTRISRAGAYIKPLLVRCSLGAIASKKHPEIKERYTALKKRRGHKKAIIAISRMLLTAIYAILKKAEPYDPSHYRALDFPPTNRSITPEQAMRLARRLGYTIVEAQVL

SEQ ID NO: 433630 - protein, 339 aa, unidentified
MRLYAGCDLHAKSNYWGMVDEGGGRVVRKKLGNDGGLILRFLEPYRGELAGVVVESTFNWYWLVDLLMEAGYEVHLANPSAIQRYEGLKHGDDEQDAFWLAQMLRLGVLPEGYIYPRQERPVRDLLRKRGHLVRVRTSLLLSLQNIVDRNGGGRLRGGDLKQCRGDRIDAILEGNEDLVLAGRVSKEAIDFLTGQIKEVEAVVLGRVGIKEVYRYLLTIPGVGKILALTIMLETGPIDRFGQVGDYVSYCRKVPSQWLSDGKVKGCGNKRNGNRYLGWAFSEAAELARRFYEKPRAYYHRKMQRTNAMVAHNALAHKLARAAYYVMRDQVVFEEERLFS

SEQ ID NO: 433631 - protein, 447 aa, unidentified
MTTPFLPVLDPLAAFVDVGSEQMFVSLAGGPPEVFGTVTHELHRLRDWLQERKVKSVAMEATGVYWLPLYGVLEAAGFKVVMVNGKQTRNLPGRKTDMKDCQWGATLHAHGLLQAGFVPPAQIRRLQDYLRLRADHLVSAAANVQHQQKALERMNVKLHDVISSLVGTSGSKVIAAILAGERNPDRLLALCDVQIQKKKAERVKESLRGTWAEEHLFALRQAVENWEHYQRQIAACDQRIEAVLREINGPDQPANPPPPIASSKRAGANAPEIDDLHSLLVKLCGGKDLTVLPAHTDYSLLQLIGEVGTDLTQWATEKHFTAWAGLAPGSHQSGKRKGSVRRKRNRAGRLFCVMARSLARSKHIALGGFYRRMAARRGGLVANIALGRKLAVLFWRVMVKGLSFAEAGLKAYEEQVLETKRRALCRLAKQLGRVVMPSLAEMQTKPA

SEQ ID NO: 433632 - protein, 422 aa, unidentified
MNTERIDSDEIAAFVGIDWADGEHEVCLMVAASGPPERSCLKQSPEALSEWAHALRDRFGGRKIAVAIEQRKGPLIYALMSYEWLVLYPVNPKSLARYREAFSVSNAKCDQTDAELLMEMVRSHRDRLRVWLPEDEDTRLLQMLVEERRRVVDQVTRLTNRLTSVLKEYYPQALEWAGELKSEQALDFLSKWPTLEDLKRARPATVEKFYHQHGMRNKEKLQGRLAGIGAAKHLTRDRAVVRASTMKMRVTVEQLRVLLKATHEFDVQIEELFEQHPDASLFKSFPCAGKVLAPRLASAFGTDRQRWDDAAEVQKFSGIAPVTRASGQTRVVEKRRACPKFLRQTFMEYAAQSVKKSLWARCYYKAMRAKGVKHRAALRALAYKWIRIMFRCWKERIAYSEEAHQAALVRANSPLASRLAGA

SEQ ID NO: 433633 - protein, 329 aa, unidentified
MFEQYLGIDLHKAFFQVCAVNASGERLWEARLPRTRDGVAELLTRCTRQTAVAVEASTPTWHFADAIAADVGDLRIVDPFKTKLKAGFAAKTDRLDARRLADALRRDSVVGIYHPSVAIRELRELCRYRHALVRTQTALINRLRAVLLRQGLADARRLARTTDDAWLERLAVPPRAQASIAGLRQVLTMVRTQIATAEAEVRRVASADRISVGLQALRGIGPVLALMIRAEVGEMQRFPTGGHLASYAGLVPRVAQSAGRRWTGRITRRGSPWLRWALVEAAIHGHARTDRIGRWARGLAGRKGALKARVALARVLCDELHRHWLAIEA

SEQ ID NO: 433634 - protein, 387 aa, unidentified
MHTVTSTTVVATAARANDNTLFASLELSKSKWVVTINSPGSEKFSKHVIEGGDGAGLLELLSRLRAKAEQRCGAGVKVVVIQEAGLDGFWIHRLLLAAGIESHVVDAASIALPRRHRRAKTDTIDGETLLRTVMAWARGERRVCSMVCAPSPEEEDRRRLTRERDTLLKERIRHTNRVKGLLSSQGVRDYHPLRRDRFERLETLRTGDGRELPPLLKVEIRRELERIGLVTTQLAAVERARDALIRTDAEEPNNPAALLLKLKGLGPEFASLLWLEALFRSFVNRRQVAAYGGLAPSPWQSGAIERDQGISKSGNRRLRKTMIELAWLWLRHQPDSALSRWFRARVGPAKGRVRRIAIVALARKLLVALWRYVTQGVVPEGAVLKAA

SEQ ID NO: 433635 - protein, 344 aa, unidentified
MDYSMGIDLHRKYFVATIVDEDGEVVRRDRVSTDRLAIEGYLGGLDGERPGKAVMEACYNWSYLYDQLESEFEEVLLAHPLKTKAIAEARIKNDVLDSETLAQLLRAGLIAQAYAPPKETRDVKNLLRYRSSIVGARTAFKNRVHAVLARNHVEHPALRDLSDIFGKKGMATMRSLELYGHDTAILNGLLDIVDEFAGRELELRKQIRAMNREDDITRLLMTVPGVGDITALLIRYEIDDIDRFLSPGKLCSYAGIVPCTLSSGGKTYHGRITKQGNRWLRWGIIEASHKATVTSPSLAAYHARIKGRRCSSDATVALARKLLKIVYCVWKERRPYYEGPVRIG

SEQ ID NO: 433636 - protein, 467 aa, unidentified
MKHNRRRSPGKPRMSRTLLDHINPNVAGIDCGAAEHFVAVPPDRDPTPVQAFSTFTTDLLRLADWLTTCRVTSVAMEATGVYWIPIYEILEARGFKVLLVNARHFKNVPGRKSDVSDCEWLRELHSVGLLRGSFRPSEGIVALRTYQRHRQTLVETASTFIQRMQKALVQMNLQLPLVVSDITGATGLRILRDIVAGQRDPAHLAQHRDPRCRATRAEIVAALTGHYRPDHLFVLQQNLEGFDACQAQIAHCDTTIEGHLRTLTAAIPAPVAPLPASRSRRTTPKNNDLPFDLRAPLFHLTGGVDLTQIDGIASLTALKLISEIGTDMMRWPTEKHFTSWLTLAPNNKITGGRVISSRTQPSANRAAATLRMAAMTLGRTQTALGAFYRRMAARLDKPQAITATARKLAILVYRALKGELVYQDPGAATYDAAQRSRILRRLRQRASTLGFELVHRATGEVFAAGVS

SEQ ID NO: 433637 - protein, 276 aa, unidentified
MEQVTTIGLDIAKRVFQVHGIDGSGAVVVRRQLKRAQVVRFFGKLPRCLIGLEACGTAHHWGRQLQALGHDVRLIPPAYAKAYVHRNKTDPADAAAICEAVSRPAMRFVPIKNEADQAICAVHRVRERLIGQRTMLINMLRSQMAEFGSVVAKGPQHVKELIGELVEPASLPEPLRQALFGIVRLLAELKEQIAGLDKQIALWHKGNERSRRLAQIDGYGPILSSALAARVQQPERFRCGRDLSAWIGLAPKQNSSGGKIRLGAISKKGDAYLRRL

SEQ ID NO: 433638 - protein, 320 aa, unidentified
MTILTSPTVIGIDVAKAGIVAYREDIKTTQAIDNDRETLSRWLKALPAQSSIALEATSIYHLDTVELAHEMGHRVYVVDAYRLSHYRESIGQRAKTDPCDARLLARYLSSEQERLRLWSPPPQAYKVLKSLLHRRAELINVRVGITLSWSSEPLLKDELARQLKSFKQAEQAIQKLLHKVSKEAGITENIKRCQAIEGIGELTAVGLATAFMRGHFANGDAFIAFLGMDLRAKDSGKKNGPRHLSKKGDTELRRLAHNAAMAACRSATWKPYYESYLARGLAKTQALVILARKLCRVAFALMKNQSEYQPNLRLQGSPAT

SEQ ID NO: 433639 - protein, 347 aa, unidentified
MGVYIGVDFHARKQTVSYLTTEDGEIQQMELEHEKDYVRTFYEQFRGQKVIVGFESSGYAAWFEELLEELEYETWIGHAAAIRKFARRRQKNDRRDADLILELMVRGDFPRLHRYSRVSRETLQQLRYRQRLVKMRTMVINSLRFMVASRGVTLRGTLQSRPGQARLMQVALPGPLSQQRDELLRLLIEIQQKVETVEEWLKQKAEADPRVQRLRTHPGIGLLSGLGLVATLESIERFSHSRKVTAYVGLDPVEDSSGERRRMGSISKQGSRLLRLLLVEAGQVAARRDAELGQVYRRVTLRRGHATAKVAVARRLLVRAFIMLRDEIDYAEFCRRGVAARSSRGSA

SEQ ID NO: 433640 - protein, 466 aa, unidentified
MENNYILYVGMDVSKGKADAAILKVSDRRSVKPKFLRKKLSFKFVKSEVASFLETVRSYSDDNCTSICFALEVTGIYSTNVYDYIKANLYENESIKFLNTDFVNQWRIAHNIAKSDPLDAQTISTIIGTDLDVQYVNDNVFENKNGYQDLKALVHRHYQIKKIYSQEINRLIAQCDCLFPELQYVFEPKSAAFIAVLSSYPTTHDIINASRVEVFDVVYEATKHRCSMDKVDKLFELCQDTLVPDDISSYGKSIILDLVENIKNIKGQLKSIERYIKDIASLNPAYKLLLTITGCGPITAATVIAETGNIRRFKNADCFVSYSGTSPRNKRSGTSVETMGKISKKGSRYLRHAIYMIAEFARRHNPVLKHQFERIKNGNKKRHKLANIAIANKIARYIYSILKNKSSFVILHDHIMRLPEETRDTFFNSISLDFPKNTRKQIYQYSDINGELHRFVYIKTDEMIPA

SEQ ID NO: 433641 - protein, 343 aa, unidentified
MNDITTIGLDTAKSVFQVHGVDAIGEVALRRQLKRRQVLAFFAKLPPCLVGIEACAASHHWSRELTKLGHTVRLIPPRYVKPYVKSQKNDATDAEAICEAVTRPNMRFVPAKTREQQSILMLHRTRHLLVRQRTATINAIRSHLAEYGIIAGVGRNGVEALLKIIADEQDDRVPAIARDCLMALGAQLEMLKRQVLELDAKILAAHRNNEMSRRLEAIPGVGPCIATALVASIADPGAFRSGRQMAAWIGLVPKQNSSGGKDRLGGITKAGDRYLRSMLMLGALSVIKRAKQLGYTRRPWLAQLMARRPVKVAAIALANKIIRMVWAMMVRGENYREPVALAA

SEQ ID NO: 433642 - protein, 317 aa, unidentified
MTEISTAVAGIDTAKDKLDVAVHDRTERWQVENRLCGWRRLRSELTKAGVSRVGIEASGGYERGVVKHLQTAGFVVLVLQPIQVRAYARLHLRRAKNDALDAVLIAACTAAIDRPRIEPDARLAALADHLTFVEQIEEDIARLKTRLEHVDDGRIRKIVVADIARLKARRIAELLRIVGRLRDHDDLARRLDLVLSVPGIGERTALALVIRMPELGRISREQAAALAGLAPFDDDSGKHKGQRHIAGGRGRLRRSLYAAALPAAFRWNKTLIDLYARLTARGKAHNAALVACARKLLIYANTVVARGTPWVNKPAAT

SEQ ID NO: 433643 - protein, 353 aa, unidentified
MRKMQNYVVKDNRVFVGLEDSKRSWKLYVRCDGMIVHETSMPAEYDNLHSYLKGRYPDCEIQLMYEAGFSGFWLHDALMADGIDCVVTPPNKVTQEKVNRVKTDKIDARRLAVNLENNDYVSCHVPDSERREDRQMSRTLNQIQRKITSTKNQIRKFLDFHGLNGDMPAGAWSSRHYQSVKQLRLGRSLRVCLDASLKALDNLEAIRVELLAELKELCAKDRYRQAVELKQSCPGVGWLSAIRFTLEWGEMSRFAGGKEIASFTGLTSREYSTGDTVHRGRITGQSNGYVRAWLIQCAWRAIRLDPVLLAKFRDVWTNSGSKKKAIVAVARKLAVRMREIELTQQRYCIGVIE

SEQ ID NO: 433644 - protein, 349 aa, unidentified
MRFYNQPHRFYAGGDLHARTLFLHILDDQGRTRFEQNLAASPEHFLEAVAPFRDGLVVGVECMFAWYWLADLCADEHIPFVLGHALYMKAIHGGKSKNDRIDAGKIATLLRGGMFPQAYVYPRELRETRDLLRRRTFLVRQRAQFLTHIQNTNSQYNLPPLTKKLSYARNRTDPAIVERFPFESVQRSMRSDLKMIDVLDDETRELELYLTRHAKLDDPQTYHLLKTVPGIGPILALILLYEIHQIDRFPEVGNFLSYARLVRCAHESAGKVKGFGNKKIGNGHLRWALGEAACLMLRCHEPAKRWLQRKEKKVGKPTALGTLAAKLGRTVYHLWRKQQAFDARKFLTS

SEQ ID NO: 433645 - protein, 395 aa, unidentified
MNKPKHYLRFCGIDIAKNRHVFCVIDRNGQKIIKSRSFANTLEGYAKLKDTLKSIGQTRTILVGMEATAHYWYGLHDFLRRQGYQVAVLNPIQTAQQAKKNIRKCKTDKVDAIHIATLIKNGDYKAALIPSELAMTCRQLSRLRYRLVEQRARLKQFIWSRLQPVWPEYEALFSNPFCATGKALLYTAPLPKDVLELGKEQLSELIRKASRGRYGTQQADKVWQSAINSAGMQRGIDGARIGIRALLDQIGAFSPVIKTLEEQMGNIAKELPDYIFTLPGISLVGAVSLYGEIDPIKNFESPEKLVAFAGLDLGVFQTGNYDAPKRHITKRGSPFLRHTLWHMAFQAIYRQGDLRDYWLRKTADGLKFNAAVTSVTIKLCHITWRILTDKRDYLP

SEQ ID NO: 433646 - protein, 323 aa, unidentified
MSIVQSSFVPGVIGADVSKTRLDIHGLGELTSVANDRYGIRRLIGRIRRSRPQLIVVEATGGYERSLVHGLLDAGLPVVRVNPLRVRRFAQSRGILAKTDRIDARVLADFGRLNADQLRPMQPISDNARMLQELIARRRQLVEQSVANKNQREHVTLGSVRQSIDRTIKHLCKEIMLVEQQIQEIIDSDEKLSGRQRKLQSVPGIGARVSRVLVSELPELGELDRRKIAALVGVAPFNDESGGYNGPRHIRGGRATVRSALYMATLVATRHDPVIRDYYNHLKANGKPKKVALVACMRKRLNYLTAILSKRPPQAAERNEAGF

SEQ ID NO: 433647 - protein, 355 aa, unidentified
MISTKYIGMDVHKESISIAVRNSAGKVVMECVIETKASMILQFIDGLRGDLQVTFEEGTWAAWLYDLLKPHVTKLVVCDPRKNKSMREGNQSDKIDARRLAELLRLDHLTPVYHGEHGLRTLKELVRSYLTITKDLARVKSRVKAIYRSWAIPCTGKQVYARCHRAEWLGKINEPGVRRRAECYYQQLDALRVLRLGVRRDLLVESKKQKAWKRLCEIPSLGPIRAAVLLGILQTPHRFRTKRQLWTYGGLAIEMHSSADHRSVDGHLQRSRKNVLVRGLNRNCNHDLKNLFKGAAAVASSKPGPFEQFYAALVAKGMRPEMARLTLARKIATIVLIVWKRGVCFDAQYLKPQTA

SEQ ID NO: 433648 - protein, 347 aa, unidentified
MDVHKEAIVIAVENARGHVVMESIVETKASSILQFIHGLQGELHITWEEGTWAAWLYDLLQPHVHRVLVCNPRRNALLKEGSKNDKVDARKLADLLRTGMLRPVYHGEHGLRTLRELARTYQTLSQDLNRVMNRLKALYRGWGMACGGTQVYAPRYRDEWLGKIEHAGVRRRAELLYQQLDGLQALRRTLRSELLAESRKHKASKLLRQIPCIGPIRAARLVALMQTPHRFRSKRQLWTYSGLGIETHDSAQYRFVRGELQRAKKPQQIRGLNRNHNHEMKDIFKGAANRASCGVGPLRDFYVALLDKGMKPEMARLTLARKIAAIALTLWKKEERFNAEHLKTQAA

SEQ ID NO: 433649 - protein, 405 aa, unidentified
MDIIVERGAGLDVHKHRVVACIMGVGMKKEIRAFLTVTNDLLRLKVWLREHSVTHVAMESTGVYWKPVFNILEDTFDVILVNARHVKNVPGRKTDVLDSEWLCKLLRSGLVRGSFIPPKPVRELRDLTRYKRKLIQTMTAEKQRVEKILEDANIKLSSIASDTFGASGKKIIEELLKGKLRPDEMAELSKGRLRKRKEELKEALVGNVEEHHKRMIRTSLEHINAMEEILVTVEQKIQEKIDFHFKEEFELLKTIPPVKDSASVIIAEMGVNRGLFPTEAHLSSWAGMSPGNNESAGKKKSGTTTHGNLYLKTLLTEFAWIASKMKGTYLWSKYQSLIGRKGKKKTLVAVGHKILISAYQILKYRIPYKELGANYLDQRKKARIAKSYVRRLASLGYTVTVTEAA

SEQ ID NO: 433650 - protein, 391 aa, unidentified
MILVGIDVAKDKHDCFITNSDGEVLFDPFTIANNKAGFNDLLKKIQSVSKDLSKVKVGMEATGHYSYNILGFVLDKGFPTYVINPLHTNLFRKGQSLRKTKTDRIDARTIANMLLWDQSLQPYSLESYHNEELKSLTRYRFSKVQERSKLKTSVARLVNILFPELEPLVPTLFTASAFALLSELPGASYVADCHLTRLTHLLQEASKGHYGQEKAIEIRDAAKNSIGSVMPAKSIELKHTIALIRILDDEIREIESEIKTLMDKTNSTITSIPGINYRMGSMILAEIGDFKKFKSPDQILAYAGLSPSTYQSGQLTSSYAHMEKRGSKYLRYALFNAAIYVCHWDPVFKAYLDKKQKEGKHYYVAISHAAKKLVRLIYAMEISGRPYSKVA

SEQ ID NO: 433651 - protein, 318 aa, unidentified
MSSPSPLLHIGIDVAKDSFELAIEGETRTSNHPNTPEGRAKAIAILQKLPVRVAVMEATGGYERRIALEFHLAGIPVAVVNPRQVRDFARALGTLAKTDSLDAKVLVRFGAMTEVQPQSIISEESHAVRELVSRRRQLIEWRIAERNRFHQVSSRDVREGISLMLEAICREVESIDAKLDGHLDANPIWKRREEALREVKGIGPVTARTLVLELPELGQVSRQQIAALVGVAPMANDSGKHRGQRKTRGGRVGVRSSLYMATLAAIRSNEVIREYYQRLVGNGKRRKVAVIACSRKLLTQLNAIIRNLEKSQDSALPA

SEQ ID NO: 433652 - protein, 347 aa, unidentified
MSGTLNHHWCVGIDLHKDTLTACVFCRCCGEISFQKLPCKCRKQIAEYFAALPRPHTVAIETVGFYRWLWEMLEPIVEKLVLADATQARALAGRRLKTDREDAFNIAELLAAGRLPTAYAPPLEVQFLRDLTRHRHGFSRQHARVLCRVKSIMNANNRPGPARLESDGLIRYLKAQGEKLPTRHVAMLWQCVDQLALTERQIAEAERAIGEVVQRDSFQEVYPILTSFPGVALVTAATVMAEVGDFRRFTHRKAIGRFAGLNPRVFASGGKQRIGHIAKTGSPQLRWILQQAAWTAIRTDEAIRRVFLRIAKRSGRKAAAVAIARKMLTWMWVAVTKGEPYRTRIAA

SEQ ID NO: 433653 - protein, 452 aa, unidentified
MKENEIAMEIVNPHAAGVDIGSRSHWAAVGQKNEDVQEFGVFNEDLKRMALWFKEKNIKTIAMESTGTYWESLYAVLLSEEFEVILCNGKFTKNIKGKKNDIKDCQWIQKLHSLGLLSGSFLPDKQTEKLRTYCRQRALLLDSAASASKKMQKYLRLLNLRLDVVVNDICGQTGLAIIKAICDGENDPQKLASLRHYNCRKSETEIAKALESNGREDYLFALRQELEMYEMFQSKIEQCDQEIGKLLDQIVDGDDHKRQHHIESKPYKKINKNTPKNIDLNLKSYQYFEGVDLMAIEGMSYSTVLAIMSEVGLEGIRRFKSAKHFASWLRLAPNNKISGGKILSSKVPKGSNRLKIALRNAANAIGNLKESTPLRDFFQRINFRKGRVSAISATARKLAVIIYNMVAHNKPYYNPKEYLYLDQKRKLGLVKRIQKQITRFELSEDNFEFVTT

SEQ ID NO: 433654 - protein, 371 aa, unidentified
MNHVTSIGLDVHARSVTAVALDSITGEVRSQKFGYSPAEIAGWILQLDSPKAVYESGVTGFHLVRELREMGVDCIVGAVSKMHKPASDRRKKNDRNDAEFLARQLMAHNIVEVFVPDVETEGARNLSRALEDVRDDLTRAKHRLTHLLIRWGYIWNEFNEDGKRRGSWTHAHWEWIRGIELPDAAARESLDYYISEVRHIESQKKAIEKRVAQCASRPRWRDRVEALRCMKGIETVTAFALTVEAGVFSRFDSARAFASWLGLVPSEHSSGERASRGGITKAGNSHLRKLLVEASWHYTRATKERKRSLYDESVPAPISNHAAVGVKRLVERRRHLSCELRKRPVVANVATARELACWIWALGRMSEGALA

SEQ ID NO: 433655 - protein, 370 aa, unidentified
MGWSPLPKTASECQSGECKFPLMREATTMKATTIGIDLAKHLFQLHGVDQHGKTVLKRQLKRDQMLSFFTNLPPSLIGMEACGSAHYWANKLQGMGHTVKLMAPQFVKPYVKTNKNDAADAEAICEAVTRPTMRFVPIKSSEQLAILALHRARQGFIKARTAQANQIRGLLAEYGFILPQGITHIGKHVPELLEDSENGLPGTFRHLLMRLHEHLKMLDKQVNELEDAIVRWHKDSAASQTLAQLPGIGPITASALVASIGNAKNFKNGRQLAAWLGLVPRQHSSGGKQNLLGISKRGDSYLRTLLIHGARAVLRVAERKESFSVSWLAGVMARRNPNVAAVAQANKTARIICALLAHDRKYDAHYGMAA

SEQ ID NO: 433656 - protein, 466 aa, unidentified
MKHNRRRSTGKPRVSPTVLDRINPNVAGIDCGAAEHFVAVPPDRDPTPVQSFKAFTSDLLRLADWLTACRVTSVAMEATGVYWIPIYEILEARGFEVLLVNARHLKNVPGRKSDVSDAEWLRELHSVGLLRGSFRPPDAIVALRAYLRHRQTLIESAGTYVQRMQKALVQMNLQLPLVVSDITGVTGLRILRDIVAGHRDADHLAQHRDRRCRASKADIVAALTGNYRPEHLFVLKQNLELFDACQTQLTACDLALETHIRTLTAHMALPVAPLPAPRVTKKPRNNEPRFEIRAPLHQLTTGVDLSQIDGIAPYTALKLLSEIGTDMSRWPTEKHFTSWLTLAPKNKISGGRLLSSRTQPSANRAAAILRMTAMTLGRTQTALGAFYRRLAARIGKPQAITATARKLAVLVYRALKGELVYQDPGAEAYDLQQRTRILRRLRQRAATLGFELVNRETGEILEACAS

SEQ ID NO: 433657 - protein, 418 aa, unidentified
MKKNTKSPGKKEQTAKRIAKARRPVQREPKEVLAELVEKLRGKLELKATTSASQPEAGPRGELSPNLDRLTVGVDLGDQWSHYCILGLQGETLSEGQLQTREAEVAEFFQALPPARVVMEVGTHSPWVREVIAGEGHEVLVANPRLMEGSKRRKRKNDRIDAKKLARLGRVDPQSLHPIRHRSREVRQDLVVLRAREALVAARTELINATRGLVKSMGTRLPNCSSPSFGHKVKDAIPEKVQEALLPLVQLADALSDYIRSYDRKIEELGSGKYGQTKLLRQVKGVGPITALAYVLTLENPEYFEKSRDVGPYLGLVPKQEDSGEIQPQLGISKAGDPMLRKLLVGSAHYILGPFGPDTDLRRYGLRLCERGGKNAKKRAAVAVARKLAVLLHRLWVSGEVYEPLGYASSRAIVQPAA

SEQ ID NO: 433658 - protein, 368 aa, unidentified
MRTNTLKAAPAASAKELKNEKPAKAKRMLVGVDTHLRGYQAARKIDSGVIGVVENFRSEEELELYVAKQTTLAEEVVVVYEAGPLGYTLYRKLSARGVLCYVCAPDSSEQRKKRRKNNKIDARSLTSKLFNYLNGDQNALQLARVPTEAQEQLRMASRQHDQLVEERKRLGATGNAMLLSQGFGSWSNWWRPKAWAALSSKLPPWLLERLEVWVDVLKVLDEKIAQAKAAFVRSCKGPRPKGVGALSQMQLQSEVLDWSLYSNRRKIACLAGMVPSEWSTGDKEWRGSITKVGVPALRRIIVEMVWRIIFFQPQYKPVQKWLEVLRGPNPARKKKAVIAIGRQLIVDLWRLQTGRVTAQELNLIMVTD

SEQ ID NO: 433659 - protein, 450 aa, unidentified
MDLYLYFYSFDCSEVTQTTAFRLLLLISLLTLDVSIYVITQPNSLWKTTVLNTYQEVFFMSMYFVGIDISKYKHDCCILSAVDQNVVTKFAIKNDNSGFQQLIKTLHSLSNSEDIKIGFESTAHYALNLKLFLENAHHSFMEINPLLIKEYKKSTSLRRTKTDSVDCESIARWLMTVEYKPHSKGFYHAYSLKSLTRLRDRLVRQRSFYLVKITNVLDHTFPEFKPFFHERLSKTALYLLENYGSAEKMARMNAASYEKLRSLSRGRFSPQQFLQLKELAANTVGINNSIFDVELNSLLTLYKSLVKEIGTLEAEINKLIEEVHPHYMSVPGIGPISAAVIYSEYGDLSNFSTPAQMLAFAGIEPGINQSGTESHGGRMVKHGSSQLRYTLINCCLPLIRFDMTFAAYYAKKRAEGKPHRVAITHVAKKLVRVIYALERQGTDFNVQKLR

SEQ ID NO: 433660 - protein, 335 aa, unidentified
MNESTAFWVGIDVSKHKLDVAILDQRSKLKNRVFSNDQAGHRKLMAWLQDRGCAPGSSRVCLEATGPYSEAVATALADGGWYVSVVNPARIKGFAQSELARNKTDRADAGLLARFCLHLQPERWLAPPPEVRALRALIERLQDLQDMHQQEANRLEGVQQTEMRESVENHLTWLQANIAQLRRQIDDHIDRHPRLRGDAQLITSIPGLGDITAAKVLAYLGDVRRFKSAKALAAFVGVTPRIKMSGSSVRGRSSISRHGHAVMRHSLYMPAMVALKHNAVIKTFGARLKTAGLAPKAIISAAMHKMVHLIYGVLKSGVAFNPLLNARRLDIQDGI

SEQ ID NO: 433661 - protein, 449 aa, unidentified
MENQARMIKSSDGNKLAIVNPNAAGIDIADAEMQVCVPEDRDGDNNRRFGSFTKDLNTIVEWLIGCNITTVAMKATGIYYLSLFLKLQDAGIEVLLANPADVKNMSGKKTDAADAEWLMVLHRYGLLRPCYQPGNAARQIRNLTRQRSNLIRMADKEVLYMQKAMEQMNIKLSTVLSDITGLSGRRIITAILQGQRNIYELAALAEPNCKASQEDIALSLEGTWDVDLLFMLKQSLAAYDFFLSQVGECDMEIERLLSLYGAQIEAGSAELIRCKRKNKRSKNAPRMDIENFAYQLWGVNVFEIPGLKDTAVMHLIGELGHDFVDKFGSAEKFSSWCNLTPNNKISGGKILSSKIMKRKNPVGQIFRTAVAPLARDKGEMGNYYRRIKSKSGALQANVATAHKMAKIFYTMAKTKTSYNASKVGLGERELAERKIAKLECLLMKLKNVS

SEQ ID NO: 433662 - protein, 341 aa, unidentified
MKEVSIIGLDLAKNWFQLHGASADGGVVFRKKLSRSQVLKFLAAQPRCIIAMEACASSHHWGRVFGQLGHDVRLIAPIYVKPFVKRQKNDAADAEAICEAAQRPTMRFVCVKSEDKQSSAMIFKARDLLVRQKTRTINALRGHLAEFGIVAPKGTAHLGRLIGHVEAADTSLPKPVCTVCLMLIDLVRTLIEQIRVLDAEIRTRSRNDAVAKRLMTIPGVGPVIATALEALAPPAETFRRGRDFAAWMGLTPRQWSTGGKPRLGKISKMGQRDLRRLLIIGASAVVRWARKRGAPEGSWLARMLLRKPPMLVVVALANKIARIAWALMAHGGIYRTPARAA

SEQ ID NO: 433663 - protein, 404 aa, unidentified
MVDIMVSDFIKGYNLMKIFVGIDIAKLNHFAAAISSDGEILIEPFKFTNDADGFQLLVSKLESFDKNSIIIGLESTAHYGDNLVRYLVAEFYQVCVLNPIKTCQMRKNNVRKTKTDKVDTFVIAKTLMMQDDLRFITFFDLDMMDLKALGRFRQKTIKQRTRLKIQLTTYVDQVFPEIQYFFKSGLHQNAVYALLKEAPSPKEIASMHMTHLANLLKVNSHGHFTKEQAKELRVLAQKSVGANDSAISIQITQTIQQIELLDSQLEKIEVEMTDIMKFNDSVIMTIPGIGYINGGMILGEIGDIHRFSNPNKLLAFAGLDPSVYQSGNFQAKTTRMSKRGSRVLRYALVNAAWNVVRNNATFKAYYDAKRAEGRSHYNALGHCAGKLVRVIWKMLTDEVEFNLE

SEQ ID NO: 433664 - protein, 343 aa, unidentified
MEQHVGLDVSLEQTSVCVVDGSGKTLWQGKCASTPEAIAATIRAKAPAVVRIGLESGPLSSWHWHELRKAGLPVVCLDARHAKAALALQLNKSDRNDARGLAQIVRTGWYREVAVKSVDSQLVRSMLTARVQLVRMRVDLANQIRGVLKPFGLVAGKGGGRPFVDRVRALVAGGPLEQVAEALLAAWEAIGSQVAALSRRLVTMARQDQAVRRLMTAPGVGTLVALAYASVIDDPERFHRSSSVGAYLGLTPRRYQSGEEDYAGHISRCGDRLLRSYLFEAAGVVLHRVSKWSALKAWGTRLATRIGTKKATVAVARKLSVILHRMLRDGSEFRWSAREAQPA

SEQ ID NO: 433665 - protein, 346 aa, unidentified
MTRPSTAAVATLGIDIGKNVFHLIGLNKRGAITLRQRLSRRQLEARLTNMPPCLVGMEACVGAHHLGRQLRALGHDVRLMAAKYVRPYSKGQKNDYRDAEAIAEAVQRPTMKFVAIKSVEQLDLQALHRVRERLVSQRTGIINQIRAFLLERGIAVRQGPRPLRSELPLILTMDKLSSRMLHVIEALAADWRRLDERIEALSSEIAALAEDDASCQRLMTVPGIGPIISSATVAAIGMGDLFSKGRDFGAWLGLVPKQMSTGGRPLLGRISKRGNRYLRVLFVQAARVVLRLRPETWERHGLKRWIEAAATRMHHNKLAIALANKLARIAWSVLHHGRDFQMSKLR

SEQ ID NO: 433666 - protein, 342 aa, unidentified
MKDNITITIDLAKINFQIAVFNQAGNVIFNKSVNDKAMLKCVEKFPHAKIYMEACGSSHYWGRYFQKRNHFVGLLPAQIVAKYRAGNKSDHNDTLAIYETSQSKNKHIHLIPIRTLEQQDIAIMHTYREGYKKQRNQIASRMRGFSQEYGVKFPLGINKLCQQVFSVLEDAENELTVIGRKVIKELYDELKHVIVLLNQVTKEIETLAKNNAACKKLVTLPGVAWLGASMIFAKFGNASHFKRGRDGSACLGLVPRHTGTGGKVRILGISKQGDTYLRSLVVNGARAVVINIKEKTDKLSCWIRDLLQRKSFNKVVVAMANKIVRMATAMLKSGEEYRQVIA

SEQ ID NO: 433667 - protein, 347 aa, unidentified
MLIIGCDFHTRTQQMAMLDTETGEVVEHRLEHESGEAKRFYEGLKERALVGIESTGYTLWFAAMLAELGHELVVGDAAKIRAMEPRKQKHDRRDAQHLLNLLARGDFPRLWLPSVEERDVRVLLEHRHQLVQLRTRVKNGLQAIALNYGLARRAKLWTVRGIKELAALPLREGMARRRRDLVPLLAQLDAWIGELDERLEQEAEQREAARLLMTHPGVGPLTALGTVLVLGPVERFPDVRHVTSYVGLIPQEESSGSRQHFGHLTKQGNCLLRFLLVEAAQSASRCDPGLKRVYRRLAFRKGSASAKVAVARKLIIRRYIMLRDQIDYEEFCRRGSHAGMLGDVALA

SEQ ID NO: 433668 - protein, 384 aa, unidentified
MDKCTGQAVGVDISDRSCEIALLDAEGNELETAKVATTQEAILRYFRKLEPSRVAMEVGTHSAWMSRIIEELGHEVYVANARKLRAIWDSDFKCDRTDARLLAEIVLFRPALLRPIKHRGEEARLDLMLVRTRSAMVKVRTSLINHVRGTVKAFGGRMPSSDAVLFHKREDEIPALLRDLLEPVMKLLKETTAWIRGYEERIAKHLESDPEASRLLQVPNIGPITVLAYMNTIEDPNRFPKANKVASYLGLVPRRDQSGEQDRQLRITKAGDRDLRTLLVQCAQRTLSNRSGDSDLKRWGLALAARGGKNAKKRAVVAVARKLALLLLRLWRTGHKYEAFRSKAGAGVTTDAPQAPAKIQVNVGTRARVMRPRVRANKKDAVSA

SEQ ID NO: 433669 - protein, 343 aa, unidentified
MKHYAGLDISVKETSVCIVDETGKICREIKVTSHPEDLFKLLQDPAWRLERIGLEAGPLSQWLFEGLAGAGLPVVCIETRHTKAFLKAQVNKSDRNDARGIAQMMRVNLFRPVHVKTLTSQKRRALLTARKLLQEKAISIENDIRGLLRNFGLKVGVVGAIKFEERIHELVAGLPDLAEITNSLLAARRTLREHFSALHRKLLTLVRDDQVCRRLMTVPGVGPVVSLAFVATIDTPARFRRSKAVGPALGLTPVRDQSGERDRVGRISLCGDAMMRTLLFEAAQVMLRPTTRWSWLKAWAMRVAQRRGGGKAVVALARRLAVIMHRIWCEGTEFRWSREVQAA

SEQ ID NO: 433670 - protein, 315 aa, unidentified
MYRSDIARDVLDIAVSSLSEERQFNNDGKDITGAVHSIAGLKPDRIILESTGTYGRSLAAALQSRCLPVIIVNPRQVRDFARETGVLAKTDRIDARILALFGLQIKPEVRPLPNKQARDMKGLLTRRRQLIEMLSSERNRLLQADEAVRLGIETHSNWLENAIAAINETLYCQISSSSLRKEKDNLLKSVPGIGNIVATTLLIELSELGQINRRKIAALVGVAPLNRDSGTMRGKRIVQGGRAKLRAVLYMAALVATKYNPVIAAFYRRLLAAGKIKKAALVACMRKLLTIINAMMCTMTSWNPELTNYIAAEAK

SEQ ID NO: 433671 - protein, 348 aa, unidentified
MLYVGLDLSRKRLDWHALAPAGERVDAGACPPDRDALAHLARRFDRDWRQPVLAVIESMTGARFVHDQLELAGWDVRIADAQRAKGIAPLACKTDRVDAWVLAELARRDLVPEIWLPGPEVRGERERARFRIRLVHKRTSLKNRVHAILFQHGLWAPVGDLFGVGGRRFLERCELPEPWRSSVAASLYLIDVFEEQITAIEQELRRLGAEHRYLPLLITVPGIGWVLGYTIAAEIGDIGRFSSPAKLVGYTGLCPRVRQSGEVDRRGSLSKHGPPYLRWALIEAAHNAIRCYPRYRALADRQRARLGRQRGGSVAAITIARKLAEASWWMLTRNRPFAPAGARIPLTA

SEQ ID NO: 433672 - protein, 358 aa, unidentified
MARKSVASLEQFVEGFKAHPFVVGIDVHNRSLSVALLRVDGKVHTFVCPADPQGLLKLIERLGIQLSLMAQEAGPTGYGLARAFQSKGLRAIVAAPSRIPRSVAPGAKCDRLDCIRLAELAARGMLKSIAIPTEEEQALRCLLRRRHSIVDAVRRAKQRVKSMLLLLGVKEPEGLSHWKREAVEALGHLSLKPSAKSTLESLLRELEFHTQELRRVEAELYALPQTNSQARSIRHMKTVPGVGPVVATTFAMEVFRATRFKRAEELASYLGLAPMVHHSGAKTPSGRIMPVGQKRLRSLLIEAAWMWKYRDPYAAQLYNRMLSRMSIPQKAIVAVARRLAIILWRLCVEKRPYRYCTA

SEQ ID NO: 433673 - protein, 419 aa, unidentified
MEYLRGFELGLGVYEVDVRREYALIDIIQIITQKQCSSFIDGMVASRLSGHLKAAVWTPISWRGRCATVSFPQGHAVRRNQMEPTTIAIDLAKRVFQIHFVEPGTGVIHSKALKRAQLTPFFANRAQCRIVMEACGSAHHWARQLAALGHDVRLIAAQFVRPFVKSNKNDAADAAAIWEAAQRPGMRFVAIKSEDQQAMLALHRMRQQLVRFRVMQVNQLRGLLYEFGVILPQGRRASIDAAKASLASIADQVPAMLIDSLQDQLSRLLALDEQILHIEQRITEWRRGDEACRRISEIPGVGLLTATAAVAVIGNAHAFRSGREFAAYLGLVPRQNGSGGKVKLGGISKRGDVYLRTLLIHGARSVISSSKHLPERMRSMLARRPTNVVAVALANKVARIIWALLAYGRTYQCPTAAPA

SEQ ID NO: 433674 - protein, 420 aa, unidentified
MDTLIERCAGIDIGKDELVACVRVPGPGGRGRTKTTRTFATFTSSLEAMIEWFTEQGITAIVMEATGSYWKPVWYLLEEHPGWGLMLVNAHQVKILPGRKSDVLDAEWLAELLEHGLLRGSFVPPHAIRELRDLTRYRKRMIQTHTSECQRIQKTLEDAGIKLDSVASDVLGVSGRAMLAALVAGERDPAVLAEMARGPLRRKIPALRQALRGRFNDHHALMIGLALEHTAHLEATIARLDEQVDTLFASHTSDGGVPFAQARDRLDTITGVGKRAAETIIAEIGIDMTRFPTAAHLASWAGLAPGNNITGGKRRSGKTTRGDIWLTDVLTQCAWAAARTRDTYLAAQFWRLARRIGKKKAATAVAHSMLVICWHLLTHDCDYDDLGGDYFTRRNVDRQRHRLINQLHNLGYRVTLEQPA

SEQ ID NO: 433675 - protein, 520 aa, unidentified
MGQIDKRPGKGKRGRGQQGATQKEIQQRGMRETRTLVDHLNPIDLKVAGVDLGSTSHYVAAPDGCDHVVVREYGCFTPDLMAMAEWLKGRGVERVVMESTGVYWVPVYQVLEDSGLKVVLVDARYSKNLPGRKKTDVYDCSWLRKLQSYGMLRACFVPDKNIAEMRTYWRHRATLVEQASRQILLMQKALEQTNLQIHKVLSDISGVTGMAIIRKILEGEQDPLVLARLKHPLVRSSEETLVKALTGNYRAEHLFTLKQAVDTYDFIHGQMEECDAKLQACMAEFEPEQRANENSGKDRPENDENSGKAGPENDGKSGKAGPENDEIQRRADKKARAKRTRRGKNQPRFDLREEQIRITGVDLTKIDGINVMTVQTIITECGPRLSAFETEGRFASFLGLCPNNRVTGGKVRSSSTNKVHHRAAQALRQAAESLHHSDSALGGYYRRMAARLGPAVAITAAAHKLARLIFHMIKYGEDYVDRGQQWYEERYQRGLRERLAKQATRLGLALVEATTGEMVS

SEQ ID NO: 433676 - protein, 330 aa, unidentified
MNLGIDTHTRYAQVAVVDDDGNLQDELRVPNNQLEQLAEQYAGSDAVIEASGNYRPIYEVLDEHLTVTLANPSKNRLIADATVKTDRLDAKRLAHMLRSGMLAESYVPTDEIRELRDLVRTRKGLVDERTAEKNRVRAVLKRTDNAYDSELFGPNGREFLAELSLSTTDRTIIEAHLSVIDEYDAQIASLEDEIERHVLESPAAQRLLTIPGVGQFTAAVVVAEVGEIDRFDSDNALVSYAGLDPVVHQSGEKEIHGSISKEGSAQLRWALVQAAHTAVRCDDYFGNFYTRLKRRKNHQVAIVATARKMLVSIYYMLTRKEVYDPPEVSA

SEQ ID NO: 433677 - protein, 351 aa, unidentified
MMIIGCDLHTRYQQIAMLDTETGELVERRLEHENGEARAFYAGLVGRQARVGIEATGHTHWFEAMLGELGHELWTGDAAKIRAAVVRKQKTDARDAAHLLELMCSERFPKIWRPSWEERDLRQLVWHRQKLVWMRGAVKNQMHALAMGEGVCRKKKLFTAKGRKELEGLALGPWASYRRQELLRMFDELQASVARLDQAVEQTAKSQALAVRLMTHPGVGPVTSLAFVLIIGPVERFEHSKQVVSYLGLNPQEHSSGGKQRLGSISKQGNPMMRSLLVEAGHTAARFDPQLRRVYQRLKFRRGASVAKVAVARKLAVRMYWMLRSTADYAQLVRMQGSPWATLVENSPSLG

SEQ ID NO: 433678 - protein, 340 aa, unidentified
MGEITTIGVDLAKHVFQVHGVDAEGAVVLRKQLRRGQVLSFFSRLPRCVVGMEACATAHYWARELGALGHEVRLMPAQYVKAYVKRNKNDAADAEAICEAVVRPTMRFVPVKTAEQQGALLLHRARERLVRQRTALANALRSHLAEFGIIAPQGLRNVGQLMAIVRDESDTRLPALARAVLAVLAMQVEQLEAAVTSLEKQLMAWHKSNPVSQRLATIPGIGPIIATAIASTVVEPSGFRSGREFAAWLGLVPRQNSTGGKTRLGGISKRGNQYLRRLLINGASANLLRSKATNADPWVMGLRRRRPSLVVAVALANKTARIAWAVMQRKENYQRMAVAA

SEQ ID NO: 433679 - protein, 449 aa, unidentified
MNAMTPTLPILDARAAFVDVGSEQMHVSIAGGPPEVFGTMTVELHRLRDWLLEGEVRSVAMEATGVYWLPLYAVLERAGLKVIMVNGKQTRNLPGRKTDIKDCQWGATLHAHGLLHAGFVPPEQIRRLQDYLRLRADHLSQAAANVQHQQKALERMNIKLHDVISSLVGASGIRVIEAILAGERDPQRLLALCDGQIQKNKAERVKESLRGTWKEEHLFALRQAVENWQHYQRQIAACDQRIEGVLREINGPDQPAGGQEPKRPIKAGGVNAPQIEDLHRLLVQLCGGKDLTVLPAHTDYSLLQLIGEVGTDLNQWPSEKHFTAWLGVAPGSHQSGKRHGSVRRKRNRAGRLFCVMARSLARSKHIALGGFYRRMSGRRGGLVANVALARKLAVLFWRVMVKGVSYVEAGLKQYEEMVLETKRRALSRLAKQLGRVVLPSLAELQTAKP

SEQ ID NO: 433680 - protein, 411 aa, unidentified
MDVFCGIDWAEDHHDIALVDRDGGLVARLRVSDDAAGLARLLDLLAEKGDSPGDPVPVAIETPRGLLVACLRATGRRVYPVNPMATARYRDRHSMAGRKSDHGDAVVLANILRTDLHAHRPLPADSELAQAVAVLARAQQDAVWDRVAAHNKLRSHLREYFPGFLAAFAAAKGGIMRPEARAVLAAAPTPADAAKLSLAQLRALLRKAGRSRGIDAEAQRLRGAFRQEQLRQLPLVEQAMGRQSLALLRQLDAACQSAGDLEAAAAEAFNQHPDAGIITSFPGIGALTGARVLAETGDDRSRFQDARGLKAYAGSAPVTRASGKSRSVTHRKVKNNRLAAAGYTWAFAALTASPGARDHYDRRREAGDRHAAAQRNLFNRLLGCLHHCLQTGQHYDEATAFPARKATPAAA

SEQ ID NO: 433681 - protein, 402 aa, unidentified
MNCVGIDVSHGKSIIVVMRPFGEVVVSPFEVLHTDSELSKLAGLLKSLDGETRVVMESTGYHHTPVAWLLHDAGLYVSVVNAMLVHDYGNNSLKRAKTDKKDAVKLANCGLDHWLTLPRYVPEEDTRLMLKTCYRKYQQYSKVQTMLKNNLISLLDIAFPDANRLFTSPPRADGSEKWVDFVAAFWHCECVCGLSKKAFTTKYQKWCKKHGYNFSEDKALDIYASACGRFGVMPKTNTAKLLVEQAISQLQATSAALAALKQEMQSLAASLPEYPVVMGMFGVGPTLGPQLIAEIGDVRRFHSKKALVAFAGIDAPPYQSGQIDVRSRSISKRGSASLRRTLFLVMGVLLQCAPMDEPVYQFMNKKRSEGKPYRVYMMASANKFLRIYYASVKAYLESLEHD

SEQ ID NO: 433682 - protein, 380 aa, unidentified
MDVFYKPYLFGIWQRRRREPAWAAVQAWISTIAMELGAHAGISLDPPEQLLELTLAVIRLGKRGSSRPFQTIRSWAMNGIGIDVSKQQLDVGTTDGEILQVRNTAAGFAELEAWLKEHPADQIVLEATGGYEQRVLDFLHKAGRPVVRANALRARRLAQGMGHVAKTDRLDACALAKMAVLVKLHAYQPLEPWQLRMREFVRARRQAMQALTVARQQQEMVGDRELRRLLQANITRLQTLVARLGKQIGEQVEQQPQLAVMKSMKGVGPALQAVLASHLPELGRISGKAIASLVGVAPMSHDSGTMRGKRSIHGGRAEIRQVLYMAAMSAMRHEPRLRDFYRSLRARGKEGKVAIVAVMRKMLVILNARVRDAESGPIPA

SEQ ID NO: 433683 - protein, 339 aa, unidentified
MDITTIGFDLAKTVFQVHGADAKGRPVLRRKLRRGKVLAFFAGLPSCLVGMEACASAHYWARELQALGHKVRLIPPQYVRPFVKTNKNDAADAEAICEAVTRPTMRFALAKSAEQQSVLMLHRARELLVRQRTMVINALRGHCAELGLVVAQGASKVEELVAIIEDPGDVRLPPLAREALGSLVEQLRSAQARIKQLEATLLAWHRSNEASRRLATIPGVGVITATALVATIGDGAQFRSGRQLSAWLGLVPRQHSSGGKARLGRISKRGDGYIRRLLVHGARTVLRWRRAKPGTRPGWTDQLLARRPTNVVLVAMANKTARVAWALLRYERIYQPTPA

SEQ ID NO: 433684 - protein, 363 aa, unidentified
MTVYIGVDFHPYEQSVAFADDRDGEIGYRRFLHSDKQSIKAFYRKWGEDAVIGVEATGCLWWFEQLLTTNGQQLQIGDPRMIRRAALSRHKNDFRDAETILDLLMRGQFPAIVPRSEESREVLDLLHYRQSLVKKRTSIANQLQAFARNKGLAKFRLPAVKARKQLLDTAGTEVETLLVSSRLLLWAELTAQMKALEVRLEKLAAADERVLLLITHPGVGLINALALVHTLGEVRRFRRKEEVVAFVGLDPLEKSSGQKKRIGQISKHGSRLARHLLGQAAQACRDQRIRTFYAQVSRRRGRPKAKVAAARKLLINCYLMLREGIGYEEFRRRGEVGLCEGSGELRGNTTVSEGLRARPAISV

SEQ ID NO: 433685 - protein, 408 aa, unidentified
MQIVHERCAGLDVHKEFVVACVRLIEKQQVLRQVRRFETTTQGLLELLAWLQQHGCTHAGMEATGVYWKPVWHLLEGCLELVLSNPAHMRNVPGRKSDMNDAMWIAELLAHGLLPASFVPPVPIQELRDLTRTRRQLVREIVQHTQRVQRVLEDANVKLSSVISDVLGASGRRILAAMVTGENDPGRLAALGSDRLQCSREQLQEALRGRITAHHRFLLGQHLAMIDHLQKTVDQFDRQIEKALEPFRRQVDLLSTIPGISTTAAQVLVAEIGVDMAQFPTVHHLLSWAGLCPSMNQSAGKRGSTRVRKGAPWLKPVLVQCAMASARTKASYTQAQFLRLKARRGAKKAAIAVAATLLTAAYFILRDYVPYRDLGADHFVRRDRGRVAQRLASRLRELGYEVTLKEAA

SEQ ID NO: 433686 - protein, 425 aa, unidentified
MEPSPLIPVAALIGLDWGTAHHDVALQVAGTATVEPGRLAHEPAAVAAWLATLEHRFGGAAVGIAIETSRGPVVHALLEAPFVVLYPVNPRSLARFREAFTPSGAKDDAPDARLLLELLVKHRALLHPWHPDDVATRTLDRLVRFRRATVDRRTQLTLQLQAALKEYFPQALRWAGDDLATPLAGEFLSRWPTLPALQRARPATIRQFYTSHNCRRMARITERLGEIATATPLTRDPAILESSALYVQGLARQLLALGPSLTALDDAIAQRVAAHPDADLFTAVPGAGAALAPRLLVAFGTDRTRFPTAADLQKSAGIAPVTVRSGTQCRVHWRWATSTFLRQTFQEFAHHSIQQCQWARAFYQQQRHRGKTHHAAVRSLAFKWIRILWRCWQDHVPYDDARYERALTAHGSPLATQLHPVLAQS

SEQ ID NO: 433687 - protein, 359 aa, unidentified
MISVGIDVHKKRCQACLKDQDGHMIEELSFQNTTEGITQLRTLLANYPETKIALESTGNLWTRIYDELHKETKNKVILTNPYKTRIIAEAKIKNDRMDARVLADLVRADLVAESYVPDPEIREQRALLRQRRSFVEDTVTIKNRIHNQLDKYDLKAEFTDTFGKKGREWLRALQLSPTEKTILNVNLQQLESIEHAINQLTIQIAREAVDRPDVKLLMGFTGIDYYSAMLLINEIGDVTRFPSADKLVSYAGLAPSQRQSADHTFQGHITRQGNKYIRWVLIEAAQHAARYDPQLRPFYERIATRRGRQRAIVAVSRKLLIYIYQVLKKQEPYRAQRNDLLEKKLKRLQQKASTSLQAN

SEQ ID NO: 433688 - protein, 355 aa, unidentified
MDSEKYIGLDVHQATISVAVMDCTGRIIMECILETKAVTILEFFAGLRGSLAVTFEEGTCAAWLYDLLKPHVGKLLVCNPRKNALLKAGNKSDRIDARKLAELLRGNQLKPVYHGETGVRMLRELSRSYLTIVKDLSRVMNRLKALYRSWAIPCAGRDVYYTRHRAEWLDKIKEAGVRRRAERLYQQLDMLQHLRQQARRDLLVESRKHPSIAQLRQIPYLGPIRSALVVALIQTPHRFRTKRQLWAYSGLALETRVSAEYSYATGQLRRSKKVISIRGLNKDHNHDLKGLFKGVATMASVRPGPFQNFYEALLAKGMKPTMARLTLARKIAAITLTLWKKGEGFDAEKLKLQAA

SEQ ID NO: 433689 - protein, 349 aa, unidentified
MHNDTLIAVDVAKSVFEIAVSELPGKVTERCRLPRSKFVAFFANRPAATVIMEACGSSHHWGRQIARLGHRIQLLPPQHVRPYVRGNKTDRTDVKGMLEAYRNADIHPVPVKSIEQQILATLHRLRSSWVAERTAKSNTLRGLLRELGVVIPVGARHVVPHAWALIEDAESVLPEALRAPFAEVCEELRTLGQRIEQIETQLKALAEQMPEVTRLRSIPGVGLLIATAVVAFVGDIHRFRSARHFASYLGLTPREYSSGSKRRLGRISKRGDVYLRMLIIHGARSILGHAKRQEAHGVDRLRRWAVQLEKRVGHNKAAVALANKLARLLWALCTSERTYTPAHEAGVAA

SEQ ID NO: 433690 - protein, 365 aa, unidentified
MSTITIGVDLAKSVFSVCEMDGAGRVLRRLDLKRDAFAVWLAQMPAGTVVAMEACSGAHHWARRCLEYGLQPRLMAAQFVTPFRKNRTAKNDRNDAEAIATAARQGNMRFVPVKTVDQQARLSCHRVREGYKVEGLSIGNRLRGLLAEFGIVVAKSDLALRRGLADLDQQTSLPPEMRELLRNLSAHWAQVRTAVDACGARIDAHARVDERCVRLRAIIGIGAITADAAIATLGDAKEFRNGRQVSAWLGLVPTQHSSGGHARLGAISCRGDGYLRTLLIQGARSSLNRAKAVSVEKSTPEQIWIRQLASRMPFGKVLVAIANKHARQLWAMLAHDETYDADAWLKHPMVQRPAGKHTIAVTAMV

SEQ ID NO: 433691 - protein, 334 aa, unidentified
MEQVTTVGIDLAKSVFSLHGVDSAGRTVLRRTVRRDQLERVVAGLSPCLIGMEACSGAHEWARRFERYGHTLRLMAPKFVTPYRKSGKNDSNDAEAICEAVGRPSMRFVPVKSAEQQALLALHRVRQGFVVERTAAINRLRGLMAEFGVVLPLRAVTVRRQAREAAEALPELARRMVGELLEQLRLLDERIDGYDRELAAQARLSEAAQRLMQIRGIGATTALAIVATVGNAREFRNGRQFAAWLGLVPGQYSTGGRQRLGRITKRGDAYLRNLLVQGARSVLQTAASHGDRVSRWALELQERCGYYQTLVAIANKNARIAWALLARGEQLRLS

SEQ ID NO: 433692 - protein, 336 aa, unidentified
MEVTTIGLDLAKHVFQVHGVDASGGVVLKRRLRRREVLAFFAALKPCLVGMEACATAHFWARELRALGHEVRLMPAQYVKAYLRRGKNDAADAAAICEAVARPSMRFVPVKGEAQQAALMQHRVRDLLVRQRTQLINAIRGHLAEFGVIEAQGPWNVGKLVAGSEQDGAVPGMVRDLVKLLAAQLEEAEQRIAEVDARILAWHKADAVSQRLAAIPGIGPLVATAIAATVPDPSAFRSGREFAAWLGLVPRQNSTGGKTRLGRTSRQGDAYIRRLLVIGAQSALYCSKAARANPWIQGLLAKRPRMVVAVALANKTARIAWAVMARGTTYRIAAAA

SEQ ID NO: 433693 - protein, 338 aa, unidentified
MSIYAGLDVSDKATHVCVVDIDGKVVRRDVVTSDPEVLAKWLSRHCPDLVRVVLETGPLSTFLYHGLAKRSVAVECICARHAKGVLSARVNKSDVHDAEGLAQLARTGWFKRVHMKASATHIDRAALRIRVQLITARTAMANQLRGLLKLFGLRMGTARTSGRRTERLAALYAQRPDLAPLFAPLIAAMEAIEEQLRASGRLLVERAAADPVCTRLMSVPGVGPITALTFTATIEDPRRFARGEDVGAYAGLVPRRNQSGERDTSGHISKAGDPMLRWSLYEAANVLLSQVKRSFALQQWGRKLAEAKGAKRARVAVARKLAALLHSLWLNETEFRWA

SEQ ID NO: 433694 - protein, 303 aa, unidentified
MTKLPKKVIGVDVGAKILTMSFQDSNNQDQVCNIENNQRSILSFLKKISSDDYCLVIEATGNYSSRILHLSLGKRFETSLINCMSVKHFARMKNIIAKTDAEDAKLIRLYGEMFRPENYIPKSTEIEYLDQEIKLLNDLEEEKRRYAVKLKALRFNPYLNPNTEKHYERRLKQLEKEIKEVELRLPQLQDEEFKEVKDLIQSVSGIGEKTSLQLMTATSGFKNFDSAKSLVKYFGLAPRIYQSGKKSYSPGKCRTSKTHIRSLLYVCSWTAMKHNVHCKELYLRLLAKGKPKKLALIAVCNKL

SEQ ID NO: 433695 - protein, 335 aa, unidentified
MEFEFFIGIDVSKNELDFSVQQGKCFLFHREIINGPEAIKALLKEISKLKGFSLSNAVFCMEHTGIYSNHLLSCLYQKNANICLEAATQIKKSLGNLRGKNDKVDSMRIAAYAYKNRDELRLWAPRREQVQQLAHLASTRSRLIKAKKMLKTPLKEYGSFVKKNAVKQNTDVCNKALNGIETSLENVEKEIMTIINTDPELKRLFTLVTSVVGIGKVIAVQLIVTTNEFKDIDNAKSYACYAGLVPYLEESGIFKGKGRISHIANKKIKTLLHMAALVAIQYNDELRLYYERKVNIEKKNKMSVINAIRNKLVLRIFACVNQNRPYEKNYLKLVA

SEQ ID NO: 433696 - protein, 370 aa, unidentified
MRNKILYVGLDVHKKTIDAAVATGRSNGKVRSYGKINSTLDALDKLTAKLQNPGVELRFVYEAGPCGYQIYRHLSSKDIHCSVVAPSMIPKRSGDRIKTDRRDAINLVRLFRAGELTSIYVPSVDDEAIRDLIGCRDDMRRLERKARQRLLAFLLRHGHQYSGKKHWTKGFYNWLAMIKFSHRAQQITLQEYIDTTNECRERIKRITQQMQAQVETCERSPFVKAYQALRGVSFIVAVTVVAEIGDMNRFPTPKQLMAYLGLIPSEHSSGNTVRRGPITKTGNSHVRRVLIEAAWTYKMPARVSTILLKRQQGLPKSVRDISWKAQTRLCARYRRLIARGKSRQTVITAIARELGAFMWAIDKQMQVAKA

SEQ ID NO: 433697 - protein, 425 aa, unidentified
MNFNMNEKINQVTENTLVIGIDIAKKKHFACAVDERGRVLQKSFPFMQTRDGFEWLFERLIALREMHQKSEVLVGFEPTGHYWMNLAAFLTQYGIPFVMVNPMHVNRTKELDDNLQTKNDQKDALVIARLMRDGRFSYPRILEGIEAELRNGATLRSKMQEDLNAIQNRIIRWIDRFFPEFPQVFKDFGKMAYAALEMTPFPSDIQGKSPEELLFLYRQVDGMKSPQLPKAKQLVAIAEQSIGLTEGMKMARFEIATLLRQRKLIQTDLDNVTAQLEELAKQMTDYGYLASVPGIGDATIVELLSEIGSLTQYEHPRQLIKLAGLTLRENSSGQHKGQKRISKRGRRKLRAVLFRVMMPLIRHNRAFKALHQYYTTRLHNPLRKKQSIVVLCGKLLKILHALCHKKMMFNEDAMIKDLYCLQDAA

SEQ ID NO: 433698 - protein, 451 aa, unidentified
MRTRHPQPPRPAALPCINPHAAGLDIGSEEIWACVPEDRDAQPVRPFGTFTPDLYALADWLATCRIETVAMESTGVSWIPIYEILEARGFRVYLVNAHHVKHVPGRKSDVQDCQWIQHLHTCGLLSASFRPEAEMCALRAYLRHRATLLEYRAAHSQHMQKALQQMNVQLTQVLSDITGATGLAIIRAIVAGERDPVQLARFRDPRCVSSTEEIAKALTGHYRPEHVFALKQALALYDTYTEQGRECDGEIAQHFQAIRPAWPDALPPGGRADKRLSHCKNAPIYDARHMLYQLTGVDLVAIPGLNASTVQTLLSEIGLDLRKWPHAKAFCAWLGLAPRHEISGGKVLRRSTLKTRNRAGQALRLAAQSVSRSHNSLGAFYRRMRARLGPKAAIVATAHKLARIVYHLLRHRIPFRDLSAADYEQRAREREIATLRNKATRLGLTLVESPA

SEQ ID NO: 433699 - protein, 342 aa, unidentified
MNEYDGRQFVGIDLHRRRSVIVRQSESGEQLSAVRIINDPVALGLEIERAGPNPEVVLEATYGWYWAVDTLQAAGARVHLAHPLGVKGFRYRRVKNDVRDAADLADLLRMNRLPEAWIAPPATRELRELVRYRAKIVAVRSGLKAQVHAVLAKAGVLIAVSDLFGVGGRQRLAKVPLGAAYVQRVISLLELIDALDAHETRFSIMVADKLGGHAGYQAIQQLPGVGPILGAVFVAEIGDVHRFADPAHLCSWAGLTPRHHESDTVVRRGHITKQGSKLVRWAAVEAIQRHPATSKIALDRTRIESRRGKNIAKIAAARKLLTLVYYGLRDGHIRALAPRRAA

SEQ ID NO: 433700 - protein, 417 aa, unidentified
MKKHNNSAMKSEPISKRAKSRGPVQRDTKEVLAELVETLRKKLDPKVEAGSTGEEDRRGKFRPNLDRLTVGVDLGDQWSHYCILGLEGETLAEGQLRTTQEDIAEFFQALNAARVVFEVGTHSPWVQEVICGCGHEVLVANPRLMEGSKRRKRKNDRIDANKLARLGRVDPQSLHPMQHRSREVRQDLVVLRARDALVAARTELINATRGLVKSMGSRLPKCSSPSFAQKVEETVPVELRDALLPLVRMAATLSDCIQGYDEKIEKLGREKYGHTALLRQVKGVGPITALAYVLTLENPDRFVKSRDVGPYLGLVPKQEDSGESQPQLGISKAGDTMMRRLLVGSAHYILGPFGPDTDLRRYGLRLCERGGKNAKKRAAVAVARKLAVLLHCLWVSGEVYEPLRQDMSATIAPAVAA

SEQ ID NO: 433701 - protein, 414 aa, unidentified
MQVLYPCCCGLDVHKKTVVACLLRAGADGQRRREVRTFATMTDDLLALADWLRGAGCTHVAMESTGVYWKPVYNILEGQFEVMVVNAAHIKAVPGRKTDCQDAEWIADLLQHGLVRPSFIPDRPQRELRDLTRTRTALIDERSAAVNRLQKVLEDANIKVAGVATDVMGVSGRAIVEAVLRGTTDPATLAELAKGRLRAKRAELERALRGRVGAHHRLLLTTHLAHVDFLDEEVARLSAEIAERLRPVEDEVQRLDTIPGVDRRTAEVLVAELGTDLDRFPSAAHLASWAGMCPGNHESAGKRRGGRTRKGSKWLRRALVEAACGAARTKQPGRAALAGHYRRLVARRGRQKAVVAVGHRLLIIVYHVLRHGQSYQEPTPTDLDQRRRRTRDRAIHQLRQLGYDVAVTPKQAAA

SEQ ID NO: 433702 - protein, 345 aa, unidentified
METMHYIGLDVHKKTIDYCVKDGSGRIYAAGSIRATRLDLDMWMKTLPRPWTAAMEATIFTAWIYDHLQPHAAAVKVAHPLMLRAIAVAKKKNDRIDAKKIADCLRCDFLPECYMASTEIRERRRTLRYRNLLVRQAVQMKNKIAVLLMEAGVSYNKQKLHKVGYFRELLATNPDIDEGLKPLLRLCRETVVHLGKTESALVRSLERDSLLVERVERLMTIPAVGPITALTWALEVGDVQRFSSIKKAISYCGLCGAERSSANITQRTPLSKQRNKHLQTVLIEAAKMAPRNSSELAMVYEHEKQKGNANRATLAVARKMVAYLVAVDRRQKGFLVVENKNRTAA

SEQ ID NO: 433703 - protein, 319 aa, unidentified
MSEIVLGIDVSKKTLDAALIFDNRTLCKQFKNSPTGFDLLAAWLVSFQIKQVHACLEATGVYGEAVTLFLHNQGHRVSVVNPLRIKGYAQSNMQRNKTDRLDARLIADFCLTQKPESRQPPSEEVKRLQSLVRRVEVLTEMLQAEENRLANAVLAIKPSIERMIRLLKEEIKELEQQIKRHVDQHPNLKEQSRLLQTIPGIGTRTANLLLAEIEFNRFDSARSLAAQAGVTPRKRQSGTSVKQTSLSKLGNARVRKALYFPAIVAKQHNKIIKEFANRLKKNGKTPMQIVCAAMRKLLHIAFGVLKHKRAFDASLAFSA

SEQ ID NO: 433704 - protein, 407 aa, unidentified
MDVHRDFLIACIAATNAQGVTEYQSRRFSTYTGSLRELRDWLLANDCKDVCMESTGKYWFPVHNILEESCHVVVSHPKFVKAIKGKKTDKKDAQWIADLFKHDLVRGSFIPPKDIRQLRDLCRYWVKLSSYMTGEKNRAQNCLTVSNFKLDDVFSNVFGKSASAITTQLLEHPGEQFDVAPFVDGRCKTPIAQIQEAVDGIFTYEQAEKLKIIRGHMDSLERHMAELESLILEIAQNYLPQIELLLTVPGIHDAFTAIRILAEIGADMTVFDTSKHLCSWAGLTPQNAESAGKKKTTRIGKSGAYLKPLLIQVALAASRGEKHPEIYGKKQALQKRRGKKKAIVAIARRLLTAIYHILSKNEPYNPAAYIQEDKNPMARQISQEKAFEMLARMGFIVSNPSPSSSSG

SEQ ID NO: 433705 - protein, 356 aa, unidentified
MHESNTVVPAGTVGLDVSDRYTKVYVVDAAGQRVEETRIRTTPAGVQRWFTGRPRMRVVLEVGTHSPWLSRAVVACGHEVLVANARKLRLIYQNDRKSDRVDAASLARLGRLDPTLLAPIRHRGEAVQADLALLRARETLVRARAQLVNHVRGAVKAVGARLPACSTPSFPLRVAGALPDVLRPALEPLLATLRQLNTQIRQYDRTLARVAQERYPETTRLRQVKGVGPLTALCYVLTLEDPQRFRRSRAVAAYLGLCPRQWDSGERQAQLRITRAGDGMTRRLLVSAAQYILGPFGPDTALRRWGLGLVARGGRFPKQRAVVAVARKLAGLLHSLWMHDRDYVPEGLPGRVAAAA

SEQ ID NO: 433706 - protein, 351 aa, unidentified
MMIIGCDFHPSWQQVSWLDTGTGETGEQKLVQAAGDAERFYRQIEAPALIGMEATGNCHWLVDLLSELGHELWVGDAAQIRASYVRQQKTDKRDAAHILKLLVEGRFPRIWMPSSEVRDLRQLLVHRYKLVVLRARVKNELQHLALNQGVQRKRKLWSREGQQVLRELTLKPWAARRRQDLLGLLAMFDEQIAPLDEAVRIQAQGDERSRLLQTQPGVGPITALAYVLTMGDVSRFPRGKQVASYLGLIPREHSSGGRQKLGGISKQGNRMLRMLLVEAAQIAVRHDPQLRREYQYRCHTKAKAVAKVAAARKLAIRMYWMLRSGKPYPEVVRIESSPRLPLVGVKLDRRC

SEQ ID NO: 433707 - protein, 356 aa, unidentified
MSEGSWVGLDVHARSVVAGVIDQGSGEVRSLRVSPGTEGTVAWLETLPAPLRVVYEAGPTGYGLARACAGSGINCVVAAPSRIRPAADRVKTDRRDAERLARLLRLGEITPVRVPEPEEEAARDLVRAREDARGDLMRARHRLSKLLLRHGMVYDATAWTRAHDGWLRRQRFQSGPLAIVFDECYGRMLDAKTRRDALDKAISELAGAPPYVDVVERLVCLRGVSTLTAFALTVELGDWNRFRPSSLGPFLGLTPSENSSGERRRQGAITKGRQLARASSPGRGRLAPTPPTALERHARTQTHRQVARRASASGPERPPASRTLARARGRGKPRTIVVVAVARELAGHCWALATME

SEQ ID NO: 433708 - protein, 347 aa, unidentified
MGHYAGIDVSLECSSVCVVDASGKIVREGKVASEPVTLITWLGSLGVSLERIGLEAGPLSQWLYGALRETGLAVELLETRHVKTALSTMPVKTDRNDARGIAQLMRLGWFRPVHCKSMAAQEVRALLTARKLVQSKLYDIEMSLRGILRGFGLKVGPTTSQSFAARINHLVDGQTSLEAVAAALLSLHAVALREFKSLEKSVRQISRADARVRLLMSTPGVGPLVALTYVAAIDDPARFTSSKSVGAYFGLTPKKYQSGETDVSGRISKMGDGSVRTALYEAAHVILTRPIKGGALKSWAMKLARRAGMMKAKVALARKLAVVMHRMWIDAIKFDTDKASGCLRVAA

SEQ ID NO: 433709 - protein, 312 aa, unidentified
MEKLSYGGIDVSKDRLDVVVLPEGWFFSVSNDTAGWAELVARLRPLAVCAIGLEPSGGYERGIIRALLAAGLSVRRINPNKLRQFARARGVLAKNDRLDARLIAEYVAIMPTRVVQRDGAVERLAEVVTMRRQLCDEHVAVENQAAHLQDAMLRRLSKRRLVRLEADIRLLDKRLAEMVATNAAFAQLYELLTSMPGVGPVLAFTLIALLPELGKMGRKQIAALVGLAPYDFDSGKLRGHRSIYGGRMPIRNVLYMAALSASRYNPALKTFSNRLAHANKKSKVIIVAVMRKMITTLNAMLRDNAAWQPRSA

SEQ ID NO: 433710 - protein, 327 aa, unidentified
MQTITTIGLDIAKSVFQVHGVDAAGQVVIRRQLKRRYVLAFFQKLPPCLIGIEACASSHYWSRELQALGHTVRLMPPAYVKPYVKRQKNDATDAEAICEAVARANMRFVPTKTPEQQSCLMLHRTRHLFIRQQTAVINSIRAHLAEFGIVAPVGRKGVTELLHIVADPSDKRVPEVARACLAALGNQLLSLKEQIVEFDRMIMVWHRSNETSKRLHYIPGVGPILATALVASVADPRTFRSGRNFSAWIGLVPRQHSSGARIGSAASANRVTAICAACSWPVHSPSSAMPRSTAPNTAPGSRHCWPGDRPRSLPSRSPTSLPEWPGP

SEQ ID NO: 433711 - protein, 332 aa, unidentified
MGLEGETLAEGQLRTTQEDLATFFQGLNAARVVVEVGTHSAWVQEVISGCGHEVLVANPRLMDGSKRRKRKNDRIDANKLARLGRVDPESLYPIQHRSREVRQDLVMLRARDALVAARTEIINTTRGLVKSMGTRLPKCSSRSFAQKGEEAVAVEMREALLPLVRLAATLSADIKEYDKKIETLGREKYGHTALLRQVKGVGPITALAYVLTLENPQRFAKSRDVGPYLGLVPKQEDSGESQPQLGISKAGDTMVRKLLVGSAHYILGPFGPDTDLRRYGLRLCERGGKNAKKRAAVAVARKLAVLLHRLWVSGEVYEPLHNAMSAPIAAAA

SEQ ID NO: 433712 - protein, 377 aa, unidentified
MIAAVRSDVSVNESVVYVAFELSKTDWTLALTSGFGVAPWLRTVSAGDLAAVDRALQQARARFGLDAGARVVSCYEAGRDGFWIHRALQQRGLENRVVDSASIEVNRRARRTKTDRIDALKLVMMLVRVCRGERQVWAEVRVPTAEAEAARHRSRERTALTQERTRLRNQIGSWLATCGCRVGARARQRPGWWTTVRDWADAALPAEVQARIAHAEARLALLAEQLAGLAAAQAGHARAVAEQAPLARLVQLKGIATTSASVLLDEGLVWRAFRNRRQLGGLLGFAPARYDSGASSRDQGITRAGNKRLQSVMVQLAWSWVHWQRPSALAQWYQARFGRGKRARKVGIVALARKLLIALWRYATDGVVPTGAVLKVA

SEQ ID NO: 433713 - protein, 404 aa, unidentified
MIFTGVDWAEAHHDVCVMGEDGQVLEQRRVSHNVAGIGELHALIAAHAGEGEPVAVGIEVDRGLVVTALLAASYQVYAVNPLASSRYRDRHATSGAKSDRGDAKVLADLVRTDRHNHRQVAGDSGLAEAVKVLARAHQSAIWSRQRQVNALRSALREYYPAALAAFGTDLAAGDAVAVLAMAPTPQAGRALPRAKIASALRRAGRQRNTEQRTRQIQAALRADYLQAPAAVTGAYGAAARSAVRLISAYTAEIAELEQALAEHFEQHPDAKIVRSLPGLGTVLGARVLGEFGDDRTRFPSPQSRKNYASTSPITKASGRSHVVLARYARNRRLADALQQWAFCSLSTSPGARRYYDQLRARGKTHRQALRQLANRWVGILHICLQRGQLYDEAAAWQHLEAAAA

SEQ ID NO: 433714 - protein, 371 aa, unidentified
MREAGPMTDGTTRFIGLDVHKETVTAAVAETSGPPALVGTVRNDSEEIRRLIHRLAQGAQLATAYEAGPTGYQLHRQLVGLGVRSHVVAPTLTPTRPGDRVKTDKRDALALTRLLRSGDLTPVWVPDLEHEALRDLVRACEDAKVDLLRARHRLSKFLLRHGISAPGTFRPNTTRYDRWLNALRFEPLAQQLAFEDYVGALRAAEDRRRRLHAALQQCAEESPLLPLMAAIQCLRGLAFHSAATIVAEVGDFTRFPTARQFMGYTGLTPSEHSSGPTRRRGQITRAGNAHLRHILVQAAHNARHRPNTDALRQRLLDAPPDVVQLAHAAQRRLYRRYWHLQRRIGATKAVTAVARELAGFVWAVGQRMASA

SEQ ID NO: 433715 - protein, 386 aa, unidentified
MQTVADRPEAPNAIRNDLGAIFISLELSRSTWLITSLSPYSGEKMSKHSVPAGDIYVLLARFSEFKQKAFARSGKSFPIIVIQEAGLDGFWIHRVLQNEGIESHVVDPASIATSRRRRRAKTDRIDGEALLRTLLAYKRGEPRVCAMVKAPTPEEEDRRRLCRERKILIAERVKHVNRIKGLLFCQGVSGYKPLRRDRRQRLDALRTGDGRLLPKHLKAQIGRELARLEQLLEQIKAVEAERDALFAAAKVAAPVPGPPAMLLNIKGIGPEFAAILWSEGLFRHFDNRRQVASYAGLAPTPWQSGSVNREQGVSKAGNPRLRTTLIQLAWLWLRNQPQSALALWFKDRVSRNGGRLKKTTIVALERVAFRLTCIRHLRGSSSIPVV

SEQ ID NO: 433716 - protein, 329 aa, unidentified
MNSDATSGIDVSAKTLDASVLRANSDKRRRRKFSNDGQGHQQLIDWLRLHAVTRVVCEATGVYHLDMAFALTDAGIPLMVANPRQVKRFIEARARNTQSDVIDADELAEYARRMDFVPWKAPPINGFELHKLGRAIGQLTKRHTAMLNRLHAAGASVHTPESIVKSAKREIQFIERERVKLSKEALRLVKADPELARKFELLISVPGIADVSALAILAELIVLPPNLAGKAWVKYAGIDPMSKRSGTSINTSPHIAKRGNARLRGALYMPAMTARQRDPHMHDFADRMIANHKQPIEAIVAVQRKLLLSIHAMFRNNQAWIPQPTQKIA

SEQ ID NO: 433717 - protein, 438 aa, unidentified
MSNKVIFNLDELFISVGIDVGADFSWMSIALPNQQFVGKPYKILHNSIDSLTTAVSKIKEAEELYSLESRIFLESTGIYHYPLFCYLRDKGFNCSVINPIITKNSTNINIRKVHNDRFDSKKAALVGLKPDLKVSLMPSDLALNCRNLCREYYDLMDNRSAYVNKLQGELRMAFPQYLGIFSKVTINTSLTLLETYTSPSAFLKADKQEIIDIIKSTARFGLTYAQNKYNAIIQAATDANQFGYIIDSNIKRIRLYISFIRKYDEEINSILESLHELVDANEDADFVKQIHLIETFKGAGFLSAVSIMGEIGDFSAFSKPKQLFAYFGLDPAVKQSGKFEGTKVQMSKRGSSIARRVIHTLSLQSISISRNGKAKNPVLREYYLKKCDSKPKLVAMGAVSHKVCNMIFAILRDNKPFKIIAPQEHIKQYNSAKCDIAA

SEQ ID NO: 433718 - protein, 400 aa, unidentified
MPDGIRWVGLDVHARESTLAVFDQASGEVTTKRVVGRPHELLAWLRAVERPARMVYEAGPTGYGLARRARAEGLELGVCAPSKTERPAADRIKTDKRDAIRLARLLAAGELVLVTIPSVEREQLRDLVRCREDIRTDLTRARHRIGNFLLRREIYWEGGEAWTRKHRSWLTSVRFADHASRATLADYLHAHDVLIARRDQVEADLGALALTAPCAHTVARLRCMRGIDTLTALGLCSEIGEFERFDHPDQLSAYLGIVPSEHTTGAQRRLGSITKAGSTHARRLLVEAAYHYRRGPVVGEALERRQRGQAPEVINISWRAQRRLNARWRQLRDARKKPNGIIAVAIARELAAFCWEIATWASHPDRIAPTSLPAGDTLTQATPLPHKHTQATRKRLTNSR

SEQ ID NO: 433719 - protein, 365 aa, unidentified
MPHATTRPRPEVKQNGNIPIVGVDLGDTHSHVCILDPASGDVMEQTRLRTRREDVERYFARQQSMRIALEVGTHSTWISRALEDLGHDVTVAHTARVRLIHGGRRKNDQLDAEKLARLLRYDRRLLVPIKHRSEEAQRDLAVLRSRRAVVRSRTLLVNHVRGVAKSFGFRIPKCETRIFAGHARDVIPPEVLPALEPTVDAIENLTTQVAILDTRVRQLCRNTYPETALLTQVHGVAEITALTYILTLEDPTRFARSRDVGPYLGLVPGQKQSGGTDPTRGITKTGDRALRTLLIECAQRILGKRGIDSDLKRHGLKIASVGTKAAKRRAVTAVARKLAVLLHRLWITGEVYEPLKNATPTAISA

SEQ ID NO: 433720 - protein, 468 aa, unidentified
MKKQKTHLTGTKKNVNQDTSKIFMEMPIVNLKAAGIDVGSRSYFVCVGQGSNDVNEFGIFTCNLHEIATYLKNMGIETVAMESTGFYWKQLFVLLQDYGFETILVNARHIKNVKGRKTDVVDSRWIQLLHSLGLLSASFQPDLITEELRIYTRQRQYLIQHASQQVLKINKNLTLMNLQLKPILRDLVGLTGRRLIESILIGKRDPIELVTLIHPNCKHSPEEFVKALEGNYRDEYLFELQQSYDSYNHFQQQITQCDEKINLLLKQRVKMKEIIHLDDCSLTKNYKPPKNITYKNCPPLQIAEYAYHLYDVDLLKIPGINTGTILTLISEVGTDLSKFKTAKHFTSWLGLSPNNKITGGKVISSHTDSKKNRVALAFRDAANSIERIVIQNPLKAFFIRIAVKKGRSVAITATARKIAIIVWKMLSNKEEYSPFVTAKNEELFRIKKMKNIQKAIIEFGIRQNELSF

SEQ ID NO: 433721 - protein, 318 aa, unidentified
MMTNQPLCVGIDIAKRRLDIFVVPSQRHFSAPNTEAGVHQVVQRLKSLQPRLILLEATGGYEFLVVAALREAALPACFINPQQIRQFARSLGIEAKTDRLDARVLALYAAKIDPQPRALPDAPQQELKQLMQRRRQLLTMLQMEHNRLETCHSAPVEQSINSLLKALRTELKSVEQQLRDFIQQHPLWSDKDRLLQSVPGVGDQTSCSLIAWVPELGALNRQQIARLVGVAPLNRESGQWRGRRTIRGGRGQVRRVLYMATLKAVRINPLLEKMYQRLLHQGKAKKVALVACMRKLLTILNAMLRKQQPWCLSPAPTP

SEQ ID NO: 433722 - protein, 382 aa, unidentified
MACKGRGRVFGRLTRSMKKYTVFHSVSAAPAAVKSKVKRSDSLLKIGLDIHREKFVMVAQHEHATPRPPHRFGPAEFMLWVEARLREGCEVHVVSEACGFGDGLYRSLLKLGAHCYVIAPQKLDERNRRVKTDGRDARLLCLRLDRYLAGSKDSLAVIRVPTEAEERARHWGRQREQLVHHRQKLEAQGRDLLVNHELFVPARWWRRQSWNRLGKLVPTWTLAHLELYRPVLLSLDQQIRALTIELEKAAPAELPKGMGALSSVVISREICNWERFTNRRQISSYTGLCPGEYSSGSKRIPGSITRHGNGRLRAALVELAWRMVRYQPQYHAVQKRLAMLARGAQATRAQRKKAIVAVACQLAVDLWRLHTGRCTATILGFK

SEQ ID NO: 433723 - protein, 446 aa, unidentified
MKNSTARKLRQIPVGYLIVGIDAHKKKHAAVVKTQDAFTRAKFKVSNSRDGFVELLERTKAQMVRTDSRGTIFAIEAGGRYWRTLAYFLEERGIPFRLISPFTLKRRREGEDIDRRKNDYRDADMAAELLRTGKFTETKLPQGIYADLRAAYHTYYSLGRERSRATNLLNALLDSLFPEFHSVFKDVSTKTALAVLAAYPSPHVIAEMSMEKFMDTMMTKYKGQYLIRKKVSAIYQAAHSSVGIHAGEGVISLEISLLVERIRLLTGQRQKVEDLLVVLVEWIPESKYLLSIPGLGHITIAGILGELGPLNHYRSGKQLVKMAGINPMQSESANKQASKTPMSKKGRPLLRYCLWEASLNILNHNQEFKAWAKRLQERPLHQNPLKKREARGAVCKRLLYLVFALFNKHSFYEVNYEINIERETISKFTYQAGGVTSPLFLGALRE

SEQ ID NO: 433724 - protein, 392 aa, unidentified
MFYVGIDIAKQNHEASIINSNGKLLDKSISFANSQIGCNKLINLLERFETNTSNTVIGMEATGHYWVSLYSYLLDLGFTVNVINPIQSDAFRKMYIRKTKNDSKDSFVIAQIMRFGQFSSTSLADEDIMALRQLSRYRLALVDECSDWKRKCIALLDQVFPEYSKLFSDTFGVTSRELLSRYPTPEDMLSVDTESLSKLLSQASRGRFGISKAYEIQESATNTFGVSFAKDAFAFQIKQIIAQINFIEEQLKELETEISTLLHQTNTVITTITGVGDVLGAIIIGEIGDISRFESAPQLVAYAGLDASIKQSGDFVGTQTKISKRGSPYLRRAIWLAATVAAFKDPALSIYYQSLKARGKHHLTSIGAVARKMCNIIFAVLRDNEPYVPYIN

SEQ ID NO: 433725 - protein, 341 aa, unidentified
MKNGIIIGVDLAKNVFQLHGACGSGEVLFRKKLSRPQFHKFMAAQPSCLVALEACSTSYYWARTLSDMGHDTRLIPPIYVKPFVKRQKNDAADAEAIVEAALRPDMSFVEPKSAEKQALSMMMRTRDQLIDHRTATVNALRGHMAEFGLIVPVGIKNIVRLKVLVEADDSLPALAKEMAAIHFEQIAQFTCQIDILTGKIKTYGTSNPTLRHLQTMPGVGPIGAMTIETFAPDMTTFKRGRDFAAWLGLIPLQKSTGGKSRLGQITKMGQKDIRRALVTGAMSRIAGHARQGSRAEPWLQDKLDRKPKMVAAIALANKMARQIWAMITKDEAYKMQGVISS

SEQ ID NO: 433726 - protein, 351 aa, unidentified
MSRKTDAVVARTIGIDTGKNTLHLIGLDDKGAIVLREKLTRGRIAARLANVPKCLIGIEAGMATHCVARELIALGHEVKQVPPVYARPFRQGHKNDFRDAHAVAEAVQRPSTRRVPVKTDDQLDLQALHRVRSRLISERTAVINQIRGFLLEHGIPVRQGLRFLRQQLPDILAKRIDVLSSRIIRIIEDLSGDWRRLDERIKNVTDEIEELAHGTEGCRQLMTVPGIGPIIASAMVAAIGSGTAFARGRDFAAWLGLVPKQMSTGDRTILGRISKRGNRYLRTLFMQGARVILLRPANWAKHSFGPWLAAAAKRLHHNVLATAVANKLARIAWTVLVQARSYETRVTSEMA

SEQ ID NO: 433727 - protein, 362 aa, unidentified
MTLGSRDAEDEQDRGRSTIRSPNSRRSRRAPTSSHLQGRERTVDTNSPLWSAFVGIDVSKNSWDVEFHPNTRRLALTANDTDLAKLLAELKTLGNCLIVLEATGGYERTLVSALMDAGHHVAVVNPRQVRDFAKSRNILAKTDRLDAHVLALFAENVQPRTTPKTSEKQAELTELVARRRQVIGLQTAERNRQQQARKTARQSIERVLKVLKNELEQLEAAISKIVESDDDWRQRADLISSTPGIGKPTAHKLVADLPELGELNRQEIAKLVGTAPFNHDSGKKKGRRAIGGGRASVRAALYLPTMTAMRFNPAIRKVAERLTKAGKAHKVVVIACMRKLLTILNHMVKTNSLWIDKLAPTS

SEQ ID NO: 433728 - protein, 406 aa, unidentified
MSIYIGIDWSQDKHDVAFMNAAGAIIARLTIPHQPDGFRKLETTRQQLAVTAVDCVVGLETAHNLLLDFLWDHGYQHIYVIPPWVVKSSRGRYGHSGARDDTLDAQLLADLLRTDRARLQPWRPDSQLTRQIRARVGFISFLTHSANRTHNRLRAALLRYYPQALELFSGLMVPTTLAFIAAYNTPQALTALSYESFASFAQQQGYWNRQGLLACYARLQHTPLQASPATVAAYQDEARLLAQQLRELILAKRQVQRDLNTLFSQHPDQAIFTSLPGVGAFLAPALLAKLGDDRERFPSAASLQALAGTCPVTVASGKHKRVIFRHACDHEFRQVAQQWARCSLRKSVWAVAYWQQVRPRCASDHDAYRRLANRWLAVLWKLWHSREFYNEAYHLQQRRLRSQPLA

SEQ ID NO: 433729 - protein, 321 aa, unidentified
MKGQSELFGKYIGIDISKDELHVALTAEGPVWVIKNDAAGVAKMIERLAELKPELIVMEPTGGYELPLAGTFAVAGLSVAIVNARQIRDFARGAGKLVKNDTIDAMIIAFFAERMRPEPRPLADAETMHINALIRRRKQLQENLLAEENRLRTALVALERVSLQRHIDWLKQEFKSVEKELQVAIKASPLWRVKAELLRSVPGVGKVLCGTLLGGLPELGRLNRGEIAALVGLAPFNHDSGTMRGQRHIRGGRHDVRKALFCATRVSINSKYNPLLNEAFARLHAAGKPKRVAIVACMRKLLVILNAILRTNTPWSPELHA

SEQ ID NO: 433730 - protein, 345 aa, unidentified
MENVILAVGIDISKDEFHACLKEKTEGGTVKIKGTHSFSNDIQGFEKFAAWVFKREKQGTQVSYIMEATGTYYENLAYYLHDKGKRVFVVLPNKIKYFAKSMNIKTKTDKVDSGIISQVGIERKLAIWKPMSANYKQLRDLSREMLSLKKEKSRAMCQLHAMEHSHDKTPSVLKIKGSLIDFYSQSITQIKTEIAKLINVDTELKIRIERIMKVKGLGMNTIVAVLCETNGFELFNNIRQVVSFAGLDVQMNESGTFKGKTRISKKGNARIRQCLFMPALSATVHNDKIKDLYERIIERNPDIKRKGVIAAMRKLLIIIFVLWKNGEEYNPQHVWGINANDIGLR

SEQ ID NO: 433731 - protein, 360 aa, unidentified
MGCVPECRLDNHPLQNGGPEMHATTYGLDVAKRVSQMYWVDGDTGEIVNRRFGRDDLIGYLSRRPPGRVALEACGSAHWWARKIKALGHDVVLLHAKFIRPFVQTNKTDAADARAIWTAVQQPGMRTVAAKTEDQQAMLSLHRIRSLLIKFRTMQVNQLRGLLYEFGASFRAGRVAGLAEIRSRMVELEEALPGALMSCLQDQLKRIEGLQTEIDQLEHRIGAWQKQDAACRAISDVPGIGRLTATALVATMGDVATFKSGREFAAFLGLVPRQSGTGGKVRLGAISKRGDPYLRTLLIHGARSVLCHTKAPTPWQSAIQKRRPANVATVAVANKMARTAWAILARGQAYRRDYVSLRPA

SEQ ID NO: 433732 - protein, 364 aa, unidentified
MFQNTSVGLDVHARSVVAHGVNRETGEVFGHYFGKDHGDEDVVAWVAGLPGPVAACYEAGPTGFGLARAFADAGITCLVAAPSKLLPLPGDRVKTDARDAAHLATLLAAGAVTQVRVPSVDQEALRDLVRAREDVREDLMRVRHRISKLLLRHGVVYNGKTTWNQAHLDWLAHQRFDQEPAQISFDDCLAAVTQATARRTHLDARLEELLPDSGYAPVVAALSCLRGISTLTGFGLAVEIGDWTRFTGSTIGAYLGLVPSEHSSGQSRSLGGITKTGNQHARRLLIEAAWHHRAEYRPGASLRLRKQWEKVDSRVQARADEANRRLHRQWVKFDARKKRPVTANAAVARELAGFCWNLAMMTTK

SEQ ID NO: 433733 - protein, 352 aa, unidentified
MQYYVGVDNHKKFSYLSVMDEKGVVVKEGRVVNTREAVNKFLGKEYTKDTSAVLEAGRNWTVMYDWLEEELDEVKLAHPLKVKAIAEAKIKTDKIDAKTLAHLLRCDLVPEAYVPDKGTRIIKNILRQRMFLVKLATMVKNRIHLIIDRHPEVKNQINLQDLFSKQGLEWLSLVVLPKEDRRILDEELDLLNYLHEKIESSNYWITQIGKDDADVQLLMTIPAGIGKFFALLIANEIDDITRFRDKNKLASYAGLIPSVHASADKVFHGRIVKHGNKYLRWALIEAVWPAIRKDLSLREYYESLKARKGANQAKVAVARRLSVIVYRVLSQKRSYIVNYSGCPHFSLAEAAR

SEQ ID NO: 433734 - protein, 414 aa, unidentified
MFAVGVDVSNGRSMVAVLGARRSVVVQPHEVPHTADGFAELAARLHALDGEVRIVMEHTGRCYESFAMSMYRAGFFVSAVNPLAIKGYQEGISVRKVKTDKADALKIAQFAIDKWEILPHYTPMDTIRYDLKTLHRQFQLSSKTKTALNNNLIALLEQSYPGANRYFDSPVRPDGSQKWVDFVDTFWHVDCVARVSRKAFVERYQKWCKRHGYNFSEAKAVEIHEDARQRFPLVPKSDTCKLMVREAVAQLNAVSRTVETYRAEMDRLASQLPEYETVMAMTGVGKSMGPQLIAEIGDLRRFAHQKSLVGFAGTDPIKDDSGDKVSDSKPSSKRGSPYLRRTLFVIMTILLQLQPPDDPVYQFLDKKRSEGKPYYVYMTAGMTKFLRIYYGKVRDCLKEKGLWEQPNVDEVNPV

SEQ ID NO: 433735 - protein, 422 aa, unidentified
MNYKQNEKINQVKESTLVIGIDIGSTTQYARAFDWRGIELGKVFTFSNSREGFESFKAWMQHLQDKYRKSDVIVGIEPTGHYWFDLGAYLEDEGILLVMVNPYAVKQTKELDDNSQSKNDRKDPKVIAKLVTEGRYSAPYTPDGVYADLRIMVANRKRLIREMTQIKNRFARWFAIYFPEYTDVFGDYEAQSSMLLLKKVCTPEAIVELGAEKINQIWRDAKLRAVGMKRATTLCETAKRSIGLKKGSSAARYEMKLLLEDYEYKKAQLDAVMEEIEKLCRKIPESEQMLAIKGIGVITVAGFLAEVGDVRRFESPRQIQKLAGLSLRENSSGKHKGQTTISKRGRSKLRAVLFNAAIPLIAKNPEFKSLHEYYTTRANNPLKKKQSVIAISCKLIRVFYAILANGVTYDPQKMLSDIHRQP

SEQ ID NO: 433736 - protein, 321 aa, unidentified
MTKVNKIIGIDISKEKFDACFSFQPYGYSSRTYTYNEEGIRSFLTEVPSDCICIMEATGVYHLRLAYALTKAAIYVSVVNPLSVKNFSRAVMCRTKTDKADARQLVDYARRMELVEWKPTSENYIRIQQIYRTIELFVTNITQLENQLEAISNSPVQDRMLCRILKRSITIQKRRIERLEKQIEELIAEDDKTVVKRLCSIPGIGKKTAVAVLTATKGMHRFNNYRQVSSYFGLCPRIYDSGKSVHGKAHICKMGMGWIRRLLYMCSISAAKHNEACNDLYLRLTERGKPIKVVLIAIANKLIKQIFAIVKNNSLYHKTFA

SEQ ID NO: 433737 - protein, 418 aa, unidentified
MKNIKTKKLKTVNGKTLIVTVDVSKDKHSGYCRCPDGTEMKPFEFFNNGRGFGEFWNRISKTKKDHNLEEIVFGFESTGPYAEPLLQYLRKRAVRIVQVNPMHTKRLKELQGNSPNKTDYKDPKVIADIIELGHALTVVVPEGAAADLRRLTQARERSMQRRIVLLNQLHDLVYLLFPEFLQVMKDMKTKTAQYLLKHYPTPQGLEEYGLEELTKTLKKVSRGKLGKGRAEALYEAAKMSVGIIEGQRSMVLEVKEILTHIEASDQFIDSIEKEMAHTLKQIPYSRFILSLEGIGEVTAAGLIGEVGDFNKFTTIAEIEKLAGLDLFEISSGKHKGTRRISKRGRSLMRKLLFFASLNVVRKGGVLHEAYQRLLKGGKPKLKALIAIARKLLRIIFALVRNHSVYVTDYCKPQLKMAA

SEQ ID NO: 433738 - protein, 367 aa, unidentified
MSKANSASSNTIWVGLDVHRDSITSAVLAPGRETPTLDRWFHDEPSVRRFVGTLGDPALVRLCYEAGPTGYDLARLLGRLGVATEVIAPSLIPVAPGAKIKTDARDARRLVHLYRAGELTAVHIPTPGEEAIRDLARARADLVIDRTRCRHRLSKFLLRHGQVYRGGVAWTLAHEAWLRQLHFDDAALQSTYSHYRAIVAGLDAHLAAVESDLGVYLQKGPFAQAVARLGAYRGVSELGALTLSAEVCDWRRFPRATALMGFCGLVPSEYSSGERKVRGRITKSGNLHLRAQLVESAWAYQHRPAVGATIKKRQERCGHDTVTRAWAAQLHLCAKFRRLAERKSSRNVVVTAIARELTGFLWAEMAA

SEQ ID NO: 433739 - protein, 339 aa, unidentified
MIIIGVDYHPSSQTIAFLDQETGECGERQLNHSDGEAEKFYRELKQRGVSVRVGMEATGHSRWFERLLAELGFELWIGDAAEIKTKRVRKQKTDREDARLMLKLLLENRFPRIWVPSPENRDLRQLLWHRHRLVQMRTRIMNQLQAVAMNEGYRWKKKLFSEKGRGLLEKLPLAPWASRRRKELLELLDQLDPKIAELTAAVEQEAKKRPEVLLLMTHPGVGPITGLVYVLVIGMPERFPCGKQIGSYTGLIPCEDSSAGRQRLGHISKQGNTLLRFLLVEAAQAAARCNPDWRRRYMHLMMRREKRIAKVAMARKLGVRLYWMWRNNWRICLASRHFF

SEQ ID NO: 433740 - protein, 434 aa, unidentified
MIADKDPAGLMLRAIRNVAAETCDREATVDEDGAVMIENHESVDVFLGVDVGKSAHHAVALGRDGSVLLDRPLPNDEGELREIIRGLRQAGTVLLVVDQPATIGALPVAVAQAEEILVGYLPGLAMRRIADLHAGHAKTDPRDAFIIAQAARTLPHALRSISVEAESVAELGMLCGFDEDIVKQINATANRLRGLLTQIHPGLERVIGPRLDHPAVLQLLQRYPSPDALAAAGKARIGNLLVKRAPRIGRDLAEQIMTALGQQTVTVAGTSAARLVIPRLAEQLQTLRRQRAEIAAEVERLVEAHPLHRVLTSMPGVGVGTCARLLTEVSGRHFDTAAHLAAYAGLAPITRRSGTSIRGERPSSRGNRALKRALFLSAFAALRDPVSRAYYDRKIAQGKRHNQALIALARRRIDVLYAMLRDGALYDPHHALAA

SEQ ID NO: 433741 - protein, 337 aa, unidentified
MNNIEACGVEVSARELAVARRGKQGVQLTRFANTAAGHRQLLRTLTRGGQRVRVVLEATGLYALDLALLLSAHQQVQLMVANPRAVRHFAQAMMQRSKNDQLDAVVLLEFAERMPFTPWVRPAENTLALWAIARRLQALTKLCTAEKNRAHAMGLSAAIPSTVRQDIARSLRFHQRAMKKLRQQALQCIAADAQLQQRYDLLRSVPGLGEISAVQALAELLLLPADRDVRQWVAYAGLDPREYSSGTSVRKHTRISKVGNAHLRRALYMPALVASRVEPHMRGFYEHLLARGKSKRQALVAVARKLLHAIYGMFRSQRPYDGTRVYLLPSCLAEKPS

SEQ ID NO: 433742 - protein, 458 aa, unidentified
MQANGFLGIDVSKGYADFLLLDQHKQVMEESFQLQDNKAGRSQLGELIEKWFSMGLEMLYCGVESTGGYENNWYHYLKTLSQHLNLKVARLNAKAVKAVSDASLKRTITDEVSAENIAGYLIGFPEKIDYGKCGVQQTRIQFQEGRKQYTYVRMLQKQKVQLTNQLEKLLYQYFSEVLVYCRHRVPGWLLRMLSSYPCAASVVRAGEKKLSSIKGISIDKAKALIQKATLSEQAVSKQIGHVIAATSKEILHKDQLLKAEKNFLVEMNRESEDVKLLISIPCIGEESAVALMMEIENIGRFELAKKLTAYFGVHPTYKQSGDGIWATHMSKKGRSEVRAVLYMAAMTGIRHNVILKQIYTRFRAKGMKHYQAMGVVMHKLLRIIYGVLKTKTKFDAAIDQKNMEQAEEKQKQNQQKIKESKEIKQQKKHRYQSATPQDESISRRAAQKRKKQAASQAS

SEQ ID NO: 433743 - protein, 402 aa, unidentified
MYTVGIDISKGKSMIAVMRPGGEEVLRPFEVHHTSHDLTLLCDKLKSLGGETRVVMEATGSYHLPIAWLLDHEGFYVSVVNPVLIHGYGNNSIRRGKTDRKDALKIAGYGLQYWNELPRYMPQDPARQLLKTCYRQYQEYSKISSVFKNSLISLMDLYFPRVNDLFTSPVRPDGSQKWIDFVAAFRHCDCVRGLSERAFITRYQRWCAKHGYQFSPDKAKKIHAFASNCVAVSPNSESVRVLVDTAVSQLRTNLISLAVVRARMQALASSLPEYPVVMSMFGAGPSLGPQLMAEIGDVRRFHSKKALVAFAGIDAPPCQSGQVNFLSRSIFKRGSPALRRTLFLVMNVINMCSPAEDPVYQYMAKKRSEGKKYQVYMMASANKFLRRYFASVNAYLDTLGST

SEQ ID NO: 433744 - protein, 433 aa, unidentified
MKVKSKDRLNRKLKLITTKTLIGGVDIAKHTQWARFVNYLGIEIGGAIKFNNDQNGFEDILATIRRLCKEHRFKHAVIGMEPTGHYWKTLANFLMKQKNITVVLVNPYATKRAKELDDNSPTKSDKKDSLTIAKLVKDGRYFETYLPHDVYADLRVLSTTRQGLNKRKSAIKNTITAIMDEYFPEFISVFKHPLKGKASRHLMKTLPFPGFILEAGEEGVLEEVRAAVKKTVGRKKVRQLIEVATSSVGVDYGEEAARFKLRQMVEELELLDSQTEELEAKMSQMLEQVPHTKYLMSVKGFGIVTLATCLGELGDPLRFDDPKQMARMAGYNLTEDSSGKNKSGTCISKRGRKALRCVLYQMSLTMVAVNPETKRLYHYLKTRKENPLKKAQALVVISKKILTLIYTLSKKKEMYKPKKFFGVVRKKQFAKAA

SEQ ID NO: 433745 - protein, 353 aa, unidentified
MMVFVAVDVGKRRCVTCVMDQDGSILDTGSYPNTAFDAAHYARQVVEKYGECKAVVESTGNMCMKTYEAFESNGVEVKLANPVKTRAIAEARVKTDKLDSKILAHLLRADLIAECYVPSKDVRLSRALLSHRVNITREQTRIKNRIHSLLDKYDLECEYDDIFGAHGMRWLHTLHLNGHDHEILQSLLRQLELLQDEEENANNTIAKDALHSQYVPIIMSMTGFDYYSASVLAAYIADISRFPSPSHLVSWVGLCPSVYQTGESLYMGRMKGGSRKVKWIMTQAANTAIRSDPRMRAYYERKLRRHHHNVAVTHVANKMLRIIWHMLRENRLYNERKERLYESKLKRMTHTAQ

SEQ ID NO: 433746 - protein, 349 aa, unidentified
MFIGIDFAKEKFDAAIIEACGLEEFGTRQFGTFVNDKKGFRQFMKWVRTNSPTSTEQEWLFCGEDTGSCSLPLSKWLYGKGIDIWIENAYTIKHSSGIQRVKTDRADASMIAEYAWRHQDKAKIFEPLSDSLTQLREVFLYRHKLVQQRVAMEVRRMDKATAENSKAISFINRKSKHLMAEIDKAIKECDDMIDKIIQADEELKENYEIITSIKGIARQNGACMLIFTNNFKRFDMDARKIACYYGVAPFGKESGTSVHSPARTSHFANKLIKSLLSQAAQIAKIFNPEIKEYYERLIERGKKHSVALNNVKNKLLRIIVALVKKKTKYDPETYKYYMRRLDLKFAHSK

SEQ ID NO: 433747 - protein, 331 aa, unidentified
MSNIIGIDVSKASLDCAYLRDPDQKRAKRLSCHNEVSCFAALLAWTEARSGLPVQSLAFIIEPTHIYHEQLVQFLHNTGATVYLVNPGRVRKFAEGIGILSKNDLVDADLLARYGLLARNLIVYEPVAQEVNDLRSLLNRLDVLERNLRSELNRQEKVGKTMVFHRLEQQSIARAVKRLKAEVITFKRAIRECIKSTPSLQQSFSLLCTIPGVGAKTAWIMIVILASRPFMSAPEVASFLGLNPIEKRSGNSQYRRPRLSKSGSGHYRQKLYFPAMVATRKNPDIKALYERLLAADKTKMCALGAAMRKLVHICYGVIKNQTPYQVQTTQS

SEQ ID NO: 433748 - protein, 400 aa, unidentified
MNDNDGIGVFLGLDVGKSAHHGHGLTPAAKKVFDRQLPNTEPRLRDVFTGLKTKFGTVLVIVDQPASIGALPLTVARDVGCQVAYLPGLAMRRIADLYPGEAKTDAKDAAVIADAARTMPHALRSLELTDEITAELTVLVGFDQDLAAEATRTSNRIRGLLTQFHPSLERVLGPRLDHQAVTWLLERHGSPAALRKAGRRRLVEVIRPRAPRMANRLVDDIFEALDEQTVVVPGTGTLDIVIPSLARSLGAVHEQRRATAAQITALLEDHPLSKVLTSLPGVGARTAATLLVTVGDGTSFPTAAHLASYAGLAPTTKSSGTSIHGEHAPRGGNRQLKRAMFLSAFAALHDPASRTYYDRCRARGKTHTQALLRLARQRINVLFAMLRDGTFYEPRTPRPA

SEQ ID NO: 433749 - protein, 317 aa, unidentified
MDKPPAAARFVGLDVSKDRVDVHVRPDATAFACTTDAKGLADLVSHVTSLQPQLIAMEASGGYEGVVAAALAEAGLPVAIVNPRQVRKFAGAIGRLAKTDAIDAGVIAHFADAIRPAPKPMPDALMLRLRELLARRRQLVVMINAEKQRLAKAADKLAQRSFKTILRSLEAERARIDRAIDKLIEDSPLFCAKQDLLKSVPGIGDVVARTLIVELPELGTVSRHQIAALAGVAPMNRDSGHYRGKRRIQGGRVEVRAPLFMACLVAIRHNPPLRSFYRRLRDAGKPARLAIVAVMRKLLTTLNAIIRDHKAWAHAQS

SEQ ID NO: 433750 - protein, 373 aa, unidentified
MKFIGIDLHTNRFTCCYRDDNSSGENPKGKITETFTLDAKGLAYFYSTLTTETYVLVEATITTFSFVRLIKDRVKEVIIANTYELKQVSLARCNTDKIDADKLCRILKAQILSGEQLVTPVVLAPEGIQVLRGLFTTYRLIQKQNTQLKNRIHSLLKEQLYGFTQEEIFGKKDREHIRAIAPGTAMSFQVNLFLDRLERSEADVETLKTQVLLQAAPYMAQIEILTSMKGISVFIAIAIIADIIDVSRFRNSKMFTSYLRSAPRVSNSNTSKSTYGINKKGRKLSATLLTQSLNHVLDSSPKLRRWFDALSKYKKAGLVRTGLRRRVLAEIFQMLKKKEYHYARDGKNHEAKMAQYRRFLENQKKGNILEEVA

SEQ ID NO: 433751 - protein, 345 aa, unidentified
MQISVLGIDLGKNSCSVVALDGAGAVVKRRRMRPESIPAFASKLPTCIVAMEACCGAHHLGRLLTAQGHTVRLMSPEYVRPYVKAQKNDDRDAEAIAEVATRPTMRFVELKSAEQLDMQTLHRARDRLIGKRTALINQLRGFLLERGITVPQGRRKLEQHLTTMPNADTDTSLSARMRQLIEDMRAEWFDLDQRIVAFDNEFAAQARRDADARRLATIPGIGVLNATALAAAIGKAETFARGRDLAAWLGLVPRQITTGGKPRLVGITKRGNKYLRKLLIHGARAAMPVLAASATPLGSWLQGVMKRAHKNTAVVALANKLARIVWVLLRRGEVFDAGATAGAVA

SEQ ID NO: 433752 - protein, 352 aa, unidentified
MVIVGTDVHKRTHTFVAVDEVGRKLGEKVVPATTAGTAVAWAREQFGDELLWGIEDCRNLSARLEIDLLGMAQSAVRVAPKLMSQSRACARTRGKSDPIDALAVAHAVLRHPDLPVAAHDEVSRELKLLTDRREDLVAQRTSTINRLRQRVHELDPAAEPNPGSLHRPTPCATLAAWLNTQTGILSELARDELADIVRLSEAINAVAARIGERVREVAPTLLALPGCGELTAAKILGETATVSRFRSEAAFARHTGTAPIPVWSGNTAGRVRLSRSGNRQLNAALHRIAITQIRLTDSAGQRYYRKRLAEGKATKEALRCLKRQLARIVYRHLHTDENTRKTKPHNNAQTAA

SEQ ID NO: 433753 - protein, 337 aa, unidentified
MKYSGIDLHSNNCVVTVTDDSDKVVAEKRLPNDLEKIIGFLKPWQGELAGVVVESTYNWYWLVDGLQEAGFDVKLANTGAIRKYDGLKHTGDEADARHRAHLLRLGILPTGTILPPAHRALRDLARKRLQLVRSRTSHILAIENILARQKGARISSNQIKRLTLEDVTAMGLPADVCLAIQSNLAVIRTLNAQVELLERRLQESIGDRPEYALLTSVPGIGRILASIILLETGPIDRFAEVGNYASYARCVDSQRISNGKKKGEGNTRNGNKYLAWAFVEAANFALRFCAEAKRFYERKRAKTNNAVATKALAHKLARACFHILKEKQPFDKGRCFA

SEQ ID NO: 433754 - protein, 417 aa, unidentified
MNTTDYVAFVGLDWGDTTHAFAVQATAAATNESGTVAATAEAFHQWLAQMQASHPGRVALAVEAGRPALLAAMAEYPWLDVFVVHPATCDRYRDAFRPSGAKDDIPDAKTLLTLVVQHRTELHRWRQDGPQTRELAALVIARRHAVDRRTQWCAQWRTALKGYFPQALVLLGDELERPLALDFLQRWPDLTALQKARPATLRGFYSQHSVRRPELVEGRLALIKAARPLIRDSAVIGPAILQVQMLVETLRVVQKHIERFDTRIEAVFAAHPAAAFFRQIPGAGPAFAPRLLVAFGDERTRYPAAASLQMYAGVAPVREKSGQQLWIHWRWLAPTFLRQSFVEWAGLTVLYSPWAHAYCFRQKRLGKKRQAILRALAFKWIRILWRCWQNHEPYDEQRYLASLRRRGSPLAADLAAA

SEQ ID NO: 433755 - protein, 326 aa, unidentified
MDYYLGIDVSKAKLDVALLSPENKIRSKVFVNDLAGFAALTAWLDAHVSEGRSSVHACLESTGTYHEGVATFLHDERVTVSVVNPMLVKRFAESQALRVKTDKVDARTLARFARERRPEAWEAPSKGVRALQALVGRLDALMEMRQMETSRLAIAHAAVQASHRTVIEELSRQIESVRELIRQTVDDDPDLKRRQELLETIPGLGERTIPQLLAYIGRPERFKSSKALAAYAGLVPWIRESGTSLNRRRGMHPMGHVQLRKCLYFPAMVAGRYNPVIARFWQQLSAQHKPGKVVVVACMHKLLAIVYGVLRSGQPFDPARAARVAT

SEQ ID NO: 433756 - protein, 405 aa, unidentified
MLISAHHSQAPSAVRVDLSAIFVSLELSQSKWLITSLSPGNGEKLSRFTIAGGDVPGMLARFDEVQRKTQSRTGQRFPLIVIQEAGLDGFWIHRVLKAERIESHVVDPASIAVSRRRRRVKTDRIDGEMLVRTLLAYKRGEPRVCAMVRAPTPEEEDRRRVARERKTLINERIRHVNRIKGLLFGQGIRSYEPLRRDRRKRLDTLTTGDGRPLPAHLKAQISRELDRLELVMEQIQVCEQARDALLTATQPATAAEPANPVQAGEPGLTTPSVPAMLLALKGIGPETASVLWLEGLSRHFDNRRQVAAYAGLAPSHWQSGQIDHDQGVSKAGNPRLRTALIQLAWLWVRHQPDSALTLWFKARVAQNGGRLKKTTIVALARKLLVALWKYVNAGVVIEGAAVQPA

SEQ ID NO: 433757 - protein, 319 aa, unidentified
MAKIVLGIDVSKKTLDAVLIFDNRTFSKQFKNTTEGFKSLTAWLESLKIEQVHACLEATGTYSEAAALFLHERGHRVSVVNPLRIKGYGQANMQRNKTDRLDARLIASFCQTQEPDEWLPPSAEVKQLQALVRRIEILEQMRQAEENRLANSVSEVQPSIERMIALLKEEIIELERQIKEHIDRHPNLKRQSVLLQTIPGIGSRTAHLLLSEIEFERYSSARSIAAQAGVTPRKRQSGTSLKQTNLSKLGNARLRKALYFPAIVARQHNEIIKEFAKRLKSRGKTPMQIVCAAMRKLLHIAFGVLKHKRAFDSSLAFSA

SEQ ID NO: 433758 - protein, 405 aa, unidentified
MMVIGVDTHKRSHALCAVDEGTGRVRGSREIKADEAGHQAAVRWARGLDSERVWAIEDCRHVSRRLEQALLAAGERVIRVAPNMMGASRRSQRERGKSDEIDAQSVARAVVKDGVESFPAAYLDERAMEIRLLFEHREDLVRERTRMQNRLRWHLLELCPEVEAKLKRGGLSQLRALERLDRRLRQLSPCVRLRIAREELGHIRALTRQADQLERELLELIRAYRPALLDEQGCGALTAALLIGRTAGAERFRSDACFGRQSGTAPIPCSSGQQTQHRLDRGGDRQLNRALHTIAITRAQRDPATKEYLARKEADGKTHKGALRCLKRYLARRFHRLLSEPPLPAQRTITGEQVPQPAQALDAPACDASRDMSRTVQPSAIAERPAPKPETQRINAAPNPMICIA

SEQ ID NO: 433759 - protein, 440 aa, unidentified
MAMRKREDLVFPNAAAVDVGASSHWAAVPPHSTDAPVREVGAMTDDLNGLADWLLACGVDVVALESTGVYWIPVYEVLEQRGLKVWLVDARQVKYVPGRKSDVQDCQWLQKLMSYGLLRPAFRPGADVCVIRAVARQREVLLTQQASWVQRMQKALVQMNIQLTEVISDVVGQTGQAIIRDIVAGQREPRLLAKHRHRRIKASEQDIVRALTGNWREEHLFVLKQALAMYDDIAGHLRECDAKLHSLLAERSAASVDLGKAPRVGSKARAQFDVRQQLANWAGADLTRINGLGLDSVMKILSEIGTDLSRFANVKHFCSWLGLCPATKISGGKVLSARTKRSANRVRQALKMAAMSLSHSDSALGAFYRRLCGRMDKPRANTATAHKLARMVYFMLTRGEAFVDQGQQRYEEQRRQRSIVALKRRAAALGFQINPVEAVA

SEQ ID NO: 433760 - protein, 293 aa, unidentified
MFEGKVVHEEETANHQSAIMSLLHQLEEDYGIASDQILVCAEHTGQYTFPLACACKAVECKLWLENAAEIKYSSGVQRGKNDKVDAKRIAIYARRFQDKVQYYERPTEDIERLKQLESERTLYVADLAKYKGQVKDQKDYMPKALYERKMKRLQALMEDLEEAIQAITDEMDEVIVSCPVLYRQRELLMSIDGVGRVVATNMIITTEAFTRFDDPRKFNCYAGVAPFSYSSGSSLHSKARVSHRADKVMKRLLHLAAVAITHRIGGELKKYYERKVAEGKNRCPSSMSYEPNL

SEQ ID NO: 433761 - protein, 366 aa, unidentified
MQKNSTMRSMGNRIFKAGQLTIGLDLGDRWSFYCVLDESGKVILEEKLTTTPEAMKQTFARTPRSRIALETGTHSPWVSRLLTQLGHEVIVAHAQKVDLITKSTRKDDRHDAKTLARLARIDPELLGPVRHRSAQAQIHLTVIRARAELVRARTALVNAARGSVKSYGERLPKCGTQQICRELGAGLSTELRDVLEPLFREIETLNERIKEYDQRIEKIAKETYPETELLKQVKGVGDLIALTYVLTIEDPHRFPKSREVGCFLGLRPGRRNSGESEPQMHISKQGDEYLRTLLVQGAHYILGPFGEDSDLRRWGGKLAERGGKNAKKRAVVAVARKLAVLLHRLWVSGEVYEPLRNSQKMMRAAA

SEQ ID NO: 433762 - protein, 410 aa, unidentified
MDVLYPNCTGLDIHKDTVVACSRRLIDGKVIRELRTFKTTTGELLALSEWLATLGATHIVMEATGVYWKPVWNILSDGDFELTLANAAHVKNVPGRKTDVNDATWLADLLAHGLIRASFVPDTQTQEQRGLLRTRKQLTRERTSHVQRLQKTLEEANIKIDSAISDVTGTSGRAMIEALIAGETDPLRLASLASSRIEASPETLGEALRGRVTRHHRFLLRLHLQQIDALDGAIAQIDKEVEANLAPFRELIPVLTTIPGIGELAARVLLAEIGADMSRFPTSGHLISWAGLCPKNDESAGKRRSTRMRKGAPWLKTTLIQCAWAAARKKGSYLQAQFHRLRARRGAKKAVGAVAASILTAAYHMIANGAFYKDLGAGHFERRAKPTQIKRLVAKIQSLGYQVEIKPLAA

SEQ ID NO: 433763 - protein, 430 aa, unidentified
MKSNTQNAKIEAITEKTLVLGIDVGSETHYARAFDYRGIEYSKKPFKFSNTEAGFVTFKEWILDLKEKHEKDKVVPGMEPTGHYWFNLGKFLQDNEMKPVLVNPHHVKKSKELDDNNPTKNDRKDPKVIAGLVREGRYMIPYLPDGVYADLRTASNIRFQLQAELTRIQNRISRWFNIYFPEYKTVYGRPDAKSGMLILKQAPLPEDILTLGIDGVNQIWRDAKMRAVGKARAKTLIEAAEHSVGSKEGAISARMEIRMLLEDYESRNIRLQEIMTLIEELVNQIPMAEKLLEIKGVGIKTVSGFLAEVGDISRFNNPKELQKLAGLALVENSSGKHKGRTTISRRGRKRLRYLLFEVAMSLVAKNPEFRELHTYYTTRRLNPLKKMQSLMAVAAKLIRVFYVMLTKGVDYDPKKMVGDIKRLAVYLQAA

SEQ ID NO: 433764 - protein, 436 aa, unidentified
MDADYAIRLQWFRQFKEHVNASTRTLIVGIDIGKHTHHAFLGTPAGRTIHRRLIFENSIHGFDRLLFLIKRYVSDEKLAEVVIGVEPTSVYHKPLAEYLIARGYCVVYVTNAAIKKNRAILDGRWDKNDTKDAANVADLVSRGRCHFYDLPDINLRDIRNLLSLRKRLKKQEHRLITRIRNNLVAQYFPELDGSWYSCQQENLAIVRFCLSPQKVAQLSFDDFCRMVTRRRRGVRQYKRLRHIHEVAQDSIGCQLGSSVDFEAQLLVESLQQAREQTREVEEQLYGICESYKEYALLQTIPGFGPFVSAAVLGAIGFAQRFENAKQLVRLAGLDLNASRSGKRSQTAVPVISKVGKADLRYALYQAAKVATSLTAEFKAYFKRLLKGREKEKGIKTKMRVKVSAKMLVIAWTLMKTQQPYKAGLLVIDEPVQLRRR

SEQ ID NO: 433765 - protein, 363 aa, unidentified
MKMQDFSNVKGNRINFNGKMVNIGVDMHKQSWRITALVEGEVAFTGTLAKPNYDSFRKLLARFEGNCVRIAYEAGPGGFGLYDILTADGIECMVTPPSLIPTESGSRVKTDKKDSLKLAKLLESNMLKKVWVLSPEERAHRQLVRTRRQIVDHRSNVMRQIKSLLFFHSMDIPFSSRQQWTVPFIKWLHELNLDDQCLNQSLKTLVHLFDYLSVEKKRLTHEVIELAKEEKYTQRVKLLNTIPGIGTLSGMEILVELQEITRFKTSDELAAYLGLTPSQYSSGEYVRMGHITHAGNDRVRTTLVESSWILIGKDPSMRRKYENIKHRRGGKRAIIAIARILSARLRRMLLDQVPYEIGFQKAA

SEQ ID NO: 433766 - protein, 376 aa, unidentified
MREKLRFLGLDVHAETITAAIVEADGEVRSLGTIANREDSIRKFIRKLGPVESLRACYEAGPTGFVLYWQLAQLGVDCVVVAPSLVPKKPGDRVKTDRRDAIKLARSHRSGDLTAVWVPDENSEALRDLVRQREAAKQDQLRARHRLTKFLLRTGRRPPLGLKAWTERYLAWLEQVRYTQPAQQATLVDCLNEVQHMSARVKRLEEAILEVVKLAPQPMQEVIRGLQSLRGVAHISAVTIATELGNISSRFRSARKLMGYCGVFPSEDSSGKRKRQGGITKAGNAHLRRIVVESAWCYRHRPCVGAKLRKRQQGVPAQITEIAWKAQNRLHKRYMKLTMAGKDHRKIMTAIARELLGFIWAISIKAEQACTPQLAV

SEQ ID NO: 433767 - protein, 320 aa, unidentified
MQSVCGIDVSKDRLDIMVLPEQQYFSVRNDAAGWAELVERLRGLSISAIGLEASGGYERGAMRALLAAGMPARQVNPFKLRQFARASGVLAKNDPLDTRMIASFVAIMPTLPAQRRAPAIERLTELLAVRRQLNAEKVAAENASRLLEDPMLQRLSRRRIRRLAADIDMLDRHLTQIVGTDAALAHRYRLLTSMPGVGLVLAGTLIALLPELGHMGRKQVAALVGVAPYAFESGKFKGRRCIWGGRAPVRNVLYMAAMSASNWNPVFKAFHDRLKAAGKLPKVVIVAIMRKMITALNAMVRDDVVWADHLSGRHSVPTAR

SEQ ID NO: 433768 - protein, 389 aa, unidentified
METAAEVNLQTGGEQVAVGVDPSRNALQLAILAPHGTVSKRFPLTPASLRSIDALLGQGQGVRIGIEGAATCGALVLLHWLRQGYDIREVNPQISKRLRECFTEAHTDVSDAQGLAWGVRFHPNLPQVRLTVITAAWKRLSRLRTRLVKAQTGLYNRLHSLLAESYGAVYKGLFPKLQSKRALEFFQTFPTLDDALNDLPQVRSLLGKEGAALLEEAGCWGEDLYLETLRLEIHLTIQLLFAHRAAIKWVEGKMAELSRADPQVERLRAIPGMGTTLALTILGHSGDFSRFRSHDAYAAYCGLAPAVWQSGQSRVYARHRRRYSRPLRQAFLQLALTQLRLNPESRAYYERKRGEGKPHWVALTALARRLCKRVYNKLMREEVPAMSAY

SEQ ID NO: 433769 - protein, 341 aa, unidentified
MVHVGLDLSRTRLDVHVMDEAGAPLAVTTAAPDRGGLAVLADRVAGFGGPVYAAIESMNGARFVHDQLELAGWQVEIADAQKVKGLAPLACKTDKIDSWVLAELSRRDLVPAIWLPTPAVRAEREQARWRLHLVRHRTALKNRIHATLLAFGHPCPVADLFGVGGRALLHRLELPEPWAADTAAALQLIDQLDTEITTCERALRRLGADHRYVPLLMTTPGVGWVLGYTIAAEIGDITRFPSPTKLAGYTGLCPRVYQSGGKDHRGPLSKNGPKYLRWALIEAATHAGRHPVYAERYRRTKTRLGRQRGPKIAQVDLARRLAEAIWHMLTTNKPFAPAGAA

SEQ ID NO: 433770 - protein, 344 aa, unidentified
MTSMNFIGLDIHKKTISYCVKDAAGEVLAEGTILSTRQSLDVWMRTLCEPWTVAMEATMFTGWIYDYLLPHAAAVKVAHPLMLRAIAAAKKKNDRIDASKIADCLRCNFLPECYMASTEIRERRRTLRYRKLLVRQNVQLRNKVSQMLMESGVVYNKQKLHKVGYFKELMTTNPDIGEGLRPLLTICRETIVRIGKTEGALVRSLARDPLLSDRVQRLMTIPAVGPITALTWVLEVDDVARFGSVKQAISYCGLCGAERSSADMVKRMPISKQRNKHLQSVLVEAAKLGPRLSPDLALVYETEKQKGHANRATIAVARKLVAYLLAVDRSGREFVVAGERREAA

SEQ ID NO: 433771 - protein, 356 aa, unidentified
MSRDVKYIGMDVHKEAVVIAVLNSSGKLVMESIVETKASSILQFIHGLRGELHVTWEEGTWAAWLYDLLQPQVTQVLVCDPRRNALLKEGNKSDKVDARKLADLLRTGMLRPVYHGEHGLRTLRELGRSYQTLSQDLNRVMNRIKALYRGWSIPCAGTQVYAPRYREEWLQKIEHAGVRRRAELLYQQLDGLQALRRTLRPELLAESRTHKAAKLLRQIPCIGPIRAARLIALMQTPHRFRSKRQLWTYSGLGIETRDSAQYRYVHGQLQRTKKPQQIRGLNRNHNHEMKEIFKGAATRASCGVGPLRDFYVALLAKGMKPEMARLTLARKIAAIALTLWKKEERFDAEQLKPQAA

SEQ ID NO: 433772 - protein, 455 aa, unidentified
MRIFIGIDIGKEYNYASFLNNEGIEIDKRFKFKNNHLGFLSFKDNIDKLTYDCNFNYDDVLIGFESTGHYWINTDWFITEKLNIKTVMVRNDAVRHTRALNSKGKGKNDSLDSRTIAECLKNGYYFDVQGRKEDYIVLRRLTRERSELEKEIARYKNRYRAWLDVNNQIFLENFSNVFSAGALALLKVYPSSLDIVQDSYLEVREKLKEVGYKRTNNTFKIYYEEARTYKNIINGITYADRLEINEYIEALEMYMKKKESLDEKIEALMNYLEGKVYNSLSQIKGMPVAQVASLLAEIGNVNNFKVSRHLISYAGLNVQGEGSGKNKGYSWISKTGNRRIRKEIYVITFTLVKHNDYFRGLYCYYKSYKRPNEKSNKEMLIALACKILRVIYGMLKYNVEFDLNEMLKNYDFRNINKEKFIDEFLGNSEKKQKIISKEIENIFLSNRKSNEKSDD

SEQ ID NO: 433773 - protein, 342 aa, unidentified
MKEVSIVGLDLAKRVFQVHAARSDGSVVLRRKLSRGQVVTFFTELPKCIVAMEACATAHYWAREIGKLGHDVRLIPPAYVKPFVKRQKNDAADAEAIVEAATRPSMRFVVPKTESQQACSMLFRTRDLFVRQRTQLINALRAHLAEHGVIAPQGIASLALLAEIVEDHDTGLDLIVVETARLYLEQLGVLSSRIASLEKALRSEAKRSQSTARLMSMPGMGPITAMAVEAFAPTMVTFRRGRDFAAWLGLVPKQHSSGGKQVLGRTSKMGQRDIRRLLIIGAMTVIRWACRKAPPEHSWLARMLARKPRMLVAIALANKMARSVWAMMTKNEDYKDSALAAA

SEQ ID NO: 433774 - protein, 343 aa, unidentified
MHTVTTIGLDIAKSVFQVHGVDATGQVVIRRQLKRRYVLAFFERLRPCLVGIEACASSHHWSRELQALGHTVRLMPPAYVKPYVKRQKNDMADAEAICEAVTRANMRFVPTKTPEQQGGLMLHRTRHLLIRQQTSVINAIRAHLAEFGIVAPVGRKGIEELLGVIADPSDKRVSDVVRACLAALGSQLLGLKKQILDFDRMIMAWHRSNQTSKRLNCIPGVGPLLATALVASVADPKAFRSGRNFSAWIGLVPRQHSSGGRNRLGSISKQGDRYLRSLFVAGAFAVIRYAKLHGTKYRPWVAALLARRPTKVAAIALANKLARMAWALMARGERYNYPAGLRV

SEQ ID NO: 433775 - protein, 379 aa, unidentified
MTQITPALIASIGRVGVDLAKNVIQVHAVDGAGRRVVGRAIKRDQFLAWCAHLPPGCLVAMEACSSAHAWARRLTAMGLDARLIAASFVSPYRMEGKSGKNDMTDAAAVCEAASRPAMRFVPIKTAEQQGVMVLHRVREGFKEERTACINRIRGVLAEFDLVFGKSPKVLRAVLADVIEDASNELTAVARLSVQQAYEHWRALDEHMRWCDQQIGAHVRASPAARRAAKVNGIGEIGASALTAGVGDFKQFKSGHQFGAWLGIVPSQNSSGGKASLGRITKRGDDYLRTLLIQGAKSAVMSAGKRDDPTSRWLVQLVARVGWQKACVAMANKNARILWAVMTREQGFDAHHVSVKPQAKCAPAKPARPAQTGQPVACAA

SEQ ID NO: 433776 - protein, 366 aa, unidentified
MKKISTMAKRGNEIFKEPKLTIGLDLGDRTSHYCILDEAGNVILEHRLPTTPRGIRQVFCRIPRSRIALETGTHSPWVSRQLTQLGHEVIVAHARNVRLIGESSRKDDQLDARTLARLARIDPGLLGPVRHRSAKAQIHLTVIRARAGLVSARTALVNTARGLTKSYGERLRKCGSGQINREIAKGLSQELRDALDPLLGEIESLNERIAEYDRRIERIAKEVYPEVTLLQQVKGVGTLIALTYVLTLDDPHRFRRSRDTGCFLGLRPGRRNSGMSEPQMHISKEGDGYLRTLMVQGAHYILGPFGEDSDLRRWGLKLAERGGKNAKKRAVVAVARKLAVLLHKLWVSGEVYEPLRNNHKVVSAVA

SEQ ID NO: 433777 - protein, 349 aa, unidentified
MTEQRRSYAGECVYVGVDVHKETYTVTCVCHKQIVKTATVQAEPASLAASLRRWFPGATLASAYEAGFSAFVLHRALTTAGITNIVVNPASIAVAANDKVKTDRRDSKRLAVDLADGRLRGIYVPTEEEELARLLPRTRAQLVEHRATLARQIKAKLHQFGLIAPSSRRMLSHRYLREIESWTLPPELRASLKLLAEQWRFVTRQLIEMRRLLREQATAQAVIDKVYRSVPGIGEVVARTLATELGDMTRFANERALFSYTGLTPSEYSSGASVQRGHISRQGSSRVRHLLVETAWRALPYDAVLQTMFERIAATRGKKRAIVAIARRLIGRIRACFRQGTMYAVGTLA

SEQ ID NO: 433778 - protein, 354 aa, unidentified
MNQSSTITAGLDLGDRYSHFCLLDTESGEVVEEGRISTNPKAFQRRFSGCEPMRVAIEAGTHSPWVSRLLKRCGHEVLVANARKLRLIYGEGRKNDRLDAENLARLARLDPRLLSPIEHRGEASQAHLAIIRSREALIEARAKLINHVRGTVKSFGSRLPRCSSPTFHKKVGAHVPESLRPALEPLLKTVASMTARIQEYDRELEVLAEESYPQTKLLRRVHAIGTLTALTFVLTLEDPSRFGTSRAVGAYVGLVPSKDQSGERDPQKLISKQGNGLLRKLLVGSAQRILGPFGEDSDLRRHGLKICERGGKNAKKRAAVAVARKLSVLLHRLWVTGEVYEPLYKSNRFEVKAA

SEQ ID NO: 433779 - protein, 368 aa, unidentified
MKNVITYVGIDAHKKDLFIAMLVGDQKTPVTWTVPNEPDAVRRLVRKLEREAPGPVRAFYEAGPCGYALQRQLTTPRMSCDVVAPALIPRKPGERVKTNLRDSKKLAELGRGGLLTVVRPPTPAEEAVRDLARARDDAREDLQRCRHRLGKLLLRRGLHYQGRNWTHGHRQWLTSLTWTHAAEQAVVDDYLLAIDHTEARLIELDARLAAIADTEPYRTLVGWLRCFRGIDTLTAILLLAELHDFRRFPSPRALMAFLGLVPGEDSSGEKHRRGRITRTGNTLVRRLLVETAWHYQHRPSVGVALTRRRKGQPSRVIAIADKAQQRLCRRFRRLAERHLPAPKIAVAIARELAGFLWAALQPVPVPVT

SEQ ID NO: 433780 - protein, 454 aa, unidentified
MAPRHKKTNKKVQAQLPTLHPNAAGIDIGAREIWVAVPPGSDPKPVRGFETFTDHLRQLRDWLLACGVQTVAMESTGVYWIPLFQILEAAGLEVCLVNARHCKNLPGRKTDIQDCQWLQYLHSVGLLRGSFRPPEHVCAVRSLLRHRGRLVRCAADQVRLMHKALTQMNIQLHHVISDLVGLTGESIVQAILAGERDPVHLAKLKDPHIKASHDTLVRSLRGDWRPEHLFTLAQSYETWRHYQRQITAGDAQIELLLASWDARVDLQAQPLAAPKTTHRTPQRNEPRFDARSECYRVLGVDLTAVPSFQTPTVLVLLAELGPAFAEKFPSAKHFSSWLGLCPDNRISGGKILSVSTRQIHSRVAEALRLAAQSLVHAKNYFGDLYRRWKAKLGAPKAVTAMAHKLARILWHLLKFKQPFNPEIFRKEEEHQQKKKLKRLQNTAASLGFTLVPIQ

SEQ ID NO: 433781 - protein, 381 aa, unidentified
METLSKTVAANDTEQQATLFVALELSQATWLVALHSPIADKISINRIDGGDTDRLMALIEKKREQAARQLGRTVQVVSCYEAGRDGFWLHRFLIGHGIDNRVLDSASILVDRRARRAKTDRLDAAALLRVLMALVRGEEQVCRVVRVPSIAQEDERRLSRERERLLHERNSHIARIKGLLILHGVRDYRLIERDWRERLDAVRTAEGQALPARAKIEIERECRRLWLAKQMLAEVEREIEQMIAHDGAAAGKLIRVRGIGPTFASVLTHEVYYRSFDNRRQVGSYLGLVSIPWQSGGVRRDQGITRSGNARARRCAIELAWLWLRHQPGSALACWYRSRVGTMTGRMRRIALVALARKLIVALWRYLQNGIVPEGAVLKAA

SEQ ID NO: 433782 - protein, 405 aa, unidentified
MLVGIDWADAEHTYCLMDDTGATLATRTIDHTAEGLERFMTLVRARAQDPQDILVALETSQGPLVGALLDQQFTVYAINPKAVDRHRDRFGVAGAKSDLRDAWVLANLLRTDRMLYRPLLPDSEVAQELRALTRDRAELVQTRTMLSNQLTSCLKAYFPEFLTLFADPDRPVALALLQAFPTREALQAVSPTRLEAFLRRRHCPHSHDRAVEIHTQMQDRGFHIAPPLVRAKVRLAGTLVSQLQALAEHLDAYDREIQRVLRLHPDGELYHSLPGAGDFLAARMVGELGDNRDRYRDASSAQCEAGTAPVTRKSATVRTVHVRRACSHPLRSTMWQFAFASKRHCEWAQAYYLRARKRGKKHAEAVRMLGNVWLRIIIAMRRNRRPYDEALFLSRSSHPSLALCP

SEQ ID NO: 433783 - protein, 342 aa, unidentified
MQIYTGLDLSRKRLDWYACAGDGQLVDRGAVPPDPDGLAQLVRRLGDTDVLAVVEVMNGARFIHDQLELRGWDVRLADAQRSRALAPLACKTDRIDAWVLAELARRDLIPEVWLPDPAVRAERERARFRMHLVKHRTMLKNRIHQTLIAHGQQRPASNLFTHKGRSLLTRLQLPEPWQGTTAATLLLIDALDEQIDTIERELRTLGADHRYIPLLLTVPGIAWVLAYTIASEIGDISRFASPRKLIGYTGLCPRVYQSGETDRRGALSKHGPNYLRWALVEAAHTAARQPLYQPTVARQRERHGRRRGSAIAAVTIARQLAEAIWWMLTRNQSFAPAGAESA

SEQ ID NO: 433784 - protein, 326 aa, unidentified
MSNILGIDVSKDKLDLILLSEKGKSHKVISNDLAGFKTLDQWLISRHIDQVHVCLEATGQYGDAISEYLYGQGHDVSVVNPTRIKRYGESKLHRNKTDKADADLIAEFCLKEKPALWEPLNPDLKHLRALVRRLIDLQANYRQEESRLSSGEKDAWVIQDLTVHLEYLKACVEATEAEIQNFTKGTPDLKAEQELLVSIPGVGEKTSARLLGEIGEVSRFENAPQLAAYAGLNPKGFSSGSSVHKKTCISKQGRSELRACLYMPAIVAMTHNPVIRALKERLQKKQLPTMAIIVACMRKLLHIVYGVLKSRKPFDPEYDRQFNYSA

SEQ ID NO: 433785 - protein, 354 aa, unidentified
MLIIGCDFHTRYQQIAMAREETAEMLVERRLDHESGEAHAFYRSLQNLQEPVRVGIEATGPIHWFERLLTELGHELWIGDSAKIRASEVRKQKTDERDARLMLDLLLTKRFPRIWVPTPAERDVRQLLWHRHKLVSMRTMLGNQLHALAMSQGLCRKQKLFSKKGRAELGSLTLGPWAGRRREELLKLLDQLEPPIAELDRAVQEEAKRREDAVLLMTHPGIGSVTSLAFVLAIGPVTRFQGSRKIASYLGLNPTEDSSGGRRRLGGISKQGNTMVRWLLIEAVYPAVRKDPALRQDYQRLKFRRGHAVAKVAIARKLAVRMYWMLRSGADYAQLVRRQGSPGATLMNVSSSLG

SEQ ID NO: 433786 - protein, 335 aa, unidentified
MRLYCGVDLHSTNSYLAVLDEQLETVLGRRVPNRLDAVLGALEPLREQIQGIAVESTFNWYWLVDGLMEAGYRVQLVNTSAVRQYEGLKYVDDRHDARWLARLLHLPTGYIYPKPERALRDLLRRRAFLVRQRTASLLSIKNLFSRNTGIQVPANELKRLTSEQVVEQFSDPHLALAITSSLAVASVIKEEIAGIEKVVLKEAKLRPEFQLLESIPGIGQTLALTIMYEAGSMTRFADAGHFCSYCRCVPSQYLSNGKVKGSGNVRNGNPYLSWAFTEAAHFAIRFEPLAKRFYERKKARTNELVALRTISQKLARASFYILQDRVPFRPERAFG

SEQ ID NO: 433787 - protein, 408 aa, unidentified
MLFVGDDWAEDHHDVEVQDETGRRLARARLPEGVAGVARLHELIGPQLPEEAGPDEVAIGIETDKGPWVQALVAAGYAVYAVNPRQVARYRDRHGTSGAKSDQGDAHTLADMVRTDRHQLRVIAGDTPQAQAVKVVARAHQTLIWDRQRHALRLRAALLDFFPAALAAFDELTAPDTLRLLAKAPDPAAAARLSRAQVLAELKRAGRRGGLQDRAEAIVAALRTRQLSQPPAVAAAYAATVRSLTALIEAFNTQIAAMDKQVSACFGQARDAEIYLSQPGLGQILAARAFGEFGDDPDRYASAKARKNYAGTSPITQQSGKRKVVLARFVHNDRLADALHQQAFCALSHSPGARAYYDAIRARGASHHAALRQLSNRLVGILHGCLKTRTFYDESKAWAHNQDQQAAA

SEQ ID NO: 433788 - protein, 334 aa, unidentified
MEQITTAGIDLAKRVFALHGVDGAGRVGLRKTVRREQLMQTVAGLPPCVIGMEACSGAHEWARRFQELGHTVRLMAPVFVAPYRKSGKNDGNDAEAICEAVARPNMRFVPIKSAEQQAVLALHRVRQGWIEERTATINRLRALLTEFGIVLPNRAQYVRRGAHAAAEAVPELARRAVADLRTHLGVLDERIGGYDRELQAQARQSEAAQRLMQIRGVGPLTAVAMVATVGCARDFRSGRQFAAWLGLTPRQHSSGGKTRLGHISRRGDAYLRCLLVQGARSVLLTAMRHSDPMSRWAVSLQARCGYHKALVAIAAKNARIAWALLSKNQTLRAA

SEQ ID NO: 433789 - protein, 388 aa, unidentified
MGPIIGLDVSKGTSMLQAFTDRNKPYGKIISIAHTQEGFERLGILLEELKQITELEPVVVLEATGHYHRSLVAYLEREGYRHFIVNPLQSKRAKGTQLRKVKTDAVDAWHLAEMFYRGDIRPHRMWAEEMTELQHLTRQHEFMTSLLVQAKQNARALLDQVNPAYESVFHNLFSTTSLQVLRHMLSGGTVTVETIRETAGSSHGKAWIQAKAERIQALPPLSHSSKAQQTALLCMVEMVLTGQEQLRQLETAIEETALALPEVELLKTIPGVGDKLAAALAAEIGDAAQFKDPKQLVAYAGLDPGVHSSGKFTASSSRISKRGSKRLRRALYVAVQCGLRKGVNERLTAYYEKKRKEGKPYKVVVIACANKLLHHVFAILVKGEPYKA

SEQ ID NO: 433790 - protein, 354 aa, unidentified
MLMIGVDYHPSFQQIAFCDQETGECGERRLTHSDGEAERFYRELKQRGVSVRVGMEATGYACWFERLLGELNYELWIGNAAEIQSKRVRKQKTDRNDAQLLLQLLLEDRFPRIWVPSPENRDLRQLLWHRHRLVQMRTRILNQLQALAMKEGWRWKKKLFSEQGRRELEKLVLAPWASRRRQELLSLLDQLNPIIGELTASAEQEARKRPEVVRLMTHPGVGALTALAFVLILGRPERFRCGKQIGSYVGMIPSEDSSGGRQRLGHISKQGNSLLRFLLVEAAQAAVRNNAEWKRRYIHLAMRRHKSIAKVAMGRRLGVRLYWMWRNGCEYSSSFEFGSYTGELGTGHGVSRTL

SEQ ID NO: 433791 - protein, 350 aa, unidentified
MTTIARRITGGVDTHLDSHVAAALDERGAQLGDNSFPATAKGYRELLDWLEEFGTVELVGVEGTGSYGAGLTRHLLSHQVTVVEIDRPNRQRRRRTGKSDPHDAVAAARAAQGGDATGSAKTRDGNVEAMRVLRVARRSARGNRTQALNQMRSLISTAPDELRAELRDLSIYKVLQLASAFRHTGKTDVTTVTKLTLRTLARRALSLEEEVKEIDRLLKTLVAETAPELNAVDGVGTDVASAILVAAGDNPERLKSESTFAKLCGVSPLDASSGKQERHRLNRSGDRQANSALWHIVFTRMANDPRTTHYIERRMKEGRTKKEAIRCLKRYVAREVFAALPRSEFALDSP

SEQ ID NO: 433792 - protein, 381 aa, unidentified
MSKSSILYVGLDVHKDSIDIAVVDAPRDAEIRHVGSVRGDLASLDKALRKLVSRGQPLHIVYEAGPCGFVIWRHLSAQGLHCDVVAPSSIPRAPGDRVKTDRRDAMLLAKLARTGDLSAVRVPDAVDEAVRDLVRAREDAVREQRNGRHRLKALLLRNGIPYTGKTSWTAAHLRWLAKVSLAYPAQQIAFQEYLHSITESSARIARLEQALRDVLHDWGLMPVVQALQAMRGVQLIAAMTLVAELQDFLRFESARQMMAYVGLVPSEDSSGPKRRQGSITKAGNSAARRMLVEVAWHYRFDPRVSPVIATRQDGLPTAVTDIAWKAQLRLTAKYKRLSARRVMKTKAVVAVARELAGFVWAIGREVQSTRWAGIKQSPPAH

SEQ ID NO: 433793 - protein, 310 aa, unidentified
MEPVFVGIDVSKDRLDVHVRPGGEVFVVSRDGSGLEELVGRLQALDPTLVAVEATGGFETIVAAAVAGAALPLAVVNPAQVRHFAQAVGKRAKTDPIDAGVIAHFAEAVRPVPRTLPDEAARLLAELVGRRRQIIDMIVAERQREKRATNVRVRKSLARHLAMLEKELDAIDQDINTLVRGSPLWRVKEDLLASVPGIGKTLARTLLAELPELGSLDRRHIASLAGLAPYTRQSGRWRGRSMIAGGRSAVRSASFMAALVASRHNPPLKDFYLRLICAGKPKMVALIAVARKLLTILNAILRDNRPWQSA

SEQ ID NO: 433794 - protein, 344 aa, unidentified
MKYFAGLDVSLDETAICVVDEDGIVVTEGKAASEPDDLVRWLVATGLTITRVGLEAGPLSPWLHTELRAAGLPAICIETRRMKGATAAMAVKTDRNDARAIAHAMRVGWFTVVHVKTAESQELRLLLNNRRTLLEKRVAIDNEIRGTLKAFGLKLGAVTVAAFEVRVLELLAKRSRLLAMVRPMLAARAALRQQCDVLHRMVLKAVRASAVCRRLLSVPGVGPIVALTYATGVDDPARFIHSRDIGPHFGLTPRKYASGEIDRNGSITKAGDGAVREVLVQAALTLLTRVQRWSALKAWGMAVAKRRGLRRAIVAVARKLAIILHRMWADSTMFNWKRETVALA

SEQ ID NO: 433795 - protein, 400 aa, unidentified
MYKYFLGIDISKDSFDFCFTDQTEKVLHKDHYLMDIDNFTNLANYLAPFSNDEILIVMEATGIYHLNLLSFFLEQGLNVSVVNPLFIHAFTKSMTIRKTKTDSKDAHIISIFAKRNYSSLKLSKSSDLETIKPIVREKDKLTSQISAIKTDMKSIVNQLFPEMLKNTNIFTKSSLNLLLQAPSKRVIRNLKEKKIAKLLSSDNAKGSKPKITANEILSLAKNSIGINNPSLEKILISKINQMSFIQTQIDEYSEIIEKFVDEYHSDDIDKLTSIGGVGKATASSFIAELGEISNFATHKQLTAYIGTDPTIYQSGTSVNVKGSISKRGNSHLRRAIWHMARSATVWNETLKAYYDKKRSEGKTFKQSVIAVANKLIRIIFSMLKNNTKFETNYQTQRVSM

SEQ ID NO: 433796 - protein, 410 aa, unidentified
MEVLYADCAGLDVHKDSVVACARHTIDGNVSREVRTFKTTTADLMALSAWLSAQGCTHIVMEATGVYWKPVWHILSDGEFELVLANAAHVKNVPGRKTDVNDATWLADLMAHGLIRGSFVPEEQTQEMRNLLRMRKQFVRERSSHIQRLQKTLEDANIKLDSVITDIIGLSGRRMIEALIGGETDPQALAALAHRRIKATSAELEAALRGRVTNHHRFALRLLLQHIDAIDAAIAEIDQEVDANIEPFRTAIRILSTIPGVSQLSAEVIAAEIGVDMGRFPTEGHLISWAGLCPKNDESAGKRRSTRMRKGAPWLKTTLIQCAWAATRTKGTYLQAQFHRLRARRGAKKAVGAVAASILTAAYHMLKNGALYQDLGAGHFDRRAKTAQTNRLIARLRSLGYVVQITPVAA

SEQ ID NO: 433797 - protein, 420 aa, unidentified
MKPWNDITHYAGLDWARDHHDIIIVDRQGQIVADWRIPHSLAGWQDFGAKIKSYAAVAVALETSQGAAVDQLLQLDCTVYPVNPHSAKSYRERKAPSGHKTDRLDAWALADALRLEGQQWRVLQPLDPLTQQIQLLCRDEIGLIEQRTALVNQLQQALSEYFPAALEAFDDWTKPFCWDFIIRFSSPEKLAQAGRRRWENFLHTQKLWRPDTAARRLEIFQRAHQFCGSPAVTTAKSLLAVSLAKMLRTVQDQLDQYRQQIQALFDQHPDRDLFGSLPGAAQTLAPRLLGEIGGNPQRFEDTSNLQCVAGTAPVSFQSGQIHRVRVRYQCNKVLRHTIHLWAQCVLRRCTWAEVYYRQKRAEGKSHACALRCLGQRLLKILWRIIQTRQPYDGELHARNQQQHGSWVLKLMNKSTGEQPA

SEQ ID NO: 433798 - protein, 402 aa, unidentified
MNAVGIDVSKGKSTVAVIQPFGVIISEPFDVMHTEKELKELAAFIKSLPGKTKVVMEYTGAYYEPIADMLHSEGIFVSVVNPLLINDYGMNRVRKVKTDKKDSLKIALYALDKWIDLREYIPEETIRKTLKIMNRQCLKLNKILVMQKNSLIALLDCCFPNVNTLFTSSSRESDGHEKWVDFVLKFPHANSVAKLTLSVFKTKYQSWCKKGHYYYSESKAEQIYAYSKTLVCTLPLTESVKTIIIESVKLVNSTLEAIAKLHSEMDSLASQLPEYKTVMNLFGVGKVICSQLIAEIGDIKQLKSGKSLVALAGIDPPPHQSGKEDKKNRSISKRGSPALRKTLFLIMTIIIQQQPVDDPVYQFLDKKRSEGKPYKVYMIAASNKFLRIYYARVNEALNAQIT

SEQ ID NO: 433799 - protein, 343 aa, unidentified
MEYYVGLDVSLKQTSICIVDQAGLVVREGVVDSDPEAISAYVKSKAPDAVRIGLETGPTSTWLWTELKRLGLPVICIDARHAKAVLKMQINKSDRNDAIGIARIMQTGWFKEVHVKDIDSHSVRALLASRALLVKIKCDLENHVRGLLKNLGLVIGRAKFNVFAVRVDELIEGWPELVAAVRPLLEARNAVEQQVSELDRKVMRLARHDAHVRRFMTVPGVGPITALAFKATIDDPARFARSRSVGAYVGLTSRRHASGEVDWSGRISKCGDAMLRSYLFEAAGVLLTRVPKWSAVKAWGVRLAKRNGLRKAKVAVARKLAVILHRMWIDGTEFNWSKKEIAA

SEQ ID NO: 433800 - protein, 389 aa, unidentified
MRAVFGIDVSKASSEVAILVNGEKVHGYTMSNDALGFARLLGDLRTVHKPEIIFEATGVYSRPYTRLNPLEAKKQLDSLRVRKTDQIDAEKLAQSQFVLNRKPTYVQEEVYQNLRALSRFYQNLTEDIVRAKNRLHKVLQVTFPELETILSTPSGQQYWNLVIDFPCKDFVLELSKDELSESIRQSTSKRISDKRVAYLVEKLTALANQSYCAVKKTSPIMEEVRYYAKELLRLSEQRQTVLDQMVELAQPLPEYDILLSIPGIAETTATSIIGELGDIRRFQSANQINAFIGIDLRHYESGNFLAKEHITKRGNPYARKILFKCIHNIASASHTNPCHIADFYEKRKRQSQTTSTKLHTIASIHRLIRTMYYLIMHNKLYDYASTQNR

SEQ ID NO: 433801 - protein, 331 aa, unidentified
MSRSAGIDVAARTAVLTILHEDRVETTKIIEQTAKGHQQAVALLSKCNPDRVVLEATGIYYLDLALALAEAGLPVSVINPKSSHHFAKGMLEHNKTDQVDARLLAQYGERMRPRLWTPPTATQLSLRTLGRHANRLVAARTRAKNQLHAYTASKEQVDLIVEDLKDEITAFDRRIERIRKAAIEQIESDQRLQHVAKAILAAPGIAEVSLISILAELTTLPDTLKSSQVSRHAGLDVRLTQSGTSVNKPGRLGKAGNTYLRSALFMPAMSAVRFDPYAKGFYDVLLGRGKKKMQAIAAVMRKYLTGIWACMRSGEPFDTAKLFSEKHLLKA

SEQ ID NO: 433802 - protein, 395 aa, unidentified
MVDDNGTRLGEKQVEHSGDGIRECIDWLLQLAGGDASSIAVAIEVPHGAMVESLIENNLAVFAINPKQMDRFRDRHTVAGAKDDDLDAFVMADSLRTDQRCFHRVELDEPAIVRLREWSRMEQDLQIDGNRLANQLWEQLRRYYPQMLKLSPAANEVWLWDLLESAPLPGDAAKLKLAKVKAILRAHRIRRVTAEQVLEQLRQPALRLAAGAAEAAGEHVLMLLPRLRLLQKQQAAAVKRMRGILEELCTAPPECEGREHRDAEILLSLPGIGPVIAATMLAEASQPLRDREYQALRHYAGAAPVTRRSNKRKVIVMRYACNERLRNALYHWSRCSMQNDARAKQHYAELRQRGHSHGRALRGLADRNLAMLVSMLKSGTLYNPARRSAAVAEAS

SEQ ID NO: 433803 - protein, 341 aa, unidentified
MNFTRIGIDLAKSVFQVHGLKADGTVVRRRLSRGQFRRFIKELEPTLVGMEACGSAHYWGRELQSLGHEVRLMAPQFVAAYRKSGKNDGNDAEAVCEAMSRPTMRFVPVKTLEQQSVLVVHRARELAKSHRKAVANQVRGLLAEYGIVFPRGIEQVRRRLPEVLEDAENGVLEPAREAFAELYECLVELDARVAEYDRRITRLARESQPAQRLMQLPGVGPLSATALVASAGDARHFSNGRQFAAWLGLVPRQHSSGDKTRLGGITKRGDRYLRTLLVHGARSVLTRAARRDDPRSRWAVALRERRGFNKAVVALAAKHARSAWVMLAREEDYRLSEASPS

SEQ ID NO: 433804 - protein, 365 aa, unidentified
MKKSSKKQQGSPVVENKPEKVVGLDLGDRHSHYCILSSSGEVMEEGRIQTTAASLEKHFGSEARMRIALEAGTHSPWVSRLLKRYGHQVIVANPRKIPTLTKSESKNDRNDARQLARMAAFDPELLHPIEHRSTERQQDLNLIHTRSVLVRARTMLINSMRGLVKSAGGRLPSCSSEAFPEKVPAAVPPALKSACAPVVKQIAQMNQTIAAMDKQIDGLEKKYPEIALLRTAPGVGPMVAACYVLTLGKPETMETNRQAGAYLGLRPRQQQSGDSNPQCGITKTGNTYLRSLLVQSAQYILGRFGPDSELRCWGLKLAASGGKRGKKRALVAVARKLAVILLSMWRNRKKFEPFLQSATQLARAV

SEQ ID NO: 433805 - protein, 365 aa, unidentified
MISVPRQSTLLGLDVHKLTISVGVLRPEADTPAVDKIASDPESVRRLVARFDDPRQLVACYEAGPTGYELARQLRDLGVRCEVIAPSLIPLAPGDKVKTDKRDARRLALLLRSGQLTAVRVPSVAEEAVRDLCRARADMVIDRSRARHRLGKFLLRHGRVWRDGTNWTMKHLDWMSAQRFTQPALDATLAHYRATLAARDAAIEAVDADLTHWFCAPPFADAVARLGAYRGITELGALTLASEVCDWHRFPTAASFSAFCGLIPTERSSGTRVWRGGITHAGNTHLRTQLVESAWSYKVHPAVGLVQRRRHVGLDPAVVARAWQAQLRLCGRFRRLDARKTNRKTVVTAVARELAGFVWAEMMAA

SEQ ID NO: 433806 - protein, 323 aa, unidentified
MNHKVGKDNTVARFIGIDVSKQWLDVASLPERETRRFTNDSAGQEQLSTWLMSLAPELIVMEATGGFETRVATTLAAQGLALAVVNPRQVRDFARAFGVLAKTDRIDASVLAAFAEKVHPPVRPLPDEDRRELIDLVDRRRQLVTMRAEEKTRLSQATASARQDIKEHIDWLDERLRRLDIDLTAKLRTSSLWKAKEEILISVPGVGRVTVFTLLARLPELGALNRRAIAALTGVAPFARDSGQHRGHRMIWGGRADVRSVLYMAAVSAARINPVIRSFYLRLKQAGKPSKVALTACMRKLLTILNTMLRNNQPSQAPSTHTI

SEQ ID NO: 433807 - protein, 344 aa, unidentified
MDYFAGLDVSVKETSVCILDDAGRIVKEVKVASEPQALLKVLGNPTYHFKRIGLEAGPLSQWLFSALAEAELPVICVETRHMQAVLKAQINKTDRNDARGIAQMMRVGMYRPVHVKTLRSQKLRMLLTHRKLLQSKAIDMENDLRGTLRNFGLKVGLVGAARFEARIRELVEGLPDLAVLVEPLLVVRQVLRQQLAVLHRRMLAVVRDDEVCRRLMTTPGVGPLVALTYRTTVDVPARFQKSKSVGAVFGLTCSRYQSGEIDWSGRISRCGDEMMRVMLYEAAQTLLTRSTRWSWLKAWAIQVARRRGKKKAIVALARRLAVILHRIWVDGTEFRWTREAGPAA

SEQ ID NO: 433808 - protein, 406 aa, unidentified
MEGPIITVDVSKGSCHYQPFIENGHPMRKPKQLSATIDGFQKLGQTIKDLEAKTEREDIPVIFEATGVYHRPLQKYLEDHKIRYYIISPLLSATYRKTDLHSNKTDALDCAHIAKAYYCEKELRQYQAQPQEYKRLYQLSCIYESELVHLRKRKVSLRSMLDIIYPRIDKTFKGNQNLYDPIPMEILKRYPHPSLLLSHREDTIVKTVGHRTGHLKGYTERIVHKIYEKAKECYSGCDIDDIEVVKLPSLIENVQEQKKKCDSLLKEMIEIARTCPYFAPIVSIVGIGENLAARIIAELRDVSRFDNRAAIVAYAGLNPKIQQSGDIDGLHLKISKKGNKHLRCLLYLGAQCNYRLRKEDPLYEFTKKKRQQTQCPLSSKAAYTASAHKLLVIIYSLCKNGTLYHS

SEQ ID NO: 433809 - protein, 345 aa, unidentified
MLYVGLDLSRKRLDWLALGSEGAQVAIGAVPPDRDGLVRLRRRLGDAPVLAVIESMSGARFVHDQLELAGWEVRIADAVKARGIAPLACKTDKIDCWVLAELARLDLVPEIWLPDPEVRAERERARFRLHLVKHRSSLKNRVHAILFQHGVANPSSDLFGVAGRRLLERLALPEPWASTVSASLRLIDDLDREIDACERELRALGADHRYIPLLMSCPGIGWALAFTIASEIGDIARFASARKLVGYTGLCPKVDQSGERDRRGPLRKNGPDHLRWALVEAAHSSIRWHPPYRAVRDRMQHRHGQKRGTKIAAIEIARRLSEAIWHMLTRNQPFAPAGAPASLAA

SEQ ID NO: 433810 - protein, 345 aa, unidentified
MKYYAGPDVSVKETSICIVDQTGKICREVKVTSHPDDLIVVLKDPAWNMERIGLEARPLSQWLFEGLARAGLPVICIETRHTKAFLKAQPNKSDRNDARGIAQMMRVHLYRAVHVKTLTSQKRRALLTARKLLQDKAIAIENDLRGLLRNFGLKVGVVGSAKFGARIRELIEGTLDLVEIVEPLLDARRKLREHFATLHRKLLMIARDDEVCRLLMTIPGVGPVVAVAYTATIDIPQRFKNSKAVGPILGLTPVLNQSGESHRVGRVSLCGDGMMRTLLYDAAQVLLNRVAKWSWLKAWAMSVAKRRGLQKAMVALARRLAVIMHRMWSDGTEFCWSREKLPASA

SEQ ID NO: 433811 - protein, 388 aa, unidentified
MNRILKIGLDVHSTNFTICAMEPTIGAEDRIYGAVQVAPDYKEVICFIESLKMKLGLDDQYSIECGYEAGCLGYTLYHQLTNAGVKCVILAPTTMLSPQGQRIKTDKRDAHLIAQCLCYGGYHPVYIPTGEDDSVKEYLRMRDDHKTTLKRLKQQINAFALRHGYQYTGTKWTHKHLTWLKKLELDPMHRETLTEYLATYEDQVARIDRFDKRIDEIASEARYKDRTEKLCCFLGIRTHTALSLIVETGDFKRFTKGSIYAAFLGLAPGEHSSSVSVNRLGISKAGNTHLRCLLIESAKGICKGTIGYKSKELRSRQKGQSSEVIAYADKANTRFRSKYYRMIRHGKKKNVAVTAVARELACFIWGMMMGNIGTSLGIGTSETAVSQG

SEQ ID NO: 433812 - protein, 343 aa, unidentified
MKTTTVGIDLAKNVFQVCALNRAGKVVSNRPVKRAALTETVAQLAPTRIAMESCASAHHWGRTFKKLGHDVILVPPQHVKPFVRGGKSDPRDALAICEAAHRPGLHPVPIKSLAQQDLQSLHRVRQQQVQHSTGIANQIRGIAHEYGVCFPVGLKRLYREVPYALEDADNGLTDAVRELLARRFIDLLAIREEIERTSRRIVTLAEGLPPWSRLLELPGFGVMVTSSYLAAIGDGRQFKRGRQVSAWLGLVPRQHGSGGKIRLHGMTKSGDRYLRTMMLHGARAAICWSRDRDTPLARWINPMVERRGFNKAVVALANKNARIAWHIVANGAHFDPGQAFGSA

SEQ ID NO: 433813 - protein, 331 aa, unidentified
MHFSQFIGVDISKDTLDAAIYPAKDKKMDFLHFDNTTRGLNEMLKWLKSRGIKPSEMVICAEHTGVYTNPLIDFTEKKGLSLSLNSPLDIKHSMGITRGKNDAIDAGRIAEYAHDHKDKLRLYQKPSEAIVKLKYLLTERHQYVRQRTAMLSFNKIMGKYETPEARSRNGSDIHHCETLILKVERQMLDIIKENPELKRNYDLVSSVKGVGLINAINIVVFTNNFKSFETPRQYACYIGVAPFGYTSGTSVKGKTQVSKICRTQQKAELSMAARSAIIYDPGLKRYYQRKMKEKGEGKNAHGVVLNAVKFKLILRMFAVVKSGQPYKILNY

SEQ ID NO: 433814 - protein, 421 aa, unidentified
MNTLYVGIDVSSADLVVCFMDHQGDTLDQELTVDNSLSGARTLEKTIIAHANAIKAEKILIGTESTSVYDLHIADFLASSDPLAPLHTSVFRINPRIIKNFKKSYADTDKTDPDDAFAIADKLRFGRLPHPYQAHMKHLPLQRLTRYRVHIVDAIRKETQCFLMHLFLKYNRFGDVRPFAHTMGATSIAAINDLSAEQLADMSLEELTAFVVKHSRNRCKTPTAIAQALKRAARESYRLRPTMAKSVDFILASIYRTIAALKHSLKELDKAIGLEFKAFPNTLISIKGIGPVLAAGIYAEIPDASRFPSDSKLAKFAGLTWRKIQSGNFTAEETRLTKTGSAYLRYYLVEAANSLRVHNEEYKAYYSKKFREVPKHRHKRALVLTARKLIRLVFALLTKKQLYDPCLRPIHRQANLLAERS

SEQ ID NO: 433815 - protein, 347 aa, unidentified
MRFYTRQHRHYGGVDLHARSMYVCVLDRDGNVLVSKNIASAPGPFLELIAPYREDLVVAAECMFTWYWLADLCARERIAFVLGHALYMRAIHGGKAKNDRIDAHKIAGLLRGGMLPQAYVYPQAMRATRDLMRRRNYLMRQRAELLAHITNTNHQYNLPALGVRPARPAERSGLLEHFAEPQVRRSVAVDLSFVEHYDRELPALERYLESNAQAHDPLGLAIVRTIHGMGQVLGLSILYEIHDIGRFARVQQFLSYGRLVKPTKESGGKILGHSGRKIGNAHLKWAFSEAAVCFLRANKRAQALRARLAAKHGKGKSLAIIAAKLARAVYFMLKRREPFDAERFFAH

SEQ ID NO: 433816 - protein, 344 aa, unidentified
MGEVSTIGLDIGKSVFQVHGVDVVGAVVIRKRVSRARVLEYFGELPPCLIGIEACPSAHHWGRELQLLGHMVRLVPPSYVKAYLKRSKNDANDAAAICEAVTRPSMRFVPIKTKEQQTALMLHRTRQLLVRQRTMLSNALRGHLAELGIVSAKGRNGTAELLRIITNGADSRVSPAVRGILDVLARQYSAIGIEIASIDRSIMALHRGCEASRRLAEIPGIGPIAATALVAEIGDWKTFSSGRSLAAWIGLVPKQYTTGGKDRLGSITKQGNRYLRWLLIVGAMAVIRYARKHGTEKRPWLGRLMERRPTKVAAVALANKIARMAWAIMVRGERYKEPKLLLAA

SEQ ID NO: 433817 - protein, 341 aa, unidentified
MNITQIGLDIAKDVFQIHGIDKDGKVRLQKQISRNKMLDFFANLPSCLIGMEACSGAHYWARELTKFGHEVRLMAPQFVSPYRKRGPSGKNDRNDAEAICEAVGRPNMRFVPVKSVEQQGVLMAHRARELMVANRTALVSQIRGLLGEFGIVVPSGIAQIRRALPHILGDAENGLVALVRETFSKMQKQLSDLDAEIHAYDERLDALSKSMEAPKRLMKCPGIGAITATAVVATAGDAKTFKNGRQFSAWLGLVPRQNSSGGKNRLGRISKRGDPYLRRLLIHGACAVLRVTNGRQDKKSRWAERVKARRGYNVAAVALAAKHARMIWAMLAKGEVYRMPV

SEQ ID NO: 433818 - protein, 422 aa, unidentified
MRGNQSEIQYAAFLSIDWADEKHVWSLQETNSSRRERGEVGPMPEAVEVWVAQMSQRFAGRPIAVAVEQTRGALVFMLSKYEQLHIFPVPPAMTAHLRKAFYSSGAKNDPSDADLLLDVVQMHRDKLRRLSPDTEATRRIQNLVEERRKLVDEKTAQGNRLEAHLKIYFPQIPHWFGDVDSPLVCALLERWPTLEALQKVSADTLRSFFHKQHCRKEELIESRMKAIGEAKPALKDRAVVEAKVAAVKVLVQLIQVLHKGIEGFHQQIQEAAEAHPDFFIFDSLPGAGAVMAPRLLAAFGSQRERFRDAAEVQILSGIAPVTESSGKSSWVHFRFACPKFLRQSFHEFAACSIPKSQWARCYYELQRRRGKKHNAAVRALAFKWIRVIYRCWKERVAYDENVYLAVLIKHNSPLLAVTNIAL

SEQ ID NO: 433819 - protein, 327 aa, unidentified
MHVAAALDPIGGLLGVQEFPATLAGYTSLLDWMGGFGTVALVGIEGTGSYGAGQARHVTAAGIRVVEVDRSDRQDRRRQGKSDPLDAVSAARAAQSGRARGAPKGRDGAVEAIRALMVAKRSARAERTQTINQARALVLTGPDDLRTRFAGHTAAALVAGIASLRPRPGDVPGYATRIALRELGRRAEFLDGQLERLDELIIPLVAARAPGLLALYGVGPDTAALLLVAAGDHPERLRSESAWAHLCAVAPIPASSGKVTRHRLNPGGDRQANHALWRIVLTRMSAHPPTRVYVGRRTKEGLSKNEIIRCLKRYVAREVYSHLRAAG

SEQ ID NO: 433820 - protein, 363 aa, unidentified
MFIERTSVGLDVHARSVAAAAIDGVTGEIVQTRLTPSHEHIRSWISELPGPVAVAYEAGPTGFGLQRALNEVGIRCEVVAPSKLQKPSGDRVKTDARDALHLSRLLRLDEVTSVSIPSVSQEAARDLVRAREDCRGDLMRARHRLSKLLLRHGIVYYGGQGWTGAHDQWLRTVAAPQLRSAATRMAFDADYDHVLTMQARRRRLDAAIEEIAKDCEFTPIVRRVSCLRGVSTLTGFALAVEIGDWDRFTGNTIGSFVGLTPSEYSSGSSRVLGAITKTGNTHVRRLLVEAAWHHRARYRVGAVMRSRWDLASPAARARGDEGNRRLHGRWVGFLERRKRPTVANVAIARELAGWCWSLAVMQD

SEQ ID NO: 433821 - protein, 449 aa, unidentified
MRKKRAKTVSLPIVERNAAGIDIGATQIFVAVPPDRDPDPVRCFHTFTADLEKLADWLQQCQIRTVAMESTGVYWIPLFQILEKRKIEVRLVNAHHVKNVPGKKTDVEDCQWIQHLHACGLLRGSFRPADEICAIRSLWRHRDNFIELATIHLQHMQKALDQMNVQLHHVISDLAGTTGLAIVDAILAGERDPQKLAQLRDWRIRASEETIVKSLVGDYREEHLFTLRQSLESYRHYQDQIQKVDTRVKRMMQAVSSKVAEGEKPPKERNPRKTPWRNEPPQLRDDLYRAFGVDLTQIPGISTLTAQMIFTEIGPDFSRFPTAAAFCSWLRLCPDPKISGGQVLSSRTRPTKNRAALALRMGAQGLHRSQSYLGDYFRRLRARMGTPKAMTAAAHKLARIIYYMVTTQREYDASVFQEQERRTQDRKRAKLHAQAREFGLQLVPVEFVP

SEQ ID NO: 433822 - protein, 400 aa, unidentified
MDNKSHAEIGVFLGVDVGKGAHHAVALDRVGERLLDRPLPNDETQLRGLINGLRASGPVLLVVDQPATVGALVVAVAHAEGLSVGYLPGLVMRRIADLHPGEAKTDPKDAYIIAEAARAMPHTIRSLSLPEETLAELIVLSGFDDDLASMINQTVNRLRGLLTQVHPALERTLGPRIMHPAVLDLLQRYPTPEAMRTAGRARLTARLTKRAPRLAGELGEAVWSALSEQSVVVAGTAAAAVVVPRLAQQLDTLITQRADVIEQVEELVDAHPLSGVLISMPGVGVRTAARILTETAGKDFPTAGHLAAYAGLAPVTRRSGTSIRGEQQSRRGNKKLKRVLFLAAFAALKDPASRAYYDRKRDQGKSYNQAIMALARRRCDVLFAMLRDGTYYNPEPSAAA

SEQ ID NO: 433823 - protein, 408 aa, unidentified
MTDYTTRYIGLDVHKHYLIALGVDENLEVVLPARRVELSHLEAWMKKTLTRQDAVVLEMTTNTWQLYDELSAHAGSVTVVHPPHVALITRAQVMNDKIAASILARLLAKGLLVGIWVPPQEIREMRGLVAQRQKMTQLATQAKNRLHAVIQRHHLQPPAGNPFSKSQNEWWQALQLGPLEKLNLQTDLETMQFAEKQEARATEEMDKLAAENEPISRLLHVSGFGVVTAVTVWAAIGDIRRFADAKHLVGYAGLGARVHDSGLTTRTGRITKAGRRDLRVALVEAAQIAANTHPHWKAELARLEPRLGRNKAIVAIARKLLVAAWHILADKTADRFAQPEAVAQKMLRFAYAVGKEYRAGKTAAQFARERLDVLNIGQELTSIPWGAKKPIPLPPSARLKKESAVPNK

SEQ ID NO: 433824 - protein, 489 aa, unidentified
MLGSDLKGHALLLRARRIDFRFPTVAPGQPAMFTASGEGASVSVMGVPEQIEDEEHEQRLERVAAVDVAKASGKVCIRVPHESKPGKRITLVWDVRATTGAICELAAYLVEQRIERVVLESTSDYWRLFFYLFEAAGLTVWLVNPRDVKQVSGRPKTDKLDAVWLAKLNERGMLRPSFVPPADIRMLRDYTRLRLDLTRDRTRHKQRMEKLLEDALIKLSTVATDIFGVSGRDMIEALIAGQNDPEILAQLARGRMRVKHAALVQALDGRFDAHHGELARILLDQVDGLDTQIQQLTTTIDKLITAMPAAGATSPAEPGSGPEHDRGLPTIERLDEIPGIAEHTAQVIIAELGLDMTQFPTAAHLVSWAKLSPRTIQSGPRTRGGTTGKGNPYLKGVLGEAAAAAAKTDTFLGERYRRLVKRRGKLKALVAVARSILVIIWHLLTDPTARFHDLGPDYHTTRINTDRKIRNLIHQLETLGHTVTLQPAA

SEQ ID NO: 433825 - protein, 407 aa, unidentified
MKMIRVKRSASRTVDCADDRAEPHADAPLGALSAKRRQTMHEVITAYIGLDVHKDSIAIAAAGKDREVPHFVGTVRPDFKQVRKALGHYGPPSSLQVVYEAGPCGYTLARQLLADGFDCQVIAASRITRSPTERIKTDRRDAITLARLARSGDLVAVRIPDERDEAIRDLSRARQDAVSACLKARQQLKAFLLRHGRLLRGSKPWSPSGELYLSKIAFVHSAQNIAFADYRQAVLDTRARVERLTEALRAQCEGWRMQPLVSALACLRGVDFLSAVILVAEIGDFSRFAHPKELMGYLGLVPSEYSTGQQHHRGDITKTGNAHARRVLVEAAWNYRFPARLSHPITRRQEGQSKLVRDIAWKAQLRLGHRYRKLQSRQLHQNKVIVAIARELSGFLWDIARHVTIPA

SEQ ID NO: 433826 - protein, 320 aa, unidentified
MNQDFSFVGIDVAKTRLDVAIHPTGQQWQVAYTEKGIQGLVDQLADLLPTLVLLEASGGLELPMVTALAVAGLPVVVINPRQVRDFAKATGKLAKTDVLDAQVLAHFAEAVRPVPRSLPDTETQALTALVTRRNQVISMLVAEKNRLYTSQPPVRQRIQTHVAWLEQELDEIDRDLKETLHKSPVWREKENLLRTVPGVGPQLIISLLAYLPELGTLNRKSIAALAGVAPFNRDSGTLRGKRAVWGGRSRIRAALYMAALAASRYNPVISAFYQRLLAAGKAKKVALTACMRKLLVILNAMLKHHTSWQSLNPQLLSPCS

SEQ ID NO: 433827 - protein, 327 aa, unidentified
MQDRALRRTQVPETTSSKVFVGIDVSKSTLDVAIEPSGEILQYANDPTFIESLVKKLRPLSPERIVIEATGGLEKPVVAALASAQLNVAVVNPRRTRDYARAMGHLAKTDRIDCSVLAAFAANVTTRLTPLKTGEQELMAALLTRRRQLVQMLVEEKNHLASAPIALQKQIKAHIAFIEKRITGCDDDIDKLITDSDLWRAKDELLQSVPGVGPVLSHTLLAALPELGTIDRKKIGTLMGLAPLNWDSGHRRGKRHIAAGRATVRSVLYMGTLTAIRVNPVIRTFYKRLIAANKPPKVAITACMHKLITILNAMLKTNSPWRPNEQP

SEQ ID NO: 433828 - protein, 416 aa, unidentified
MNAVGIDVSSRKSTVAVLRPLGEVVCLPFDVSHDADGLASLAEKLKALDGETRVVMEHTGRYYEAVAKALHEAGFFVCAVNPLLIKEYGANSLRRVKTDKADAVKIARYALDNWADLRDFTPMDAIRYDLKTLNRQFQLASKQRTASANNLIALLEQSFPGIRKCFDSPVRSDGTQKWVDFAHSFWHVDCVRKQPFPAFCERYRKWCKRHAYLFKLSNAEEVYALAKRAVVLTPKSKVVKVLVQEAANQLSSISRSVEVYRAEMDRLAAMLPEYPVVMAMYGVGKSYGPQLMAEIGDVRRFERKQALVAFAGIDPMPNQSGDKNVRSNKSSKRGSPYLRKTLFNVIRTYLQCAPQDEPVFQFLNRKRAEGKPFYVYMLAAANKFLRRYYAKLRDYFASPDTLQSVAPIPATLKASL

SEQ ID NO: 433829 - protein, 330 aa, unidentified
MRKGTEAGIDVSKDVLDVAVRRHDGGLETGRFENDAAGHRTLVRWLTKRGRRVRVVLESTGTYSLDVAVALHRARGVGVMVANPRAIKQFAGALMQRSKTDLTAAAALREYAARMPFVEWRPPAGEVLALRGIARRIAALVVERTRERNRLHALQATAERVAVVLNDIEVNVRHLERRIELLTAEAVALVREHVTLHRAFERLTSVPGIATHSAVQLLPELLVLPDDMTVRQWVAHAGLDPRACQSGTSVHKPARISKVGNAHIRRALFMPALVAVQHDPHVKAFFAKLVARGKKPIQAYVAVMRKLLHAIYGMFATETTFVGEKFHAVA

SEQ ID NO: 433830 - protein, 396 aa, unidentified
MTKFNVEHASLHTAGASVVPAQPTVHTAYVGLDVHKETIAIAVAEPGRQEPGYEGEIANTPKRVERKIQQLSERYGGGLLQFVYEAGPCGYGLYRQLLASGHDVQVVAPSRIPKAPGEQIKTDRRDAIKLARLARSGDLTPVWVPDTEQEAMRDLTRARDDMKAQERKARQQLNAFVLRHGHHWPKGRTRWTQTHFNWLESLRFEHDWQQVVLQEYIDAVRAATRRVADITTQMERALPQWSLAPVVEALVALRGIDKLAAMVLMAELGDISRFDSPRQLMGFLGLVPSEHSSGSRRRQGAITLTGNSHARRMLVESAWSYRFPARQTGHLKRKAANAPEEARAIAWKAQKRLCGRYRDLTRAGKNTKLVCVAVARELTGFIWDIVCRVMPATHAV

SEQ ID NO: 433831 - protein, 373 aa, unidentified
MSKSITLYVGLDVHKDSVDIAFCEALRSAEPTHLGTVAGGLEAVTKAQRRQVSLGRKLHIVYEAGPCGFVLARHFAALGWHCEVVAPSLIPRAPGERVKTDRRDAIKLAKLARSGDLVAVRIPELADEAVRDVVRAREDAVREQRNARHRLKALLLRNGVSYEGKCAWTGAHLRWLATLKRPQPAQQIAFQEYLHAISESQARIARLEQHLRELLPSWHLAPLVHALQAMRGVQLIAAITLAAEIQDFWRFPSPRQLMAYLGLVPAEHSSGPRRRLGAITKAGNSPARRMLVEIAHHYRMPARVSPIIARRQAGLPKAVTDIAWAAQTRLCARFRRLSARKLQPNKVVIAVARELCGFVWAIARETTLPGQSH

SEQ ID NO: 433832 - protein, 342 aa, unidentified
MQITTIGLDIAKNVFQVHGIDAAERVVVRKQLRRGQMLAFFKALPSCLVGMEACATSHYWARELAKLGHQVRLMPAKDVKAYVKRNKNDAADAEAICEAVRRPTMRFVQVKSAEQQSQLMLHRTRDLLMRQRTQVINALRAHLGELGITAAQGQAGLRELLAIIAGSADERLPAEAHASLIVLAAELQAMRTLIASIEKRIIAHHRLDEASKRLRSIPGIGLVGATAIAATITDPKAFRSGRDLAAWIGLVPRQDSTGGKQKLGPISKQGDRYLRRILVVGAHAVLKLARQKPEKYPWLTRLLARRPFRVVAVALANKMARIAWALLAKGGTYRMPVLAAAA

SEQ ID NO: 433833 - protein, 345 aa, unidentified
MPIVGGLDIHRKQITFDYLDTATGEVRRGQIAPADRAHLRAWLARFAGRDDVAFALEGCTGWRYVAEELAAAGVAAHVAEPADTAFARGRKRHAKTDKTDSRHLRVLLEQGRLPECWIPPAQILECRALLEAYHDLRREHTAWIERIHAVFFHQGAPRLGEGALRTEHGLAALREAAAIHLSPAGQLQVATALDMLAAVEARMDTLRQQLLHAARHLAGARALQARLYGVGPLAGLAMTCWLGGAGRFSSARKAVRFAGLDITVYSSDGKRSPGHLSRQGPEILRWVAYEAGKTHARASAPGHDYYAAVKDRADGKIAALAQARKLIRQACHILAELGDDALTAA

SEQ ID NO: 433834 - protein, 360 aa, unidentified
MRPKVTKNLFDGQPFYVGIDYHKKSWKVTILGEQYEHKTMSQNPDSELLASYLKRNFPGGNYHAVYEAGFSGFESCRKLRQLGIDCMVIHPADVPTSQKEKLQKTDRSDSRKLARSLRSNEFKAIHVPDISLEADRSLVRQRFRMMKDVTRTKNRIRSLLFQFSIPIPDRFTAAQTRHWSKIYINWLKGLPLDQKNLRQTLDNYIRIGEIQRKELLLLNRQVRDLSQTDNYLDNYNLLISMPGIGLMTAMTFLSQIGDIGRFKQLDELCNYIGLVPRMYGTGEKMQTGKMIKRGRKELKIMLIEASWDAIRMDPALMSKFNELTKRMNKNKAIIRIARKMVSRMRSILLNQKRYELGIIK

SEQ ID NO: 433835 - protein, 423 aa, unidentified
MKKRIYRRMPVNDFQLDSIAPADLGGKLVFAIDVAKVDMVAAIAAADGRVLQTLCWKAPGENQRVLAILRHFRLAGITVEAVMEPSGTYGDVLRRQLELDAFPVFVISGKRTHDACEIFDGVPSLHDAKAAAIIARLHADGLSTRLRDEGPDRRQLRAALAIMDLHQERYLQLVHRLESWLARHWPELPMLIELTSSSLMALLARIGGPADVAAVPDQASKLLRGISHRLLADDQIVAVIASARASVGVPLVGLERDALMAIAADAYRAHRAFATAKTQVDALAATTPAAALAPAVGHTTAAAVFAEVGDARSYSCTRAFLKAMGLNLKERSSGTIQGQLKITKRGPSRVRQYLWLAAFRWIQKDPIANAWYQRKKQRDGGRASRAAVALMRKLAKALYHVGRGATFDSSKLFDVRRLQLSDG

SEQ ID NO: 433836 - protein, 349 aa, unidentified
MNKKLFVGIDFSKETFDAAILKVSEESSIDLKIIGNEQFKNDVPGCKRFVKWLNKTCALAGDYSSVLVGGEDTGNYSITLPKQLYVLGIDCSLQNAYSIKCGSGKIVRDKTDKMDAEKIAYYFYRFRDQIRLYKPLSKDMESLERLYSYRYGQVRERARLKCQIKEYKHILKSEPNDETLKFMIQRLEKQERFLKREIKAIEAKMVEIIKANEELNEIHKCLLSVPGIGKITSLLLIVVTRGFTRFDNPKQLACFLGVSPHPNQSGTSVQNGNHRSWFADPYFASLLHMAALSASRFNSKFIDYKKKLKSKGKPHLLIMNNIKNKLLTVAFTIATRRTKFYSDYDAKRA

SEQ ID NO: 433837 - protein, 358 aa, unidentified
MKIIGCDLHAQQQTIAMLDTDTGEFVEKTLEHDGEELRKFYSGLSRPVLVGIEATGSMQWFLELMEELGIECRVGHPAKIRKAETRKQKHDRRDARLLQTLLAENRFPTIWMPSSEQRDLRTLLRHRHQWVRLRSRVQHTLQSMALNHGLRRGHALWNQAGQQALRALPLAPHASERRAALLSLYPRLQESIGELDQQVSQQVQQHPQARRLLTHPGVGPITALATEVFLGDPLRFSDGKTLASYIGMIPSEHSSGDRQRLGAMSKQGNALLRYLWCEAAMHAVERDPELKRFYRRKLVQKGLGKARVAAARKLGIRLWIMMRDQIDYQEFCRRGKARQESGSVRAGIPAINSGPAQQ

SEQ ID NO: 433838 - protein, 387 aa, unidentified
MPKPKDDLSRSLVAFDQNNTVVCAVELGSASWLMGAIVPGINRDTLKKLAPDEDVLLKLLYRWRDEAIKVGHEIKRIVVAFEAGRDGFWLARWLRARGIEAYVIHPTSIPVSREQRRAKTDRLDIGLLKRALLGWLRGEKKHCTMAAIPTLEEEDAKRPHREREQLVGKRTGIVNRMKAALVRLGIRGFNPKLRKAAQKLAALRTPEGGPIPPNTMAELQREMAHLRFIDEQIKHIEDARVENLKQAPQQGLNAKVLQLEQIHGLGIETADMLANEVFWRDLRDQRAVARYAGLTGSPDESGRRRREKGLAKTGNARARHGMVQLAWRFLNHQEHSALAQWFRARVAEGKKRKTMIIALARKLLIALWRFLTTGEVPQGVVLRPTSV

SEQ ID NO: 433839 - protein, 392 aa, unidentified
MFYIGIDVSKDKHDCFCCNDDLQPVFQFQFSNDSIGFNLLFEAIKSLDSSFDNIKIALEATGHYSYNITSFILDNDLPLAIINPLHSNLFRKSISLRKTKTDKVDANVLARMLVAYPDLKFSTSLDDNDIILSELKSLTRFRLSLVKDLSKLKTSLSRIINIVFPEIEKVFSSTNSLYELLYNFPSAKEIANAHLTKLTNVLIKASKGHFSKEKAVQIKKLAQNTVGNSSYALTLELKHTIKLINEYNSSIDKIDKEITTIMDKIASPITSIPGIGITLASIIIAEIGNFDNFDSPDKILAFAGMSPTIYQSGKYFASSAKMEKRGSKALRYALYNAARLTSIYCPVFREHLARKRSQGKHFSVAISYVVKKLVRVIYHLQTKNELFKNTIN

SEQ ID NO: 433840 - protein, 358 aa, unidentified
MQSVTRVGIDLAKMFIQAHAVDAVGKLVCNKQLSRDKFIAWCNQLPAGCLVAMEACSGSHAWARKLIALGLDAKIIAANHVAPYRLEGKGGKNDANDAAAICEAASRPSMRFVPVKTLSQQGMLCVHRYREGVKEERTANINRIRGLLAEFGIIAPQSPNKLRERLAEIIEDADNDLCGIARMVIQEAFSHWDEIDKQLEWCAQRISAHVKENQQAQTAVQLMGVGPVTASAAVVTVGDFKQFKNGAQFGAWLGLTPRQNSSGGKTKLGRITKRGDVYLRMLLIQAAKAAVMTAHKRDDPISRWLLQLREKSGWQKAAVAMANKNARILWAVMTKGCDFDPRYVSVKPSGGGSIAAAI

SEQ ID NO: 433841 - protein, 344 aa, unidentified
MDHIGIDVHKNQSQVCIFKGSGERIEQRILTDRVRFAEVFGGRPGARILLEASTESEWVARCLEELGHEVIVADPNFAPMYATRSRRVKTDRRDGRALAEACQLGAYRPAHRTSDAQRLVRADLAIREALVRTRSRYISVVRSLLRREGLRVRGGEAKTFGRRVGELEVPRSLSSAIEPLLVVLEQVNQQIDHADRELARRVEGDPDLRRLTTLPGVGPVTATTFKATVDDVERFRGAGQVAAYLGLVPRERSSGERQQRGRITKAGNSRARSLLVEAAWLILRSKRSDTIALRTWAERVAARRGRRVAAVALARRLSRILYAMWRDDTGYAPEKIHRPAAQAA

SEQ ID NO: 433842 - protein, 314 aa, unidentified
MTNPKERAGINVGVDVGKFQLDIHILERDRNFSVENSPAGIKEAIKVISRFKVSRIVLEATGRYELEFATAAFEKGLPVCIVNPIRVRKFAQADNQIAKTDKLDAKVIARFASAMKPELSTHKGKNIRLIKDLICRRRQLVEMRTQEYNRAKIMGSKIERSCNRIIKSLNLEIEWTEKHLAKAVELQEEWSQRKEILLSMPGVGDTLVYTLLADLPELGELSNKQISALAGLAPMNRDSGNLKGKRRIKGGRHTVRTTLFMATLSAIQCNPILGGFYRHLVKQGKHKKVALTAVMRKFITILNSMVKQNELWAH

SEQ ID NO: 433843 - protein, 365 aa, unidentified
MTEVTRGAAARVGVDLSKRVFQVHAVDRWGHKVVGKAMSPERFFAWCTELPAGCLVAMEACGGAHHVARRLRLLGLDARLIAGHFVTPYRMAGKSGKNDANDAAAICEAAGRPHMRFVPVKSAQQQGQLSVHRLREGYKAERTALINRIRGVLAEFGLVFPQSPEALRRVLAEVLEDASNELTGIARLVLQRAQLHWIDLDLQMKWCEERIEAHARSDERASKAAALQGIGPIGASALVASVGDFKQFDNARQFGAWLGLVPSQNSTGGKASLGRITKRGDDYLRTLLIQGAKSAVMTASKRTDRISQWLVQLKERVGWQKAVVALANKNARILWAVLTRDAAFDPNHVPEAPAPRCVLSQRPAL

SEQ ID NO: 433844 - protein, 393 aa, unidentified
MICVGIDVAKDKHDCFILSSEGEVLADVFTIQNNAEGFDMLLQTIRRCARPEDKIKVGLEATGHYSYNILGFLLDKGLDTYVINPLHTNLYRKSLSLRKTKTDRVDARTIAAMLMSDVDLKPYTDTAYHNEELKSLTRYRFDKVRERAKLKQSVSRLVTILFPELEKLVPSLHLASVYALLIEFPGAKQVAGAHLTHLKATLSDASKGRYGRDMAVTLRDAARCSVGSVLPAKSLELQHTIRLIRELDAEIEDIETAIQSMMDEMQSPITTIPGIGVRMGAMILAEIGDFSRFNSPDKILAYAGMSPSTYQSGQLSLSGPYSHMEKRGSRYLRYALYNATKYVCLWDPAFAAYLAKKRGEGKHYNVALSHAAKKLVRLICALEKSQQSYRNAA

SEQ ID NO: 433845 - protein, 408 aa, unidentified
MNTLYVGIDVSSKSNVVYLMLPNGDKHSNFSVANSHEGSTQLVKRILSALTSHSLDTVLIGLEATSVYGDNLVYFLREDATLAPFNRKIHVLNPKQVKKFHDTYNDLPKNDYVDSFVIADCLRFGRINKEVYLGDYRYKALQNLTRARFFAVQNLVKEKQRFMNVLFKKYSTMTQEKVFSDTFSTTALAVYDEFESAEALANMDLHELTDFIIEKGKNRFPDPDAVAKAIQKAARSSYRLPKTVNDSVNQVLSISITSMKALESQIKEFDKAIKAQMELLPNVLISIPGIGPVYSAGIMAEIGDINRFNSQAALAKYAGLAWKQHQSGGFESEVTRLIPSGNRFLKYYLCEAAFSLVRCDKEYSDFYHLKYKEVNRCQHKRALALTARKFVRLVFRLLKDNRLHCPAK

SEQ ID NO: 433846 - protein, 344 aa, unidentified
MAKLNIIGVDLAKNVIQAAVLTPTGKTLTNKELPRKKFAEFLAKQPISTVAFEACASAHYWARQAEKYGHKAMIIPAKAIIPYRQGHKTDRNDAVAVAEAASRPTIKEAPIKTIDQQGLQAIQRSRDLLMRDRTAHSNHIRGLLMEFGIYIPKGIFHLRSAIPEVLEDADNELPDMYRPVLACMYRHFQRIEADIKSIDLEIKALLKENDACSRIMELEGVGPIGAILLFATLGTGEAFKSGREFSAYIGLTPKQHSSGGKTNFVGISKFIANHQLRAILVQGARAYVHKLKDPTTPKQKWLHALILRAGYGRAAVALANKTVRTAWALLTTGTEYDRCRGAVA

SEQ ID NO: 433847 - protein, 448 aa, unidentified
MSKIKTKGGKVKRISQLTVINPKVAGIDVSDSEMMVAFPINSQEVEVRPFGTFTEDLEAIAKCLAEFGITSVAMESTGVYWSSLFLLLKDQGFEVLLVNAKHVKNVTGRKDDESDAEWIQKLHSCGLLRGSFQPDNLIRTLRSLVRHRANLVRTSSTYLNRVQKALELMNIKLHTIISDIDGKTGRLIIQAILAGERNPEVLADMRDLGVKASREDIIKSLEGHWTTEHLFELDQCWDLYCYHGQKIAKCDSMIEKQLVGIIASENEGVIPDIPVVKRKKSGKKKIPFNLTADLKEISGVDVTEVCGISELSALTILSEVGTDMSKWKTAHHFTSWLGLAPNTKISGGQVISSKIAKKKHYAGQAFRIAANSLYHSKSPLGEFYRRIRANAGAPKAVVATARKLAIIYYKMIQNQEAFNPIALIDSQKKHNEKKISKLKKIIAKLEAA

SEQ ID NO: 433848 - protein, 344 aa, unidentified
MDHFAGLDVSVKETSVCIVDDTGRIVREVKVASEPEALLQELAKSAYRFKRIGLEAGPLSQWLFSGLAEAGLPVICVETRHMRAVLKAQINKTDRNDARGMAQMIRVGLYRPVHVKTLRSQKLRMLLTHRKLLQSKAIAIDNDLRGTLRNFGLKVGMVGTMKFEARIQELVENLPDLAELVEPLLIVRRVLREQLVILHRRLLAIVRDDEVCRRLMTVPGVGPVVALTYRATVDVPARFRRSKAVGVVFGLTPSKYQSGEINRTGAISKCGDEMMRVMLYEAAQSMLRTNKWSWLKAWAMQIARRRGMKKAIVALARRLAVIMHRIWVDGTEFRWTREQATAAA

SEQ ID NO: 433849 - protein, 359 aa, unidentified
MTTLTKIETFFNNVKLTADDKLFVGIDVHKKSYHVALYLNDAPSIDFVMPAKKEQLSQKLKTTTPALRQVAYETGPSGYGLVRHLNKNNLPASVVATSKIPRPAGNDDKTDKLDSKKLAEYAAKGLLKPVQVPTLKQEADRQLYRMRHRQARNLAKVKTQIKSFLLMHDMDEPAGLGSWSQSSIELLRAISLRKTLRLSLDELLGDMDYYASRVRTLNKSLAEQLNKGRLAQRIALLKTHPGVGTVVSCQFATELFHYRDFNNTREVFKYLGLSPKVHQSGERSVRGSISRVSNSRLRSNLVQAAWRWVAVDVQAKKTYHRLLNNGGGIKQKAIIAMARKLSGHLWTMLIKDQPYRSNK

SEQ ID NO: 433850 - protein, 345 aa, unidentified
MKITTVGLDLAKNVFQVHAIDEAGEVIVRRALRRHQVMPFFERLEPCLIGMEACGTSHFWAQQIAALGHAVKLMPPDYVKPYVKRGKTDAGDAAAICEAVRRPTMRFVAMKSPEQQSMLALHRSRDLLIRQRTQLVNMIRGQLAEFGIVLAKGIQHALKLVDRLLNGEALEIPALAAKVVITLAEQVRDLQARIGGLDKDMMTWFRGNEVAKRLQTIPGIGIITASALAASVTDPQQFTSGRQFAAWLGLTPRARSSGGKERSGRISKMGDQYLRRLLVSGMTSRLRWLRHHPEAQPWAAELLQRKPAKLVAVALANKTARIAWAVMARGETYHAPQPSTREVTA

SEQ ID NO: 433851 - protein, 340 aa, unidentified
MGEGSWVGLDVHARSTVAGVLDGASGELRTVRVSPRGVETVAWLRTLAGPVRVAYEAGPTGYGLARACAEAGIACLVAAPSKIPRGPGDRVKTDRRDAERLARLLRLGELVAVHVPTPLEEAARDLVRAREDARGDLMRARHRLSKLLLRHGRVYDGSAWTLAHDRWLTQQRFTARPLTLAFEESYAVVAQAKARRDALDQAIIELAAEPPFRDVVARLACLRGVSTLTALALTVELGDWRRFHPAALGPFLGLTPSEDSSGPRRRQGAITKTGNSHARWLLIKAAWHQRRPPRPSATLERRRAGQPALVRLQADHSAHRLHRRPPSARARSRRSCRPWR

SEQ ID NO: 433852 - protein, 356 aa, unidentified
MLNDKKYIGMYVDKESISIAVRNGAGKIVMECVIETKASLILQFINGLRGDLHVTFEEGTWAAWLYDLLKPHVTKLVVCDPRKNASMREGNQNDKIDARRLAELLRLDHLSPVYHGEHGLRSLKELVRSYLTITKDLGRVMSRVKAIYRSWAIACTGKQVYAPRHRAEWLAKITEPGVRRRAEFYYQQLDALRALRQQVRRDLLAESKKHQAWKRLCQIPSIGPIRAAVLLGVLQTPHRFRTKRQLWTYSGFGIETQSSADHRSVNGQLQRVKKPSSIRGLNRNCNHDLKNLFKGAAIVASSKPGPFQEFYTALLTKGIRPEMARLTLARKIATIALIVWKRGVNFDAQHLKPQTA

SEQ ID NO: 433853 - protein, 342 aa, unidentified
MQITTIGLDIAKNVFQVHGIDAAEKVVVRKQLRRGQILGFFEALPRCLVGMEACATSHYWARELTKLGHQVRLMPAKDVKAYVKRNKNDAADAEAICEAVRRPTMRFVQIESVEQQGQLMLHRARDLLMRQRTQLINALRAHMAELGIVAAQGREGVKELVKIIASEQDARLPVDAHTSLVVLAAGLQALQTMIGSIERRIIAQHRSDEASKRLRSIPGIGIVGATAIAATVPDPKVFRSGRDFAAWIGIVPREDSTGGKHKLGPISKRGDQYLRRILVVGAHAVLKRARHQPEKYPWVTRLLERKPFRVVAVAVANKMARVAWALLARGGSYRAPAFAAAA

SEQ ID NO: 433854 - protein, 392 aa, unidentified
MSTDRLFADPTAIHADPASIFVSLELSRSSWLITSLSPGGGEKMSRHSVPGGDVEGLLARFAFLKDKALERRGQSYPVVVVQEAGLDGFWLHRALEAEGIESHVVDAASIAMPRRRRRAKTDRIDGEILLRTLLAYKRGEPRVCSMVRAPTPEAEDRRRLCREYKTLVAERVRHVNRIKGLLFAQGVRGYQPLRRDRRQELAALRTGDGRALPKHLRAQINRELDRLELLLEQLKAVAAERQALLAAARDAAGLPAVPALLLGLRGIGPEFAASLWSEGLCRSFANRRQLAAYAGLAPTPWRSGSLVHEQGVSKAGNPRLRTTMIQLAWLWLRHQPQSSLTRWFHDRAKRAREGWRKTAIVALARKLLVALWKYVNAGVVIEGAVMKPVPAA

SEQ ID NO: 433855 - protein, 456 aa, unidentified
MQKKYLKSKNEKKRVSINQAWPLINPRAAGVDWGAREHWVAVPEDCCAQAVRPFGTFTRDLEALADWLQQCQVTSVAMEATGVYWIPLFQILERRGFQVLLVNARQIKNVSGRKSDVADCRWIQRLHAYGLLGASFRPADPYCVVRSYLRYRDELVAARSVQTQHMQKALQQMNVQLTQVLSDVNGVSGLAIIGAILQGQRDPLKLAALVDRRVKTSLDKIARALVGDYRAEHLFVLKIACELYHTYEAKIADCDQELARELARLPDQVDWATHPLPAKIGKTQISEEMRLGLYRKLGVDLTAVEGFGPLVGLTVLSEVGPDLTKFKTEKQFASWLGLCPDNRVSGGRVLSCRTRRVVNRLSDILRLAATTLERSQTGLGAYYRRMKAKLGAAEGVTATAHKLARLLYRLLKHGEAYVRQGLADYEKKYADRKLKALKKTAASIGFDLVQRQAVTP

SEQ ID NO: 433856 - protein, 386 aa, unidentified
MQKLNDLSRSLTALEPDGTLIAVIEMSLSSWLVAGIVPGVERQPLKKLAVDESALLKLLHRWREEAKKAGRRIERIAIAFEAGRDGFWLARWLKARSIEAHVIHAASVAVSREHRRAKTDRLDTELLKRAFLGWLRGERDHCKMVAIPSIKDEDAKRPNRERENLVSEQSRIINRMKAALIRLGIRGFNPKLKRAAGRLEDLRTPEDEPIPPNTLAELRRDMERRRLVRDQIRQIEEARLERLDHAPGDGPHAMVRLLARVIGVGIETADMLVHEVLSRNMRDRRAVARYAGLTGSPDESGRKRREKGLARSGNGRVRRGMIQLAWRFLTHQKHSALAQWFRARTENARGTRKPMIVALARKLLIALWRLVRQGVVPDGVVLRPAQ

SEQ ID NO: 433857 - protein, 320 aa, unidentified
MANAAVYLGIDVSKDVLAVAAEPAARTWQVPNADAGIGSLVEELRALNPALIVLEATGGYEVAAVSALSAAGLPVVVANPRQIRDFARATGRLAKTDRVDALVLAAFAARVRPTPRPLPDEALRELEALLTRRRQLVEMVGAERQRLALARRIVQKSLRAHIAYLEKELDRTNTDLTRLMRASPVWRAADDLLQSVPGIGPVVAQTLVAELPELGTLGRRQIAALLGVAPLNRDSGRRRGLRHTWGGRASVRRVLYMAALVATRWNPVIRGFYHRLLALGKPKKVALIACTRKLLTILNTMVRTRQPWCPDLTTGALVSA

SEQ ID NO: 433858 - protein, 319 aa, unidentified
MTKIICGVDVCSRFLEARIGQDGAAACFSNTAAGIAELASFCRHHGVALVAMEATGGYEKQPYALLWTQGLPAAIVNPRAVRRFAEAMGQLEKTDRIDAGMIAWFAEVKKVVAGPPPTSQQEHLKALVIRLRQLTDLQTAQRNQRLLVQDEMVLESFTQLLALISSQMRQIETAIAQLISADPLWEKLNQAFRSIKGVADRTVARLMAEMPEIGTLSNKKISKLAGLAPLARDSGKNQGKRSVRGGRSGIRGILFVVVSIVRRYNPDFADFDQRLNRAGKPKKVIRIALAHKLLVRLNAKARSVRNELAISTVSPAKVG

SEQ ID NO: 433859 - protein, 385 aa, unidentified
MAQVNDLSRNLTAFDPISTLVVVVEMSKASWLVSGAVPGVERQPLKKLEPDATALLRLIERWRNEAVRAGRPISRIALAYEAGRDGFWLARWLIARGIEAYVIHSASVAVSRERKRAKTDRLDAAMLMRVFLGWLRGERGHCGMVAIPTMEEEDARRPSRERESLVNERSRITNRMKSALARLGVRGFKPHLRKAPERLAGLRTAEGTGLPANIIEEFRRDMARLALVREQISSIEKTRAERLERAPDTGPHAMVRLLARVIGIGIETADMLVREVLSRKLRDRRAVARYAGLTGSPDESGLKRREKGLAKAGNARVRRGLIQLAWRFLMFQKDSALARWYRVRTEGPSGARKTIVALARKLLIALWRLVTTGEVPDGVELRPAA

SEQ ID NO: 433860 - protein, 400 aa, unidentified
MPHATQGLSNTEISSEGRAVLAIADFVCFIDEMDSSCDSVGIDVPESLLSRQKEEPIMSNDTRIAVDVAKAVFELAISDRPGHVSRRERLSRAQFLAFMAQQPAATVVMEACGSAHHWAREIQKLGHRVVLLPPHHVRPYIRRNKTDRSDAKGILEASRNDDIRPVPVKTVDQQILTSLHRLRSGWMLERTARLNALRGLLRELGVFIPVGSRQVVPAAWLLIEDADSKLPEALRPIFAEACREIREIEDRVKQVERQLEAISEQLPAVEHLRTIPGIGLLSSTALVGFIGNIHRFPTGRHFASYLGLTPREYSSGLTRHLGRISKRGDGYLRTLLIHGARSLLVHARKQQPDRLREWANNLAKTHVHNKAAVAVANKLARIVWAVWKHERPFALMAKAA

SEQ ID NO: 433861 - protein, 338 aa, unidentified
MSLYCGIDLHSNNCYLAVLDEQLQPVLGRRVPNSLETILDALASHQEQIAAVAVESTFNWYWLVDGLMDAGYHVKLVNTSAVRQYEGLKYVDDRHDARWLARLLQLGILPTGYIYPKQQRALRDLLRRRSFLVRQRTANLLSIKNLYSRQTGSQVPTKDIKRLTAEQVAEQFTDPWLAQAITCGVNVADALQTEIVSLEKTILEQARQCPEFALLESIPGIGKTLAMTILYETGSLSRFPDAGHFCSYCRCVPSRHLSNGKVKGKGNTRNGNPYLSWAFIEAAHFAIRFEPLAKKYYERKKARSCALVALRAVAHKMARACFYVMRDQVPFQAAQAFG

SEQ ID NO: 433862 - protein, 360 aa, unidentified
MNRTTVAVDLAKSVFQLAVADASWKVIETHRLTRTQFERWFANRDVGLVVMEACGSAHHWARWLNNLGFEVRLLPAQYVRAYVRRNKTDAADASALLEAARASDMRPVRVKSVEQQALQGLHRVRSLWMGTRTSRINALRGFLREFGIAIPVGARTGLETISRVLADPGTAVPALIRGTMALLVDEIRLLEARIGQLERELSELARLSPACTTLLSIPGVGLLTATAMVAATSGDVSHFKDARHFASWFGLTPKEYSSGGSRYLGHISKRGDRYLRMLLTHGARSVLRAAAVARGKGREVHGVRSWALEVQGRSNHNKAACALANKLARICYATLRDKEKFDETQSLAKKLSRQAFTMPA

SEQ ID NO: 433863 - protein, 321 aa, unidentified
MKTVLGIDQAKKKFDVALLRNGKYKSKVFENNPAGFSALLIWLAKNDVAIVHACMEATGSYGEPLARFLHEAGHSVSVTNPARIKAFGQSELLRTKNDKTDAKLIARFCEKMEPTLWQPPPVEIEYLRGLGRRRDALVSMRTQELNRQESSNETVNSSVQTVLECLDKEIEQISKLIRDHISKYPGLKRKHDLLDSIPGVGPATIEAILSEINAFEGFETVEQVVAYMGLSPKEHTSGTSVKGKSAICKIGNARLRKALYMPALSAIIYNPIVRALYLRMKAKSKNGMVIACACMKKLVHLIYGVIKTNKPFDPAYILKTA

SEQ ID NO: 433864 - protein, 350 aa, unidentified
MQYLGIDWGTRKAAWCAVDERGEVAEGMVPADEDGLAWLVHRLGPDVRGCVEMMSGAVWVRERLRACGWQFQIADARKVKAIAPLACKTDRVDARVLAQLAYRDLVPEVWVPALSDRELRERLRRRAHLVRLKTSTRNRMFGLLTQWGVRGNLKALRQPGSLQRLSERGVPAVWIQSLRVLLAVVDDLERQLAAIDTELRPIARTDQRVGLLVTIPGIGDLLGLTIAAEIGEISRFASARKLIGYAGLAPTIKQSGQSSWTGRISKAGSPTLRWAAIEAAQPAWRPTNPWHRLFTETRRRHGKANPAKAAVARKVLIACWHVLSLQEPFKPHAPTSPAICPGKLPCDLAA

SEQ ID NO: 433865 - protein, 433 aa, unidentified
MLLTPYNSIEPLVLKGVPMALKIVYQICCGIDVHKTFVVACIASTNQQGVTTYKRHRFSTFTQGLKELLQWLLDNHCKDVCMESTGKYWIPIYNVLEKDCTIVLAHPKYVKAIRGKKTDKKDAKWIADLFKHDLVAGSFMPPADIRQLRDLMRYRFKLTCFMSSEKNRLQNCLTVSNIQLASVVSDTFGKSSQRILDKILENPENASFDIESLIHGSMKKKLPELELAIDGFITPEQAGKLKIIKKHFEDLESRKAELEELILALASPYQQELDLILTAPSFKNKFTAIGIISEIGVNMEAFPSAKHLCSWAGLTPTNNESAGKKKSVRVSKAGCYIKPLLVQCANSVVKSEKHPEIRNRYLRLRKRRGHKKAIIAIARMLLTALYNMLKNKEPYNAKLYRKSDVLPVNREITVEQAILMAQFQGYKIKSAAE

SEQ ID NO: 433866 - protein, 419 aa, unidentified
MTVDFEWYAGIDWASEQHRVCLLDGGSRRAGEREFAHSGDGLAELCAWLIAMSGCEPQKIAVAIETPHGPVVEMLIDQGFAVHSINPKQLDRFRDRFTVAGAKDDSRDAQVLGHSLKTDAHAFRRLVVDDPMIIELREWSRLGDDLKQERNRLANRLRQQLWRYYPQMLELGGDDIAADWLLALWDEAPTPAKAAEISTQVIAPLLKAHRIRRFEAADVLRILRQKPLTVTPGTIAAASAHIRILAERLRLVNRQVKETNRKLDRLCRKLGQAPESEAGNRPEQRDVAILRSLPGVGRINLAALLTEASEPLKRRDYHALRLMSGVAPVTRRSGKACLVIRRLACNARLARAVYHWTRVASQCDPISQKRYAALRQRGHSHGRALRTLGDRLLGLACTLLRRQVLFDPDYHCKEVAAAA

SEQ ID NO: 433867 - protein, 457 aa, unidentified
MRQKSKRTKGIEEAHPFSGMSRVNPKAAGVDIGAVEIVVCVARDESTQLVKAFGNYTVDLQGIGTWLKEYKIQTVAMESTGVYWIPLFEELERQGFECLLISSRSLRRVSGRKSDITDAQWIQTLHSYGLLESSFRPQADLVALRTLLRHRNQLLDHRSPHIQHMQKALLQMNVQLSQALSDVTGETGRVIIRSIVSGIHDPKLLAAFRDPNCKKSEEEIEKALTGTWREEHLFVLKQSLELYDFYTKQIESCDEEIDRMYGMTRPDWVSGELPPIPKKKRNSHSKNAPEKAREIRQHLKRISGVDLSVVDGFGVSLAQIVIMEVGTDMRKFPSEKHFSSWLGLAPKHEISGGKVLKNKTLKTKNRAGQAFRMAAQSVKQADCSFGAMYRRLRARLGPAQATVATAHAIARVVYRMLKYQVEYDPLSVNEYQKQYDQQQIKYMKKKAAKFGFQLVPA

SEQ ID NO: 433868 - protein, 388 aa, unidentified
MIYVGIDIAKLNHFASAISSEGEILIEPFKFTNDADGFHLLASKLESFDKASTIIGLESTAHYGDNLVQYLVAGLYKVCVLNPIKTSQMRKNNIRKTKTDKVDTYVIAKTLMMQDTLRFISFYDLDLMELKALGRFRQKAIKQRTRLKIQLKTYVDQVFPELQYFFKSGLHQKAVYAVLKEAPSPNRIASMHMTHLATLLKTTSHGHFTKEQAKELRVLAQKSVGANDSTLSIQITQSIEQIELLDSQLKKIEEEMTDIMKFNDSVIMTIPGIGYINGGMILGEIGDIHRFSNPNKLLAFAGLDPSVYQSGNFQVRRTRMSKRGSRVLRYALVNAAWNVIRNNFTFKSYYETKMAEGRTHYNALGHCSGKLVRIIWKMLTEKVEFNLK

SEQ ID NO: 433869 - protein, 433 aa, unidentified
MIKINYMSTLFVGIDVSSKSNVVYAMDFDENKYIDSSFPNNQPGADKLAEMIIECMKKHTQLNTIIVALESTSVYSIHIANFLSSCELLIPYKPYVYCLNPKMTANYRKTYVGMDKTDHMDAFLISDFARVGRTKKCEPWRGSQYLALKRLTRHRLHLAECITREKTYMVSNLYLKFSELQILNDDSQPFSNIYGATASAVLTEFLSLQEIIDSPEEDLLQYLAEKSKSRITDISKTSELLKKAARDSYRMDKCMYEPLNVSLASSFNCIQTYQKEIKLIEHAIKKCINGMNPNAFTILKSIPGIGPVWAAGILSEIGDITAFHSSDALAKYAGLTWLKNDSGDFISEDNHVSKAGNTYLRYYLGEAANSVRKHVPEYAEFYSRKYAEVTKHQHKRALALTSRKFVRLVFGLLVKNQLYTGEKLDNELNTEPN

SEQ ID NO: 433870 - protein, 344 aa, unidentified
MTIPLSIIGIDLGKNWFHVVGLEPKGTVLLRKKMNRGQLSEFAATTPRGVVAMESCAGSQHWGRVFAAAGHEVRLLPGQFVKPYVHGNKNDFHDATAIAEAGQRARMRCVPLKTTEQIELQALHRLRQGIVRERTAVVNQMRGLLLEHGIVAPVGRSGFGRRLPTTLLEAERRLSPRLIEVLHRQRRRWLALDEEIEEATRELTLWAAQSEACRRVETVPGIGPLIATATVAAVGTGRMFRSGRDMAAWLGIVPSQHSTGGKPTLGPISRRGNAYLRALFVQGAHAAFVHLKRDGSALGEWIRNVEARRHRQVAIVALANKMVRICWKVLTTDEAYRPYPARVA

SEQ ID NO: 433871 - protein, 316 aa, unidentified
MTSTRFVGIDISKATFDVAFSADLRAVYSNDPAGFTQFRQALADDDHVVMEATGTYFLKLATFLSAQDITVSVINPAVISYFARMRLVRTKTDRVDADIIREYGCLEALPAWTPTEDVFIELNQLDSHLNGLQGDRNRVIGRLEALQQCAKINAYTLEDLQQQLTDLEVRIKQTEKELVVLTQAHFPELLTLLTSIKGIGQKTAIMFIVLTRGFTRFSSPKHFASFLGLSSFIRQSGTSVRGSGGISKMGNPRMRQLLYMAALTARTRNSACKIFAERLAGNGKPPKVVRIAVANKLIRQAFAVCLKGESYSECYV

SEQ ID NO: 433872 - protein, 390 aa, unidentified
MIYVGIDIAKLNHFASAISSDGTELMKPFKFTNDGDGFQMLDSRLSALSYEDDSIIIGLESTAHYGDNLVRYLVACNYNVCVLNPIKTSVMRKDNIRKTKTDKVDTFIIAKTLMMQDSYRFVSFYDLDLMDLKQLGRFRQKTIKQRTRLKIQLTSYVDQVFPELQYFFKSGLHQKAVYALLKEAPTPQDIASMHMTHLSHLLAAASHGHFKKEQAKELRVLAQKSVGANDSALSIQITHSIAQIELLDSQLNSVEAEMTEIMKFNDSVIMTIPGIGYINGGMILGEIGDIHRFPSPSKLLAFAGLDPSVYQSGNYSARRTRMSKRGSRVLRYALINAAHNVVKNNATFKAYYDKKMAEGRSHYNALGHCAGKLVRIIWKMLTDGVEFNLD

SEQ ID NO: 433873 - protein, 481 aa, unidentified
MKTKQKEPTEKYTGQSRQLNWRHMNRKQRRDLERKIQSADLTLQLIHPDAAGIDIGNESHYVAVPPDRDSQPVQRFGCTTAELRTMADWLKQCRIRTVAMQSTSVYWIAVYDVLEQAGLEVYLVNARETKNLPGRKSDVQESQWLMKLHTYGLLRNSFRPPQEIRTMRTYWRQRNDLVRSAARHIQRIQKTLTQMNIQLANVLSDVSGVTGQAIIKAILAGERDPQRLAAFRDPRVKASEKDIARSLEGNWQEDLLFVLKQEQAAFEFYRKQMAECDHQLELYLQKMEDRSQGATLPEEKRKDRLQKKGNQPQFDLQQQLFRMTGTDLTQIDGIDVMTAATILSEAGWDMIKWKDEDHFVSWLRLAPDNRISGDRIVGKGRLPTSNRVTVALKLAANNLRTSQSYLGAQFRRLKARLDTPVAIKAMAAKLARLIYRMLRYGTKYLDHGSRYYELQQRTRDIRRLKLKAATLGFQLVPSTAP

SEQ ID NO: 433874 - protein, 369 aa, unidentified
MLYLGIDQHKRQLTVNLRNEDGSVILKRQVSTQWEKVRTFFADLAEKAKSDDGFMAILEVCGMNPWLLAMLKEYGCREIVVIQPAKRSVQKTDGRDAAELSHLLWVHRHNFLGGECPLGVRRVLPPSPQEADDRQLTALRARLTRQRTAVLNGIHKLLRKHNLEQFQPTKEFQTKKVRAWLTELELPALDRLELNMLVSQWDLLDSQLDVVEAKIAERAVADEQVQLLESIPGVGHYSALAIHSRIGDIDRFKHADSLANFFGLTPGCNNSGENTKRLGSITKRGSKLVRYLLNQAVIKVLRFDSDMRTWFKRIKRRRGAKIARVAVMRRLTTILWHMLKKKQKYRYKAIVKRHEAFDAYAGTATVQGN

SEQ ID NO: 433875 - protein, 349 aa, unidentified
MRYIGVDLHKTNFVVCFLNEDETLQLETFPLSKAGISRFSSELRKEDAVAIEVTQNIYYFYDRIKEFVARVVLVDTYRFAIIASSKKKTDKADALALARFLKLDHLPQVPVPSERVRQLRHLLQARETLVGLRTKLKNLGHAALIRNGIALSRSAFAAGVARERLRTRDDLSAADKVILQSALRQIAELDKEIEQLEAEVVRLGKTLAGIKRLLQLHGLNLLSAISLLAEIGDIHLFETSKQLVAYSGLATSIRQSNQTTKQGHITKQGRKRLRTVAIRAVLSMVSRTNTPLMDFYARKKREKGSGKAICATARKLLTIIFVMLKKELDYWYLEERLYNRKLRQLNAAA

SEQ ID NO: 433876 - protein, 311 aa, unidentified
MYYIGIDVSKKDLSVFDGKDLNFINQEGLKSFKKYLKKKYSLSEIVIIFEPTGVYSLYLKEFCAENGIKAYIVNPKKSHNFTRALGKRSKTDKIDARILYQFHKLINLKDIQVPEVDQQAKTLASYLVSYEFALKQRISLSHHLESLRDKQLITLIKKELKRAQRLEDKIFHDIKEYVEQNQNLKEDYQRLSTIPGIGEKTAVALLTLFKTYQGTNRAQITALVGLDPVKRESGTSVKYKVKISKNGKEIYRKILYLPTLCATVHNQKIKIFYQRLLANHKSKKLAVIASMRKILLIAHAMYQDKTEYITA

SEQ ID NO: 433877 - protein, 366 aa, unidentified
METIYIGVDFHARQQTICYLKTETGELVTCELKHQNKQKERAFYAQFRGPVIVGLEASGYSPWFERMLEELGCEVWLGHATEIRRRARWRQKNDRRDAELILELMLHDEFPRLHRPAVQSREVLRMLRYRQKLIKIRTMSKHSLQAIALQSGLAKGSRLFTKEGQQQLGTAEMSPVMHWQCEHWLQLMEPINQQLLETMVWFKEQSKGDICITRLRTHPGIGLLTSLCLVHTLQPVSRFRNTRKVAAYAGFDPVERSSAERKCFLGISKAGSRLLRYLLVEAAQTAVRKDEDLKRFYQRLADRRGRPKAKVAAARKLLIRAYIMLRDEIDYAEFRHRAVAARLARRGQGPSNVPEVLIGQPASPRQ

SEQ ID NO: 433878 - protein, 389 aa, unidentified
MKEEEKSSHCRYVALDIHKHYSVVAGVDRDGQEILPPCRVEHLDLENWLPKHLLRTDRVVIESTTNAWHVYDLLEPLVAEVLVANPIKVKQIACARVKTDKKDTLILARLLAANLVPTVWVPPKHVRELRQLISQRRRLVGMHTQVVNRMHSVSHRHHLGHPKGKRFQEKDMGWRESLGKMERFQLDLDLETKKYLKMQIDQITKELGSMSHQEPWASQMMYLMQIPGFGVVTGMTVLAAIGDIARFETPKALASYSGLTPGVEQSGVKLRGKSITKEGRREFRWAMVEVAQRAVKADPHWKRLFSELERRMHRNQAIVAVARHLLMVVWYVLSQGKSYRHYSDERIAYKYYTWSWQLDEAQRKGLTRPQFVRYYLMRLGLGLIYSEWL

SEQ ID NO: 433879 - protein, 408 aa, unidentified
MTVVGIDVSKSKSMVAAMKPGGKLVAAPYEVRHSDIELSHLALDVLCMEPDTRVVMEATGRYHEPVAALLHSEGIFVSILNPLLIKQSGAGSLRKVKSDPKDALKIAKYGLDNWSTLREYTPMEAIRQQLKLCARQCDLYNKSIVMLTNNLISLSDKTFPGVNELFSSPEKADGHLKWVDFYRTFWHCDCINRMSPDTFGERYQKWCKRKGYHFSADAADALYAASCGLYTTLPRDNNARLLVTVAADQLIALRENQSKLEAEMLNSCKQLPEYETVMAMYGVGKSTGPHLMAELGDVRRFLHRSSIVAFAGVDPGVVGSGKMQLSSVATSKRGSPQLRKALFQVVSTYVKCKPENEAVYQFYTKKRDEGKPFFVCTTAAANKFLRIYYARVKECLNAAESATQVEEG

SEQ ID NO: 433880 - protein, 417 aa, unidentified
MNESEQWQQHRAFGAVDWASEKHSIIVVDQAGKVIEDLQIEHSAIGWKKFRQKLQPYGSIPFAIETSQGAAVEQLLEAGMVVYPLNPKSAQAYRERKAPSGVKDDRLDAWSFADALRVDGQGWKALRPEEPLTKELRLLCRDEVTLIEQRTAFIQQLRHALAEYYPAVLEAFEDWTSVSAWMFLQRFPTPEALAQAGKRQWQKFLHSRRLWGSNQGPRRMEIFAHAGEFAGTPPTIKAKSLLALSLVQMLFAIEKQLAIYRQRIEELFARHPDHDLFGSLPGAGPKIGPRLLSEIGEDRQRFGGDAQALQCLGGTAPVTKRSGKYRHVHQRWACDKHLRHAIYLFAEQSVSRCVWAERYYQHHRQKDRSHANALRRLGHRWLKIIYKMWIDRTPYNAELHHRNQLRHGSWIFQFKPS

SEQ ID NO: 433881 - protein, 318 aa, unidentified
MSTGNDFYGVDVAKAELVIARKGEPGICTIANEAGAIGLWLKTLPPGSTVAVESTGRYHRLLVELATASGCTGYVLNAKDVSFYAKALGGRSKTDKVDAHVIARFIAEHHEGLHPWEHAQPHAAEIWELLLRRADIVVHRASLRQTMRDAQAVAVAAKQFDDSFEGLLEAIDERIESLQRQDAQMAAASRRLQTVKGVGPQGGAMLAALLSRIPFANADALVAYSGLDPRAQDSGQKKGRRRLSKRGPPPLRRQAYLMAKAAARSKVFKPIYEALKARGFAATQALVIMARKLLRVAFAVWKSGKPFDESVIAPAAGA

SEQ ID NO: 433882 - protein, 326 aa, unidentified
MQGKEASEQETKAKCSVGIDVSKCWLDVHVLPSAEALRVPNTCEGIRRLKRRLGGFDVALVVVEATGKWHRHVHRSLVASGIPVAVIDPFRVRMFAKAQGILAKTDRLDARVLAQFAAIMAPLPRPPAPEILQQLAELVVARASAVEAQTALKNQFAAAHGQFLKRQLARRIERADKDIAALDGEILKRIKADLELDRRYTILTSIPGIGFVAAATLIACLAELGSISAKQIGMLAGLAPIADQSGEREGARVIWGGRASVRRILYLAALSAARFNADMNAFYARLIAKGKPPKVALIAIARKLVILANTLIGENRIWHSQAPKHA

SEQ ID NO: 433883 - protein, 416 aa, unidentified
MKKHNNSGKKSEPTSKRTKSRGPVQRDTKEVLAELVGKLKEKLDPTKVAATSAGEKHQRGELRPNLDRLTAGVDLGDQWSHYCILGLEGETLAEGQLRTTQEDLATFFQGLNGARVVVEVGTHSAWVQEVISGCGHEVLVANPRLMDGSKRRKRKNDRIDANKLARLGRVDPESLYPIQHRSQEVRQDLVMLRARDALVAARTEIINTTRGLVKSMGTRLPKCSSRSFAQKGEEAVAVEMREALLPLVRLAATLSADIKEYDKKIEELGREKYGHTALLRQVKGVGPITALAYVLTLENPQRFAKSRDVGPYLGLVPKQEDSGESQPQLGISKAGDRMVRKLLVGSAQYILGPFGPDTDLRRYGLRLCERGGKNAKKRAAVAVARKLAVLLHRLWVSGEVYEPLHSAMSAPIAAAA

SEQ ID NO: 433884 - protein, 344 aa, unidentified
MSKVITIGLDIAKSSFHAHGADERGEAIFSRKLSRGKLLDFFAAQPACLVAMEACGGAHHWARELTRLGHEVRLVPPAYVKPFVKRHKNDAVDAEAICEAARRPGMRFVAIKTEEQQAAGMVFRTRDLLVRQRTQLVNALRGHLAEYGWVAPRGKAQVAMLADLLDEDEMASSLPEATRAMFRIMTDMLAELDDRIAALDKEIARRAREDEVARRLMTIPGIGPIAATAIVALAPHAATFSKGRDFAAWLGLAPLQHSTGGKQKLGRISKMGERTIRRLLIIGGSAVVRQATIHGAPAGSWLEGMLARKPRMLVSVALANKMARIAWALMTKQEDYKAPVAVAA

SEQ ID NO: 433885 - protein, 344 aa, unidentified
MYRTRVGVDLAKKVIQICIHRNKKVQSNIELTPEAFLFWLFNNKPATIIFEACSSSNYWKQKATEAGHDARLISAKLVSVVRQNQKTDKNDALAIVQTTFMPDVTFIGGKTVEQQQLQSIKRLRELAVKQRDASQKQLIALLAELNIKIANRRGGIISSIEAVLEDATNELSTECRRAIYLAKEHLKVLFEAIRHYDDCMEKSVAAHPECKKLMLLEGVGAMNAINLYIALGCSEIGTFSKGKDAAACIGVTPIQHSSGGTVALGSIGKSKNSILRSQLICGATAAVQHAVKRKAKTKKDLWIQGLVERRGKKCAAVALANKTVRTAFSMLTKGTEYKAELLAA

SEQ ID NO: 433886 - protein, 345 aa, unidentified
MAEVTTIGLDLAKRVFQVHGVDAAGVVMVRRALRRQQVLAFFAKLPRCLVGIEACATAHYWARELASLGHDVRLIPPPYAKAYVRRNKNDPADAAAICEAVSRPSMRFVAVKTEAQQAAAGIHKVRELLIKQRTMLINTLRGLMAEFGIIVAEGPRHVSELVAILADPADARIPAPSHHGLMAIVETLRGLEQRIERVEKQIVGWGRANATCRHLITIPGYGPILSSAMTAMVVNPAGSTSARHFAASLGLVPRQDGTGGKAKLGPISKRGNGYLRRLLVNGAMSVLGSRRAKDDAWLVKLLQRKERKVVACALANKLARTGWALMMRQQDYRRPRQDQLCPDLA

SEQ ID NO: 433887 - protein, 452 aa, unidentified
MKKEKMALDVVNPQAAGIDVGSRSHYVAIGQRDEDVKEFGVYNEDLMALAKWLLDNQVKTVAMESTGTYWQSLFTTLQGVGLEVILCNGKFTKNIKGKKTDVKDCQWIQKLHTLGLLSGSFLPDEATEQLRTYCRHRANLLEQAADTSRKMQKYLRLLNLRLDVVVKDVTGLTGLSIIDAICKGEMNPEKLASLRHGNCKKSEQEIAKALQSNGRKDLLFSLTHEYELYQIFQRKISECDKQIQKLLNEQINNDDNKKHHFIEGKVHKRLNKNNPDININLLSYQYFEGVDLLAIEGVSHSTVLTLMSEVGHGINKFESAKQFTSWLRLAPNNKISGGKILSNKIPKGSNRLKIALRQAANAVGNLKDTALSNFFKRIAFRKGRTSAISATARKLAVIIWNMITKKVPYKTDTQYEFLDQKRKRKVMEMKKLIHKFDITSDDLGLQLNINNL

SEQ ID NO: 433888 - protein, 321 aa, unidentified
MTYVGIDVSKVTFVVAYSSVKTNKTRTFKNTVNGVHEFVQTISASEHNCVLEATGNYSALLVYLLSEAGITISLENPLKIKNFARVMLTVTKTDEIDARLIALYGEKMQPAPYKLRSDAILVLKQKRTVLRQLKKQLVATRNLKGSMEVLPFFDPKCKKTIEKTITFLEKQIKEMEEELASLAQGEYKKQMDLLTSIKGIGVTLAAPLIVATGRFSYFDNAKQLTRYLGLCPTYQQSGTSVNVKGHINRNGDSSLRSQLYVAAFSSLRCNTECKACFDRLRSNGKPGKVVVIAVANKLVRQAFAVVTQGKPYVDGFKSEKP

SEQ ID NO: 433889 - protein, 333 aa, unidentified
MKNYLFYVGIDISKLKLDITILDVSSLKSEHFVVENNIKSISLFVKNLSKKIDINQTLFCCENTGVYTNHLSSASMDLKLDLWIVPAVEIKRSKGISRGKTDKSDAKDIAYYSYRNIDKLKLFTLTAIDIQKLKILYTEREKMLKSLLLLETTKENKGFASKEVFKEVSSINQSLTKTIRNAIRKIETKMKEIIKANAQLNKQTQLIRTIPGIGEQTSIYLIIVTKGFTAFKNWRQFACYSGVAPFECSSGSSIKGRTKVNHMADKKIKSLLQMCAMTTLKYDPQLKEYYNKKKAEGKNSMLVLNNIRCKLISRVFAVINRETSYINTYKFAS

SEQ ID NO: 433890 - protein, 402 aa, unidentified
MNAVGIDVSKGKSMVAVMRPFGEVVLSPFEVPHSSSELSKLARLLKSLDGESRVVLESTGNYHTPVAKMLHDAGLYVSVVNAMLVHDYGNNSLRRAKTDKKDAVKLANYGLDHWLSLPGYVPEEDTRLLLKNCYRQYQQYAKVQTMMKNNLLSLLDMIFPAVNRLFSSPVRTDGSEKWVDFIDAFWHVQCVSGLSANAFSAKYLKWCRKHGYNFSEEKALEIHRTARDHVAVMPKTDTTKLLVKQAVAQLRTVSSAKAALQNEMDALAASLPEYPVVMDMFGVGPKLGPQLMAEIGDVRRFHSKKALVAYAGIDAPPYQSGQLNVHSRSISKRGSPALRRTLFLVMSVYLKNSPTDEPVFQYMAMKRAEGKPYLVYMMASANKFLRRYYAAVKAYLNALEQG

SEQ ID NO: 433891 - protein, 363 aa, unidentified
MEAQTNQRARRKGAEHADYRCDYHPGFQQIAFVDTETGECGERRLTHREEAEQFYGGLRQRSVRVGMEASGHARWFERLLRDLKFELWIGDAAEIRTKRVRKQKTDRQDAQLLLRLMVEDRFPRIWVADAENRDLRQLLWHRHRLVQMRTRVMNQLHVVALNEGLRRKQALWRPAGRSELESLVLARWASRRRQDLLDVLDQLTPKIQELTRALEEEVEKRPVTRRLATHPGVGPLTALAFELVIGTPERFHSGKQIASYVGLVPSEESSGDRRRLGHISKQGNSLLRFLLVEAAQVTVRSQPQWRSKFFHLAMRRGRKIAKVAMARKLAVHLYWMWRQGLDYGQFEKLGSHAGEPGHRHGVQ

SEQ ID NO: 433892 - protein, 338 aa, unidentified
MTVYAGLDLHATNTYVAMIDQENKVLYKQRHRNELPSIIAALDPFKKDLQGVVVESTFNWYWLVDGLMAEGYPVHLANPSAIKQYEGLKQIDDKRSSLWLANLLRLGILPTGYIYPKEERPTRDLLRKRLQLVRHRTSHILSVKNILARNLGLRVKSDDIKKLEDHEVKRLFRDQEMRTAVLASLGLIRHLQTEIDTIEDMIVKKVKVKKEFAKLITLPGIGTILALTIMLEVGDIHRFPAVGDYSSYCRCVKSTRISAGKVTGHGNRKNGNKYLSWAYIEAAQAARRFHETVRSYYEKKMARTNKIVAIKALSHKLTRASYYVMRDQVDYDPARLFG

SEQ ID NO: 433893 - protein, 348 aa, unidentified
MRQVYVGMDLGSKQCAAVAINSKGKMIDSELFPTSERNLIGFTKRQKGRVHMLIEEGELAGWVMRTIKPHAESVVVSDPKRNAWVSKGSNKNDRVDAAKLAELNRLGSYSPVWHPEQEEIAAFKLVVQHYDECSRRVARTKCQVKARLRGQGVITRGGAVYGIVGRTKALGQVNSVAVRKVIESDFMLLDYLSRAKAAALRHLIEVSKRFPVIARLKRIPGVGPVLAARFVAYVGDPMRFNKRTLASYSCLGIVKRSSDGSPIGREHLNRAGNSVLKDVSRTAFERALASRKPNGIKEFYWSSLKRTGSETKARLNTQRKILALMLAIWRDGTEYSDELVGGVAFTGA

SEQ ID NO: 433894 - protein, 315 aa, unidentified
MNSQTQTYHVGIDVSKDKLDVFHPAWERPRCFANTPRAIRDLLAAVAAAGGPCQLVAEATGGYEKQLVQAAAKAEVPISIVNPRQVRDYARAAGVLAKTDEIDARTLADYGRLFEPTPTEPLTASQQSLRAAVRRRESLIGQRTREKDQLGKDHDALVRRDLKSSIAALDRRIAKWDAHIATLIASDSEMTAKKDRLEQIKGVGAVASSTLLAEFPELGRLGDRQAAALAGLAPYNCDSGRWHGLRSIRGGRGRIRRALYMPALCAVRHNPVLREFYQRLRAKNKPHKVALTAAMRKMVCVLNRMLADPHFQPAS

SEQ ID NO: 433895 - protein, 369 aa, unidentified
MPHVTSIGLDVHARSVAAAAFNPFTGEVVHRDFGTDASEIAEWALGFEDPRACYESGPTGFHMARELRALGLDCAVAAVSKMQRPAADARRKNDRRDAEFIARMLATHNIVEVPLPDAAVEAARDLDRALDDATVEYRRARQRLNMFLIRLGHVWDERNADGARKKAWTRAHWRWVSEIRLEGPQRDALEYYVTAARCAESDRRQLERRVVALAGTDRWRATVEALSCIKGVDTLTAFRLAAEAGSFSRFRSAPAFASWCGLTPSEHSSGESERRGGITKAGNALARTALIESAWHYSTCSPRPKAPAPGTDVPPAIRSRADDCTARLCRRREALAAAGKSSCKANAAVARELACWVWEIGCRSEGTVL

SEQ ID NO: 433896 - protein, 312 aa, unidentified
MANQVCAGIDVGKEKLFVNIYKDNKVRDFPNTHSGLERMSKYLIKNAVDLVVMEASGGYERLPASDLRACGLSVAVVNPTYVRRFAQGMGTLAKTDTIDARLIAHFAFVKQPKPQPAKTVEEEELTALVERREQLVSLLSMEKNRLSKASDYSKTSIQISIQFLTEQIGTIETAIKALVSKSPERQAKLRCMCSFVGVGEITAVTLLTEMPELGKESREHIAALAGVAPINRDSGKMKGKRRTYGGRARVRRTLYLAALSASKHNPIIKAFYERLLAAGKEKKVALVACMHKVLTILNAMLKKGELFNPEYS

SEQ ID NO: 433897 - protein, 355 aa, unidentified
MNDAKYIGMDVHTATISAAVRDASGNLVMEATLETKCETILEFVHGLRGSLHVSFEEGTCASWLHDLLKPHVTEVLVCDPRKNALLRVGNKNDREDARKLSELLFLNKLHPVYHGETGIRTLKELARSYLTLTRDLTRMMNRLKAIYRGWGIACGGQQVYAPRYRAEWLAKITEAGVRRRAEIYYQQFDVLVALRQGVRRELLAESRKHPARRLLRQIPSIGPIRAALLIALMQTPHRFRTKRQLWAYCGLALRTYDSGEYRFVGGQLKRSKKAVTIRGLNKNHNHDLKNIFKGAATRAAATAGPLQNFYEARIANGMKAPMARLTLARKIAAITLLVWKKGVRFDAEQLKQQAA

SEQ ID NO: 433898 - protein, 331 aa, unidentified
MQAGEGIIGIDISKDSFDMVLRSTRGEQHRVFTNDPKGYTALVAWAEKQPERVVHICLEATGSYWEGLSEYLYQGGYTVSVVNPFQVKRYADHLLNRNKTDKADASLIAEFCEKDRERLRAWKPYPPEIKVLRSMGRRLVELQDIKQQEQNRLKSGVSNPVVLESLQENLTHLEDQIKALMKKIKEHVEQHPDLREKQRLLTSIPGIGKLTAIKLIAEIGEIKDFASAPQLAAYAGLAPKQFRSGSSVHKQTRISKQGRTELRRCLYMPAVVASEHNPIVMDLKRRMLASGHAMMEVIVAAMKKLLHLVYGVLKSGKPFDPDYGKQFCFNS

SEQ ID NO: 433899 - protein, 265 aa, unidentified
MTITTVGIDLAKNVFAVHCIDQNGKAVLVKPKVSRAALSELIAGLPPCVIGMEACSGAHYWARLFRQYGHDVRLMAPKFVSPYRMAGKTGKNDAADAIAICEAVQRPHMRFVPVKDESQQAMQCLHRTRQGFIQERTATYNRLRGLISEFGVIAPQSTDALRHVVSDQKETLPVQVRLCIDDLLTHVTNIEEKIAEYDRVLSRVAKTDHRSQQLMELKGVGPTTASALVASIGNAHDFKNGRQLAAWLGLTPSQYSSGENQSLAG

SEQ ID NO: 433900 - protein, 332 aa, unidentified
MYYIGIDLHKQDLVMAMEDERGPVGRPRRIACRDVDAIRAAVQRWRPFRAVVEASASYRWLYDLLTPVGEVVLAHPLRLRAITAARAKTDRLDARLLAQLLRANLIPTAYVPPARYQQLRDLTRSRARLSHGATLAKNQMHALLARANVHPPLKTLFGPRGRRYLAGLDLGLSGNLARDELVRRLEHYGREIATLDAHLEAVASEFPQAEALQVLHGIGRYSALLVVAEIGEPERFRNGRQVGAYAGLTARVHQSGGHEHRGNISKQGSRWLRWILVQAAIKLVRRDERLANFYQRVRKRRGRNVARVAVARKLAGICWVRLRRWQREQATA

SEQ ID NO: 433901 - protein, 327 aa, unidentified
MKEILAPVYVGMDVAKATLQVHLNGHQFEFKNDPQGHAQLSAKLAQLTLPHVVCEATGGYERPMVEACHKAKIPVSVLNPAHTLAATQAQGKRAKTDPCDAAALTDYGQRFHPEPTVAVPPVVREITDLTLWLKQLIDNCAVVKTQAEHHDNSFVGQRHQELLAHYQSQIQTVEKEIKKMVQAQASFQQRVDCLTQIKGVGFRTALLTLVFLPELGSMNRGGTAALAGLAPWTRDSGTMKGKRCIGGGRAQVRPVLYMAALSASRCNPVLAPFYKGLKKREKPSKVALTAVMRKLLIHMNGELKKLAAKPVETKSAKTQKTKKSLAK

SEQ ID NO: 433902 - protein, 373 aa, unidentified
MNYSTVYVGMDVHKENFSLCCYTNEKEKAEYAQKVEGHYSKVLNYLEAMRFHYGNDALFVCGYEAGCLGFTLYRDLTARNVKCVILAPTTMAVPAGKKRIKTDKRDAELIARCLAHHDYSEVHVPTEKDEQIKEFIRMRDDHRLALKKVKQQTLSFCLRHGFQYDGTKNYWTQAHLTWLRTLKLDGVDQETLDEYLLTYDYLTSKLDRIEKRIEELAEAEEYKENVHKLECFLGVKTITALSVIVETGDFKRFASAPQYAAFLGLVPGEDSSGGDQTRLPITKAGNRHLRTPLVEAAQCYGRGQIGFKSKTLAARQTGNPPAVIAYADKANERLRRKYYRMTLKNGKKSNVAKTAVARELACFLWGMMTENYA

SEQ ID NO: 433903 - protein, 360 aa, unidentified
MFTERTSVGLDVHARSVVAAAIDGVTGELVQARLTPSHEHVRSWLGGLQGPVAVAYEAGPTGFGLARFLGAAGVRCEVVAPSKLQRPSGDRVKTDARDAVHLARLLRLDEFTAVAVPTVDQENARDLVRAREDARGDLMRARHRVSKFLLRQGIVYSGGDAWTVTHNVWLRRQRFDSRALQTTFESNYEAVLAVKARRDRLDAAIAEAAANSEFTPLVRRIGCLRGIGDLTALALAVEIGDWHRFAGNTIAAFVGLVPSEHSSGQSRVQGSITKTGNTHARRLLVEAAWHHRPRYRAGKALRARWELAPPAARARGDAGNQRLHARWNAFDARHKRHVIANVAIARELAGWCWSLAVLEE

SEQ ID NO: 433904 - protein, 342 aa, unidentified
MNQVDIIAIDLAKNVFQLHGATRTGDVVFRLKLTRARLVDYVASIPPCTVAMEACAGAHHWGRKFQKLGHEVKLIAPIYVKPFVKRHKNDVADAEAIAEAALRPTMRYVAVKSADKQASGMAFKIRDLLVRQRTQTINALRGHLTEYGVITANGTQNLPRLRSILESGESGLPEPVRELSELMLAHIAHLSDPIQLLDKELRQRARKDDVASRLMTIPGIGPICATAIEALAPETPTFRKGRDFAAWIGLVPLQNSSGGKEKLGRISKMGQRDLRRLLIIGASSVVRWAIARGAADESWLKQMLERKPRQVVIVALANRIARVAWALITNGGTYRIGASAVS

SEQ ID NO: 433905 - protein, 373 aa, unidentified
MLANGLVFKNSMLFTGLDSGDRHSHMVSLDQCGEIVEEARLPTTQASLARKFSGIPACRVAIEVGAHSRWVSALLTRLGHEVLVADARKLRLIYNNPRKHDRADAEYLARLARLDPKLLSPIHHRSPQAQAHLAVIRARDSLVRARTQLVNHARGLVKTTGARLPSCSAASFHTKTASAVPQELLPAISPILATIGSLTQSIQAYDRQIHQLALDHYPETRLLRNVPGVGPVTSLAYILTLEDPQRFRKSRELGACLGLVPRTDQSGGQDPQLHITKTGDSYLRRLLVQSAQYILGPFGHDCDLRRWGLKLAERGGKSAKKRAIVAVARKLAVLLHHLWKNGEVYDPLYRSQSAQRPAELARPSAQEAAIAPA

SEQ ID NO: 433906 - protein, 582 aa, unidentified
MFHTNKKKVEENVKKNKKEGYISPYKPELASPKGKLLARAELELLRSTELYKLLRLKKVPGRSKFTRKAARAAALEGIITHGDLLSLNISHPQEVKVYEPRKAEKKPIKPGKGKRIDEPVGGMDVHKDTLFVAIATPAGIKDEKVFRNKESRIMDLINYFEFHRVEHVALESTAEYWLKVFWKLTEGGMKVLVANPLQTKAAQGVKTDPEDARRIAIAFRDGRLKPSVLCTPEQYSMRKLNRDAIKKVQEGTKAVNRLKAMFEMFDAEEWITKLHTSNRGQRIMSQTLELSDQEKILSVLTEEYSTGPKQIRDRSKLLKRAVELTKFLTNMDISSNYRIRYGQLLEDYVRCERMATQLRSKIIEFAANDEQFKKDLELLLTLPNVGINTALTIRVEIVDIRYFWRSKSLVKWSGLAPRVNQSGHHKRKTGHIYKGGNKWLRRAVWISAKNCYAHYNESDEPIGAFVNRLYNHKHKHYFTAVTAGARKLVSYIYQVLTQQRPFEEVFELEHLEQLEKNRKRKLSVLQRMLNERSVVDVLPIIAGSLKEECYELEECEKHLALEIAIKLGVAPRLYIDEGSIRH

SEQ ID NO: 433907 - protein, 347 aa, unidentified
MKSRQIATYVGADLHKNNTHFIAQDKAGKEIASRKLDNNGVMFREFLSNLPQPVKVIVESTSNWAWFCEEVKAGGHEVMVAHARETSSKSETREKNDPMDARLLATLLRGNLLKKECWQAPPEILRTRERLRYMQFLTRQKVANKNRIHSILTRLNIKSPFKDAFCKGGKRFLRSLDIDAEYKTSLSRSLDLMENIEILLAEDLAFCRKLTIEDPLAGLLTTMPGVSAQLACMIRFETGDIDRFERVEAYVNYTGIVPGKRSSSDHSKDIGVTKEGSFWLRWAFVQAAQTADRQRKGRLSTFFWRQFRKTRNRNKAIVATAREMAVIAYHMMKRKEKYNEPAIFVCK

SEQ ID NO: 433908 - protein, 408 aa, unidentified
MNAVGIDVSKGKSMVAALRPMGEVALLPQEFLHTEVGLEQMAYAIVALGEDTRVIMEATGRYHEPIAAALHEYGIYVCVLNPLFIKQSGGGSIRKVKTDKADAMKIAKYGLDNWVDLREYTPMDTVRQQLKLCSRQYNLYMKTVVSLQNNLISLTDKTFPGVNELFSSPERADGHQKWVDFVMTFWHCDCICRVSEKAFTERYQKWCKRKGYHYSAEKALDIYAGSCGHFTTLPKNDNTKLLITTAAQQLLAGKMTLAALRAEMARLARQLPEYDTVHAMYGVGEITAAQLMAEIGDVRRFPRRSSIVGFAGVDPAVNQSGKHAAQSTPTTKRGSPHLRKTLYQIVCTYLRKAPEDEPVYQFLDKKRAEGKPYFVYMTAAQNKFLRIYYARVKECLEDFDAQQNSAQS

SEQ ID NO: 433909 - protein, 325 aa, unidentified
MDIVGIDISKAKFDVALLIGGRLRHATFSNTEAGFEQLLAWLAKHRPDLAAPLHVCMEATGNWGLDLAAFLHGKQVQVSVVNPARIKAFGESELARNKTDRLDAALIARFCRAHMPSAWTPPAAHLRELRELVRRCDALKAARVQELNRRQAGFASPAVARSIAAHLEWLDQQIATVTAEVRQLVAVDPMLTRNLALVRSITGFGEVSATILLAELPNIAEFTPKALAAFAGLSPQEHSSGASVRKPGKMSRIGSERLRSTLYMCALSAKRTNKALAAFVSRMTAAGKPPKVILIAVARKLLVYAHAVIRTQKPFNPFPDAPLPT

SEQ ID NO: 433910 - protein, 358 aa, unidentified
MRIIGVDLHARQQTIAMLDPETGELVEKTLKHEGETVREFYSALPHPVLVGIEATGSMHWFLELLEELGIERQVGHPAEIRAAEPRKQKHDRRDAALLLKLQVENRFPSIWVPSTELRDLRALLRHRHQWVRMRTRVQNTLQAIALSHGLRRGQSLWSQAGQQVIASLPLAPHAAHRRTELQALNCKLGKQIDELGERVMDQALQRPGAKLLMTHPGVGPITALATDVFLGDPARFDDGKAVASYVGMIPSEYSSGGRQRLGGLSKQGNPLLRFLWCEAGIHAVRRDPELKRFYRRKLQQKGLGKTRVAVARKLGIRLWIMLRDQIDYQEFCRRGQMRQKSGGARAGMPEGVHSPARS

SEQ ID NO: 433911 - protein, 351 aa, unidentified
MIVIGSDPHKRGYTFSAVGVETGELRSSETVEATSAGHARLLGWARAVDVERVWAIEDCRHVSGKLERVLLARGERVVRVPPKLMAGRRRGSRQAGKSDPIDALAVARAALEEGIDTLPLARLEGSAREVKLLLDHREDLVAERTRIQNRLRWLVHDRWATLELPAGCLDRMVWLERLAGRLARSPQDADVRVMRTEIRRLRELVREASALERELLLLVRGLQPRLLKLPGVGPLTAAKLIAEIAGIERFRSEAKLARLAGIAPIPASSGALHRMRLHRGGNRQLNAAFHRIAVTQIRMHPPAQHYIARKIADGKTKREAIRCLKRHLVRTIHNTMIHTTRDTPAPVLALT

SEQ ID NO: 433912 - protein, 343 aa, unidentified
MTQQTLMGIDLAKPVLQVCLVTPTGTLKTNTAVARGKLLALIARPPAALIFMEACGGAHDWARRFGAMGHEGRLLAPPYVPPFRRGQKNDPNDALALTEAGQRPNIPTVPIKTIEQQDLQALHRVRERLVKNRTAVVNQVRGLLLEYGIVIPQGIARLRKRLPRVLEEADHGLSFQMRDLLQSLQSALSALETRITDITGQLARLSHEMEAGQRLQEMEGIGPLSATALVAALGNGHDFQTGRQVAAWLGLVPRQHSSGGTTRLGGITKGSNSSVRRLLIHGARSVISHVRDKPDAKSAWMRQLVTRIGVNKACVAVANKMARVAWALLHTGEHYRKPAVLSI

SEQ ID NO: 433913 - protein, 410 aa, unidentified
MAYKIAGIDIHKAVLMVVVVDVEAMAEPGLRRRFGTSPSDLQELAAWVQEQGVEEAVMESTAQYWKPVWYELEDLMTCHLAQAFSNKAPRGRKMDFRDAERLVRRLVAQELILSFVPGPEQRGWRTMTRMRVQLARDRVRVHNYMEALLEEMRIKISSVLSDLLGASGLRILRALAEGETDGKQLAALGDPRLDCSPERLEDALTGKSTEPQRALLKMHLERLDLIDEQIAKLNQRIAEAMKPYEDAVVRLSEVTGFGVDSAQQFIAEVGPEAATFPSAPELTSWAGTCPGKEESALQNQSSRSPKGNKYVRRILTEVAQAATKTKGSHYQQVFHRLKPRLGYKQALWALVNRICRVTWVILHRKVRFIEQSPERDAKAQKQRAQTWARNLRKMGYQVILKPLNPTPLRA

SEQ ID NO: 433914 - protein, 355 aa, unidentified
MNNFINNFVVGVDVSSKSSVITILMPGGETYGKKLNITNDLKGFTKLLTTLKEIEKQFSKRPEIFMESTGLYHIPLYNYFSKNDYKCYVINPIHTKNFAKQSIRKVENDKVDSLRIAQLAQSPMFSTESVFDGNTFLLKKLCREYDSLVSNSAQYKKKVNSLLNLVFPKFNEVFSDVFSSVPLAILFKYPTYVDFLSASKSDVITLITSTVNHSTEWADKRYNLIFNIAKEAELLKLDLDYLGTEMVCFINLLTSFKSAINKLKEKILEFSANISEFKENVELLCSHPEVGQISAISLLAEIGDIKNFSRAKKLVAFLGVDTSVSQSGAFTSTHNKLTKRGSNLARKILYNLSLA

SEQ ID NO: 433915 - protein, 385 aa, unidentified
MTKQLQYTTFIARDYDIFGGLDVDKKSMAVTFRDHGIMRKSFRLAYSASQLLNYTEKHFPGQRVAFVYEAGPTGFGLHDELTAARHACLVVSPSMVPTVQRKRVKTNRLDSLKLAEGLRGGQLRGIHVPAPGYRELRHLVQLRDTQVGQLRATKCRIKSLLLYEGIPFPAANGKWSAAALRELEALPCNATVRFKLDQLIDALQFHFLAAAKVQKQIRYFCQNDPELGRCISFLVSLPGVGTITATHALARLGDWRQIKDVRQIAGFLGLVSSEHSTGDKENRGEITRIGDSRLRNKLIQCAWTAIRKDPELRAFYRRIYERQPKKVAARKAIVAVARKLTTRIYAVLKEQRPFVIRADSSIAPLTAEETGGPRERLDAAQNEQP

SEQ ID NO: 433916 - protein, 343 aa, unidentified
MRLFIGLDVSLAKTAICVVSEHGKIVKEAQVASEPEELIRWVTEQDGIIAAIGLEAGPLSQWLHRGLAEAGLEVVLMETRQVKGALKAMPIKTDRRDAEGIARLLHLGWFRPVHCKSVSAQEVRAVLGARKAVQQGFIALEMSLRGLLRNFGLKVGAISRGRFEQRIRELAAGNPMLLAATEPLLRARSSLRQELAGLERRVRQLAQDDPVCRRLMSMPGVGAVVALTYRSAVDDPSRFTSSTKVGPWVGLTPSRNQSGERDVSGGITKAGDVNLRRALCQAATVMMHRGRSTWLRTWAAQLARRRGAKRAMVALARRIGVILHRMWVDDTAFRSDLVVPHAA

SEQ ID NO: 433917 - protein, 347 aa, unidentified
MQFYTQQHKHYCGIDLHARMMYLCILDASGAVRLSRNIECTAQAFLSAVKAFRDDLVVAVECMFTWYWLADLCQREGIAFVLGHALYMRAIHGGKAKNDRIDAHKIAALLRGGMIPQAYVYPPTMRATRDLLRRRCHLMRKRAELIAHIQNTISQYNLPPFEGQIRKAHDRAKLLAHFPDPQVRNSVALDLALIDEYDALLPKLERHIRACAKEHDRKAFTLLRSIHGADLIIPLLILYEIHDIRRFPRVQEFMSYCRLVKPTRESAGKIQGHAGGKIGNAHLKWAFSELATTFLRSNPRAKALHERLKKQHGKGKALSVLAARLGRAVYYMLSRGKVFDPDKFFQH

SEQ ID NO: 433918 - protein, 358 aa, unidentified
MTQVKKLDFSGTTIYCGVDVHKKSWRVNIQDSEFELEDFTQNPDAVLLHKHLTKRYPGASYKIGYEAGFSGFSMQRSLSGSGCQCWVVNAADIPASDKDKKQKGDKADARKLCEYLQSKKLKGVHIPDAAWEHARTLVRTRERIVNNQTRSKNRIWQLLHFSGLPVPAEQQEGKYWSKRFIDGLQRLDCGGSMHLQQSLQLHLKDYLQTRGLLLEATRAIRSLCREEKYEGDIRLLRSIPGIGEINAAVLLFELQNVTRFKRFDYLCSYVGLVPDTSDSGETKRTKGITHRHNYFLRTALVESSWSVVRKDPALLMKYKEYCRRMEKNKAIIRIAKHLLSRINFVLKNKKEYVTGVVA

SEQ ID NO: 433919 - protein, 325 aa, unidentified
MKVFYLGVDVSKKKLDLCLRSNGKDILYDVIPNDLSSIKSWLTRTFEKFFLSEDSLVVCAEHTGQYTYPLVCATKSIGVYLCLEDAAKIKYCHGIPRGKNDKIDACRIAMYAERYNDCLQPYTASELIIQKLKNLSTERSMLVADRAKYQSQLKDQVDYMEHSIYIAKCNRVEGIINTFTDYIAQIDLEIKELINQAPVIAHQMDLLMSVDGVGERVALKMIMETDAFTSFTDPRKFCCHAGVVPFVYVSGSSQRSKNRVSNRADKSIKHLLHMAALSVSQVKNSPLKKYYDRKVEEGKNKMSVLNAVRAKLVTIMFAGVRADCF

SEQ ID NO: 433920 - protein, 369 aa, unidentified
MPHVTSIGLDVHARSVAAAAFNPFTGEVVRRSFGTDASEIAEWALGFEDPRACYESGPTGFHMARELRALGLDCAVAAVSKMQRPAADARRKNDRRDAEFIARMLATHNIVEVPLPDMAVEAARDLDRALDDATRELRRSRQRLNMFLIRLGHVWDERNADGARKKAWTRAHWRWVSEIRLEGPQRDALEYYVTAARCAESDRRQLERRVVALAGTDRWRATVEALSCIKGVDTLTAFRLAAEAGSFSRFRSAPAFASWCGPTPSEHSSGESERRGGITKAGNALARTALIESAWHYSTCSPRPKAPAPGTDVPPAIRSRADDCTARLHRRREALAAAGKSACKANAAVARELACWVWEIGCRSEGTVL

SEQ ID NO: 433921 - protein, 340 aa, unidentified
MPLYGAFDLHAKTNHLGIIDGSGKRVLMKKLPNEASVILEALKSMKRRIVGLVVESTYNWYWLVDLLMEAGYKVHLANPSAIQKYSGLKHADDVHDAFWLAEQLRLGVLPVGYIYPKEERPIRDLLRKRGHLVRLRTSLIISLQNIITRNVGMQVDVNEVKRLREDRVTPLLRMNEDLALAGRASKESIDFLTRQIKQIEKVVESRVQLKEPYRYLLTLPGVGKILGLTIMLETGTISRFPGVGDYASYCRKVTSKWTSDGKAKGKGNKKNGNRYLAWAFSEAAECARRYDEQARAYYTRKARKSNFMVAHSALAHKLARAAYYVMRDQVPFMAEKLFAL

SEQ ID NO: 433922 - protein, 324 aa, unidentified
MKSKSSELFIGIDICKARLDVADDANSLPWSVANNDAGIASLVERLHTLHPTLIVMEATGGLETLLYAAVTTAGLPAVVMNPRQVRDFAKALGTLAKTDALDARILARFGAAIQPAVRPMKDDTTQELTALVTRRRQLLAMLTAEKTRLQQAAKWIRKDINAHIASLENRLQTIEGHIATIIKKTPGWKEKDSLLRSVPGVGNVLSMNLLSSLTELGTLNRREIATLVGVAPLNRDSGNFRGNRRVWGGRAQVRAALYMAALSASRFNPVITPFYQRLIEKGKQPKVALTACMRKLLVILNTMVKTQTAWNPNHFSTLDFNHGC

SEQ ID NO: 433923 - protein, 354 aa, unidentified
MLRASSIRRRSAAWTILLDVSVKETSVCIVDDVGKIIWEVKVASEPAELLAVLTNPAYHFKRIGLEAGPLSQWLYSALAESGLPVICVETRHMRAVLKAQINKTDRNDARGIAQMMRVGLYRPVHVKTLRSQKLRMLLTHRKLLQSKAIAIENDLRGTLRNFGLKVGVVGAARFETRIKELVETFTDLMMLIEPLLVVRRTLREQIGVLHRRLLTIVRDDDVCRRLMTVPGVGPVVALTYRATVDVPARFRKSKSVGAVFGLTSAKYQSGEVDRSGKISRCGDEMMRVMLYEAAQSMLRAKKWSWLKAWAMQLARRCGMKKAIVALARRLAVIMHRIWIDGTEFRWTREACAAA

SEQ ID NO: 433924 - protein, 338 aa, unidentified
MAIVTVGIDTAKSVFAVHGVDESGKVQLRQPKVARAKLSALIAELPPCTIGIEACTGAHHWARQFQAYGHTVKLMAPKLVAPYRMSGKRGKNDAADAAAICEAVSRANMRFVPAKTEEQQARLMVHRARQAYVTTRTATINRIRGLLAEFGVVLPLKAEVVRREAAGKLEDLPGYANLVIGDLLSEVHHLDERIGQYDIHIRTMTRQSTPAQQLMRLMGIGEVTATALVATVGNAREFGSSRQFAAWLGLVPGQYSSGGKTRLGGITKAGDAYLRGLLVIGARAVLNAAASKSDSLSRWAMKVAERRGYWKAVVAIAAKNARMAWAVLTKGENFKLPA

SEQ ID NO: 433925 - protein, 411 aa, unidentified
MRLFVGDEWAEDHHDVEVMSETGMVLARRRLPEGVAGIADLHALVGARLGEDADAAEVVVGIETDRGPWVTALIAAGYLVFPVNPLQASRYRERHGVSRAKSDAGDAHMLADMVRTDSHQLRPAAGDSPEAEAVKVLARTHKTPIWERTRAVQRLRHQLREYFPAALEAFEDLDAPETLELPGKAPEPARAARLTRAQVSAALKRARRRNIPDKATAILAALRGEHLGQHEVLTAAYAATVRALIALIATLNEQVKALQGQVGEHFGRHPDAEIYLSQPGMGTILGARVLAEFGDDPHRYADGKARRNYAATSPITRASGKKKVIVARFIHNDRLVDALRAQAFTALGTSPGARAFYDQLRARGIEHNDALRRLASRLVGILHGCLKTRTLYDQATAWGHRENLPHPSVAA

SEQ ID NO: 433926 - protein, 399 aa, unidentified
MISIGIDVSKSKSMVCIMKPGGEVIKAPFEVLHTMESVNSFVKLIHSYDEEVRVVLEDTGHYHLPIVSVLVDNNIFVCCVNALRMKKYCSQSIRKAKTDKIDSTRIASYGITYWSELTPVSTSSDTYRELKLLVRQYYQTTSMLIKAKVNLSNLLDQTMPNIQDVLQDSSSNHKLTDFVSRYTHYANILAMGKGKFTNDYCKWAKKQGYRMNERKAEQIFALSQNGIPVLPNSQSTKIVVTEAVRTLHEIEKSRNTILTQMQALAKTLPEYSVVRDMPCIGDVLAPRIIAEIGDVRRFNDKHALIAYAGIDAPPYQSGNFFGSKRNISKRGNRYLRKTGYEIMKCLIQHKPIQDPVFSFIQKKRHEGKPAKVAMIAGLNKFLRLYFARVNEHLDSLKIT

SEQ ID NO: 433927 - protein, 369 aa, unidentified
MKTKTTPSVVPTSPATVTPGGFTLGLDLGDRSHHVCAMDATGQIVREGSLLNTRPALAKLMAEFPRATIAMEAGTHSPWISRYLTELGATVLVANPRKLHAISRSERKCDRRDAQMLARLARVDPALLHPIQHGSAQAQHDLLGLKLRDALVRTRVNLINAIRFTLKSLGHSVRNPSSESFHKTVLADVPADCLPVIQPLLTVLAQVTEQIKGMERDLVQRSRKDYPATQRLQQIAGVGPLTALCFVLKIGDPQRFSRGRDVGAYLGLCPRRDQSGGTDKQLRISKCGDGLLRRLLVSAAHYILGPFGPPCALREQGQRLAGTGSAREKKRAIIAVARKLAVLLLSLWRHGTDYEPRVTASPVLVMTPA

SEQ ID NO: 433928 - protein, 333 aa, unidentified
MGQYVAIDLHKRRSLVVRTDEDGNRLETVRIVNDPFKLAEVVSAAGEDAEVVLEATCSWYWAVDVLEELGANVHLAHPLGLNWNNRRVKNDERDANDLLDMLRLGRVPEAWIAPNEVRELRELVRYRAKLVMLRGGLKSQVQGVLTKEGVVVGRYKLWGPNGGALLATVPLAPPYRAKVNSLCRLIGHYDEAISQMGEEITSVLAHDKGYLAIQAIKGVGPILGAVFVAEIGDVSRFSGPDRLCSWAGLTPTHRESDTKVVRGGITKQGSRLVRWAAIEAISRGRDTSVDAHYRRVRERRGTNVARVAAARKLLHLVYYGLRDGEIRCLAEAG

SEQ ID NO: 433929 - protein, 380 aa, unidentified
MGKVIEDVEGLTEFGRWLDETRAKGIELWAAIEKPHGRIVEFLLDHGVVVYPVNPKALDRARDRFRMSQSKSDSFDAYVLAEFVRTDHGHLRALEPNSDPAQELKLLTRDQYRLVRQKTRLLNQLSRTLKEYYVRPLEIFSDLETNIALDFLQQYPTPQALAKLTRRQWNRFSKREHHLGEDHCKELWEKLNQPQLEVPEHVVRAKARLLAVLVVQLKTLRDAVDSYNERVKSFFACMPAAELVRMLPGAKTGTIVATLWAELGDAKSRWESFRHLQAEAGVVPVTKASGKSRVVQFRFSCNKIMRHAAYWLAFVSLNRSEWANQYYRDQRAKGHSHHQALRALGAKWLKIIFVMWRDHKPYDENIHLANITRQKMRQAA

SEQ ID NO: 433930 - protein, 352 aa, unidentified
MEHFIGCDAHKKFSVFASINEKGEYGRTIQVRHDLEMFREFLKELPAGSKIALETSGCYYWMVDEMERAGHFPQLAHALTAKRRMEGRHKTNDRDAKGLAMLLRNGTLPVVWIPPAELRDQREMLRWRMYLSQMRTQIKNRIHGVLQRYNIDITVSDLFGDGGRVKLLARKGELPPHSRQSVLEQLQTIDSLETQIGECERILEEILYPSAERDLLDSLPCVGKILSAVLALEIGDVRRFPGPDRLVSYAGVVPTARESANWKRKDKCPRDCNVYLKWAYVEAANLISAHSKHWADRHVVQLFQRVKESTKMHGKAAMAVARHLAEASYWMLKKQEVYREPQTRQVLSSTHG

SEQ ID NO: 433931 - protein, 299 aa, unidentified
MKQYVGLDVSQKETSVCVVDEVGQILFEGKAKSDPGALAALLRKRAPQAERIGFETGAMASWLWHELRRIDFPVVCIDARHAHAALSVRMNKSDQNDARGLAELVRVGWYREVKVKSEESQKIRAILVARSRLVAIRRDIENQVRSLIKEYGLLFPRAIGLQFRNQVRELLGEDHQLFGVIAPLLSIHEQICKQQSKFDNEVRELAKSDETTLRLMTVPGVGVATALTFRHTIDDPSRFRSASTVGAYLGLTPRRNQSGETDINGKISRWGDRLLRTCSRPLPYFFIGQRSGLPSRPGA

SEQ ID NO: 433932 - protein, 338 aa, unidentified
MEYKRISIDTSKHVFTIHGVDEKERPVLRREIRRAQVEPFFAKMAATEVVLEACAGSHHWARLLNSMGHRVKLIPPQYVKPFVKRNKNDRNDAEAISEAASRPMMRMVPVKTADEQAATIIVKHRELMVHQRTQSINALRGHAAEFGIVVAQGCANITALLAVLSEAEAIPGIAKAMFVQMGQHIADLDEKIAALDGRLIELHRTNPISQRLDAIPGVGPITAITMALTINAANFESGRHFASWLGLTPRENSTGGKHRLGKISKAGNERLRQLLVVGSMAVIRYAKPGSKSATEWLLQLLERRPRKVAAVALANKMARVIWAMMARGDAYRRQPVSI

SEQ ID NO: 433933 - protein, 408 aa, unidentified
MQSDFQYFVGIDWGSEKHRVCLMDRDGQTLEERWIEHSGGSLAELADWLRQRTPESAQALAAAIEIPRGAIVETLLEHGFAVFSINPKQLDRFRDRYSPAGAKDDRRDAFVLADSLRTDMHCFRAARLDEPAMIRLRELSRLEDEVGEEQNRATNRLREQFHRFFPQLLQLSECADEPWLWALFESAPSPARAARLSEAKIARLLREYRIRRVTAAEVRAILKARPLRLAPGAAEAAAEHALLLLPRLRLLHRQRTDLARRIEAILEELASAAEGQPEHRDAAILLSLPGLGRKVAATMLSEASQAIAERDYHALRCYSGAAPITRQSGKKKIVLMRRGCNERLRNALYHWSRTSIVWDAASKKRYAALRACGHSHGRALRAMADRWLKVLISMLRNQTLFDVQRRAA

SEQ ID NO: 433934 - protein, 352 aa, unidentified
MERFRVGIDVSAKTLDVAYRNVKGLIERQTFDNETTAHAALVRHLSKRAGGKKVRVVLESTGVYGLDLALALDRAGFEVMVANPRATANFAKATMQRSKTDRLDCAMLLEFAEQMTFKQWQAPSKAQLQVRGISRRVHALMTTIRDEKNRMHAANQVDGTTIVKRSIRDTIKQLEAQVRKLRAAALELIMSEPELAGCYERLLTVKGIGTISAIAILAELAVLPSDMSDRQWVAHAGLDPRQFESGTSIKMPPRISKRGNKYLRSALYLPARVACRFEPGVASFAARLRGSGKKPLQIHVAVMRKLLHAIHAMFRSGQDFDGSRFYLKAAGAVGTSGIASSAISEVSIAHFP

SEQ ID NO: 433935 - protein, 340 aa, unidentified
MSEIKRIAIDTSKAVFTLHGVDDAGRPMLRRNVRRRELLPFFEKLPPVEVVLEACGGSHHWGRALSTIGHRVRLLPAQYVKPFVKRSKNDRNDAEAISVAASQPSISSVPIKSLEQQAAAMLLSVRELLVRQRTQLVNALRGHAAELGMVAPLGEKGLAELPTEIAAADERAVPAAAKQALMLLGQETHRIETRLAAIEVKLMQQHRANPVSRRLSGIPGVGPIGALNFALRIDPAQFRSARHLAAWLGLVPRECSTAGRQRLGGISRAGDERLRQLLVLGATAVIRHAKPGRPATSPWLLSLLGRKPRKLAAVALANKMARIIWAMMTSGQAYRSQPAA

SEQ ID NO: 433936 - protein, 331 aa, unidentified
MKQARLSREQKLGTTPKAMKEVFGAVPRSRIALETGMHSPWVSRLLSQLGHEVIVAHARNVRLIGESRKKDDRIDAQTLARLARIDPQLLSPVKHRSAKAQADLTVIRARAGLVRARTALVNTARGLAKSYGERLRGCNVRNMNAEKAQGLSPELRTALEPLLAGIESLSERIRECNEGIERLARESYPEVAQLKQVKGVGTLIALTFLLTLEDAHRFRQSRDVGCYLGLQPGRRNSGQSEPQMHISKEGDPYLRTLLVQGAHHILGPFGADSDLRRWGLKLAERGGKSGKKRAIIAVARKLAVLLHHLWVSGEVYEPLRHSKPTAMPAAA

SEQ ID NO: 433937 - protein, 346 aa, unidentified
MRYSTTIGVDLAKNIIQVSVVSGGGKELLNRSFTRKKFTEFLGKQKSSLVAFESCATAHYWARKAEQHGHQARIIPAKFVAPFRQGHKTDSNDALAVAEAARRPNIKEAPLKTAEQQGLQAIHRSRELLIQQSTALSNHLRGLLLEFGVVIPQGFASLMKAVPEVLEDGENELPDMYRPTLHRMYTQLQELREDIEAMTKEVELLVNAHPVCSRLTALEGIGPIGALLLYAVMGSGLAFKNAREFAAYLGLVPRQHSSAGKSNIVGLSKKVGNRQLRAVLILGARAYTYRLKEPRSAKDRWLKDLIERNGHSRAAIALANKNVKTAWAMVTRGEAYQRREQLEMAA

SEQ ID NO: 433938 - protein, 309 aa, unidentified
MNRTKKVYCGVDVSKHYLDTFTGGRTVRFENTAKGAKALMKQAGDVHFVFESTGGYERLAAWLLLAAGRTASVVNPGRVREYAKSMGQLAKTDRIDAQIITAYAEAASPRPSELPSAGQRKLSVLVERRQQLIEMQVAESNRLDTAGEPGLRQMIRKHLRWLGKQIDQLDEEIAQTIRDHREMSEKAERIQSIKGLGKVCAATLLAHLPEIGTLSRKEIAALAGLAPYNRDSGTFRGRRHICGGRKRLRACLYMAAVCAIRCNPHMKSFYTRLVIENHRPKKVALTAVMRKLIIAANSAVKNPDFLVVV

SEQ ID NO: 433939 - protein, 394 aa, unidentified
MTDALMNSAPTHTRLSAIFVSLELSRSTWLVTALSPASGEKMSKFSITAGDTAELLSRISILQDRAIQRTGYAYPITTIQEAGLDGFWLHRVLMNEGIESNVVDPASITVSRRRRRAKTDRLDGEILLRTLMAYTRGEPHVCAMVHVPSAEEEDQRRISRERKTLIGERVTHVNRIKGLLYSQGVSGYEPLHRDRRKHLDELKTGDGRDFPVHLKRQISRELDRLELLLEHIKSVEADRNKFLLSQVKQTKEPQLEMLLAIKGIGAEVATILWTEALYRHSDNRRQIASYAGMAPTPWQSGSIDREQGVSKAGNPRLRVTLVQTPWLWLRHQPNSALSKWFRERTQANQGRRKKSTIVALALSNLPAEATLKQLTSTSGWSGKLMPHVQFGPRK

SEQ ID NO: 433940 - protein, 415 aa, unidentified
MSRFNKIVYPICCGMDVHRDFLIACVASTNDVGVTTYESKRFSTFAGSLRDLCAWLAARNCRDVCMESTGKYWFHIHRALEKSCNVVVTHPKFVKAIKGKKTDKKDAQWIADLFKHDFVRGSFIPPEDIRSLRDLCRYWCKLTSCTTGEKNRFHNCLTVSGFKLDAVFTNVFGKSASGIIEHLLAHPGEEFDVAQFVSGRCKTPIEQIQAAVDGEFAPQQADKLRIIRSHMDFLEELKSRLEAAILAIADKYPVHMELLLTVPGIADRLTAARIIGEIGVNMSVFETSKHLTSWAGLTPQNAESAGKKKTTRIGKAGIHIKPLLVQIAIAASRSDKYPELKLKRLILKKRRGGKKATIAIARRLLTAIYHMFARGVEYQPFVAADKPPKPRHLTPEQALKLVAKMGYTITEPEAA

SEQ ID NO: 433941 - protein, 347 aa, unidentified
MLIIGCDFHPGFQQVAIFDNQTGEIQERRLRHREEAEPFYRALAGQEVRVGMEACGHYPWFERLLAELGQELWLGDAGKIRAQAVRQQKTDRRDAAHLLQLLLENRFPRIWVPSLEERDVRQLLVQRHKQVQTRTQVKNQLHALALSQGVQRKRKLWTKAGRAELEQLQLLPYAAQRRKQLLGSLDGLQAEIAELNQRVEAEVAQRPAAVRLQTHPGVGPVTALAMVLTLGPAERFASAKHVGSYLGLIPSEHSSGGRQKLGRISKQGSSFLRFLLVEAGQSAVRQDPQLGRFYRRLAARKNRGVAKVAVARKLATRLYLMLREDWTYAQLCRAMVSASPSHSVVER

SEQ ID NO: 433942 - protein, 342 aa, unidentified
MPQVAIIGVDLAKRVFQLHGAAADGSVLFRRKLTRERFLSFLVSQPPCVVAMEACATAHGWGREIERVGHIVRLIPPIYVKPFVKRQKNDAADAEAIVEAASRPTMRLVAVKSEGQQARAMLFRTRDLLVRQRTQLINALRGHLAEHGVVAAHGPAQVKRLADAIANNDSCLPIAVRELGELLLEQIAALNEKTRDLDKRLRDAAGRDGATKRLQTMPGMGPVIAVAVETFAPPMEVFRRGRDFAAWLGLVPIQRSTGGKPRLGKTSKMGQRDIRRLLITGAMSVVQAAGRSAPPENSWLAHMLGRKPRMLVALALANKMARGIWAMLTKGENYRDPVTTGA

SEQ ID NO: 433943 - protein, 349 aa, unidentified
MNGERVSFANKRVYIGIDVHRAFFVASCVSEGVILKRCCMPAQSEAVISLITKYFPEAEVKTCYEAGYSGFWLHRELEAAGISNIVVHAASIAVAANDRVKTDKRDSLKMAEQLSTGRLKGIRVPSIKEERRRLLTRTREQLMRAKKRVQVQIRMRLHQFGMFPAGIERVIRLADVEELLTGIDGELQLSISCLYDQWKHIAEQIRVLEKKIGTQALSDPLVAIYRSVPGIGPLTAHILSSEFGDMSQFKNERAIFSFTGLTPGEYSSGNNVHRGRISRQGSTRLRHILVEAAWKAIRKDSVLREFFDRIAVKSGKKRAIVAVARKLIGRVRAAVRAQIQYEVGHKKAA

SEQ ID NO: 433944 - protein, 340 aa, unidentified
MNATTYGLDVAKRVFQMYWVDAQTGAIVNRRFGRDELLGFLAQRPAGRVALEACGSGHWWARKIKALGHEVVLLHAKFIRPFVQTNKTDAADARAIWTAVQQPGMRTVAAKTEDQQAMLSLHRMRALLVKFRTMQVNQLRGLLYEFGATFRAGRVAGLTEIRARMAELEDALPGAIIGNLQDQLKRIDTLEQDIDRLEQRIGAWQKQEAACRALAEVPGIGKLTATALVATIGDAKTFRSGREFASFLGLVPRQSGTGGKIRLGSISKRGDPYLRTLLIHGARSVLYHAKVPTTWQKNIQARRPANVAAVALAHKMARTAWAMLAHGQAYQKDYVSVKPA

SEQ ID NO: 433945 - protein, 388 aa, unidentified
MQTVRSFVGMDVHKETISISVAEDGRNGPVRFIGVIPNQPDDIAKMAKRLAKHGELDFCYEAGGCGYNIYRQLTALGHSCTVAATSMIPRKPGERIKTDRRDSQKLAILHRSGDLTKVWVPDATHEALRDLVRARVDASMHLMRARQQLLAFLLRHGRSYPTGKHWTQRHRSWLAGQTFQQEVHRIVFQDYVETVWTAQERRDALIERIGAMTANWSLGPLVEALRGLRGIDLLSAATFICTTGDLSRFESPRMLMGYLGLVPSEHSSGGSVRRGGITKTGNREARRMLIEAAWSYRYPARVAKEKAEILVRLPKSVRDIAWKAQTRLCARYRAMIARGKKPTVVVAALARELAGFIWAIGQQMRVTAVIDIGGRSTVMDLCSGTFAD

SEQ ID NO: 433946 - protein, 351 aa, unidentified
MDYFAGLDVSLETANICIVDADGDILSEKKVEAEPAAIIAALKQFGQAFKRIGLEAGPTSSWLYSELHRSGYPAICLECRHVKAGLSAMRNKTDRNDARGIAQLVRLGWFRQVHVKSEEAQRVRMLLVNRQQLLTKALDLENSVRGSLKVFGLRVGTVTRRTFEGRVLQLVAEDRSLLAITEPMLRVRRALIAEFEQLDRLCRQLARRDPLCHRLMTVPGVGTVVALTYRTGIDAPERFSKSRDVGAHFGLTPRRYSSGQTDYDGHISRCGDAMVRTALYQAANVLLHHGRWSSLRSWAMRIAKRSSVKVAKVALARRLAVVMHRMWVDGTDFRWSAIATAAAPVSTAIAR

SEQ ID NO: 433947 - protein, 388 aa, unidentified
MNKIIYIGMDVHSSNFTLCSYEPGYGFEADKIFGQTQIKEDIFNSTVKYINNLKSMRPDVDVVCGYEAGCLGYNLHRKLKAKEIESVILAPTTMAVARNSSKKKNDYRDAITIAKCLASSAYKAVYVPDEKDEDVRDFIRMRDDHKTALKQIKQQLNAFCLRHGHHYDKSKWTGIHLNWLRKLELSKLQRETVDEYLATYETLTSKIAALDVRIEDIATEERYAEKVNRLKCIKGIKTHTALSFICEIGDFNRFKSADKFAGFIGLVPGECSSGNTERMLGITKAGNRHLRRLVVEISNTYRRGAVGRKSAALKERQQDMPKDVVAYADKATNRCQRKYQRMVLKGKNSNQAVAAVARELCCFIWGMMTGHYSRTAQAEASIYRSELD

SEQ ID NO: 433948 - protein, 376 aa, unidentified
MKNVRFIGLDVHAETIAVAVAEVGGEVRGLGVIPNRPESVRRLIGKLGKPESLRVCYEAGPTGYVLYWQLTELGVHCEVVAPTLVPVKSGDRVKTDRRDAEKLARCYRAGDLTAVWVPDAAHEALRDLVRARLAAKRDQLRARHRLSKFLLRQGRRAPEGMTAWTGKYLAWVKQQRFAHAPQQATLLDYLHEVEHAAERIVRLERSIDEAVQEMPQSQRAVIAGLQCLRGVAKVSAVTLVSELGQLSRFGHARQLMGYAGMVSREHSSGQSVRRGAISKAGNAHLRRIVTEAAWSYRHLPAVGSALKARQAGASESIKAIAWRAQHRLHGRYRALMGRGKTKQKVITALARELLGFIWAIGCEIERTEQQEVRRAA

SEQ ID NO: 433949 - protein, 344 aa, unidentified
MSQDTLLGIDVGSKEVVCALQREGKSVLLASFANDSEGHDKLLRWARKHGGSLRACLEATGVYGLDLAVTLHRASEVQVMVANPRAIKDFARANMVRAKTDQVDAQIILAYLQRMPFKAWQSPSAAILELRAVARRTVQLKAEWTRERNRLHSATYGAGQARSIIRDIEDNLRHLEQRIQALEGAGLKLIQGDERLSADYAHLVTVKGIATSSAIRLLGELLVLPQGLKAPQWVAHAGLDPRPTESGTSIHKPRRVSKTGNAHLRAALYMPALVAIQHEPQVRAFYQKLVAAKKTPLQAVVAVMRKLLHAIWGMLTTARISMEIDSIHRTATLDCEESISRSAS

SEQ ID NO: 433950 - protein, 421 aa, unidentified
MKIVYPICCGIDVHKSFLVATIVSVTKLRTLTYKKERFSTFNKDLFRLKNWLIENNCYDVCMESTGKYWVPVLNVLEPDLRVVIVNPKWVKAIKGNKDDVKDSKWIGELFCFGLVRSSFIPSKDIRILREYTRYRYKLVNMRSSEKNRFQNAFTVCNIALDSVVSDMFGKSASEITNYLLTDENPNAGHCATMLHRSLKKKAVAVVESIEGFQLTEKQKFRMRQVLHHKEYLDLAIELLDTKLESLTKPYTAAIKLLCTIPGLDSDSATTIISEIGTDMSQFDSSKRLCSWAGLTPGNNQSAGKKKSVKITRAGVYIKPMLVQAAHAAVKCTSQPYYKIKYENILRRRGKKRAIIAIARMILTAIYHMFQTGEVFNPSDLRQIDMPEELKTKQKQQEIHKAIKLLKQQGVLAEDFAASTCA

SEQ ID NO: 433951 - protein, 337 aa, unidentified
MDTSKHFFQLHGVNAAEKVVLRKKLRRKEMVAFFKALAPTVIGIEACGASHHWARILRSFGHEVKLIAPQLVKPYVKRGKNDTADAEALCEAMSRPTMRFVPVKTAEQQAALMMVALRDRLIRNRTQLSNAIRGYAAEFGFTAARGMAHIDPLLDRIQADENVPVLARELFAAQAEEYAQLQAQIAEVDAKLMAWHKADECSRRLAKIPGVGPIGAALLMMKTPAPEMFRSGRQFAAWIGLTPKDHSTAGKVRLGVITRAGDEALRSVLVVGATAVVQHVRRGGRGSPWIVDLLKRKPPKLAAVALANKMARIAWKLMVTGNSYAAKSAPATLMGAA

SEQ ID NO: 433952 - protein, 335 aa, unidentified
MDLHKNQFTVCYLGKKGEHQLQVFKVTAKDIEAFKQTVTKSDAVAVESTGNTGYFVRQIQDSVKEVKIINPTQFKIISTSVKKTDEHDALVIAKYLSKGLIPEVRMRSKEESQIASLIGTRDKFVKLRSCLKNKIHNILNANGIVTKREVFGSEKGLERILNIDIEDSYRFELKIIVEQIRSLNKSIDEIDKEITGRGKNLVGHKSLTSITGIGDISATILLNTIGNVSDFADDNKLAAYFGIVPRVAVSNETSQYGKITKMGNKIARTTLVQSTLIAIKYNSYLRKFYFRLKAKKGSGKAIIATARKLLTIIYRTLKNNWVFEDFNQFKLAVSV

SEQ ID NO: 433953 - protein, 412 aa, unidentified
MQVIHARCAGLDVHKKSVSACVLGCEEEGGKRHEVRVFGTMTRDLMALGDWLAAHEVTHVAMEATGVYWRPVWSILEGQFHLLLVNPQHIRAVPGRKTDTKDCEWIADLLQHGLLQGSFVPPRENQDLRDLTRYRAELTQAQNRVANRIQKLLEQANVKLSSVASNALGVSGRQILKALITGQEDPEQLAELARRRLRSKIPELRLALEGKVRDHHRFLLAEYLEEWEAIGRRIERMEAEIERRLTPFEAAVTLWKTIPGVDWVTAANLVAEMGVNMEQFPSASPLASWAGVCPGNHESAGKRKSGKTREGNRWLRRTLCQAAWAVTRKKDCYLSAQFRRLAARRGVKRAVMAVAHALLVIAYTMLKTGRSYQELGGDYLERINKDQLRRYFVKRLQRLGLKVIVQPLPQPA

SEQ ID NO: 433954 - protein, 340 aa, unidentified
MKGTTIGIDIAKNVFEVYVEDEAGQVVERRRLSRKKMVPWFANYPCAVVGMEACGGAHYWGRELAKLGHTVRLIAPQYVKPWVQTNKSDQADARAICRAVQEPGMRFVAIACEAQQAVQAFHRVRSRLKENRTALVNQIRGILLEYGVALPKGVAAVRKALPLLLAEERWAPLIRQFLLEQHAELLEWDTRIVAVTQAITQENARQPVCQRLEQIRGIGPLSASALWLKAGGQTYQNGRHLAAALGLVPKHTGTGGKIRLGGISKRGDRYLRWLLIHGARSVVAHVGNKPDRLSCWLRSLVVRRGINKAVVALANKNARVAFALIHEDQPYDVMKMCHAA

SEQ ID NO: 433955 - protein, 487 aa, unidentified
MSRRAQVADPAAASSPPETVGASHRQAQGKSQSQSQSQSASQSPSQTESAGLLGLDVSQDEVVACLLLPDGREATPRLTLPNNLPGAQALAERLVGMANQHGFRRVRIGLEATSLYWWHLASFLKDSPLLAPFSPEVFLLNPKLVHGLKKAYSDQGKTDHLDAWFIAERLRIGRLPAPFELDLVYAPLQRLTRFRSHLAQTLAREKNYFLTFLFLKFSAFSQAEPFADSFGVTSSALLDEYTTEELIQTPLEELASFLNAKGRGHFAEPTKLAKDLKRAATNSYQLDRALQEPVSLILATTMANIRTLKWQILEVDKTIAQELQALSLERRIIDSIPGLGPVYTAGLVSEIGSIHRFENEAALARFAGLVWHPHQSGEFTAEDTSLAKSGNAYLRYYLVEAANNARLHCPEYRDYYQAKFAQSTKHAHKRALVLTARKLVRLIDALLRAGMAYRPPERRQDQKAGLTPPQSRRPGAPKRARLPGLGR

SEQ ID NO: 433956 - protein, 366 aa, unidentified
MRKNSIVVKNGNKIFKQPALTIGLDLGDRSSCYCILDELGKVILERSVPTTANGIRQAFGKIPRSRIALETGTHSPWVSRQLTQLGHEGIVAHARNVRLIGESSRKDDRLDAWTLARLARIDPGLLGPVRHRSAKAQIQLTVVRARAALVSTRTALVNAARGLVKSYGERLKKCGTEQMDRNSSEGLSQELREALDPLLREIESLNERIAEYDHRIEQIAKQVHPEVARLKQVKGVGTLIALTYVLTLDDPHRFRHSRDVGCYLGLRPGRRNSGQSEPQLHISKEGDRYLRTLMVQGAHYILGPFGQDSDLRRWGLKLAERGGKNAKKRAVVAVARKLSVLLHKLWVSGEVYEPLRNNRKVIRAVA

SEQ ID NO: 433957 - protein, 392 aa, unidentified
MTEPYLIKWLSKYPKDGGWMYAACKANLKKEMKNMNHLGIDVGKRKCSRAALKDDKGMMLDEFFFGNDMSGIHNMLSRIQSHGKGATIGAVLESTGNMWIRIHDTLEENGIDTKLANPYKTRIIAEAKIKSDKLDARILSDLLRTDLIYESYVPNSEDRDKRSLVRHRITLSRTKTKLANKVHSILDKYDYQTDLTDIFSKSGIEWLKSLSSIVTPVDRIILNTSIESIEAINQQVDTVSKEISKYARDNKDVKILLSITGIDIFSAMLISAEIVDVRRFSTPWKLVSYASLAPSIRESSGKIKTGKITKQGSSPCLRWILVQCALTAIRFDAPLRIFYDRIRNRRGHATAIVATTAKELLVIIWYMLTRNELYRYMNKQRYEQNLHKLEHR

SEQ ID NO: 433958 - protein, 345 aa, unidentified
MKITTTGIDLAKNVFQIHGVDEGSKPAVKKQLKRDQMVEFFVNLPPCLIGMEACGSAHHWARKLASFGHTVKLMAPQFVKPYVKTNKNDAADAQAICEAVARPNMRFVPVKDIEQQSVLALHRVRQGFVKSRTAQANQIRGLLGEFGLIIPQGIAHIAKRVPELIEDASIELTGMFRLLIDRLMGHLKELDKHVDELDAKIKEWHRASDASRKLEKIPGIGPVTASALIASIGDAKNFDNGRQLAAWLGLVPKQHSSGGKNVLLGISKRGDTYLRTLLIHGARAVISAAQRKKDKVEGWMSRLLERRNKNVAAVALANKNARIVWALLARDREFRSDYTSAVAAA

SEQ ID NO: 433959 - protein, 337 aa, unidentified
MVYGAIDLHMRYSQIRIIDAAGAVLRDQRVPTTRERLTAAFAGFGAMRILLETGTESEWVAQAVAAAGHEVVVADPNFAPMYGERRRKVKTDRRDVAALAEANRRGWFRATHRVSAAQRAVRQVLRTRRLLVQQRSSTIALLRAVLRQEGYRLGGGSTERVGARLAALDLPAALTATLAPLCRMLTMMTTEIAALNTQTQALATADPVTRRLQTTPGVGPVVALTFRAVVDDVARFGHAGQGSAALGLVPREDSSAERRQRGHITKAGPRELRSLLVQAAWSCWRSGHSGALRAWTDQLAARRGKRIAVVALARRLSRILYALWRDGATFEARTSAA

SEQ ID NO: 433960 - protein, 406 aa, unidentified
MKPCSAGLDWASRNHALCIIDSSGTVVEQFEIAHDAAGLRELLTRLRRHAPTPAQLPIAIERPSGLLVDALVEAGYPVVPIHPNIVKATRPRYRSHGAKSDASDAYLLADLLRTDGARFNALQPQSDAVRALRALVRGRDDLVTTRVQLANQLRSLLESFWPGAAGIFAEIDSPIALAFVQRYPTLASAARCGEKRLATFLAQHRYCGRRSPAVLLDRLRAAPDGHANELETDAKRTLVQALAATLTALVEQITQITARIEHTVAESPDGQLIMSLPRAGQVCAAQILAELGDVRDRFPSDAQLAAEAGVAPLTYQSGKSRSVTFRWACNHRLRRAITCFADNSRHASHWAARMYTAARARGCDHPHAIRILARAWIRVLWRIWTDRCSYDPARHRAALRLSAPGG

SEQ ID NO: 433961 - protein, 402 aa, unidentified
MNAVGIDVSKGKSMVAIMRPFGEIVSAPFEIKHTASGINSLVELINSVEGESRIVMEHTGRYYEVLAHQLSEANLFVSAINPKLIKDFDNDSLRKVKSDKADAVKIARYALDKWQNLKQYNVMDELRNQLKTMNRQFGFYIKHKTAMKNNLIGILDQTYPGVNTYFDSPARSDSSQKWGDFASTYWHVDCVCKMSKNAFINHYQNWCKRKKYNFSQSKAEEIYGKAKELVPVLPKDDITKLIIKQAVDQLNSVSTTVESLRTLMNETASKLPEYPVVMAMKGVGTSLGPQLMAEIGDVSRFTHKGAITAFAGVDPGVNESGSYEQKSVPTSKRGSSILRKTLFQVMDVLIKTHPQDDPVYQFIDKKRAQGKPYYVYMTAGANKFLRIYYGRVKEYLSSLPES

SEQ ID NO: 433962 - protein, 352 aa, unidentified
MLIIGCDFHPGFQQVAIFDNQTGEYQEKRLSHREEAEQFYRALRGQSVRVGMEACGHYPWFERLLAELRFELWLGDAGKIRAMVVRKQKTDRRDAEQLQVLLREERFPRIWVPTLEERDARQLLVDRHKQVQARTRTKNQLHALALSQGVQRKRKLWTECGRAELEKLELLPYAASRRQRLLETLDRLEAEIAALNRQVEEEVKQRPQAMRLMTHPGVGPVTALAMVLTLGPAQRFASARKVGSYFGLIPSERSSGGRQQLGHISQQGSSFLRFLLVEAGQSAARYDAELGRFYRRLAMRKHRALAKVAVARKLATRLYLMLREDWNYAQLCRAVVQVSPSHSVDGRQKPAA

SEQ ID NO: 433963 - protein, 317 aa, unidentified
MTRTICGVDIASQSLEARIGQQGAAGSFANNPEGIAALGAFCHEHQVELVAMEATGGYEQQAFAQLTEQGLPMAILNPRAVRQFAQSMGSLEKTDRIDAGMIAWYAEVKKSRPTCLAPQSQQHLRALVTRLRQLTEMRAVQLNQQRLVTDRAVQASFKKLLAVLARQIRELEQRIAALLEKDPLWRQLNEAFRTIKGVADRTVARLMAEMPEIGTLSNKTISKLAGVAPLANDSGKHQGKRAVRGGRAPVREILFIVASVVGRYEPDFIAFQRRLRAAGKPPKVVRIALAHKLLVRLNAKAREVRQRMANLQPEAAV

SEQ ID NO: 433964 - protein, 341 aa, unidentified
MYYIGLDVHKKTISYCVKDVSGHVQQRGTMAATRTELDSWMKTLPQPWTVALEASIFTGWVYDHLLPHAAQVKVAHPLMLRAIAAAKKKNDRIDASKIADCLRCDFLPECHMACTSIRDRRRTLRYRHLLVRQMVQMKNRVSGLLLETGVSHNKARLHQVKYFQELLTDKEVTESIRPLLRLSHETIRRLDNTETTLIRSLERDPVLAERIKNLKTIPGIGVITALTWALEMDDVSRFRSVKQAISYCGLCGDERISADKVLRTPISKQRNKHIQSVLVEAAKFAPQQSHELALVYEKEKQKGNSNRATLAVARKLVAYLLAVDRSHRPFIPAEKFSSAVA

SEQ ID NO: 433965 - protein, 389 aa, unidentified
METRTVNSLPPAASHDGAVRCLLAIELSKKSWIVAVNTPLSDKVGRHTLRACDWKGLFELIARIRTRVVEALNRPVEVISCYEAGYDGFWLHRVLEAHGVRNYVIDPASVQVDRRARRVKTDNIDLARLLRSLMAYLRGEPKVWSVVRVPSVAEEDDRRLHRERDRLINERVQHVNRIKGLCAVHGIYDYEPLRPNRLARLEQLRAADGCELPPRFKAEIVRELQRLELVLNMIKTIEAERDAIASAGKSSTHANAKKIQDLIRLKSVGPEIGTTLVGEVFYRQFNNRQQLGSYVGLTPSHFQSGPMSRDQGISKAGNPKARTTMIELAWLWLRHQPNSPLSIWFRERVGTGKGRVRRIAIVAVARKLLISLWRYLETGVAPTGAVLKG

SEQ ID NO: 433966 - protein, 411 aa, unidentified
MGRHTLSCRNASQGGKAMPELFVGIDVAKDTSSAQGIDRNGKGRFSLTFAMDSEGFMQLWKAITAHRKDLLEVSAAVESTACYHINLYTFLTAKGISTVVINPLLIANFAKLSLRKTKTDKKDAMSIAQFLLVHRETISQLSLSQDLQDFRDIARERESVGNLLSAHKVEIKRLLQSTFPELERIGDLSTRVMQEFIAAFPSARLLKAAKPKAIQKILQRKGVGTRLTYTAEDLIQAAKQSVATISPAKELILQGKVRTHEHLRERYEELTKILTEYCKSSMLEDFEIITSIDGISKCTATTFLAEIGCIGNYASYKKLIAFAGIDPTVYQSGKFEGSSRISKRGNRHLRRVIWLMTTCVLQHNATFRAYFMKKRSEGQPFKKAVFATAHKLVRVIFAMLTQRTMFREVCA

SEQ ID NO: 433967 - protein, 391 aa, unidentified
MMTKRKTETVNDLSRCLDPLDMDATLIAVIEMSQSSWLVGGTVPGVERQPLKKIAIDEHALLKLLSRWQEEAEKKGHKITRVTVAFEAGHDGFWLARWLRARGIEVHVIHASSVAVTREHRRAKTDRLDTELLKRCFLGWLRGERGHCKMVVVPTLAEEDAKRPSRERETLVGEASRIITRLKAAFVRLGIRSFNPKLKAATERLGTLRTPQGEPIPPNTLAALKRDLERHHIIKRQIREIEQTRLDHLAQAPAKGPHPMVLLLARVVGIGVETADMLVHEVLSRNMRDRRAVARYAGLTGSPDESGAKRREKGLARSGNARVRRGMIQLAWRFLWLQKHSALAEWYRQRTQAAPGTRKTLIVALARKLLIALWRLAHDGIVPEGVQMRPA

SEQ ID NO: 433968 - protein, 344 aa, unidentified
MEHFAAIDVSLELSSVCVVDGTGKIVREVKVASEPEVLVRFFRESGLTYTRIGLEAGPMSQWLHAGLAAAGFEVVLLETRHVKAALGAMTMKTDRNDARGIAQMIRMGWFRPVHAKTVPAQEIRALLVARKQLQARLNDIELCLRGILRGFGLKLGEVGKGRFEARVRELVVGQATLEGLAEPMLRARAALRGEYAALHREVLRLVRADADCRRMMTVPGVGAIVAMTFKAAVDDPGRFKRSRDVGAHFGLTPKRYQSGEVDRSGHISKTGDAQVRTVLFEAAHVMLLRVQRFSALKAWALRVARTRGLKRAKVALARKLAVVLHRLWADGTEFRWSREAQASV

SEQ ID NO: 433969 - protein, 351 aa, unidentified
MTDPDHSVTVGVDTHLDTHVAAAFNHLGQPLGHLEIPTTPAGYRRLLGWAQSLGSAVTFGIEGTGSFGAGLARYLRAAGCTVIEVSRPNRQTRRSRGKSDPLDAVAAARAVLAGEAAGLAKSDEDRVGMIRSLRIARRSAVKMRTQIANQMDALVLTASTDLRERLRHLSHDALVTLAAGFRPGAVTTPAAATKLALRGLAERHRLLAAELDQLDVELRRLTVEAAPALLAIHGVGPDVAGALLLAAGDNPHRLRSEAAFASLCGVAPLPASSGKTHRHRLNRGGDRQANNALWRIVFVRLAHDPRTRTHVERRTAEGLSRRDIVRCLKRYVAREVFLALRPLTAPTPVAS

SEQ ID NO: 433970 - protein, 385 aa, unidentified
MANQNDLSRSLVAFEQDNTIIAVIEMSLNSWLVAGIVPGIERHPLKKLSCDEQMLLQLLYRWRDEAVKAGRMITRMVVAFEAGRDGFWLARWLRTRGIEAYVIHPTSVAVSREHRRAKTDRLDTELLKRAFLGWLRGEPDHCSMAAIPSLQEEDAKRPTRERENLVGERTRIINRMKACLVRFGIRNFNPTLRRATERLNALCTPEGVSLPPNTLAELRRDMARLRFVMNQINEIEAARLQRLEQAPAEEPHAKVRLLARVIGVGLETADMLVHEVLSRKLRDRRAVARYAGLTGAPDESGSKRREKGLAKAGNARVRRGMIQLAWRFLLFQKNSALSQWYRTRAESAGKKRKTMIVALARKLLIALWRLVTTGEVPAGVVLRAG

SEQ ID NO: 433971 - protein, 390 aa, unidentified
MTQVDDLSRCLATLDENSTLVAVVEMSQSSWLTAGLVPGVDRRPLKKLAPDAPTLLHLLERWREEAKTAGRMITRIVLAYEAGRDGFWLARWLRARGIEAYVIHSTSVAVSREHKRAKTDRLDAAMLLRVFLGWLRGERDHCGMVAIPTIEQEDAKRPSRERESLVGERTRIINRMKSALARLGIRGFKPELRKAPERLEALGTPEGDSIPPNTLDELRRDLARIAVVRGQIEAIEQNRLARMEQMPAQGPHAMVRLLARVVGIGVETADMLVQEILSRNLRDRRAVARYAGLTGSPDESGSKRREKGLCKAGNARVRRGMIQLAWRFLIFQKESELAQWYREQAVATKGAGKDKRKKMIVALARKLLIALWRMATTGEIPEGVMLRPAA

SEQ ID NO: 433972 - protein, 271 aa, unidentified
MTRFVGLDVSQKLTAICIVDETGRRLWRGQCATDPGQIERLVRGHTGEDASIGVETGPMTPWLVHELRARELNVICLDARHASAALKMQMNKTDQNDAEGLAQIMRTGWYRPVHVKSLDAHRARALLGARAQLVGMTTRLSNHIRGVLKTFGMLPGAMRGLPFDRRVEELLVDRDDLTPIVGPMLAAWRQLREQIAAFDKAVRALAKADPTCRLLMSVPGIGVLSVLAYVSTIEDPARFARSRSVGAHMGLTPRQYQSGEVDRSGKDIQVR

SEQ ID NO: 433973 - protein, 369 aa, unidentified
MAVAKTIKKERSSKTMRDGVAAVGLDLSDRKARFHVIDDEGETVETGTVVLEGPHLQRWASNIAPTVMAIEAGTHSPWVSRLLTACGHEVIVANPVKVALITRNIRKSDAVDAEYLARLVRFDRKLLHPIEHRGEQAQLDLQVIRTREIMVQSRTKLIGHVRGAVKSFGARLPKCATEAFVIKTRKVIPEQLRTALDPVYVQIEHLSATIAGYDRHIETTARERYPEVERVAQIKGVGTLTGLTFVLLLEDATRFRRSRSVGAFLGLTSKREQSGEEDPQRRITKAGDRLMRRLLLQSAHYILGAFGEDCDLRRHGMRIAERGGKRAKKRAAVAVARKLSVLMHRLWISGETYDPLRNGGKLAELPSAA

SEQ ID NO: 433974 - protein, 348 aa, unidentified
MITIGIDPHSRNHAAAALDDRGRILGELAVGSTVRELDRLARWIAGIGTERIVAIEGARGFGLALCRRLQGAGETIIDVAPALTVAERRSARRPGKDDRGDAVAVARVAMREHTLPRVSSEESGSDLKLLVDARDQLVAEATRTRNRLHALLLAIAPGYHEHVRDLTSSTALMVARRLASRARTTDRVRSTLACSAIARLRSLSAETGALEREITPSLDRAAPANLLGICGVGPLVAAKILGEVRDVRRFSSPAAFASYSGTAPIPASSGTVIRHRLHRGGNRQLNRALHTVALTQARRDDRARAFLARKRAEGKTPREARRALKRHLAVAVYRALVLDAEELSPKNP

SEQ ID NO: 433975 - protein, 330 aa, unidentified
MKKMEFVGIDISKEKLDVRLHLANQQEIFENKSSGFKKMNGWMTKHVGGETTFFICFEHTGMYAVGLQVYLEEMKLDYIQISGLEVKRSLGIQRGKNDCIDAKRLAEYAYLHRDKLRPQKLHSTDLIRLKYLLSLRSRLVRQRGGYTASVNEYKRFLSLANTDGMIRSQKEMIKALDVQIVVLEKEIRALIASDKKIQEQFTLATSVKGIGLISAAYMIVLTNCFTEFKTWRKFACYTGSAPFEHQSGKSIKGMTKISHYANKQMKTILTNAVKSAIQFCPELKLYYQKRIKEGKHKKVVVNIIRNKLISRVFATVRRGTPYVELVRYVA

SEQ ID NO: 433976 - protein, 353 aa, unidentified
MLADQADHVLGVDTHRDSHSAAVLAADTAVVQGQITVSADERGYRRLLGFARKRAPGRRAWAVEGTGSYGAGLTAFLRAEDELVIEVDRPRRPARRNGAKSDELDAIRAAREALTREHLSQPRMRGEREALRVLLATRDSAVRSKRAAISLLKGLLVSAPSSLREGLRGLSTKDQLARCARLRNNPTHSSEQRATIIALRASAKRVLALEEEASELQREIEPIIQRVAPQLLEEMGIGPITAAQILNAYSHAGRIRSEAAFAALAGTAPLPASSGQTIRHRLNRGGDRQLNRALHTIVLCRMRDEPRTRAYAARRQAEGRSTREIKRCLKRYTARHLYRLLQAAPPIPATSET

SEQ ID NO: 433977 - protein, 345 aa, unidentified
MQYDAGIDVSLEQSSVCVVDAAGKIVKEAKVATDPHVLVTFFKGLGFPVTRIGLEAGPLSQWLYAGLTQAGFDVVLLETRHVKAALSAMVVKTDRKDARGIAQLIRMGWFRAVHAKSASSQEIRALLTARRLLLDKLRDVELSVRGILRGFGLKLGKVTQRGFETRVHELVANHPMLQQITRSMLLARATLQREHNTLHKALLKIVRRDKVCQQFMTVPSVGPIVAITYKTAVDDPHRIKKSKGAGPLFGLTPTRYQSGETDVIGGITRIGDAMVRAMLYEAANVLLSRTMRFSALKRWGLAVAKRRGMKRAKVAVARKIAVILHRMWIDGTSFRWSNQKAAAYA

SEQ ID NO: 433978 - protein, 402 aa, unidentified
MEKYAGIDIAKRTHWMCVTDGEGRFLMEPRPYDNDAEGLFRMVADLDLYGGDIAVGMESTGCYWRSCYKVLAEGGYPVSVINPVVTCAERKSGNLGRAKTDRVDCLVVADALRKQGIPPTPSPDADAAQLRDLCRFRRAVSESMSRAKIQAVALLDQVWPEYGKLFSDKFGDSSRAVLRRLASGDMDSDALADDLRGASRNRFGAAKASAVLDSLRSTCGVPATDALRLQLRLLLDQLDFCAAQLAEIDAEADSLLDAVAPTLPTVPGIGRATAAQIAAEVGDVTRFRDAKALVAYAGLDPTRRQSGGFDPDRNRISKRGSAHLRRSLYIAAQASLRADCEFRDFYDRLRARGCSHRYAVCAVARKMLCVCWALMRSGEEYSRDRHRAKGKAPEGASPVDAG

SEQ ID NO: 433979 - protein, 358 aa, unidentified
MAGKVTETAVVGGVDTHKDLHVAAVVDENNKVLGTRYFSTTRQGYRQMLAWMVSCGTLKRIGVECTGTYGSGLLRYLQNAGLEVLEVTAPDRMERRKRGKSDTIDAESAAHAAFSGIRTVTPKTRDGMIESLRVLKTCRKTAISARRVALQIIHSNIISAPDELREQLRNMTRMQLIRTLGSWRPDASEYRNVTNVYRIALKSLARRYLELHDEIADLDVMIAAIVDELAPELIKRNAVGYESASQLLITAGDNPQRLRTESGFAALCGVSPVPVSSGKTNRYRLNRGGDRAANSALHIIAIGRLRTDDKTKEYVARRVAEGHTKMEAIRCLKRYISREVYTLLRNQNRHVNSIPITS

SEQ ID NO: 433980 - protein, 331 aa, unidentified
MEKAEGVVAFVGIDAHSEHCSVKAVGRQGESLLCAEVATAARSLRAALEQLPRPVWVMVEASGLAPLLKEWLEPVVERVVVCETRENRWIAQSEDKSDPADADRLARRLRMGEFREVHVPERAGQERRELVRAYQKSVGDVTRQKNRLKAKYREHGVAVKGARVYTVRHRASYLREVKRPVIRALLEVMYEQLDGAEAAQVKIWGQLFARLRSLPAYRLLKTIPGVGSRISAMLAAGIDDPGRFAGPQRKRKLWKYSGLGVRKQWSSHPEQARVSGSPSGNRMMKYAALTAANNALKGKNRFSRHQAAMVAQGIDPAMAQRTVARQILAFD

SEQ ID NO: 433981 - protein, 430 aa, unidentified
MNPPCEQTAQDWLAHRAFGGLDWASQKHNVIVVDSRGKIVEEFEIAQSALGWKKFRERLAPYGAIPIAIETSQGSAVEQLLEAGMEVYPINSKSAKSYRERKAPSGVKDDRLDAWSFADACRIDGQGWRALRPEDPLVKELRLLCRDEVGLIQQRTSFICQLRHALGEYYSIALEAFEDWGSMSAWMFIQRFPTPQLLQEAGKRQWEKFLHARHLWRTESGPRRMELFAQATELCGTVPMANAKSQLALSLISMLFALEKQLGIYRQRIEELFSRHPDHDLFGSLPGAGPKLAPRLLSEIGDDRGRFEDGPQALQCLAGSAPVTRRTGKGKVRANPDHWPCHQRWACDRYLRHAMHLFAEQTLGQCVWAQIYYQHHRQKGSSHADALRRLAQRWLKIIYRMWIDRKPYDAILHHHNQLKHGSWVLELNPS

SEQ ID NO: 433982 - protein, 373 aa, unidentified
MSEFNKFVGLDVHKSTIAISIASDDGAEVRYFGEIKNTKEALINFANKISQGSLKLSFCYEAGGCGYEVYRHLRNIGHDCMVVAPSLIPKKAGQRVKTDRRDSLNLARLHRAGELTGVWVPDAMNEALRDLTRAREDMKHLQRQAKQRLLAFLLRHGWTYSGKSNWTKDHFNWLETVKFQHAAQQIVFQEYVDTVKYCGKRVESVTQQIEICSRESAYWPVIESLMALKGIDLISAATIMAEIGDLTRFDSAPQLMSYLGLVPSEHSSGSSVRRGGITKTGNSHVRRVLVEAAWTYRFPARKTAHTQKRAKLTSDAVQEISWNAQKRLCQRYKELNANGKIKVQTCTAIARELAGFVWAIGQTVPLKQSANAQ

SEQ ID NO: 433983 - protein, 448 aa, unidentified
MKILALDLGKFNTMCCFFDSKTRKHSFLNAATDRQFLATLFKKHKVDLVVMEACGPSGWIYDLAQNAGHKTVVCSTNEDAWKWSNVKRKTDKDDAFKLARMASMDELKPVHMPSESHREFRSLVKYRKTLDQRINKMKCTIRAWFVNHGITIDTGEKAWCTGRTHINSFRKPLIDCEPNELWKGELDIELTQLDALTEQLNVVVKKLEAIGKQDARIQRIQTIPGVGPRTAEILVACLDDPHRFQNGRQVSAYFGLVPRQFQSGETDRNGRITKRGNPLARTILVECAWASLRYNSWAKTVYERICGKQKTRKKKAAIALARKLAVLAWAMLRDQTDWKPSHMLQVTKSFGKTTKAIQSVLDEMKPKENSDQRKKRKRREAREAKQANAPMERAKSTTDVKETTGKRTVKENRGRTQFEKRAGSKNSTQRKSVTPHKPRRAREPAAAV

SEQ ID NO: 433984 - protein, 430 aa, unidentified
MKSNTQNAKIKAITETTLVLGIDVGSETHYARAFDYRGIEYSKKPFKFSNDEAGFVTFKAWILDIKEKHGKDKVVPGMEPTGHYWFNLGKFLQDNEMKPVLVNPHHVKKSKELDDNNPTKNDRKDPKVIAGLVREGRYMIPYLPDGVYADLRTASNMRFQLQAELTRIQNRISRWFNIYFPEYKTVYGQPDAKSGMLILKVAPLPEDIMTLGIDGVNQIWRDAKVRAVGKARAKTLIEAAEHSIGSKEGEISARMEIRMLLEDYESRNTRLQEVVALIEELVKKIPMAEKLLEIKGVGIKTVSGFLAEVGDISRFNNPKELQKLAGLALVENSSGKHKGETTISRRGRKRLRYLLFEVAMSLVSKNPEFRELHSYYTTRKLKPLKKMQSLMAVAAKLLRVFFAMLTKGVDYDPKKLVGDIKRPAVYLQVT

SEQ ID NO: 433985 - protein, 412 aa, unidentified
MEVLYPHCAGLDVHKDTVVACVRHMVNGSVRREVRSFKTTTKELLALSDWLAGEGCTHVAMEATGVYWKPVWHVLSDGDFTLVLANAAHVKNVPGRKTDVNDATWLADLLAHGLIRSSFVPDGQTQEMRTLLRTRKQLVRECSRHVQRLQKTLEDANIKLDSVISDIMGLSGRAMIEALIAGESDPERLAQLAHRRIKAPPEALCEALRGRVTRHHRFLLRLHLKQIDAVNVAIDDIDQEVDAQIEPFRTAIQLLITIPGVSELSACVILAEIGHDMNRFPTAAHLISWAGLCPKNDESAGKRRSTRMRKGAPWLKTTLVQCARAAARKKASYFQAQYHRLRARRGDKKAIGAVAASILTTAYHMLKYGTLYDDLGPDYFDKRGKGKHVHRLINRLHNLGFAVQITPVEAAA

SEQ ID NO: 433986 - protein, 336 aa, unidentified
MDTVIERCAGLDVHKDTVMACVRVPAPGGDRRQVVQRFGTTTTDLLALRDWLVSHGVTVVGMESTGVYWKPVYYVLEDACECWLLNARHLRNVPGRKTDVADAVWIGQLVEHGLVRPSFVPPKPIRALRNLTRYRKAQIEERTREAQRLDKVLQDAGIKLSSVASDILGVSGRAMLHALVEGSDDPQTLAELARGALRKKLPALRAALTGRFGAHHALLIGAILAKLEFLEGVITELSAEIDRVLAPFARAVELLRTIPGVDHRTAEAMVAEIGVDMARFGAAPRLASWAGLCPGNNESAGKQRRGTTRTGSKWLRTSLTEAAKAAGRTKNTYLAA

SEQ ID NO: 433987 - protein, 341 aa, unidentified
MKQYVGLDVSQKETSVCVVDENGRLIFEGRAKSDPGALAALLAKKAPDAERVGFETGAISSWLWHELKRIGVPVVCIDARHAHAVLWVRMNKSDENDARGLAELVRIGWYREVAVKSEASQQVRSLLVARSRLVTMRRDLENQVRSMLKECGLLFSRAIAGQFQRCVTELTGDGHALWPVLLPLLSVHGHVCRELAGLDRQVRLMARSDDTTKRLMTVPGIGVVTALTFRHTIDDPTRFRNATCVGAYLGLTPRRKQSGETDTVGQVSRWGDRLLRTYLFEAASVLLHRTKRWCALKAWGLRLAKRNGMKKAKVAVARKLAVILHCIWIDGTSFQWSKEPA

SEQ ID NO: 433988 - protein, 343 aa, unidentified
MLIIGCDYHPSVQQIAVLDQETGEYQELRLSHKNGEAERFYRKLAGRQVRVGVEATGGLRWFERLLGELGFELWVADPVEVRAKAGRKPKTDKEDARLLLRLLEENRFPRIWVPSLEQRDARQLVLHRHRLVQTRTRAKNQLQSLATDEGILKRVWTQAGQTELKKVALSPWGQVRRQDWLELLEELNQRIEPLDQALKQQAEQRWEVQLLMTHPGVGPVVGTAYVTTLCDPKRFARSKQVGAYLGLVPQENSSGQGRQRLGHITKQGNCLLRGLLVEAAHVAVRYEPEWKRKYMRLAMQKNRSIAAVAIARCLAVRLWWMWKLGLTYEQFKKQKQESRSHAE

SEQ ID NO: 433989 - protein, 345 aa, unidentified
MTEAYDGRQVVGMDLHRRRSVLVRMTGDGRKLETVRIENSPAALRAVIARAGNNPRVVVEATYGWYWAVDVLEAAGAEVHLAHPLGVKAFSYRRVKNDERDCADLAGLLRLGRLPEAWIAPEPVRALREITRYRHKLVGQRTSCKDQVHAVLAKAGIPVTRSDIFGRGGGIWLDGLPLPQPYAGKIASLRALIAVLDGEIARLEEQAAGMLAGDRGYAAIRQLPGIGPVLGAVIAAEIGDITRFRTPGQLCSWAGLTPRHYESDTRVIRGRVSEQGSRMLRWAVVEATQRAPAGTRPRQVKDAIIARRGPDVRGIAKTAAARIMLTQVFYGMRDGHIRRATSQAA

SEQ ID NO: 433990 - protein, 398 aa, unidentified
MEVMDAAGRRLSAAKLPEGIAGMARFHAMIAAQLDPDADLDAPAGQVLIGIETDRGPWVQALIAAGYRVYAVNPLQAARYRERLGVSGAKSDPADAHLLADMVRTDSHQLRVVAGDSDLAEAVKVVTRAHKTLIWERTRHTLRLRSTLREYFPAALAAFEDLTDADTLELLAKAPDPASAARLTTTQIMAALKRARRHHRDRRAGEIQAALRTEQLGQPAVVARAYAVAVRAQVAILGVLNEQINLLQEQVEAHFGQHPDAEIYTSQPGLGQILGARVLAEFGDDPTRYGDTRARKNYAGTSPITRQSGKKKVVLARYVHNDRLLDALGGQAFAALTRSPGARAYYDKQRDRGLGHRAALRQLANRLVGILHGCLKTGTRYDEATAWSHAQQDQQVAA

SEQ ID NO: 433991 - protein, 445 aa, unidentified
MRFYTQQHQHYCGIDLHARTMYVCILDATGNVLVHKDMAAGPEAFLKVIAPYRKDIVVAVECIFTWYWLADLCAREHIAFVLGHALYMKAIHGGKAKNDKIDAHKTAVLLRGGMIPTAYVYPRAMRSTRDLLRRRYRFARHRAGLLAHIQNTTSQYNLPPLPQRISYKANRSTVPDHFPDPRVRKSIEADLCLIDHYDERLNDLELYLVRTAKIDDADTFYRLRSVPGIGKILALVMLYEIHDIARFPTVQDFLSYARLVKCAKESAGKHYGYGGAKIGSVYLKWAFSEAATLFLRHNGLGQACFARLECTHGNAKARSVLAQKLGRAVYCMLSHRTAFDLKKFVGNATPQPRRARQAPADDTASMDAPHLAAESAGAACPTSPPRSARALGERANPRKPRKKKNDRPNCPRSDDREEVKGVATLKNRRRRLQPTTPAEEIAATE

SEQ ID NO: 433992 - protein, 347 aa, unidentified
MRFYNTQHPFYCGIDLHARTMYLCIIDQAGETLLHRNMTATPEALLKAIAPYRDQIVLAAECMFTWYWLADFCAEHGIPFVLGHALYMKAIHGGKAKNDKIDAQKIAVLLRGGMLPQAYVYPAEMRATRDLLRRRMHLARKRGELLAHVQNTNSQYNLPAIGKKIAYKANREGVAERFADPAVQKSIEVDLALITYYDALLRDVELTIVKTAKHHDAHTLYLLQTVPGIGKILSLVLLYEIHDIARFPRVQDFASYCRLVKCAKESAGKRSGTSGSKIGNAHLKWAFSEAAVLFLRDNPAAQKFLARLEKKHSKGKALTILAHKLARAVYYMLKRQTAFDLHTFLQG

SEQ ID NO: 433993 - protein, 316 aa, unidentified
MSAEPVFVGIDVSKASLDVAVHRPATRWTVDYTEAALPPLGARLTALAPALIVLEATGGLEGPVVGALAVAGLPVVVVNPRQVRDFAKATGQLAKTDTLDAAVLAHFAAAVRPPVRPLPDAATQGLAALVTRRRQLVDMLTAERNRLSCAPPGLRTELQAHIRWLERRITGLDTDLDQAIRTSPLWRAQDDLLRSAPGVGPVVARTLLAQLPELGTLSHKTIAALVGVAPLNRDSGLFRGRRQVWGGRAAVRAVLYMGTLAAVRFNPVLRAFYQRLRAAGKLPKVALTACMHKLLTILNAMLKHQRRWDPTYAQTH

SEQ ID NO: 433994 - protein, 409 aa, unidentified
MEVVIARCGGLDVHKATVAACVRVQGPNGHITQQVRTFGTTTGQLQALVVWLQEQGVTDVAMEATGVFWKPVWHVLEPHVHLLLVNPRDIRRVPGRKTDVSDAAWIAQLLQCGLLRSSFVPPRDIRELRDLTRARATLEQQTTAVANRIHKLLEDANIKLGSVATDILGTSGRAMLRALVAGETDPTRLADLAVGKLRVKIPALHEALRGALTAHHRFLLRRLLTQLTFLEDEINSFNRQIAEATAPFAALLTRLDAIPGIARRAAENLLAEVGPDMTPFATAAHLVSWAAICPGQHESAGRSQRGTIRKGNRWLRRTLGQAAWSARNKKNSYAAAQFRRLAARRGRKRAIIAVAHSLLVAAYYIIRDGVEYHDLGAAHFDRLAPDKLTRMLVKRLERLGHKVTLEAAA

SEQ ID NO: 433995 - protein, 336 aa, unidentified
MNYIGVDLHKQTITVCVMNQDREVVMTSRFPCSEAERITAWFRQRQPFRMVVEATASYEWFVQQVEPYAERVVLAHPGKLRVIAESTRKSDRLDARVLAEFLARDMIPEAYRATPRQREHRRLIRQREWLGRRLRSMKVRMRRVLADYNADRPDLFTRAGRSAAGVLKLSSADQLALNQMWSQYDLLRKQMTEVMQALREFARTASASEAEARRVVGTIPGVGPVTVEAFLAELADAHRFRSQKRAAAYVGLAPGQRESGGVRRGLGITRTGSGLLRRILNQAAWRLVRVDPRWRRIFEGLAKRRGKKKAIVAISRRLLCVMVSLVQSGQSYRPAA

SEQ ID NO: 433996 - protein, 403 aa, unidentified
MTMRRRAWVGIDVGKTSHHACAIDETGKVVWNQKVSNEQRAIEQLVTRARKGAEQVRWAIDLTSPMALMLITVLLCAEQSVVYVPGRTVNTMTHAFRGEGKTDAKDARVIAETARLRNDLSNVVLPDELVVELTQLTGYRADLMADWVRGINRLRALLGSIFPGLEAAFDYSTRTPLILVSGLCTPAEIRAAGIDGMTAFLVDNHAWPTGIVKSAATAAALANEQPLALPGEAGTAALVKRLARRLLELDREIKDIDKTITARFREHPYARIIESLPGFGPGLGAEFLVVTRGDPASFATAGRLASYAGLVPVPKDSGRITGNLRRPKRYNRRLRRVFYLAALSSLRADGPSRRFYDRKRAERLIHTQALLALARRLIDVLWALLRDGREFTPEKPTTATAAA

SEQ ID NO: 433997 - protein, 422 aa, unidentified
MEDERNWFVGVDWASETHHVRVSDARGRKLGARAFAHSGEGLAAMAAWILEVTGAPPEAVFVAIEVPYGPVVESLMERGFRVHAINPKQLDRFRDRFSPAGAKDDTRDAEVLGDALRTDPRCFRALQPLDPVVVELREASRMAEDLKQERNRLGNRVRDLLWRFYPQMLGLTDDVAAPWFLDLWRLIPIPEKATRVREATVDRLLKRHRIRRLSAADVLEALRRPAILLAPGTVSAAVSHREAIAKRLDLVNRQMLAVDERLDRLTQSLAGAQERAGGQRPEPCDVTILRSLPGVGRIVLATLLAEAVEALQRRDDRALRCLAGVAPVTKRSGKSRIVLMRQAAHVRLRNAVYHWARVAVQHDPRSQAKYAALRARGHGHGRALRSVADRLIGVACAMLKAKTIFDPNLASQRAPNLGKPTC

SEQ ID NO: 433998 - protein, 382 aa, unidentified
MFILAIDVSKSSLDYFSNFIGSGSVKNSPQGIFDLFSKASSCSNDFILVLESTGVYSFDVASYFYNHSIKVFFVKPDNLKSYRKLLNRPKTDKIDAQLIFDIALKFHDSLIPYVSYSEIITELRYLTRLYLKLNEDIAQLKLRLYSYVSLYFPDLDFKLNKTFSSLLKDFTIEDIAKKPINELFEYIASVSKHRVSAQVLAQKLKDLSKNALRLRPNPSNSLRLSIISTLELINTYEKQIKSIKSEISKLIKRIPNTLTTVNGIGDITAAGIIAEIGDINRFKNASSLASYAGLTWSIHQSGNFKAQDTFLKKNGNKYLRTYLVLAANSLRIYNPIFKEYYRKKYKESYKHNHMRALILSARKLVNLVFYLLKNNVPYVPMK

SEQ ID NO: 433999 - protein, 337 aa, unidentified
MDVHKKSWTVHIKTDLFDYKTVTMPADPKRLEQYVEKNFPDHEVSCCYEAGCCGYWIARSLQQINWKVMVVNPADVPRTHKQDWQKTDKIDCRNLSEQLQRGNLHSIGIPGEGQEQLRSLFRRRNHLVRQLRTIKNHIKSQLLYYGIKVPEQFDNPNWSYEMKTWIGNLSWKFTPGAETMKSRLKQLDFLWYEQLHVSNELRAYCRKHHKTDYYLLRSVPGIGGIIAAGILAELGDIRRFHRLDELASIVGLVPGIYQSSDNNICLGLSKRSNRYLRSLLVEAAWVAVRTDMSLQTYYRKHAHKEPNKAIIKVAHKLLSRIRAVINSGTPYQTGLVK

SEQ ID NO: 434000 - protein, 356 aa, unidentified
MRNIRKLDFSNNNFYIGIDVHKKSWCVTLNSQQMNLETFSMNPSPSELKKYLNKNYPNGKYFSVYEAGFCGFWIHRELCKLGINNLVINPADVPTTDKEKRYKTDSRDSHKLSRELANHCLRAIYIPDEFAESIRGLCRLRERIVSHQTRLKNRIKSFLTVKGKDFTPNSECKHWSANFVRTLKEMTFSQEIDKQTFQFHLKELEETRQQVLEVTRQLRSHTKTDTCQAIIKYLLTVPGVGFIVAITFYTEIIDISRFKNNDHLASFVDFTPGTHSSGEKNRTTGLTPRRNRYLRYLLIEAAWVAIRKDPALFIQYSTLLKRMPKQNAIIRIAKKMVSRMRNVWIKERPYLLGILE

SEQ ID NO: 434001 - protein, 409 aa, unidentified
MRLFVGLDVSSFDMKVCFLNGEGEKLDSFSVSNDLPGAQVLKERLLQCTTNQKVETLKIGLESTSVYSFHPSMFLHHDEDLKRFGTKVFLLNSKQVANFKKSYSDMNKTDEIDAFVIADYLRFGRNQMSTVKESQYVVLQQLTRSRYQLVRMLTKEKQHFLQHLSYKCNTFSQEVDSSIFGNAMMELFLEKFSLEELADMPLEELAEFLQEKSKNRFGDPKCVASTIQKAVRTSYRLDKVVEGSIDILLGTSIEIIRIYQKQIKELEKSIKRIMAGLTQTLESIPGIGPIYAAGIIAEIGQIERFDDETKIAKYAGLYWRTYQSGRFTAENTSLSRNGNHYLRYYLVEAANSVRKHVLEYQEYYAKNYNEVPKHQHKRALVLTARKFVRLVDALLRNHQLFTLERRVKV

SEQ ID NO: 434002 - protein, 482 aa, unidentified
MKKRNIYQNQSQELLHLFEGAGSSEKVMCVPMDYAKKDHLVMFCNGHGDILRKPFSVKNTPEGIAYIADQVTRSCRRRGIKKKHVFFGGEDANSFAKNFVSTLRGKGFLVANVNAHDAKKQRGNVQASTDRIDLMGIATMLLNCRANCGPAQSGIYRNLRTLVRHRRKLVQMLTEVKNRVHGIVDELFPGFLNEKNSGIIPFTQSSLYLMEDRFSPKQIRRRRRQKLIEILKRFGTSKAERTAVKLQQYAAKVLHAPVEYVDTMQLSLAQHVKHIRCLKESVAQMDKEIALNLAQTQGAFLTSVRGIGLVLAAGVTAEIGDLNEQKPLNNLASYSGIIPRVKQTGGSDGKTYTGPVAKRCNRILKDYVVKSAYHLGLHGPQDLMADYKRRDASGQHADFGMGRRYLRMAISLMRTSQVYLPPNLRRDDYTLEERAGYYLTSWPYLKEKWKKVGALEAAFAKDRPLGLWRQIVQELYDIKLKL

SEQ ID NO: 434003 - protein, 460 aa, unidentified
MAKRKKSPVNVPVLDIIDQINLHAAGLDIGAEEIYACVPVDRDEESVRVFPTFTVDLHALADWLEACQIETVAMESTGVYWIPIYEILESRGFEVYLVNARHLKNVPGRKTDILDCQWIQQLHTYGLLRASFRPPEEICALRALARHRDNLIRYRAAHIQHMQKALQLMNVKLTSVVSDITGVTGLSIIRAIVAGERDPHQLAGLRQSGCAKSEEEIAKALQGNYKPEYLFVLRQALAQYDFYLRQIQECDAEMEAMYADLPPCHPDDQGSPPPKPKTQKRRKNQAHFDLATSLYRIVGVDLTAIDGIDALSAHKIITEIGIDVTPWPTVKHFTSWLGLSPHNDKSGGKVLRSRTKKTQNKANLAFRIAAQSLSRSDSALGAFYRRMKAKHGPAKATTATAHKLARIVYSMLKNRTAYADPGVSYYEEQHRERAIRNLKRKAAALGLELTPAPTQPMTVS

SEQ ID NO: 434004 - protein, 348 aa, unidentified
MDNLITKYVGFDVAKDTIAVAVADERREAPRYLSKIPHDMQALRKTLERLGEPETLEVCYEAGPTGYVLARWLRTLGIRCQVIAPSLTPRPPGDRVKTDRRDAQLLAQHLRSGELVEIRVPDEEDERVRDVSRAREDAREDLHRARQCLIKLFLRRQILEPSEMKSRWTKTYYKWLDTLKFESPTDQLVFQEYLQTIKACDGRIERYEAYILKLINDSPVNALVRILQGFRGVSATAAFTIAQEIFTFDRFDDPGKAMSYAGWVPSESSTGLTTRRGGLTKVGNAHLRRILIEVAWSCRHKPCEKGDLKKGLRTCRLRYSAFPRRHKRGFTRSICIWSYNVGNTQTSP

SEQ ID NO: 434005 - protein, 345 aa, unidentified
MAEVSTIGLDIAKTVFHAHGADARGQMVFSRRLTRVKLLEFFAAQPRCVVALEACGGAHHWAREIASLGHEVKLIPPAYVKPFVKRNKNDAVDAEAICEAAQRPSMRYAAIKTEAQQAAGMVFRTRDLLVRQRTQLINAIRGHLTEFGWVAPKGPSHISVLASLLEEGEEIGASLPDAARAMFLVMTGQLEHLNEQIKLLDKEIARRAREDEAARRLMTIPGIGPIAATALLALAPPVEGFARGRDFAAWLGLTPRQHSKGGKERLGSISKMGERTLRRLLIVGSSAVVLHASKRGAPRGSWLEQMLARKPRMLVTVALANKTARIIWAVLMKGEDYKAPVAAAA

SEQ ID NO: 434006 - protein, 410 aa, unidentified
MEPIVERACGLDVHQATVVACLLVGQAHEKPRKEVRTFSTFTQDLMKLRDWLRSERCTHVGMESTGVYWKPVYAILEDDFEIIVGNAHHIRNVPGRKTDVKDSEWIADLLRHGLIAKSFVPPKPIRELRDLLRYRRKLVESRTAERNRLLKLLETANIKLASVASDVFGVSGMSMLKAILEGKATPRQMAELAKGRLRHKISDLARALKGKVEEHHRFLLSFQVHRLEQVDADLARLEQRIDEKLKPYERSRARLTQIPGVNRILAGVVIAELGLDMTVFHSANHLAAWAGVCPGNNESAGKRSSGQVRKGNVHLKTALIEAANAASQKKGSYLKDKFFRLKARRGHKRAAMAIARKILIAAYHMLSTGASYQELGELYLDAISKERVVLNLVRRLQRLGFDVQVQSNTA

SEQ ID NO: 434007 - protein, 326 aa, unidentified
MTNANELIFVGIDVSKATLEIALDDNSKTRTLSNDDKGLKALLDELKAVAARVAVVLLEATGGLERAAAAALCANGFDVMVVNPRQAHDFAKALGYLAKTDSTDARALSHFARTLYHSEKRETLLHKLPTPEQELLLAMVTRRSQLVGMRVAESNRLDNAHPSQRKSIQAMLKQLDRQIGQIDDDADRHLRQHFKDKLDLLKGLKGVGPGTQAMLMAALPELGRLGQREIAKLVGVAPLNCDSGKFKGKRTTWGGRANVRSALYMAALSAVRFDPCLKAFYERLLQAGKPKKVALTACMHKLLTIINAVIKSGKPWQAGYPQSANA

SEQ ID NO: 434008 - protein, 342 aa, unidentified
MKKYFIGIDVSKETVDVGFVESDFQRQPEYLAQYPNGKKGYRSMVRDLRLALRGTSSGQWLFCCETTGAYDRQMCHWLAEHGMHVWRESALQIRQSLGIRRGKNDRADSMAIADYARRHHDKASLYKVPDKELAALKDLYLYRQTLVDKRKAVKNRVKALESQGGSASPAAKFIRRDASRELRRLEQSIRECESAMKDVIRSDAQLERNYEHVKSIKGFGLVVTVALMVFSGNFLNIPTANKMATYCGVASFRNISGTTLDSRQDVRHLSNLRLKGVLTMAARTAIRHDEAMMQYYQRKIAQGKQHGVAINNVKNKLLHIAYALVRNGQDYQSGHVTNVEAA

SEQ ID NO: 434009 - protein, 338 aa, unidentified
MQITTIGLDLAKSIFHVHGVDAHGCERIRKKLRRGELLKFFAKLPPCMVGMEACAGAHHWARQITALGHEVKLMPPAYVKPYVRRQKNDMADAAAICEAVSRPSMRYVPIKSASQQATLLAHRGRSLLIRQRTSLINAIRAHCLEFGLVAARGPANIAALIATIQDDRNPLLPQEARPALLILVEQLHFLNQRIAAMEKEATATRRLDDRVKRLMSIPGIGIIKATAIAATVPDAKAFRSGREFAAWIGLVPRQHSSGGKERLGGHIKMGDSYLRRLLISGAQAVIAHSSRRKETAATWLGALIARKPRMVAAVALANKTARIAWVIMARGEHYRAMA

SEQ ID NO: 434010 - protein, 356 aa, unidentified
MSHDVKYIGMDVHKEATVIAVLNGSGKQVMESIVETKTSSILQFIHGLRGELHVTWEEGTWAAWLYDLLQPQVQRVLVCDPRRNALLKEGNKSDKIDARKLADLLRTGMVRPVYHGEHGLRTLRELGRSYQTIGQDLNRVMNRIKALYRGWGIPGAGTQVYAPRYREEWLHKIEHVGVRRRAELLYQQLDGLQTLRRTLRPELLAESRKHKASKLLRQIPCIGPIRAARLLALMQTPHRFRSKRQLWTYSGLGIETRDSAQYRWVDGQLQRTKKPQQIRGLNRNHNHEMKEIFKGAATRASCGVGPLREFYVALLDKGMKPEMARLTLARKIAAIALTLWKKEERFDAEQLKSQAA

SEQ ID NO: 434011 - protein, 418 aa, unidentified
MEKSYVVAGIDVHKSMLAVVVADAGREGEFQFQRRKFGTTTGELNALEAWLSEQGVREAVMESTAQYWKPVWQHLEERFEMYLAQAFSNRAPRGRKRDFADAERLLRRHVAGELIRSFVPNGEQRLWRTMTRSKHQLTRDRVRIHSQIESLLEDGRIKLAAWVSDLLGLSSRRILRALVEGETDPAKLAALAERSLRATPEQLQDALSRATALSGLHREILGMFLSRLELIESQIELLNQRTATAMGVHHAAVQRLAEVPGFGIDSAHQVIAEVGPTAETFPSPQQLASWVGVCPGREESAEVSKNNRSPKGNRMMRRVLTQVANAAVKSKGSVFESLYRRWVARMGHNKTIWTIAHRLCRLAWKILHEGVRYIEYGKRENPQSVRKRASKLLRQLRALGYQVEAQPPALPLDQQAAS

SEQ ID NO: 434012 - protein, 400 aa, unidentified
MSERRARVWAGIDAGEGHHWAVAVDETGATLWSKKIDNDESAILAALGEILELAGEVHWAVDISGTSSALLLALLAARGQQAVYVPGRTVNRMSGAYRGEAKTDARDVYVIAETARQRRDFAVIDVPAQLAADLALLTAHRSGLVAGRVRLVNRLRDVLTGIFPALERAFDYSSHKGALVLLTGYQTPAVLRRRGRARLTAWLANRGVRGADAVAATALEAAQAQRTALPGEDVAAQIVADLAAQVLALDDRLKRIDKQIRDTFRSHPQAEIIESLPGMGPVLGAEFVVSAGDLSAYVDAGHLASAAGLVPVPRDSGRRTGNLHRPKRYSRRLRRVFYMSAQTSIIREGPNRDFCLKKRAEGCKHVQAVIALARRRASVLWALLRDGRVFTSAPPVTQAA

SEQ ID NO: 434013 - protein, 312 aa, unidentified
MTKIICGVDVSSEALDVEIRPGGASGRFERSEAGIAELVAFCKARGVELVVMEATGGYEKLALALLWANGIPVALANPRSVRRFAEAMGLLEKTDPLDAGVIAWFAEAKRMVAQLPPSRAQERLQALVTRLRQLTDLRTAQSNQRRLVGEATVLTSFSEIIALINRQIRNLEKEIAAIIDADPLWQRLDEEFRTIKGVADRTVARVMAEMPEIGTVSSKAIAKLSGTAPIANDSGKRKGRRSVRGGRTHVRSILFVVADVVRRHDPDFCAFHQKLSQAGKPKKVIRVALARKLLVRLNAKARDVRRELALAA

SEQ ID NO: 434014 - protein, 411 aa, unidentified
MEAIYESVCGLDVHSGSVQACVRRWKERRIEQEVRAFGTMTRDILALADWLAAEAVTHVAMESTGVYWKPIYNILEGRFEILLVNAKHVKHVPGRKTDVKDCQWLAQLLQCGLLRGSFVPDRPQRQLRDLTRHRSQLVHQTAAVANRIHKVLEDANIKLGLVASDILGVSGRDMLRALIAGQQTPEEMAELARRQLRGKIPQLRLALEGALTEHHRFVLAELMDQLEDLGRRIERFTRRIEEISGPFAAAIRAVAEIPGFDQRSAQNVVAEIGTDMTRFPTDAHIASWAGVCPGSNESAGKRKSGKTTKGSRWLRSALCQAAWAASRTKRSYFRSQYRRLVGRRGKKRALVAVGHSLLVVIYHVLLTGRPYQDLGIDYFDKLDAARIVKSHVRRLESLGYKVTLATSEKAA

SEQ ID NO: 434015 - protein, 364 aa, unidentified
MHSINNTELSSLEETRCQFNGGRCAIKLGIDVHQEFYVVVMQEGGANPKPPQRFQKQAFLHWAGRLKQKSGAEVYAVYEACGFGFTLQRNLSALSIHCYVICPQKLDEQNRRVKTDGLDAKALCLKLDRFVQGNRAALAIVRVPSEAEERSRAIHRQREQLVGARKRLEAQGRSLMVNHGFEPVQNWWKPRTFAPLEVPQWMRELLSNSQPILVALQQKIAALSVQLQCAAAPDQPRGLGLMTSVIIDREIGDWRRFSNRRQIASYTGLCPGEYSSGNSRLQSCVTKHGNPRLRAALVELSWRLVRFQPNYKPVVKWRAILAKGALATGAARKKAIVAVARQLAVDLWRVRTGRCKPQALGLVI

SEQ ID NO: 434016 - protein, 344 aa, unidentified
MSKTIMIGLDLAKNVFQVHGVDASGAVVLRRQLRRGQVEKFFSELAPAIVGLEACGGAHHWARMLERLGHEARLMPASYVKPYVKRNKNDGRDAEGVCEAMGRPTMRFVAVKSVEQQAVLVIHSTRALLIRQRTMAANALRAGLNEFGIVAAQGIKGLRTLIEQLRNPSEGVIPEVGRATLLLLARQWEALDADIRALERQIERAARADEAACRLMEVPSVGPITASAAVAKVPNARVFKTARDFVAWVGLTPRGRGTGGKHRSGGISKQGDRTLRSLLINGASSYLRQQIARGVKDPWLRDMLARRPYKVVMVALAAKNARIIWALLAKGERYRERAPVPAAA

SEQ ID NO: 434017 - protein, 344 aa, unidentified
MKITTIGLDLAKNVFQVHGIDAAGEVVVRRALRRGQVFAFFSKLEPCLVGMEACGTSHYWARELGSLGHEVKLMPPAYVKPYVKRGKTDAGDAEAICEAVTRPTMRFVAVKSADQQSVVMLHRTRELLVRQRTQLVNIIRGQLAEFGVTLAKGIQHALKFVRQLLDGQVLDIPDLGVKVVMVLAEQLRQLQIRIGELEKELKRWFRADRVAQDLATIPGIGFITASALSSTVTDPNQFTSGRQFAAWLGLTPRANSSGGKERQGRISKMGDQHIRHLLVSGMTSQLRWARRHPDAHPWVASLLARKPAKLVAVAMANKAARIAWVVMTRGEVYRARQPSTQLTA

SEQ ID NO: 434018 - protein, 350 aa, unidentified
MKTSTQDTGLYGGLDLHGDNVFCALLDTERSVVFEKRLPNDLDTIRLALEPYKGRIRELAVESTYNWYWLVDGLRHLGYTVRLANPAKMKENIGLKHANDKTDARYIARQLVSGILPEGYIYPEETRGVRDLLRHRMHMVRHRTAELSRLAALAARQTGREVSGAKITPEELPRLFGGHAPSVAIAEASLRHIEYLGGEIKALEKSVASQIPDEAAYARLETVPGIGKILASCILLETGPITRFKSAGHYASYCRAVPTEHTSNGKKKGEGNGKCGNKYLAWAFVEAAHFAVRYSPGINAWFQRKQARSRGLRVVAVKALANKLAKACFFILHDNTGFDAARLVGKHGTH

SEQ ID NO: 434019 - protein, 387 aa, unidentified
MYFIGIDISKFKHDCAIIDEAGDTVTASWSFANNCEGFSLLKQLLDALDGQKKIGFESTGHYGHNLKLFLEANNFSFMEFNPLLVSKFVRSKSLRNTKTDSLDAVSIAQYLMTVEYKPYPPSFYHMDQLKSLTRFRDSLVRQHSRQLVELTNILDKVFPEFKPFFDGRFSATALYILTHYQSPEKIANMNAKSYEALRKKSRGKFSMVKFAQLKTLAKNTVGRSDAFLLKQMEITIDIENQLDAKIDEIESQILECIRALNPPILTIPGIGELTAAIILSEYGNINKFENPAQLLSFAGLEPGYYQSGLAEHQGHMVKHGSSHLRYALMNACLPLVTYEPVFAEYYAKKRAEGKPHRVALTHVAKKLLRVIFTLQTKNISYDPTLIR

SEQ ID NO: 434020 - protein, 381 aa, unidentified
MHYTACSPTLAMPRERLLFVGMDVHKDTHAAVGATAFGEKLFEISLENNRADFDRLIKQSRLVASESGLGLVFGLEDSTAYGLRLAKHLFANNLLVKTVSPIYVDRERKYETHPEKNDSLDAYAAAKVLIQRIDTLPTYTITKQNELAKEIKELTLDREFLVKEQSRLKCHVHRLLHRAWNSDYQKKFKNLFSLKGLKFWLAHPLPTGAAKDDIIGTSDILKNQIKRKIKRLLAIREELKEIEIELQSLIEQTGQKITTLNGCGIALGAKVLAEVKDITNFTSPSALAKYAGLCPRERSSGKTFRHVKTKSGNRQLNTAIHRIALSQIARSGNHFAKDYFQRKISQGKTKAQALCCLKRRLVDIIYMMLKHKQAYRQPDTL

SEQ ID NO: 434021 - protein, 419 aa, unidentified
MYSVGIDVSKGKSTVAIITRKTKKDNLNKKHKFKVFITHTEPFDVNHVKSELTNLVKIIKDLKGKVIITMEATGKYHLPILLFLMGHDLSVNVVNPLRMKKFETDELRKVKSDDKDSLKIARYGFEKKNKLLPFQLSAAVYADLRFLNREYNHYTGLIVNEKLHLTSLLDQTMPGITDLLVMTDNYNGKNKLCSFIERFWHFDLITKKSEKQFINSYNSWAKKNGYHQSEAKAIRIYALAKDGITSLNSNRPCTKRALLESVNILRDLETSLNKIITQMNELAKGLMEYETVRAMEGVGKILALRLIAEIGDIRHYRSKQALVAYAGIDVDRKQSSKYEAPNRHISKRGSAALRHIGYIIMLSKKMHKVKGDSVYKYMLKKEKEGKKKKVAKIAGLNKFLRIYYARVSALYALKIIKSI

SEQ ID NO: 434022 - protein, 320 aa, unidentified
MSDSTECFVGIDVSKDTLDLFADPPAPQLSAHCSYNDATVHTLCNALADLAPTLVVMEASGGLEQRLAAELAARGVRLAVVNPRQVRQFARASGELAKTDALDARILCAFARAIRPQARAPHDADTRDLADLLSRRRQLVDMRVQELQRQHTASSRTMRKSLAEHVAWLDKRIARLDDDMGQRLRDSDVWRAKDDLLQSIPGVGPVLSLTMLGLCPELGQLNRREIAKLVGLAPLANDSGKHRGPRRIWGGRADIRRVLYMGTQSAIRHNPVIAAFAARLRLAGKRPKVVIVACMHKLLTIMNTMLKTGQTWLPAEQPAQ

SEQ ID NO: 434023 - protein, 345 aa, unidentified
MQIKSIGIDLGKTTFHLIALGMRSQVVIRKKFSRSQLLVYTANLPPSLIGMEAGVGSHFLGRALREQGHEVRLIPAQFVRPFVKSNKNDYRDAEAIAEAVERENMRFVPIKTEDQLDLQALHRVRDRLVARRTSVINQIRAFLLERGISFRKGPASLRQQMPGILENADEKLSARMLRLLDFLWQEWKGLQVQIESLNRDLEQIASSDPSCVRLQQIPGVGPLVSTAVVSAIGNGAAFKKGREFAAWLGLVPRQWSTGGKAKLLGISKRGNPYLRKMFIHGARAAVLRVKREGSSLGQWMSGLETRTARNVVIVATANKLARISWAVLASGNDYHPRHPALGFSN

SEQ ID NO: 434024 - protein, 348 aa, unidentified
MLYVGLDLSRKRLDWHALAADGGLIGRGASPPDRDGLAHLVHEVDREHGGPVLAAIESMTGARFVHDQLELAGWDVRIADAQRAKGIAPLACKTDRIDAWVLAELARRDLIPEIWLPGPEVRGERERSRFRIQLVHKRTSLKNRVHAILFQHGLHAPVADLFGVGGRRFLERCELAEPWRSSVEASLYLIDVFQEQIDGIERELRRQGAEHRYLRLLMSAPGIGWVLGYTIAAEIGDVARFATPAKLISYTGLCPRVRQSGEVDRRGALSKHGPPYLRWALIEAAHNAIRCYPPYRALADRQRSRLGRQRGGSVAAITVARKLAEASWWMLTRDRPFAPAGARVPLTA

SEQ ID NO: 434025 - protein, 495 aa, unidentified
MKLLYRRCAGLDVHKETISVCVRIRRSDSQQVEIQEKVFGAFTQELERLRDWLRENKVKQVAMESTGVYWIPVWNILEPASCGLELLLVNPQTVRALRGCKTDRIDARRIAEYLQYGLLHGSFVPPRPIRQLRDLTRMRVQVQHDRNRVINRMGRLLETVNLKLSSVTRKIAGVSGRAILKAIARGKTQPEDLASLAVGSLKAKKAALALALRGRYSDHFRWLLGQLLEDLERLDGELATLDSHIDREMQPHAELVCRLCTLPGVERLTAWVLIAELGVEMSQFPDAKHAASWAGLCPGNAESAGKRFSGKTRKGDRYLRRILVQNAWAVSHMKDCFLTAVFYRIAHNCGRKKAAVAVAHRILVMAYHIIRDGTEYRERGGDYFDRVDAERTAVRLSQRLERIGYDVVLTRRPEAQTAEEAVRRRGRPCKCKERGIPCNHPGPRPSRPRRGLLPTKPAPASAACSRCAKWGIACIHVRPRKPNGNFSGPTAKSTS

SEQ ID NO: 434026 - protein, 341 aa, unidentified
MCNQVLGPDPIKMMEVRMNCKGPRVVGVDVGKRMLDVAREGARAGERYSNDVVEIARFVRGLDPERDVVVFERSGGYERLLEGQLSEASVRWAVVHSKRVKAFRVAKGIKAKTDAIDCRLLRDFGRDQLDSGELRLGRLGDVTMAALAARRRQLNDMLHAERCRRETAAIELVRSSIDCTVATLEAELTAIEAAIATHIRTDPELYLKEDVMCRRIGVAETTARGLLAILPQLGRASAREIAALAGAAPRVHQSGTTQKRRGLEPGRAVVKVILFYPAQTAMRFDPEIKAFAQRLRNRGKPGKVIMVAVMRKMLVQLNAAVRDALANSNRLGLASAGCAAD

SEQ ID NO: 434027 - protein, 325 aa, unidentified
MSNQKLCCGIDVSQNTLDIAYQNNLGDIFHLKVDNNNGGFKKILEHTGPSYHFVMEATGVYYIRLAFYLHGQGCCLSVVNALSIKRYIQMHLERNKSDKKDAAWICRYAIEQQPPYWEMPDSTYFECKQLYNTIREYAEQMKRFNNQLHSLRLLPVPSKDTIKSLEKINQQLEKEMKSLEVKLEAQLQQWQPEQLKSISSIKGIGKRATAMLIVFTQGFKYTKNHRQLISFAGLSPTEYSSGSSIQGRPRIYKRGGKNLRDVLYMCSMNAIKTNPACKALYERLRANGKTGKQGLIAVCNKLLKQVFAVVKNNSLYQPNYCSAKQ

SEQ ID NO: 434028 - protein, 480 aa, unidentified
MSQQKKHSKPLGEEKTAAGTGKRGRKRKGMCLEDRPILEANAAGIDIGAREVFVAVPPDRDEHPVRVFSTFTEDLEKLAQWLVSCGITTVAMESTGVYWIPLYDVVEKYGVKACLVDARGMKNVPGRRTDWHECQWLQFLHSVGLLRAAFRPEGDVCAVRSMMRYRTELVEMTSQHIQHMHKALTQMNVQIHHVISDLTGVTGLAIVDAVIAGQRDPVVLAKLRDPRIKASEETIRKSLVGNWRAEHLFTLEQSRKSYQHYQGQISACDEAIEKLLVAFVPRVDPTERPLPPDRKRKQRGRKKKNANPNTFDLRTESYKLFGVDLTQIPGLMAMVLMLFSEVGRDMSRWKTAGHFVSWLALCPDNDISGGRVLWRGMRRVHNRAGDLFRMAAYSLHHDATPLGDYLRRMKSKLGPAGATTATAHKIAIIFYTMVKKQVEYDATLWADRDAEREKRFEAKLKRQAQQLGYKLVPIEERPAA

SEQ ID NO: 434029 - protein, 330 aa, unidentified
MLADELDYVIGVDTHRDEHVLAVLTAAAAAVVAGEALPANARGYRETLRFAERYAAGRRAWAIEGTGSYGAGLARYLAGRGETVLEVSRTPRAERRLRGKDDTLDAARTARAALASDTLALPRSGERREALRLLLVARRSAVDVRREALTQLRGVLVTAPDRRREELRGLPTGKLLHRCSRLRRSSAASVDELATKLVLRSLARRIEAATLEADELERDLLGHVRALAPALLDEPGVGPIVAAQLIVAWSHRGRLRSEACFARLAGVAPVPASSGQTVRHRLSRGGDRQLNRATSPNASPKAKADATPHAYSSATSPATSTGYSNKPSRS

SEQ ID NO: 434030 - protein, 457 aa, unidentified
MEGDAVKKAKKIAKLPIINPNAAGIDIGATQIFVAVPPDRDAESVRCFATFTADLEKLADWLAACKIQTAAMESTGVYWIPLFQILEKRKIEPVLVNAQHLKNVPGRKKTDVEDCQWIQHLHAVGLLRGSFRPADEICTIRSLWRHRENLIQLASIHVQHMQKALDQMNIQLHHVISDLTGTTGLAIVDAILSGERDPAKLAQLRNPHIRASQQTVRESLVGDYREEHLFVLRQSLESYRHFQRLIHEVDLEVKQMVKELPSKVGVQDPPLPKAKNPRKTPWRNEPPELREDLYQAFGVDLTQVPGLNTLTTQILLTEIGPDFSRFPTSGDFCSWLRICPDPKITGGKVISSKTRPSKNRAALALRMAAQGLHRSQSFLGNYFRRMKARLGTPKAITAAAHKLARIVYHMVTSRQEFDATIFEALERRSRDHTHLRLCAHARELGFDLVKINPEAAN

SEQ ID NO: 434031 - protein, 400 aa, unidentified
MRAVFGIDVSKVSSEVAILVNGEKVHGYTMPNDAIGFARLLGDLKTVHKPEIIFEATGVYSRRLQAFLEDNGYAYTRLNPLEAKKQLDSFRVRKTDQIDAEKLAQSQFVLNRKPTYVQEEVYQELRDLSRFYQNLTEDIVRAKNRLHKVLQVTFSELETILSTPTGEQYWNLVIAFPCKDFVLDLSKDKLSESIRQSTSKRISDKRVAYLAEKLITLANKSYCAVKKTSPILEEVRYYAKELLRLSEQRQAVLDEMVELAQPLPEYDILLSIPGIAETTATSIIGELGDIRRFQSANQINAFIGIDLRHYESGNFIAKEHITKRGNPYARKILFKCIHNIASASHTNPCHIADFYEKRKRQSQTTSTKPHTIASIHRLIRTMYYLITHNKFYDYTLTQNQ

SEQ ID NO: 434032 - protein, 437 aa, unidentified
MRVLYEHVAGIDVHKDMIKVAIRSPGEKPWTRKTEILEFRTFYGVLQEMARLLRRRGVTHVVMEASGVYTDPVYYALCEQDFAGVAVVNPAHARALRGHKTDAADCRRLAELFECGLLRGSYIPPAELREVRDLTRYRMKTVQARTSEIQRLGKALESAGIKLGSVASDITGVSATAMIDSLIDGERRGAVLADLAIGRMRTAGKLADLSMALTGRFTEHHALLCRLHRDRIAGLDAAVADLDDQIAGRAGRWQRELDLLKTVPGFGDVVAAAWLAEIGPAPHRHFASHEKLASWVTLCPGNNISARKRKHGRTGDAGTYIKPMLIQAAWNAIRTKGRLQARYSRLVRRFGGEKNPGAKKKAITAIAHTLLKIAYQVLKSGVPYQDLGADFYTRRESPDQQRAYLERRLQKLYPGCAITITISPPEAALTSTVSNAP

SEQ ID NO: 434033 - protein, 338 aa, unidentified
MSLKIVRFNCCGMDVHKDIIVATIGITDRSTLITEYFQETFNSFNSDLYRLCDWLTSHQCSEVCMESTGKYWIPVYNILEERGFTVCLAHPKYTKAIKGKKTDKKDSKWICDLYKHDLVRGSFIPPKDIRELRDIARYYHKLIGIASSESNRYQNCLTVSNLGIGSIFTDVNGKSASRVMEAVLAAENPNDIPDDELLKLVHKSCKKKDQLIDAIRGCRIEPDQRFKMNEIQKHKEELDQHISACFAEMIKRATPHFDQFLHITEIVGISTLSAILIISEIGVDMTVWESSKQLCAWAGLTPGNNESANKKKSTRITKAGQFFEASSCSMCSCCHQES

SEQ ID NO: 434034 - protein, 351 aa, unidentified
MRLYIGVDFHPYQQTVCWMDVETGELRSKVLRELDEMREFYGNMPPSVVGIEASSRAIWFEDLISECGHELVVGNPVEIRKRALSRHKSDKRDAENIYTLLLRGEFPKLWRRPRESSDILDLISLRWSLVRQRTQVSNRLQRIARECGFRRGTVRTLRYQAMIKEASLGDVQRIRRDHLFRQFDALNSQIDELDRWLEAKAKENEQVQLLMTQQGVGSLTALSMVHTLGDVHRFETTRKVTAYVGLDPLDDTSADRVRKRKISKGGSRQLRHLLGQSAHIAARYDKRLQSFYKRLSKKKPKGVAKAATSRKLAVKLSIMLRDQITAEEFDARGQRTVDDARTSPGPEMVVA

SEQ ID NO: 434035 - protein, 412 aa, unidentified
MAITCGIDWAEKHHDVALIDENGKLVAKQRISDNAEGYRRLLNLLAEAGDTAEHPIPVAVETARGLLISCLRATGRKVYSINPMAVARYRERHRVTRAKSDHADAMALANILRTDADAHRPLPADSELVQAIAVLARAQQDAVWNRGQLSNQLRSHLKQYFPAALEAFQVRGIGLDSREARAVLAVAPDPTTAAKLTLARLGSVLRACGRQRGIDAWAQRLLAVFAGEQLHQLPLVEQAMGRQTQALVLQLDAACRAADDLAEAVAEAFSQHPDAEILTSFPGIGPLTGARVLGEIGDDRTRFRDARGLKAYAGSAPITMASGKSLVVRHRTVKNQRLAAAGYVWIFGALPSPQVKEHYDRRRAAGDKHTAAMRNLFNRFLGCLYHCLQTRQTFDPDKAFPTRPDRSEPTAA

SEQ ID NO: 434036 - protein, 343 aa, unidentified
MSNVSAYIGVDLHKKTCYVTVMDQAGVISKQTEIKNDREEIERFFNIYDNKGSRVAVESTMNWIPFYEQVEALGFKVVLSNPLMTKAIAAARIKNDKVDSKILAELMRTDFLPTAYIQPKDIRDLKELIRQRAIYVGMRTKIKNKIHSVLFKTGDKSPVKVLFGKAGRKFLTELKVSAVYRAELDRYLLTLTNFDSQIKELETEVAKTAKADYDCKLLCTIPGVGPYTALMIKSEIGDISRFAGSDKLCNYAGLVPSTYASGEKIRTGRITKRGSKWLRKALVDAVTSSRRNANKISVFYKKLKKSKGTGKAKVAAARKLCSVIFAMLTDKQPFKEFVPVKER

SEQ ID NO: 434037 - protein, 338 aa, unidentified
MKVYAAIDLHSNNSVLDVVDEAGGLLHERRYPNELPVIVEALHKYGKDLVGVVVESTYNWYWLVDGLMAAGFRVHLAHTAAIGQYAGLKYSNDYTDARHLADLLRLGILPEGHIYPKEQRGLRDLLRKRGTLVREQTRHCLSLQSLWTRHTGQQLSANSLRRLTPEDLANRFSDAYVRQAAAVTHTLFQTLHKQVDALERSVHRELKRCASLMHLQSAPGIGDILGLTILLETGQILRFASVGDYASYCRCVDSKRLSNGKKKGRGNAKCGNRYLAWAYIEAANFAIRFSPPIKRWYDRKRSKCHRMVALKAVAHKLARACYFMLREQTDFDLTRAFG

SEQ ID NO: 434038 - protein, 276 aa, unidentified
MSVYVGIDVHRKRSQVAVVTEDGTVQLNKNVVNGSEPFLRLIGDLPSGTPVAFEAAFGWSWLAELLEDYGFEAHLVHPLRCKAIASARLKNDKVDAAILAQLLRADLLPEAWLAPPRVRQLRALLRHRASLVRLGTQLRNRIHAVAADHGYDRSASYWTGPGRGWLAELDLPAASREIVGDCLAVIDGLAPVTGRIDGELHACARADPRVTVLRTLPGVGEFTALVMLAEIGDISRFGSARKLAAWAGLTPTVRGSDLKVRHGHIPGRARRGCGGR

SEQ ID NO: 434039 - protein, 346 aa, unidentified
MKIIGCDFHPSFQQIAMLDLATGEWTKKKLPHASGEAEQFYRSLQGEAVRVGIEATGSTRWFERLLEELGQELVMGDAARIRSLVTRKQKTDARDAEHLLELLERDQFPAIWVPSAGERDLRELVLHRHKLVEMRTRIKNQLQHVALNEGLQKKRQLWTERGRRWLEDLALPPWTERRREDLLHFLDELDARIAELDQAVGEAARQDARVRLLMTHPGVGPVTALAFVLVVGEVTRFPRSKKLASYLGLIPSEDSSGSRRRLGAISKQGNSLLRTLLVEAGQSAARYDPELRRAYQRLCHKKQHTGIGKVMVARKLTVRLYWMLKTQQPYRPARMQSSPSHSVSAA

SEQ ID NO: 434040 - protein, 346 aa, unidentified
MTAPSSAAPSVQLHVGIDIAATSFVGVWTRDGRTYTRAQTFAQTPEGFAALQQHLSTTGVPPAQTRVVLEATSSYWVALAVALHTAGYQVCVINPAQARNFARSLPRRSKTDAIDAQMLAQFARERQPPIWSPPPQVYHELRQRLVARDGLLEMRQQARNQRHALLQWPVVIASVCDHLDGVIADLDKRLAALDAEIAQVLTDGAWAESAALLASITGIGMVTSAWLLVGTLNFQGCASAEAAAAYVGLVPLAHESGSSVRGRSAIGHGGHGRLRTALYLATLTAARFNPLIKAHYDRLRAAGKPSKVARCAAARKLLHLAWAVVTKGQPFDPAYQRRTVEEQLPA

SEQ ID NO: 434041 - protein, 418 aa, unidentified
MKIVFPTCCGVDVHKSFLVATIIKTPQDSLQPSYQKKRFSTFNSDLNRFADWLHENDCLDVCMESTGKYWVPVFNILEKRGIRVTIANPKWVKAVKGNKDDTKDSKWIGDLFRIGLVKSSFIPAKDIRILRELTRYRYKLTSMKSSEKNRFQNAFTVCNVALDSVVSDMFGKSATAITDYLTSDEDFDPQHCVSLLHRSLKKKAEDVLSSIEGYEITLEQKCRIGIVRDHLHYIEKLIERVDICINTMVEKYDGAISLLRTIPGIDRSSAITVISEIGVDMTQFGSSKRLCCWAGLTPGNNESAGKKKSVRISRAGVYLKPVLVQAAHAAVKDKLNPYYALKYERIAKRRGKKRAIVAIARMILTAIYSMLSTGEIWNPVDLFKVDMPEHLKEQQLQKAMKQAVRFLKAQGLTVLDSA

SEQ ID NO: 434042 - protein, 317 aa, unidentified
MGEAKVARYVGIDVSKDTLDLMVRPTGTRHQHPNDADGIAQLIKQLRRQRPTLVVCEASGGWERLLAGALATAGLPIVVVNPRQVRDFAKATGRLAKTDRLDAAVIARFAEAVRPEPRPLPSADTQALAELVSRRQQLIEMRTAETNRRRLATGRLRHQLDEHLAWLDRQLDELDRELDDLLRNSPIWREQADVLRSAKGVGPILTATLLSALPELGHLNHKEIAALVGVAPFNRDSGVWRGKRRIWGGRGPVRAVLYMATLSAVRTNPVVRSFYQRLISAGKLQKVALVACMHKLLIILNAMARDSRPWQPARTTA

SEQ ID NO: 434043 - protein, 282 aa, unidentified
MNNNGTVFVGLDVHKDSNMAAYSVDLGEVQVLGNIGVRQCDLDRLCKRMQSKGSRVRFVYEAGPCGYALYRYLSRKGVDCMVCAPSLIARKPGDRVKTDRRDAIKLVKALRMDDLSAVHVPDVVDEAMRDLVRAWGAAKRDLRKAQQRLKAFLLMHDVRYTGRANWGPAHRRWIAELVFPQPWSQIAFQEHRQAIEDRLAQCERLQAALREAAPQWRWYPVVRAIQACRGIQFTVAISLIAEIGDLSRIDHPRQLMAWLGVTPSEHSSGGSRELAASPRLTT

SEQ ID NO: 434044 - protein, 424 aa, unidentified
MNDTLNKKIEQVTDKTLIVGVDIGSEIHYARAILVRGYEVSKRPYRFENTDDGFSGFITWAYNLAIENKLTKIMIAVEPTGHYWFNFAEYLKKYDVQLVLVAPQHVKHSKEMDDNTQEKNDRKDPLVIAKLVPEGRYLIPYIPEGIYADLRTAFNRRCELVDAQVRNSNRMNRWFDVYFPEYKTVYDRTDAISGLAVLKRAPLPADILTLKEDGIYQIWREEHIRSVGINRARKIIAAAENSVGVKGGAAARWEFWQLMEEHDLIVRQLHDIMLLIEEYLRQIPGADRLLKVPGAGIVTVAGFLAEVGDIKRFTDPKQIQKLAGLAVVENSSGKRKGMPGISRRGRGRLRWILFQLARTMVKFNKEMRTYHLYYTTRKENPLKKMQSIMAIAARIARIFFGILKNGTEYDPAIVMKDFNKEATA

SEQ ID NO: 434045 - protein, 340 aa, unidentified
MEGLYAGSDLHGNSNFLGIIDAQGKKVFKKKMPNELALIRETLQPFQGELLGIAVESTYNWYWLVDGLMEAGYRVHLANPSAIQQYSGMKHSDDRHDAFWLAEMLRLGILPEGYIYPKEERPVRDLLRKRGHLVRLRTSLIISLQNILSRNLGRKVSVNDVKAVKEDRISVLLEMDEDLALAGRVSKEAIDHLTRQIHKIEWVVQKRIVLKEPYRYLLTLPGVGKILSLTIMLETGPISRFETVGDYVSYCRKVPSQWMSNGKWKGAGNRKNGNKYLAWAYSEASEFARQLHPEPRAYYNRKMQKTNVACAHSALAHKLARAAYYIMKDHVPFRPEKLFG

SEQ ID NO: 434046 - protein, 416 aa, unidentified
MDALNTTIFTAFIGIDWANSKHDVCIQVAEGETCEFDVIPHQVEQIDAWVESLCKRFGSPMAIAVELSKGPIVYALQKHDCFVIFPINPSTLARYREAFTPSRAKDDPTDAQIAVELIMRHPERFKPLRPQSVRMRTLATLVEQRRALVGDKIRITNRLRSALKQYYPQMLEWFEDIDTPLFCDFLTRWPTLQQAKRARANTLKVFFNKHNMRFEQVLEKRLAAIKAASPLTLDESVIVPYRLQAMIFVEQLRIALQAIKQFDIVIEKTAAQHADYYLFSALPGAGSTLAPRLLVAFGEQRERYKSAADMQKYSGVAPVTERSGKKHWVHWRWQCPTFIRQTFVEWAGQTINKSYWAGVYYKQQRAKGCTYQAAVRALAFKWIRILYRCWQTHTPYDEAVYLKALKRRGSPLMVAA

SEQ ID NO: 434047 - protein, 340 aa, unidentified
MYPFYLGIDLHLKRTYVVLMDTEGEVIDERRLLNAEMAGYLEQHVPQETYAVLEATRNWPFMYDMLSEHVERVELAHPKEVKAIANAAVKTDRIDANVLAHLARMNYLPTAYAAPKEVRDLRLYTRHRSWLIGHRTQAKNRIQAVLSSYNLASPVSDLFGVKGREFLEEVLGELRPAARRVITDNLTLIDRLDEQIKELEQEIPLTKEQTHTIQILMSMPGVGKVTALTILAEIGHISRFNSSKALCNWAGLTPRVRKSDAIVHHGKISKQGSAHLRSAMGQAAMVASRFSPRWYRVYERLAKRCGKRAARVAVARRLLTVIYYMLKRDQPYEKDYHRGA

SEQ ID NO: 434048 - protein, 338 aa, unidentified
MNIVFLGIDLAKNVFQLCGLNQAGKPVYTKRTGRKELLQTLANIPACLIGIEVSTGAFYWQREFEKLGHKVKVISPQYVKPFVRGQKNDGNDAQAIAVALMQPTMQFVPPKSPEQQDIQALHRARQRIVNHRTATVCQIRGLLLDRGIPIGSAVSRVRRAIPLILEDAENGLSSRMRRTIAELYELFNDLGRRIHFFDKEIETVFRQSEACQRIARVKGIGPKTATAVVAAIGKGTEFMNGRHFAAWLGLVPRQHSSGDRQVLMNMTKKGDKHLRTLFIHGARAVVRVATNNNDGHMNQWVNQLKERRGFNKTTVAVANKNARIIWSMLRNETEYQVV

SEQ ID NO: 434049 - protein, 322 aa, unidentified
MTTSPLGIDISKSKFDACLVRDGGKLRHRVFPNSPAGFSQLCAWLAKHKVEHAHACLEATGAYGEALATYLHDAGHTVSVVNPAQIKAYAQSRLSRAKTDKADATLIAQFCHERRPPRWSPLPQEAREWQALARRLDSLLEMRQLEANRLEVAGTQPVKESLSEHIAFLDAEVARAQGLIRSHIDRHPGLRAQRELLVSIPGIGETTAAELLSEIMDVKLYGGARQLAAFAGLAPRLHESGSSVRRKARLSKAGAPRLRKALYFPAVVAIRHNPYVKDLGERLRARGKCPMQVIGAAMRKLIHLAYGVLKSGRPFDPAMKTA

SEQ ID NO: 434050 - protein, 401 aa, unidentified
MEALLVGIDVGCRRHRVAVGRPDGKLIDQFDLEHKPASFSSFFTRIEKQAAQLGLPVSVAMEGYGGWARPLDEMVLGKGWKLLNVNNLKLARFKEIFPAPAKTDAIDARKIVELMRLRPLLPQAKEILNEVIPAPQANHDMKLLTRRRRQLVDERSMVINRMHSDLQAIAPGLLEITGSVDNQWFLNLLTARDSFDQLVRMHRSSIQKIKGVGQKYAALIRQWQQSALLSSDVLIMGDMVIEDAKRVLDLTGKIKRLESRLSALVPQSRLARTIESITGFGLVCACEMAGEIGAIERFSSESALARYIGMAPLDNSSGTYTGAKGGKQVNRRAKAAMMTAVARHYWHTPQSKAYYERKRAEGKRHNQAVRSLGRHISRVIWSLMKNDNLYEERNRAIALKS

SEQ ID NO: 434051 - protein, 387 aa, unidentified
MRDKTFIPQDYDVFGGLDVDKRSISVTFMSHQGFIRSLHMPYSAEHLVNHVRKHFPNQKVAFAYEAGPTGYGLYDGIVSEGYRCLIVSPSMIPRAPGQRVKTNRLDSRGLSENLRGGQLKSIHIPSEVYRELRHLTQLRDTFVSEMAGMKQRIKSLLLFEGISFPPAPAGRGQWSLAVRAKLRELECSRIVHFKLDQLLENLELSEKQALKTTREIRRFCKEDPELSQCIKYLMSICGIGWIVASQLLARIGNWRELKNIRQLAGFLGLVPTENSTGDRTERGSITHSGDGRLRSKLIQASWSAIRQDAELREFFRSVCRSHPRNIAPRVAIVAVARKLSVRISVVLMQQRLYVVREKVHSAPLTQEETSPQGTTRRLAEPGEVKDS

SEQ ID NO: 434052 - protein, 495 aa, unidentified
MNNGAAGQNKDGGRPALARSRSPRSNRKTVSERLPAEPVALATTSNRKPPQEGHYISSMDGRAKGRKDQQQKKQTMNGSEQWQLHRAFGALDWASEKHFVVVVNQSGKIVEEFEIEHSALGWKKFREKLQPYGAIPFAIETSQGVAVEQLLEAGMMVYPINPKSAQAYRERKAPSGVKDDRLDAWSFADALRVDGHGWRALRPEEPLIKELRLLSRDEVTLIEQRTAFINQLCHALAEYYPAALEAFEDWTSVSAWMFVERFPTSEALAKAGKRKWQNFLHSRRLWGSTEGPRRMEVFAKAGQFAGTPPTTKAKSLLALSLVQMLFVIEKQLKLYRQRIEELFARHPDHDLFGSLPGAGPKLAPRLLSEIGDDRERFGGEPQNLQCLAGSAPVTKRSGKRRKYWHVHTRWACDKHLRHAMHLFAEQSLSRCVWAQLYYQLHRQRNQSHANALRRLANRWLKIIYKMWIERTPYNAELHHRNQLQHGSWIFQLKTS

SEQ ID NO: 434053 - protein, 337 aa, unidentified
MEYFAGLDVSMEETHVCVVDRDGKVILEARTPTAPNTIAAALAKGPAVERVLFETGRMAPMLFHGLTALSLPVVCIESRQAYQALRSLAAHKTDRNDARGLAHLARTGFFKPVHVKSLPSHAVRALLIARKKLVGQRVTLENQIRGLAVAFGVRLPRGLSSGFAQRAMAAGHGIPGLDGAMRGLLAARDAILKAIVAINADMKSLERSSAACRRLMTIPGVGRLTALAFAAAIDDPDRFRRSRDVGAYLGLVPRRYQSGEIGYTGSISKCGDARLRTLLYEAANVMLTRYSGSLALKTWALDIARRSTMRKARVALARRLAVIMFAMLKHGAEFEPA

SEQ ID NO: 434054 - protein, 347 aa, unidentified
MRKFIVGIDISKEKLNVCLLEGMNIVHEDEIENTVASLRKWFGRMRKSLKCCMDEVLLCAEFTGRYIYPLAVACHEEEAFLWMEDPSRIKNSFGLVRGKSDSVDARRIAEYAFRHQDKAVAYRLPSKELASIKILMADRELVLRDRKKYEAQLVDQKRFMSKDDYAMQSKMWKSIVKELQKQLDFIDEKIDKLVSDSELLSHQVELLKSVDCIGQRIAVAMVVFTDAFTRFDNARQFNCYAGQAPFTYTSGKSIYSKAKVSQRANKQIKALLHMAAVCAATHMKSGDYKEYYDRRVAEGKHPLCVLNIIRAKLVSRMFAVIKRDEKYVKNYDRSSSKNYLSTPLQIS

SEQ ID NO: 434055 - protein, 343 aa, unidentified
MKITTVGVDIAKTVFQIHGVNEQGAPVLRKQLKRGQVLSLFANLMPCVIGMEACRGAHHWARQLQKLGHTVRLMAPQFVKPYVKTNKNDMADAEAICEAVSRPTMRFVPMKNGEQQAVLALHRARQGFVRARTAQANQIRGLLEEYGIVIPQGICQIGKRLPSILEDGENDLPGLFRQLLQRLGEHLKQLDLQVKELDSQILLWHRQHEGSCRIAQIPGIGPLTASALVASIGDAKSFENSRQLAAWMGLVPRQHSSGGKTLLLGISKRGDGYLRMLLVHGARSVLRVAERKPDYGTSWIAGLVKRRHLNIAAVALANKNARVVWALLRYERNYDARYQAAAA

SEQ ID NO: 434056 - protein, 407 aa, unidentified
MDSLKTVFGIDVSSRKSNVCIMVNGQKVNDYAISNDMVGFNQLLDDLKQVTNPQIIFEATGVYSRRLQAFLDMHELRYVMMNPLEAKRKTKDDLHQNKTDKLDAMYLAKMQSEHPQRLAYVQSEEYQELMANNRIYEQASHDLITNKNRLHKAIQLTFPEIEHLMANPRGKNYWSIVLKFPHPNIVLETKEADIIDFLKSLSGIGEKRANDLAQRLIRLAKLACPAVKKSSAHIRGLEMAINNILSAEETCQTALKEMAKLAPKRDLEILKSIPGIAENTALRIISELGDIRRFNNPNQLNAFVGVDPQVYESGNLTAHLSISKRGTAIGRKVLYLAINQIQSAKKAGNPCHIADYYEKRKRSSETASHKKAAIASIHKLLRTIFALITNDQLYSYDIAKHNQRLLS

SEQ ID NO: 434057 - protein, 361 aa, unidentified
MNATTAAIDLAKNVFQVALADANARVLEQHRLTRAQFERFFDNRKIARVVMEACGSAHHWARVFAARGIEVMLLPAHYVRAYVRRSKTDAADALALLEAARCADIVAVRVKSVEQQALQALHRTRSLWMGTRTSRINALRGFCREMGMHVPVGARTGLDAMARAVADDQSPIPALLRPLMQQLIDEIRVLEVRVAQLERQLAQVVRESPASKLLMSIPGVGLLSATAIVAATSGSVAHFKSARHFASWFGLTPKESSSGGSRRLGRISKMGDKYLRMLLTHGARSVLRAAKVATLKGQELLGVRHWALTVQGRTNHNKAACALANKMARICYAVLRDQTPFGQPATRLGKKMQRQSFGLAH

SEQ ID NO: 434058 - protein, 381 aa, unidentified
MDQKQATPEKELSTKFPVLYVAFELGNSTWKMACSNGRKVRQVTVSARDLEQVQHALLRTQAHFGMGEAAAMVSCYEVGRDGFWLHRYLQGRGIDNVVVDSASLEVDRRLRRAKTDRIDAGKLLRMLIRYHGGEKQLWRVVRVPSREDEDARHLHRELESLKRERTRHRNRIHGILMQQGLCIPNPSKKRFLEDLEALRTWDGKELPAGMKARLVRVYQQLRLVEDQISTLATEKREQLKQVDNAKIRQVAQLLRLPGIGPVSSWTFVMEFFGWRRFRNRREVAALAGLTPTPYDSGRKLREQGISKAGNRRIRTLAIEIAWAWLRYQPQSKLSQWFLERFAGGGTRMRRIGIVAVARRLLIDLWRFLEYGVVPEGAMLTT

SEQ ID NO: 434059 - protein, 461 aa, unidentified
MARRKRKISLPSDALPPPLATANLHAAGIDVGAEEHWAAVPPCDDPQPVRRFGANTADLEAVADWLWDCGVTTVALESTGVYWIPLFELLETRGFQVLLVDPSKMPRNGRPKTDVHDCQWLQRLHTYGLLSACFRPEDQGVVLRSSLRQRATLLADAARDIQHMQKALTQMNIKLQHVVSDITGVTGLAIIRAILAGERDPTQLARLRAPRCKQDEAAIAAALQGTWRAEHLFALQQALERYAFQHRQLAACDARIASHLETVADQSHGAPLPPKRGQRRRHRNRPAFDPREPLHRMTGVDLTRIEGIDETTALIVISEIGLDMSKWPSEKHFTSWLGVSPQRRISGGKVLSSRTRPSTNRAAALRLAAASLHHSKSALGAYFRRMKSRLGTPKAITATAHKLARLIYSMLKHGTAYVTQGLEAYEQQYRARVVKNLSRKARELGYELVKPVEATSETSLA

SEQ ID NO: 434060 - protein, 386 aa, unidentified
MKKNNTPEQSPSKRANKMSRKVNRTGQKSRQQTGPVTIGLDLGDKSSRYCVLNEAGQVVLERSVGSSKKAMTQVFGAIPRCRIALEVGAHSPWVSRLLERLGHEVIVANARQVKLISQSSRKNDRLDAQMLARLARVDPQLLRPIRHRSEQAQGYLTVIRVRAALVDARTGLVNAARGWAKAMGERLPKCDTDQMGEERLKMLPQGLREALRPLLQEVESLTGKIKECDVKIEQIARTEYPETCLLRQVSGVGTLIALTFVLTVEDKERFAKSREVGCFVGLRPSQSDSGESKPQLPISKEGDQYLRKMLVQGAHCILSKRGPDTDLKRWGVALSDRGGKNAKKRAIVAVARKLGILLHRLWVTGEVYEPLRNSQAAAKQKKTAAA

SEQ ID NO: 434061 - protein, 333 aa, unidentified
MSKSSQYVGLDVSLKETSICIIDDAGKIVWRGRVDSTPEAIATAMKQHAPNAVRIGLESGQLSSWLFHELKEAGFPVICVDARHAKAALSLKVNKTDANDAFGLAQIMRVGWYREVTVKGLDCQAVRALLVARAQIVSQITTLKNCVRGILKIFGRVLPKGLRSQFPGRVRAAIDGHPVLGAIIEPTLRVLEAMRTQLLVYDRAVIQRVGTVVALAYMTGVEDPARFKRSSSVAAYFGMTPRRYQSGEVDHAGRISKCGDGMVRGLLFEAAKVLLSRSARPSALKTWGEALGKCVGAKKATMAVARKLAVILHRMWTTGKTFQWNAEAASPAA

SEQ ID NO: 434062 - protein, 427 aa, unidentified
MKKADLLSTLFVGIDISSRENVVAVMDFESTKPIATFAVPNNEPGAEEMAKHILEFLNTESSLKRLVIGLESTSFYGVHIANYLSTSPMLMPYHTEVYCLNPKSIANYKKSYIGLSKNDCIDAFVIADYARVGRITTKPWRGCQYLALQRLTRHRLHLVKALTREKTYMLSNIFLKFSEFNTLDAEEQPFSNEFGATASAVLTEFLSTEEIVDMPMEKLVEFICEKGRNRFPDPQKTAKLLQAAARNSYRLDKCLYEPITVAIASSFTMISTYYAEIKKVNQAIETTIKGLNPNAFLSLQSIPGLGPVMAAGIMAEIGDISVFKSQESLAKYAGLVWRENQSGQFKADDTSMSKAGNSYLRYYLLEATSHIRLHCPEYSEYYSKKYAEVKTHQHKRALALTARKAIKLIFGLLAKNQLYSGNRVGQA

SEQ ID NO: 434063 - protein, 363 aa, unidentified
MKKDNTLIKSRTETVIGIDLGDKRSHICVLNEGGACVETGTVVTRPSGFEGRFKRIDPCRIAIEAGGQSAWVDELLTKLGHEVVVANPRRLRMIYENDSKSDEVDAEQLARVARLDPSLLHGIEHRKHSTRVDLGKARSRDMLVATRTTLINHVRGQMKSFGMKLGTRGAAYFHNWAREQVPEELKIALDPILDLLEQVDKQIKLIDVELERLANDVYPVTQLLRQVDRVGLHTALRFVLTVEDPFRIKKSRDAAAYFGLVSKRKQSGARDPEMHITKAGDSDMRRLLVQCAQQMLSAKGKESDLRTWGLNLAARGAKAAKKKAVIATARKLTVLLHVLWKTGQVYEPLKNTTGRVPSKAACA

SEQ ID NO: 434064 - protein, 406 aa, unidentified
MVRYVGMDVHREFAQLAVVEDGIVRDEGRIAVSPEALRQWAGGLRADDEVALEATGNSDAIATLLTPLVGRVVVSNPSKTRAIAEAKVKTDKVDARILAQLLAADFLPSVWLPDDRTRRLRRQVTRRAHIVRTRTRIKNQVHAVLARNLCPTPPVSDLFGKKGRHWLSCQDLPADEAATVAALLRQLDFHAGELALVDRELAIEALSDPVVARLMTIPGIDAIAGISIVAAVGDFTRFSDPDKLVSYLGLNPRVRQSGNSAPVHGRIAKTGRAHTRGVLVEAAWSAVRAPGPLRAFYRRVQARRGFPKAIVATARKLTILAWHLAVKDEDYAFARPALVTHKRRKLELAAGAPSRRGNHRQPGAAYNDKTRRQAETTAAEQAERAYEILVGHWQPRRPPPPPQPSP

SEQ ID NO: 434065 - protein, 429 aa, unidentified
MNNSFSVAQLIVAWVGLDWADQKHDICLRASGSAEVERTVVEHQPEALHSWVADLRRRFPQGQVALALEQSRGSLFYPLMNYEFLVLYPLPPKALADYRKALYPSGSKDDPTDAQLLLEFLRQHPERFRPWVADDVQTRQIALRSEHRRPRVDDRTALTNRLTALLKGYFPEARGWAGDLAAPRAWDFLAQFPSLERAQRASRLEVLKLYRAHTRRTPEQLEELGEQIRTALPLTTDRAVIATSGLMVQTLVEQWRVVQAGVERLEHQLRDLFAAHPDHEIFPSFPGAGKARAPRLLAAWGSDRQRFAGADNRPCFAGPAPITVRSGKSEWVHRRFAGPSFLCPTFHEFAAPSRLRSPWAKAYYQQMCERGADHHAAVRALAFKWIRIMFRCWQDRTPYDEARYQQALERRGSPLATTLRRLAASPARA

SEQ ID NO: 434066 - protein, 303 aa, unidentified
MATYYVGLDVHWKHTTICILDQDGKRVKRLTIRGAWSKIADELKRLPGKVSVCYEASSGYGYLHELFSKVVDRVVVAHPGQLRLIFRSKKKNDRADAEKLAKLLFLGEVPPVYVPSQDVRAWRQLVEYRRRLIAKRTRTKNALRAILRTVGQRPPREFGLWSRQGAAWLGQVELPELTALQRDLLLEELAMFERQVGRAEKELERYSRDNPAVALLRTIPGVGIRTAEAVVAYLDDPSRFASSKQLGSYFGLVPSQDQSGSTNRLGHITRSGPSVVRHLLSEAAWRSVQCSPTIGRYHERIQQ

SEQ ID NO: 434067 - protein, 370 aa, unidentified
MQTVNRSQTLFVGVDVHKDTHTAVGLSSFGEKVFEMTIGNETEDFISLVEKTKVEAEKSGLIPSFGLEDVHSWGERLSSFLVEEGLPVRAVAPILVDHRRSKMTHPEKSDSLDASGVAEVMIQKIDSLPLYKVTEEAQKAKQIRELSLEREWLVKERARLKNQLHILLHRIHNTGYRAKFKDPFSKKALRYWMRGAPKDTDAILEQRMKRAVRRLLDLREEIQEIEDGLETMMKDNGTTLSTASGCGTVIAAEIIGEVGDVNRFHSPGALAKYAGCAPREHSSGKTIRWRKTRSGNRRLNRSFHRMALSQISRSGNDAARAYFKRKVSEGKTKAQALVCLRRQLVNVVWMMMKHKTEYRYPQEKVVDFFS

SEQ ID NO: 434068 - protein, 394 aa, unidentified
MCQQYKTEASMIKHNILFIGLDTHKTFTEVAYIEDQRGARPIHLGKILSNKAAFKKLARQLESKYPDATLHFVYEAGPCGYWIYRLLTSLHHCCYVIAPSLIPKKPGERIKTDKRDALKLAKLLKSEDLTPIYVPEPEDEAVRDLSRARETTMKDLKDAKYQLKALLLRNNINSKVKDNWSLQHLRWLAELVLPHPCQQIVLQEAVSTITERLKRLKRLDNELTHQVKNWRYYPVVKAIQALRGVRLLVATGVIAELGDLTRFDHPRKLMSYLGLVPSEHSSGGKRRQGAITKCGNSRARRLLVEGAHSYKHNANISKEMQLRQEGLSKEVIDMAWQAQLRLCRRYSRLMHKGKHRNVVVTAIAREMIAYIWAISREVVLPVIDVKLRLARMPA

SEQ ID NO: 434069 - protein, 377 aa, unidentified
MKAPSTRPAAVLGLDVGKSSHWACLIDRDGEVLASAPVRNREAELDALFASAPAGTLVVVDQFRNIGSLAVRRARAAGLGVAYLPGLAASRAAGLFAGEAKTDERDAAVIARTALGVPDSLSGVPGRGEALEAARALSSQRDHVVACATRDKNRLRAVLLESCPALEAAVDLSDRRWLELLAGFGGAWGIARSGAEGPRAEAAGEAAAASTAPPPALVEAENRQVRFLAARISEALDEAGALEAETAALLEGDETYACLLTVPGIGPRTAAQLAVSVDIGRFPDHDHLASYCGIAPRVRSSGTSVRSVRASRRGDARLKSLLIFSCNSLVRSSGRYGEYYRACRARGMGHGRALKAVARKRLRAIYAVMRDRVPYRG

SEQ ID NO: 434070 - protein, 412 aa, unidentified
MPEPDNDAAGTYAGIDTHKDFHVVAVIDHLGRLLDTHTAMTTEEGYRQLLQWLSTFQPVIRIGVEGTGSYGAAVTATLGERGFNVVEVNRPNRQMRRFRGKNDTVDAEAAARSVLSETSSAIPKSHDGLVESIRLLRISLTSLRKCRTALTNSLRNVIVGAPPRMREQLEAMTSTGLVAHCARLRVSAGAPTDPVQALKLTLRALATHILAQTAELNGLRAHLTELTRTANPALLATPGVGVDSASALLVTAGDNPERLRSEASFAALCGVSPIEASSGKHVRHRLNRGGDRQANNALWRIAMIRGNSDERTRLYTARRTAEGKSPREISRCLKRHIAREVYSLLTAPPPIAGTDDLRPLRHRTGLAMQAAADHFEVSLTTVSRTERGIKPNHEFAARYRTWLSEHEPVPAV

SEQ ID NO: 434071 - protein, 352 aa, unidentified
MERQRLEDSEIVGGVDTHKQAHVAAAVDGVGRLLGTSEFPATSRGYRDLLRWLRGHGVVSLIGVEGTGSYGAGLARYLAREGVPVVEVIRPNRQLRRRRGKSDPVDAEAAARAALAKEADVTPKSADGPVESMRMIRLARTSAVKARTQAANQIDALVTCAPQSLRSQLKDLSLRRLVERARRWRPGDIQDPLSACRATIKGLARRWSQLGAEIAGYDEQLLRLTRRVCPELLARTGVGFEVASSLLVAAGDNPDRLRSEASFAALCGVSPLDASSGQQRRHRLNRGGNRDANRALWVVAMTRLRVDERTQAYAARRTKQGRTKREILRCLKRYIARELYSILRCNTLLTPP

SEQ ID NO: 434072 - protein, 344 aa, unidentified
MQITTIGLDLAKSVFQVHGIDAAGQVVVRKSLRRAQMLAFFSKLPPCLVGIEACGTSHHWGRELIKLGHEVRLMPPAYVKPYVKRGKTDAADAEAVCEAVTRPTMRFVPVKSPEQQAALSMHRTRDLLVKQRTQLINMLRGLLAEFGFDIPKGLERALLIARQVIDGKAPEVPIEAARIATTLSQQALDVHVRLREIDRDLVIWLRGNDVARRLMTIPGIGPVGATALAASVTDPHQFRSGRQFAAWLGLTPLQKSSGGKERLGRISKMGDKYLRKLLIVGMTSLVRRAKYAPGNIDPRLGDLLARKPTRVATVAMANKTARVIWAIMARGGTYRAGHQPALEA

SEQ ID NO: 434073 - protein, 344 aa, unidentified
MEEYIGLDVSLKETAISIRRGGRRIWRGKCKSDPDSIITLLHKHAPDARRVVFETGPLSIWFYHALTDAGVPAICIDARHAKAALDMAANKTDANDADGLAHLAEVGFYREVRVKGYDSMLTRTLVAARTRLVTICTELSNQIRGLMKTFGLVIPSGKGATFGNNVRMLLDGHQSLSRIILPLLKAWYGTREQAAELSRQLIAIARASQSCRLLMSVPGVGVVTATSFVTAIEDPENFKKSRSVGAWLGLTTRRYQSGEVDYDGHISRRGDAHLRGLLFEAATVILTRSSADSGLRSWGLKLRERLGFKRAAVAVARRLSVTMHAMLKSGQLFDRAVGMDPANG

SEQ ID NO: 434074 - protein, 341 aa, unidentified
MEEYVGLDVSMKETSVSIRRAGERIWRGKCASDPRIIAELIRKRAPAVKRVVFETGPLSIWFYHSLRTEGLPAICIDARHAKAALDMATNKTDANDADGLAQLAEVGFFREVRVKGFDSMLTRTLVGARTRLVRITTELSNQIRGVMKTFGLLVPAGKGSIFEKNVRSLLTDQDGLASIVLPMLEAWRGIRIRAAELGRQLVRDARQNQACRILMSIPGIGAITATAFTTAIERPDNFKKSRSVGAWIGLTTRRYQSGEVDYDGHISRRGDAHLRGLLYEAAAVILTRSSTDSTLRTWGLKLRERIGFKRAAVAVARKLAVIMHTMLKTGELFNPNAGAIA

SEQ ID NO: 434075 - protein, 371 aa, unidentified
MKKCTRFVGLDDSKNSIDVAVASEGREGEVRSYGTIPNTPEALKKLVRRLGRPKELYFVYEAGPCGYGTYRDLLALGTNCMVAAPSKTPRRPGDRIKTDRRDAITLARLHRAGELHPVWVPDEETEAMRDLTRAREDFKYAQTKARQRLGSFMLRHGRSFPGRSHWTKTHLKWLAEQRFAQPSQQICLDEYIGAVEQATDRVQRMEAELRELVAVWSMGPVVSAMTAHRGVSLVVAATVCAELGDLTRFDRVRELMGFVGLVPSIHATGLSRRVGAITKTGNGHVRRVLVEAAWSYRHPARRTVHIRRKLEGQSEEIQAISWKGQVRLCGRFRRMIARGKHPNKVTVATARELLAFLWATARMVSPMSPAV

SEQ ID NO: 434076 - protein, 401 aa, unidentified
MIDVSGTGAFLGLDVGKGEHHATAVTPAGKKSFDKRLPNSEPKLREVFGKLQTKHGTVLVVVDQPASIGALPLAMARDMGCPVAHLPGLTMRRIADLYPGEAKTDARDAFVIADAARVMPHTLRSVDLEDETIAELEMIVRFDEDLTGDAARISNRLRGLLTQIHPSLERVFGPRVQHPAVLKLLDQFGSPAQIRKAGRRRLVTPTRPKAPRMAERLVDDIFTELDEQTVVVPGTDAAALIAPSLASSLQAVLDQRKLLAARIEELLEKNHPLCKVLTSMPGIGVRTGARILIDVGDGRWFPSAAHLAAYAGLAPATRSSGSSIRGEQPSRKGNKQLERALFLSAFAALADPVSRAYYDKKISQGKHHTQALLCLARRRADVLFAVLRDGTFYEPQPAPSA

SEQ ID NO: 434077 - protein, 435 aa, unidentified
MICAAVERCAGIDVGKKWLAVCVMTGPLNGDAQVQQRRYGVNVANLEGLRDWLVKEGVTHVVMESTGSYWKPIFNVLEDSVKVYLANPKEVKARKGHKTDDKDGWWLAHLLRHAMIHPSFIPPRRIRELRDLTRRRARLQGAGTAEKNRVQKILEDANVKLGNVLSDVFGASGQLMLDALIEGKAAPEEIAQFAQRRAKRKIPEIVAALEGHQMSGHHRKMIRYSLSHMKFIEEQIEQIDEDIAAKIHEAGMDRQWENLQTVPGIQERSAANILAETGADMTQFPSARHISSWAGVCPGNNRSAGKNRSSRTTGGNPWLRGALTECAWAAAAKKNCFLKEKFWRITTTKGGKKNTALIAVAHSILLLSYEVLRTGQPYRDRQTPALSEPQKERLIRHHIRKLGKLGVRMRSHRPGHAPVEKGADAKGTQEATENT

SEQ ID NO: 434078 - protein, 396 aa, unidentified
MDTIWAGIDAGKTHHHWVAIDDSGRRLLSRRVANDEPELLELLDDVMALGDEVTWGIDLVDGGAALVIALLLNHGQPLHYLSGRAIHRASESYRGEGKTDAKDAAVIADQVRVRRDLHPLRTPDDTITDLKLLTGRRMDLVADRTRTVNRLRAQLAAIFPGLERALDLTNAGPLTLLTGYQTPAALRRLGVKRLATWLRNRRVLRADQLAETALQAAERQHTSLPGEKLTVQLVHTLAKEVLALNEKVAELDKNIETRFRDHPAFDVITSMPGLGVILGAEFMAATGGDMTVFGTADRLAGFGGVAPVPRDSGKISGNLRRPRRYNRRLQRVFYISALFSIRYCENSRRFYDRKRAEGKRHIQAVLALARRRVNVLWALLRDGRCYEPTPPPPLAA

SEQ ID NO: 434079 - protein, 381 aa, unidentified
METLHSHCAGLDVHQKEIVVCVYIGTSDTELTKEIRTFPTFTKHLFEMLQWLEDLHITHLAMESTGIYWKPVFNILEDYFDITLANAQRIKNVPGRKTDVADAEWIAKLLRYGLIEKSFVPPADIRELRDLTRLRKKMIGNMTAEKNRIQKTLECSNIKLGSIISDVFGVSGRKLLTRLVEQGYVNSHEVEENIHGSMMPKASQITESLFGTLNPHQIFLIRQSWNHILFLEESIEQLEEKIDELLSPYPEQVELLLTIPGVKKHAAASIIAEIGVEMRQFPSAQHLASWAGLSPGNHESAGKKKSTRTTKGNPHIQSMLCEVAWAISRTRHTWLSGKYWSLAARRGKKKALIAIAHKVIKIIYHILDQRSGFIEYSKVLS

SEQ ID NO: 434080 - protein, 408 aa, unidentified
MKDSGKRYIGLDVHKYYLIALGVDEDLNVILPARRVELSHLEAWMKKTLTKQDEVVLEMTTNTWQLYDELCAYVGSVLVVHPPHVALITRSQVMNDKIAASILARLLAKGLLVGVWVPPQEIREVRGLVTQRKKMTGLATQAKNRLHAVLQRHHLVPPEGNPFQAAQSAWWLALPLGKLEQVNVQSDLETLRFAESQRDRLTSMMEEIASQEEQVTRLLHLSGFGVVTAVTVWAAIGDIQRFADPQHLVGYAGLGTRVHDSGMTTRTGRITKAGRRDLRVVLIEAAQVAANSHPHWKAELARLEPRLGRNKAIVAIARKLLVAVWYILAQHKTDRFAQPEAIAQKFLKFAYQLGKENRPAGQSAAQFVRQRLDALQLGRELTRIAWGSKKPIPLPPSTNKVSDVPNTK

SEQ ID NO: 434081 - protein, 422 aa, unidentified
MTVTETEDYQWFVGLDWGSEAHVLCVLDAHGRVCGRRTVAHTATAVHEAVQWIGAQTGTAPAGVALGIETPRGVLVDTALELGFPVFALNPKQLDRFRDRFTVAGAKDDAEDAHVLGDALRTDRRAFRRVHADDPQILQLRDATRLREDLQEDVSRLTNRLREQLYRVDAAWLRLVPAADEPWLWTLLAETPDPGAWAAIPRRRIAAVLRAHRIRRVSADDVHAVLRQPRLTGAPGVAAAVAVRLAALVPHLQLVRAQRTAAEQRIDRLLAQLATAEASAGASREHRDVEILQSLPGVGRMVAATMLSEATGPMAERDYPTLRAHSGTAPVTKRSGKRAPVVHMRYACKTRLRQALYHWARTSIQCDAGARRYYDAVRAKGHNYARALRSVGDRWLRILVAMLKTRELYDPSRFVTSERRPA

SEQ ID NO: 434082 - protein, 400 aa, unidentified
MSVAIGVDIGAYKHAVAVCHSGEREADRRTLQISADRTGFRDLASWMGTLAEPISVVVMESSGHYWYNLASHLHRAGIPVAVVNPLESKYFGKRRLQRSKSDRADARTLAALGMHDQPRVHTPLAQSELREAARFTMRLVREQAEVGQRIQRLIDLGFPELREAWEDPTCVSALAVLRKAPTAAAVSRLRLETLAALKRPGAGGRAIGRAKAEQLKVLAKESVAAPEMEAQVAFEMRLLIQQHDFLDRQIAEAEAQLASLLDGETARRLLTIPGVGPATAATLLAEIGDIWRFADVDQLLAYAGVHPKEQSSGKKGERPETSWTMAKTGNAYLRAAAYRMAIVGITHNPILRNHYARKRAAGKSAMNAVGHCMSKSLSLVWGVWRSGQDFDPRHGEPRSA

SEQ ID NO: 434083 - protein, 392 aa, unidentified
MVLVGIDVAKDKHDCFIRSSEGEVLADLFTIQNNREGFDLLLQKLRSCSRPEHKINVGLEATGHYSYNILGFLLDNGLPTFVINPLHTNLYRKSLSLRQTKTDRIDARTIAAMLMSDVDLKSYTDTAYHNEELKSLTRYRFDIVSDRAKLKQSVSRLVNILFPELESLVPTLHMTSVYALLSEFPGAHQLAASHLTRLKTVLYDASKGRYDKEMANELREAARRSIGSLMPAKSLELQHTIRIIRELDKEIDEVEAAIKEIIDQMAPPILTIPGISYRMGAMILAEIGDFSRFDSPDKLLAYAGLSPSTYQSGKLNATGTYAHMEKRGSRYLRYALFNAAKFVCHWDPTFAAYLARKRAEGKHFNVAISHAAKKLVRVIFAIQKSGKAYQPA

SEQ ID NO: 434084 - protein, 401 aa, unidentified
MKRLSGGIDVGSESHHITILDEEDQTLYNQKVSHKLNEFTENIKQFKKIEKQEGGKISFALEGKNGYSNPLDRILLDQGFTLYNVDNFKLKRFREAFAGEWRDDERDSLMLSKMLKLKDYINSEKEKVFIKIEKPSLVTESLKLLSRHQQTLIDEKVRLVNRLGKKLLEVCPQILELGKVKNKKIIAILAKYPDFSKYKRITLKSLLKIRGIGKRQAPFLLKRLNNIEYMAGLTDIYKTIILSYAQRILQLQREIKDIDKSLDEIGNQNKEVNHLKTIPGVATKLASRLIGEIGDINRFPSGKQLAIYCGVACVNNDSGKVTKAKAVYKANKICKQTLITMAGCSIRSIHQCKAYYLKKRTEGKKHNHALRCLARQLIKVIYKMLTEDRDYIIRKELRKVA

SEQ ID NO: 434085 - protein, 367 aa, unidentified
MPRMPQAPTVRPAHHESAEAGDVVVGVDTHKAAHVAAVVNQLGVLLGSAEFATTSSGYQQLLTWARTFGQVRRAGVECTGSYGAALTRYLAGHQVEVIEVNQPDKRARRRGKTDAIDAEAAARAVLSGRATTRAKAADGPVEMVRVFKLAKASATKSRTQAINQLKSVLVSADSELREEMAGLSNPRLIRRCADLSTSDSPATIAGAAAYTIALLARRILELTSEINDLRQRIHESLTAHAPQLLARHGVGPDTAAALLIAAGDNPQRLHHEGSFAALCGVSPVEASSGKTQRHRLNRGGDRQANCALHTIVLSRLRWDPRSRDYLARRIAQGKTRREALRCLKRYVAREIHQLIAPRKQLQPPAAA

SEQ ID NO: 434086 - protein, 424 aa, unidentified
MHMKKYTRQIEKRQRISSRTLVIGIDIGSEFNAVCLMDKEGDVIGKYPKIYNSRKGFDYFRTIIEQARRKRGFVDVLIGMEPTGHYWRKIGFYALEQGYEVRFVRTTALKHQRELDESSSAKSDIRDAFTIGNIVREGKYIDTVIEDGVFRQLRTLSHTRERIVRYNTGSKHALKAVLDDYFPELSGIFWSMKSKGLRALLETHPFPDDVLMAGIPAIEALLAKSTKRRAQAREKAEKIYQAAGQSVGLKTIGQADRMRLAVYLDEVKRSEERLKEIACQITELLHQIPLAEHILSIPGIGAVTCGVFLGELGNPGYFKEPRQIIKYAGYDPKEHDSGLRTGRKIISKKGRWLLRKYLYFMAMRVVYRSIFFKEYYERKQKGSRRPLEKKEALCAVIIKLIRVIFALMRDKKMFTEEIRCLQAA

SEQ ID NO: 434087 - protein, 347 aa, unidentified
MNFYNQQHQFYCGIDLHSKTMHVCVVDHAGKKLLHRNFKNDDPQFWLKRIEPFRQDLVVGCESTFNWYWLADRCLEEELPFLLGHALYLKAIHGGKTKSDPIDSEKLAMLLRGGNFPTAYVYPKDMRSTRDLLRRRTFLVRRRAEAIGHVQLVRMQYNLPAFEKSIGYKSNRAGVAEQFDDPSVRLNIQTDLDLADQYDRVIQRMELYLEQHAKVHDPHTFYLLTTIPGVGRIIAMTLLYEIHNIGRFASVGDFLSYSRLVRGSHTSAGKTYAATGKKIGNVHLKWAFSEAVPLLKRQCEAAAQYAARIEKQHNKARAMSLLAVKLGRGVYYMLRHKQPFDVNTFFK

SEQ ID NO: 434088 - protein, 350 aa, unidentified
MTQFSKIIGVDLAKTVFQLALADAHHHVTQSKRLNRTQFHTFFVNHPPVHVVMETCGTAHYWARTLMAMGHTVTLLPAQYVRPYVRRNKTDANDAMALVEAARNRAIRAVPVKTEYQQALQSLHRLREQWKTTRTARINALRGILREFGVLVPMGPRAAITTTRAALDALPPLLHTSVQAVLDELTDIQTRITTLEKQLKHAVKEDVVIQRFMQINGIGLLSATAMRASVQSPAQFKNGRQLSAWLGITPREYSSGNQRYLGRITKRGDKYLRTLLIHGARSVMARNKIRQRNNEKLNSLQQWAIQLEQRVGHNKATVALANKMVRILWATWMHQRAFDGNYAGQELNAV

SEQ ID NO: 434089 - protein, 341 aa, unidentified
MKLIRVGVDLAKNVFQIHGVDRSEKAIWKRKLVRGDWIKALLDRIEPGCEIGMEACSGAHHWARLLQARGYTVKLVAPQFVKPYVKGNKNDANDAEAICEAMSRPHMRFVAVKTVEQQDVQAVHRVRASLIDQRKAKGNQIRGLTSEYGLVAPKELLHLKAAIPRWIEDQENGLSDRFRRLLRGLWQDLLALDERVQQLDQEIEQIARQDPVAVRLQQLRGIGPVTATALLATVGDASQFASGRQMAASFGLTPKQNSSGGKERLLGISKRGDAYLRSLLVHGARAVIRTAQAKTDRLSTWVMRIATTRHPNIAAVALANKTARIAWAMMTKKTDYQPQLA

SEQ ID NO: 434090 - protein, 405 aa, unidentified
MGIYVGIDWAEAHHDVCVLDEAGTVLGKRRIAEGLEGVGQLHALLADHAQEPDQVVVGIETDRGLLVGALLAAGYQVYAINPLAASRYRERHATSGAKSDPGDAKVLAELVRTDRHNHRPVAGDSELAASLQVLARAHQSLIWNRQRLINQLRSNLREYYPAALAAFGTELAHPVALGVLDAAPTPAIGRTLSRAKLVAILRRAGRERGLEEKAAAIQAQLRARQLAAPTLVSAAYGKSVASMVRIVRELNAQLASLEAELGPSFEKHPDAEIYRSLPGLGIVLGARVLSEFGDDRTRFAHPKARKNYAGSSPITRASGTRRVVLARMARNRRLADACHQWAFCALTSSVGARDYYHRLRQRGKTHHQALRALANRLVGILHGCLDHRQTYCEDLAWPSSLMVAA

SEQ ID NO: 434091 - protein, 356 aa, unidentified
MNYAGIDYHKRYSVVCIIDEAGAILQEERIEHGFPERFQVLLGKHAPMEVAFESTMNWCWLHEILEEIPGIARIVMANPLHVRLIAAAQVKTDKIDSRKLAKLLRAGLLPPSHIPDRATRMRKEVLRQRTFFVRMRTKMRNRIHRLLGRQHGLTMPQVTDLFGKKGRAALDKLVLDAPDDLLLRQQLEMLDFLAARIRELEKQIAADSHNDEDVKLLAGIPGLGPILGNVIATEIDGIARFDGSESLCAYAGLIPSTSSSGDKTHHGRLVPGCNKWLRWALVEAAWVAVGCSAYFGGFYRHHRARGKKANTAIMIVARRMCQIIYRILKERRPYEARSGVKDVPGRSQHGRTGRAA

SEQ ID NO: 434092 - protein, 339 aa, unidentified
MKITTIGLDIAKSVFHLYAVNRMGRYVQKKQLKRRQLLPYLARLEPCVIAMEACGGAHHWARELKVFGHEVKLIAPQYVKPYVKGNKNDYNDAEAIAEAVQRPGMRFVPIKSVDQQDIQNLHRQRERIKKARTALVNQVRGLLTEYGIVINQGVTAVRSGLPDILEDADNGLTLRSRELFADLLEELRLLDERFKHSERQIVASNRGNEVCQRLDEILGVGPITASAAYAAAGDGKDFVNGRHFSAWIGLVPGQHSTGGKPTLLGISKRGNAYLRTLFTHGARAVLRHSATKTDRFSVWAQALLERRGHNKACVAVANKLARMAWVIMARGETYRPAMP

SEQ ID NO: 434093 - protein, 347 aa, unidentified
MNERTANVERLAIDLAKNVFQLAGEDARGQVVFEERLKSREAFSAFLRQLGSRVTVLMETGPGAQAWARELQGRGVRVRILPAQRVAEHRSGAKNDRNDCRAILRADRDDTIQPVVVKSTEALAMQALHRVRSGYLRRKTAITNQIRGLLLEHGIAAPQGVAALATRVPRILEDATQPVPALLRELVGELWAEAVHLSAGVEALSARLETAAREDPLARRLMRVPGIGPITATALVAKEAHPERFPNARQFAAYFGLVPEQHSSGPRVRLGRMCKRGDGYIRSLTIQGAHTVLRQLRDDRQDPDSRRLRRWNERHGRKGAAVRLANRNLRIAWALLCREDDYRRTPA

SEQ ID NO: 434094 - protein, 334 aa, unidentified
MQNVTLIGIDLGKHSFHVHAQDKNGNALLRKKFSRNPLTAFLSTCAASTVVMESCAGAHFMARHISQFGHQVKLISPQFVRPFVKSNKNDFIDAEAICEAVSRPSMRFVTPRTEDQQAMSALHRVRDAIVRDRVKTTNQMHAFLLEFGISMPRGIAVIRRLAAVLEEHELPPYLARLLMRLHQHYAYLTEQIEELEQELKTHMADDDTAQRLLTIPGVGLITASLLATKLGDGKSYASSRDFAASTGLVPRQYSTGGKSTLMGISKRGDKNLRRLLVQCARAFMQRLEHNQGRLADWVKAQLSRHHSNVVACGLANKLARIAWSVTTHRTAFIQ

SEQ ID NO: 434095 - protein, 428 aa, unidentified
MDEVNRNRLEEFRQLRQEIRQSQQYLIVGIDVAKDRHHAFFGTAMGKTLLRRLVFSNDHEGFRKLLDQAEALRVGHALKKVVYGMEPTANYHKPLGEYLITLGRTVVLVSGVTVKRNRESLDGRWDKHDVKDSANVADLISQGKCLYYEYPSAELRGLRGLLSLKRRLKKQEHGYRVRIRNHLIAQYFPEMDRDYERLGAVGLSIVRWCFPTSQITELDVEPFIERVSSRRIRMETRRRLVGVWEKAGASIGCDAVPGLGHEAKVMVEGLRQIREMIKETDGKIEELCEQFPEYPYILTIPGFGPDVSAKVLGAVGDPDRFQNGKQVLKMGGLDLSADRSGKDSDKAMPEISKRGKADLRYALYQAALIASHKNRDVMIYYTNKLRGREREKGIHNKMRVKLAAKLLVIAWTLMKKKEKFDPTYLNVG

SEQ ID NO: 434096 - protein, 335 aa, unidentified
MEFEFFIGIDVSKNELDFSIHQGKTFLFHKEIINDPEVINALLKELSKLEGFSMSKAVFCLEHTGIYSNHLLSCLYKKKANICLESASQIKKSLGNLRGKNDKVDSMRIATYAYKNRDELRLWSPRREEVQQLAHLSSTRSRLIKTKKILKTPLKEYGTFVKKKAAKQNTSLCNKALNGIEASLEGVEKEIMNIVHADPELRRLFTLVTSVVGIGKVTAIQLIVTTNEFKDINNASSYACYAGLVPYLEESGMFKGKGRISHMANKKVKTLLHMAALVAIQYNEELKLYYERKVNIEKKNKMSVLNAVRNKLVQRIFSCVNQNRKYEKNYLKLVA

SEQ ID NO: 434097 - protein, 393 aa, unidentified
MRHVVTVLIEGDDGTLSKHQREFGGFKRDMKAMAAWLQELGVEWVVMESTGIYWKSAHAHIERVGIPALVVNAHFIKYVPGRKTDMGDSEWLAVLARFGLVRGSFIPPKDLRELRLLSRYRRKVSQMLASETNRMHKVLEDGGIKLGAVVSDIKGVSAREMVAGLIEGKPLGEMLAMARGSPKNKRDDLAVSLDGDLSPRHLFVLRQLHEHVTALERQLAQIDAELFQAMTPYHWAWVLLQTIPGMDAIASAMILIEIGDDMSRFGDADRLASWAALCPGNHESAGKRKSGKTRKGNAIVRYLLCECANAARMTKSSLASKYRNLKVRKSHNKCIVAIAHKMIRIIYFMLSRREPYRDQGVNYEAMSARKNASRWIKALKNIGKLPEATAASA

SEQ ID NO: 434098 - protein, 346 aa, unidentified
MGKPIINLSSVTTVGLDLAKHVFQVHCVDASGCVVAAKAIRRNKLLEFFASLPPCLVGLEASGSAHHWARELIKLGHEARMMPPAYVKPYIRRQKNDAADAAAICEAVTRPSMRFVGVRSLANQAALMRHKAREMLVAQRTQLLNGLRGHLTEVGVIAAQGPRHARELAELIEACDETIPFEVCEALAPLVAQLRNLDEAIARLDRTIAKLAQRDETARRLMSIPGFGPITASAMAATIQDTSSFAGPREFAAYLGLTPKQNSSGGKQKLGRISKMGNRNLRKLLVVGAHAVLFHRKPHTDPLRMWAKKLIEKKPFKLVAVALANKMARIAFAILRGKTVYREIPA

SEQ ID NO: 434099 - protein, 375 aa, unidentified
MTRFGGLDVHKDSIFLCIIDGNGVIYREKYGVLTPALEALSLTMQEYGVTEVAMESTSIYWIPVWRVLEGKFNLHLVNPYFIKQLPGRKSDVKDAEWIATCLMKGLISDSFVPGETVQQLRQYDRRIFDLNAEIVRKLGKIDAGLQRCNIRLSNYVSSTDGKSYTNVLKKIVKGVTDPEVLIKEVHGRTINRFGKDTILAALTGVFAQSDIDTLRQLSEEVELARKHKEECQAQMDQICEECFKKEYDALQTIPGVKSRSAASIISAIGTDMSVFKTSSHLVSWAGLNPRNEESAGKIKSRKTTHGNKQIRKTLIECAWAAKKKKDSYFNRYSYRQCVVRKKGTMKVQVAIARKILVAAYHIISKGEVFKEAAAA

SEQ ID NO: 434100 - protein, 401 aa, unidentified
MEGPIVSIDVSNGNSHYMCFIKNNKRFGKVKKIDHDIEGFKRLLEDIQKLEAETNEKVCAVFEATGVYTKPLERFLSKNSIKTYIINPLESARKRKEEIHNKKTDKLDPISISKVYYDKEEMMELKKKDETYNWLRKKNRLYEDQLNHLRKYKVTFQNQLSICFPGYLDLFKDGYSDIPMTILKKYPHPDLLKNKKAETVARYLEKNTCHTHKISLEYALKIIGFAKKTYPGCEKDDVEVEIFKILLDKVIETQRECEKTLNEMITVASTLEEYRYISSIDGIGPNLAARIIAEIGDIEEFKSREALVAYAGLDPHIYQSGDQDGKHLKISKKGNKYLRCLLFLAVGCSIRGAKDNPVNRFYQKKKQQSNPLNSKAAKTACTAKLLKIIYGICKNKTTYKR

SEQ ID NO: 434101 - protein, 350 aa, unidentified
MIIIGCDYHPGFQQIAFVDTDTGELNERKLGHREEAEQFYRQLKVRGKKVRVGMEASGHARWFERLLTEVQFELWIGDAAEIRTKRVRKQKTDRQDAELLLRLLIEDRFPRIWVADGENRDLRQLLWHRHRLVQMRTRIMNQLHVLALNEGVRRKKALWRPAGRAQLQSLVLARWASRRRQDLLELLDQLTPKIQELTRALEQEVEKRPVARRLMTHPGVGPLTALAFELVIGTPERFGCGKQIASYVGLVPSEESSGDRRRLGHISKQGNSLLRFLLVEAAQVTVRTDPDWRRRFLHLAMRRERRIAKVAMARKLAVRLYWMWRKEWDYEQMRKFGSHVGEPGNRQGAS

SEQ ID NO: 434102 - protein, 330 aa, unidentified
MKGYKQFFGADISKRTVDVTMLHGSQNAHQQFSNDKSGMQKLLDWLGELEIKHDEALFCMEATGLYCFALTQFLVANELDVWIEHAAQIKKATALARGKNDKIDSHRIASYASKNLERLRLWKPMDSTLEKIKHFAALRERIVETQKKLVVPIKEFEEAGNHEMAKLLRRTIKRSVAALDADLNNIEKQMMEIINADAVLSKKYSNAISVVGIGFVTAINLMVHTNGFTQMNDVRKLACYCGVAPFEYSSGSSIRGKTKVHFMANKKLKCNLHMASLTAIKLDTDIKNYYERKCAEGKNKMSVLNAVRNKLLARVLACVNKDRLYVNKAA

SEQ ID NO: 434103 - protein, 358 aa, unidentified
MGLYIGLDCGWKWFRYEVRDEKGRRIGWGRGECCPGVLHGVLSEYAGEEEVTVAYEGGTGLYWIHDTVKGLGFVSHPFHASSFKMIVESKKKTDKMDAKKIAEAAWKGYLPKEIVVPEGWERTLRQWVSRREFLRKQLVGLGNNLHALGMSIGVRLETESLALEEERWERVLSDWMERVKEEAIIEQAKCLYRLALGYFQVLEEVEERIEALMKEKPVSEAREVLQSYPGIGPVTSAAILAWTGVKAERFPGGREAASYFGLTGSRYQSGERDRGGRITKTGPPIVRRLLVQAAWSFVRSRAGKNSAWGEWYRQVLRRRGSKRAIVGLARKILTGVIASLQSETRWDPGYWVRGSKSV

SEQ ID NO: 434104 - protein, 406 aa, unidentified
MIFVGIDWSEEFHEVELQAGSGRVLKRLKLRADLAGLTRLQEVITDAAEEPSQVVVAIEASHGLLVNALVASGYRVYDINPLTAARARQGESPAGSKSDAGDAHLLANLVRTKRQDLRPLAGDSEQAQAVHIRARSHVRAIRHQQRLRNQLRSSLAKFFPGALPLLGDEPEELRDALAVLTLAANPVQARRLSLNKLRASLARHGRQRNLDAKAAQIQEQLRQPQPELSSAKVLSAHSDEVRYLVRSLVQVRSEVALLEEQLAQDFEEHPDAKIILSLPGLGVVLGARVLGESGDDPTCYANAKARKNYAGNAPITRRSGKWEARNRRVARNRWLADATFLWARSALSASPGARRYYDQLRARNKTDNVALRALANRLVGILHGCLRTRYIYDESIAWPGVLEHAA

SEQ ID NO: 434105 - protein, 352 aa, unidentified
MIVLGADMHKTSHTIAGIAATTGEMFGDKAVSVGVRGFDQVLQWARGLGRDRVWALEDCRHVSGSFERFLIARGERVVRVPTRLMASSRRSSRERGKSDLIDAVAVARAALAEGLETLPTAELAGPELDIRLLVDHRERLVRARVALNNTLQWHLHDLWPELELPGSCLFYGKWSARIARRLARAEQTMRVRIARDELRRLRELTQAINALEAEIAELVGQVAPQLLDEPGFGPLTAAKLVGEIAGAARFATDAKLARAAGLAPIPVSSGRTDRHRLDRGGNRQINAAIHRVAVTRARCHPETIDFVARKKTEGKTHREAIRSLKRHLARRIWQLLRAPHPVPETTPHPSIS

SEQ ID NO: 434106 - protein, 340 aa, unidentified
MTITTVGIDLAKNVFAVHCIDQNGKAVLVKPKVSRAALSELIAGLPPCVIGMEACSGAHYWARLFRQYGHDVRLMAPKFVSPYRMAGKTGKNDAADAIAICEAVQRPHMRFVPVKDESQQAMQCLHRTRQGFIQERTATYNRLRGLISEFGVIAPQSTDALRHVVSDQKETLPVQVRLCIADLLTHVTNIEEKIAEYDRVLSRVAKTDHRSQQLMELKGVGPTTASALVASIGNAHDFKNGRQLAAWLGLTPSQYSSGGKSKLGRITKAGDAYLRTLLVQGARSVMVGAENRTDPFSRWVCSLIGRRGYWRAVVAIAAKNARLCWASLHYGDDFRLYSTT

SEQ ID NO: 434107 - protein, 328 aa, unidentified
MSYVGIDISKDSFVVAFSSASKSKTITYQNDDKGIEKFINTLDKKQHHCVMEATGNYGVNLLYHLCEQEIKVSLINPKQSNFLSKMKLSTAKTDNKDARLLVEYGEKMNPEVYKMPSDKIILLKQKQTVLTHLIKQRTASKNQLKSLELLNKKDNLAIDMLKNNIDNLDKLIYNLEKDIVSITEEEFEKQVQLLTSIKGIGKKVATTLVIITNGFSFFENPKQLSRYIGICPTYQQSGKSLNYNGHINRNGHSTLRGQLFIASWSATKYNSSCKALFERLREEGKPWKLAQIAVCNKLIRQAFAVIKSGVAYIDGHVPTLSVPMQTAI

SEQ ID NO: 434108 - protein, 417 aa, unidentified
MNQYAAYLGIDWADKKHDLCLFDVATGKKTKLVLPHTPQAIAEYFTGLRLRYPGQPIAVALEQSRGPLLFALLQYDFLVLFPINPTTLAKYREAFSPSRAKDDPSDAEYVAELLLHHSDRLKAWHPDDDQTRTLRYLVEHRRRLIGDRTRITNRMTSLLKCYFPQVLSWFPDLSTLLVCDFLWRWPALERLRGVKRTTLLNFFRAHHSVRAVTLEKRLAAIKESVPLTTDRAIIDSSVLMITALAAQLKTTIAAVRQFDLEIEKLCAAHPDFPLFQSLPGAGQVYASRLLAVMGTDRTRWTTAADLACLSGIAPVMERSGQSGWIRWRYFCPKFMRQSFHEYAGESVKHSFWARTYYEQQIAKGKSRQAAVRALAYKWIRIIWKCWLTRTPYNEVKYLESLRKKGSTLLSYAAKNAA

SEQ ID NO: 434109 - protein, 409 aa, unidentified
MEAIVERCCGLDVGEATVTACLLVGKSEEKPHKTLRTLGTVTRELIALRDWLIADGCTHVAMEATGVYWIPIFVVLEGYFDITIANAQHIKAVPGRKTDVKDAEWIADLLRHGLLKKSFVPPEEIRELRDLVRYRRKLIEGRTAERNRLLKFLEGANVKLASVVSDVFGASGMLMLRALITGEATPEEMAQMAKGRMRRKLRELELALEGRVQEHHRFLLGLQIRRLEQMEADIGLVEARVREKRGPFREQVELLTTIPGVSDLVAAAIIAEIGVDMSVFCTAARLAAWAGVCPANHESAGKRKKAGVRRGNTYLKTILIEAANAAGHTNGTYFKDKLIRLQARRGRNRALMALAHKLLIAVFHILANKVPYRELGADYLDTIKPIRTAQTLVRRLQRLGYKVQLERAA

SEQ ID NO: 434110 - protein, 426 aa, unidentified
MVECLTVAAGISLAARETICNAPQVCRIVDLPVYYELETNNGNRDYRIQIGGHYMNYNTVYVGMDVHKESFTLCSCKYEDEKASHYQRTPASYKNVLRYLAFLRTIYGEDTRFVCGYEAGCLGYSLYHQLENFNVECVILAPTTMLEQRSKRRIKTDKRDAEIIARSLAQHNYSPVHIPTETDNQTKEFIRMRDDHKAELKKIKQQILSFCLRQGYQYDGSGNWTAKHVKWLRSLKPAGLYKEILDEYLLTYTILTDKLNRLDQRIEELASKEEYKESVSKLTCFLGIKTHTALSVIVEVGDFQRFVSARKFAGYLGLVPGQHSSGDDRNGLGITKAGNTHVRRLLVESAQSYTRGKIGYKSRVLRSRQAGNSPQVINYADRANERLRRRYYKMVLKDGKKYNIAKTAIARELACFIWGMMTDNIY

SEQ ID NO: 434111 - protein, 424 aa, unidentified
MNCNQNFKISQVTEGTLVLGIDVGSNTHYARAFDWRGLELSKVFKFKNSFEGFQSFVLWVNDLCCKYNKSKVIAGLEPTGHYWFSLGELLKENNITIAIVNPYHVKQSKELDDNLQTKNDSKDPKVIAKLVIDGRYSFPYIPEGIYGELRVADKLKNDITQQIISIKNKIHRWLSIYFPEYEKIYSSIDSKSGFLLLKETPLPKDIVELGSEGIVERWKQTKLRAVGLDKAKKLEEAAKKSIGCKNITSSARFEIKLLIEDYEYKQNQLNSITEELNKLCEKIPMIKEIAEIKGIGIATAISFVAEVGDIRRFKSAKQVQKYAGLALKENSSGKHKGLTRISKRGRKKLRTILFRATISLIGFNKEFSSIYNYYIERKDNPLKKKQALTAICCKMIRIFFTILSKGIKYDETKMLHDIKRPVAA

SEQ ID NO: 434112 - protein, 428 aa, unidentified
MKIKIIEGIDQLDNKALDVAFDVSGESLDYSSYCLTERGKELWEGALSNRAGSIKKELLELDALAREKGYPGIRVLCEATGVYHRKLLKVANKLGMKTALISGEAVNMTQVVQSNDYIKSDEKDPKTMLLVSKVGKPLKDRNLSGGWLVMRQLNLEYERNQCDGTRFKNRIRQGLFELFPDLGFKSQWIFESRASIAIAELYGFNPYRIIDAGRSGFTQKLRRRKLRKQTINRLWEYAKQSTIMLEDKGITDCLEDEIRELHAHLQNLLSKRLELRSRMVAELEKLHRKGSVNIDPHAAPVGPFMLARTFAETGPLSDFINSKKLLRYAGLNITCRSSGTFKGQDKIAKKGRARLRRCLQQASLKLVVKGGLYGEYFHAKKASGKSGNQAMVAVSRKLLKMLFGLERSGGVYNAERVFQNQLPLRQAA

SEQ ID NO: 434113 - protein, 386 aa, unidentified
MKTVAGLDVHKDSVYLCILRENGEKIERVYGVLTPQLDSMRDFMAENEVSEVAMESTSVYWIPIWRVLVDSFELKLVNPYFIRQLPGRKSDVKDAQWIAECVMKELIRGSFIPPPLVQQLRLYDRRIFEINAELVRKYSKIDAILQRCNIRLSNYVACTDCKSYKAVVKQISEGVTSPQELLRHVHKRIINKHGEDTILAALTGVVSDAEIDMLAQYVAESALLEDNKNKCIEKMREICNREFEEQMKNLQTIPGVSERSALTVLAEIGPDVNAFPSAKHLVSWCGFNPRNDESNKKIKSNKITHGNRFIRIASVQCAWAASRTKDCYFSKFYAFHTQVRKKFKLKVVVAVARKILVCIWHILKFNVSYKDFEPQKSVAKDSTQLA

SEQ ID NO: 434114 - protein, 285 aa, unidentified
MEQSILYVGLDVHKETIAVALAEAGLREDVREHGKIANTSAALKVLTGKLTGQRRELRFCYEAGPCGYAIQRQLSAMGYECAVVAPSLIPRKPGDRIKTDRRDALNLARLHRAGELTPVWVPDQAHEAIRDLVRARQAAVRTLRQARQQLSGFLLCHGQHYHRPAWMLLHRRWLASLKFDQAVHHIVLEDCIAAIEAATARRDRLEAHIEAALPEWSLAPVVEALQALRGVGLVAAVTLMAELGDITRFNNPRQLMAYLGLVPSEHSSGHTRRQGGLTKAGNGAC

SEQ ID NO: 434115 - protein, 345 aa, unidentified
MPSIVGGLDIHRKQLTFDYLDTVSGEVACGQIAPADRGHLRSWLARRFEDPGEVAFAAEACTGWRYVSEELRRAGIEAHLAEPADTAAARGRKKRAKTDRADARLQRELLAQGRLPECWIPPSHVLECRALLELYHDLRAEHTAWVQRAHAVLFHQGAPAFRDLSRADAPAELAELARGHLSAAGQVQVGAYLRMLAAVEAELDATRRRLLAAARQLRGAKVLAESIYGVGPVTALALTCWLGGAGRFTSSRKAVRFAGLDVTVYSSDSKRSPGHLSRQGPPVLRWALYEAGKTHARPAAPDHGYYAAVKDRKDGKRAALSEARKIVRRACHILTELGDDALATV

SEQ ID NO: 434116 - protein, 342 aa, unidentified
MKQYVGLDVSQKETSVCVVDESGKVVFQGRARSDPGALAELLSKRAPGAERVGFETGAMSSWLWHELNRIGLPVVCIDARHAKAVLSVRMNKSDENDAQGLAELVRVGWYREVKVKSPESQATRSLLVARSRLVAIRRDLENQVRSMLKEHGLQFSRSIGSQFRRKVLELLAEDHPLRSVIGTLLRVHEQTCEEQEKLDRQVRRLAHDDCTTRRLMTVPGVGVVTALTYRHTIDDPSRFSSASDVGAYLGLTPRRKQSGETDVSGRVSHWGDRLLRTYLYEAASVLMHRTKKWSALKAWGIRLSKRIGMKKAKVAVARKMAVLLHCIWVDGTSFQWGSEKTA

SEQ ID NO: 434117 - protein, 319 aa, unidentified
MNSTSIAHRRNKERNVGIDVGKSCLDIYIFELDLHWQEDNSPEGIKQLISKLRRYKLTRVIVEATGGYERRVAEACAEKNMPIVIVQPIQVRQFAKAQGILAKTDKIDAKLISQFGAVIRPDIRSLPSKKIRLIKDLLARKRQLKGARTRELNRQHKAPDILAASHKRLIKILDKEIDWVDNKLSKHVSEIAEWQRTYEILSSAPGVGDGVAYTLLGDLPELGQLTSRKISALCGLAPYNRDSGQMNGKRRIRGGRAPIRTVLYMAMMSAIQHNPIMKEFYDRLVSQGKHKKVALTACMRKMMTILNAMVRDNVEWKTA

SEQ ID NO: 434118 - protein, 370 aa, unidentified
MKKRITFVGLDTHKNSIEVALADDGRNTEVRLYGTIGGDLTSLDKMIRKLQTAGAELRFVYEAGPCGYEIYRHLRAHGFHCDIVAPSMVPKRSGDRIKTDRRDARNLARLYRAGELTPIYVPQEDDEAMRDLVRGRQDAVNAQRKARQQLGGFLLRHGFRYPGKCVWTLAHRRWMAEIIMPHPAQQIMLQEYIHSVEECTQRVHRLTEQILQLMPDWRMHPLVTALQALRGVAPVVAATAVAEIGPMGRFERPRQLMAYLGLVPSESSSGGSVRRGAITKTGNGHARRALIEAAQAYSHPARISRVILKRQEAVPGPIRQIAWKAQLRLCARFRKLTARGKSRNRVVTAIARELSGFMWAIAKQVPVPQD

SEQ ID NO: 434119 - protein, 351 aa, unidentified
MSHKSAPPIVSTIGIDLGKNSFHLVGLDQRGAIVWQLKCSRAQLERRLANIPSCLIGMEACSGAHYIGRQLAALGHDVRLMPAQYVKPFLKGHKNDYRDAEAIAEAVQRPTMHFVAIKTPEQMDLLALHRVRSRLVGQRTGVINQIRGFLIERGIIVRQGVVPLRKALPDILSSNTSGLSPRMVNLICELAQDWRRLDERIAAVSAEIEALAEQDEACQRVMTVPGVGPIISSAVVAAIGNGAGFTQGRDFGAWLGLVPKQESTGDRTILGKISKRGNKYLRTLFVQAAHVVLARRPSAAMRGLWPWIEQASRRLHRNMLAIALANKLARIAWAVLARGHSYQPRIVADAA

SEQ ID NO: 434120 - protein, 347 aa, unidentified
MEQMNLFAGLDMHTESITATIKDDQGNPVRVLQVETNKEGVKKLFDRLQKKHISAVFEASRNWPRYAELIQPYCNKVIMAHPLKVRAIASARIKTDVIDSNTLSDLLRANLIPESYMPPLDIVELREVLRYRAGLSRMRGQLKTKAKNILSREGKKCDFDEVTGKRARLWLNHLELNVLNRKELDYTVALIDNLSLEIVKFDKEIEQLQYKYPEVEILKSVIGINTFSGMMILAEMADVSRFPSPNKLACYAGLVPSTYQSSQTQYSGKITKQGNAYLRWILTQCTHASIKSRYSHKLKSFYLRIERKKGKQKAIVATARKMLTTIWHLLNKNEYYAYRDIPSKNGL

SEQ ID NO: 434121 - protein, 380 aa, unidentified
MKIYVGIDIAKLNHFAAAISSDGEIILEPFKFTNDADGFQLLVSKLESFDKNSIIIGLESTAHYGDNLVRYLVAEFYQVCVLNPIKTCQMRKNNIRKTKTDKVDTFVIAKTLMMQDDLRFVSFYDLDMMDLKALGRFRQKTIKQRTRLKIQLTTYVDQVFPEIQYFFKSGLHQHAVYALLKEAPSSKEIASMHMTHLANLLKVNSHGHFTKEQAKELRVLAQKSVGANDSSISIQITQTIQQIELLDSQLEKIEAEMTDIMRFNDSVIMTIPGIGYINGGMILGEIGDIHRFSNPNKLLAFAGLDPSVYQSGNFQAKTTRMSKRGSRVLRYALVNAAWNVVRNNATFKAYYDAKRLKAGLTTMHLALCRQACQSHLEDAH

SEQ ID NO: 434122 - protein, 380 aa, unidentified
MDVHSTNYTLCAMEPTIGAEDRIFGEMQVAPDYKEVILFIESLKMKLGFYDDYSIECGYEAGCLGYTLYHQLTGAGIKCVILAPSTMLTQQGQRIKTDKRDARLIAHCLCYGGYHPVYIPTGEDDAVKEYLRMRDDHKLALKKIKQQINAFVLRHGQQYIGTKWTIKHVTWLNKLELDPIYRETLNEYMASYEEQSAKIERYDKRIEEIAAELRYQENVKKLECFLGIRTHTALSLIVEIGDFKRFGKGNTYAAFLGLAPGERSSSTNVNRLGISKAGNTHLRCLLIEAAKGICKGSIGHKSKELRSRQSGQSAEIIAYADKANTRLRSKYYKMIRHGKKKNVAVAAVARELACFIWGMMTGNISVASKTGTSVPAASQG

SEQ ID NO: 434123 - protein, 353 aa, unidentified
MIVLGADMHKSSHTIAAVAAASGELLGDKTVRVGDRGFAAALDWARGLQDERVWALEDCRHVWGAFERFLLGHGERVVRVATRLMAGERRGGRDRGKSDLIDAMAVGRAALREGVDRLPVAELAGVELDIRLLVDHRERLVRMRTALYNDLLWHLHDLWPEQTFPACALLSKKWTARIARRLARAEQTARVRIARDELRHLRELSDTINLLEAEIADLVARVAPQLLAEPGFGALTAGKLIGEIAGAHRFSSDAKLARAAGIAPIPVSSGNTNRHRLDRGGNRQINTAIHRVAITRLRCHPETKTYIERKRGEGKTNREALRCLKRHLARRIWHLLQPSPPVLNNTPNINLLT

SEQ ID NO: 434124 - protein, 356 aa, unidentified
MGIFLGVDLHTRNQSICWIDTAQGEIHEARLDHQRDEIRGFYEGLPAPAVIGVESTGYALWFHKLVEELGHTLLVGDALAIRQLARRRQKNDRRDASLVLDLLIRGDFPAVHVPSAASRQVITLLRYRRRLVRIRTTLKNGLQAVALNHQLRLGARLFSAQGKLQLSSLPLTGASAIEREHSLQLIMVLDQRLGKVDQELEACAQKDARVQRLRTHPGVGVQTALAVVHFLEPVSRFRRARQLSSYSGLDPVEHSSGDHQRYGHISKQGNRLLRFLLIEAAHQLVRRGQDPDLRRFYYRLWARKNSSVAIVAVARKLLLRLYRMLCEQIDYEEFRRRGRDAGSARSVPSPAFAVTD

SEQ ID NO: 434125 - protein, 535 aa, unidentified
MATHIGITAPRLAKSPRRRKSRFPETVQKPRGALAARVKEVGAEKFALVCIDPAKQRSEWMMADYLGNILIQPQTLEHQSVHFDLAVQLVREAQQQHGIAEVLVTVERTGSYHLPPQRAFARAGFSTRVVHPFATKQFRLPADPGNKTDRTDLMAQHRAAVAGFGLAEAIWDETHRRLQLRIRHRRDLVEKSTALICQIREHLHLSLPGYAELFSDLFTHSAALAIARACDSPAAMLQLGQAGLRQKLREQQIRVQAPTLDKILAWACQAARQVPTPEASPRHALWTDLDDLRQQLRRRIQSLEVEIADDLVRTPYVRLMAIPGIGVVSAADFAGEMGPIANYANANAITGRSGLFPSRYQSDTTDHADGPLVRQANRSLRAAILRIADNLARSNNHFRGRAELARAGKVDERAIRVKIGKSFTRLAFAAVAGDQPLRHACCAARDSIIEKLREFHLEHGTSPAAVLAQLELCVPQLLADTRGHEALIVSQVLQRQQTRRRGPTRLAELLPAVLARLGVTSLDTQPDTTGTTAPN

SEQ ID NO: 434126 - protein, 411 aa, unidentified
MDTLYPRCAGIDVHKGNVVVCVRCCDRPGKPFEEVRTFSTMTRDLLELAEWLAGHGVTHVAMESTGVYWKPVFNILEGGVHVILVNAEHIKQVPGRKTDVKDCQWIAQLLQHGLLKASFVPPPPIRELRDLTRQRTQLIQERAAAANRIQKVLEDANIKLAGVATDVLGASGRDMLEALIAGETDPKVLADLARKRLREKIPALQWALQGRVTDHHRFLLRMHLDHVSHLEELIGRLGARIEEALAPFAQAQERLQTIPGVSQRVAETVLAETGPNMEQFPSAGHLASWAGMCSGNNESAGKRRSGRTTQGNRWLKRILVQAAWAASHSKGTYLAAQYRRLAKRRGRKRALVAVGHTLLVIIYHVLKQGTTYTELGPDFLDRLEPERLTRQLIKRLEALGHKVTLEPRPAA

SEQ ID NO: 434127 - protein, 334 aa, unidentified
MSKVIIAQNEEIVIGVDVSDAKHNIAVLNSRREVVEEREMRQPTREKWAKYLERFPGCAVKVIYEAGPQGYTLYDTIREFGGEAVVIAPVKTIGIKTDRRDALRIVRDFVSGSAKVITVPDRKKRVLRQLLRQRHQIRKDIVRIKNRMSALTRFHGLVGTFKAVFTRKRDVQVLMFCYDQQQEMCAFLEKKRDEIDALLEEVARDAEYRDDIGKLKEIKGIGTMTALEIVLNVADIRAFGDGASFASYCGLCPGEWSTGATRRLGHITRRGPGRLRGALVQCAWTAARCDPEEKKKFNELRTRIGKKKAIVAIARRLSVRVWNKLNTREAAQAA

SEQ ID NO: 434128 - protein, 414 aa, unidentified
MACARHKGDGNVSTQVKTFKTTTEPLISLSNWLSSAGCTHIAMKATGVYWEPVWLILFDSEFELILANAGVPSDRSSSLGWNAAHVKNVPGRNTDANDAVWLADLLAQGLIRPSVACPERSRRVPDEPTQQMSDLLRTRKQPARVRASHIQHIQKALEDANIKLDSVVTDLLGMSGRRILEALIAGQTMLQVLATLAHRRIHASTDELEAALRGGVTPHECFLLKLHLDQIDAIDAAIAHIDQEVSANVEPFRAAIEQLTAIPGISPLAAQVLVAEIGIDMSRFKTAGHLISWAGLCPKNDESAGNRRSNRMKKGAPWLKTTLVQSAWAASRATESYFQAQYHRLRSLRGSKKAVCAVAASLLTAAYPLLKSGAPYRDLGPNHFDLPDKQKHAIRLLKRLQNLGYTVQIQPIAA

SEQ ID NO: 434129 - protein, 365 aa, unidentified
MWEAPVKVQRTSVGLDVHARSVVACGLDGDTGELFERRLTPDHGEIVAWLGDLPGPVAATYEAGPTGFVLARSINAAGIRCSVAAPSKLQRPVGDRVKTDVRDARHLARLLHLGEIVEIEIPSVEQEAARDLFRAREDCRCDLMTARNRLSKLLLRQGIVYYGGTAWSRNHERWLQAQRFDHPALAMTYDTAFDTVLAITARRDRLDTAICEMAADSPFTAVVTRLGCLRGISTLTAFGLAVEIGDWHRLTGRTIGAYLGLVPCEYSSGATRAQGGLTRTGNTHARRLLVEAAWHHRKPYRPGEVMRRRWNAAAPAPRARGQAANRRLHERWLRFDERRKRPVVANAAIARELAGWCWSLAVMDD

SEQ ID NO: 434130 - protein, 417 aa, unidentified
MQYARSVLPDQPVNGLTSGIDWARDDHALSIVDGRGCEVHRYTVEHSAAGLRELVAVLAGAGATEVAIERPDGPVIDALLNAGVTVVVISPNQLKNLRSRYGSAGNKDDRFDAFVLADTLRTDRARLRPLVPDSPATVALRASCRTRKDLITHRVATANQLREHLKAVFPGPIGLFDNLDSPISLKFLTRFDCQDRADWLTPSRLANRLTSVGYTGRTTPATLHARLTAAPRGITGAASEGFIAITHALVTVLDTLVQQIKTLDKQIARRLAAHADAHIFTSLPRSGTVRAAKLLAEIGDCRARFPTPEALISLAGRAPSTRQSGKTCIVGFRWSCDKNLRDAVADFANDSRHANPWAADIYNRAIARKKKHPHAVRILARAWLYVIWHCWQNNTTYDHAKHRALQALLEGQQQPAA

SEQ ID NO: 434131 - protein, 343 aa, unidentified
MTKISMIGLDLAKNVFQLHGIDASGAVTLRRQLRRAAVEKFFAQLAPCLVGIEACGSAHHWARVIGRYGHEVRLMPPAYVKPYVKRNKNDGRDAEAICEAVSRPSMRFVPVKSVEQQAALAVHGTRALLVRQRTMAANALRAALTELGIVAAKGHEGLRELMAGLEKPSAEIPEIMRSALLMLAKHWQALDAAERVLEQQIAKAARCHREARQLMAVPGVGPIIASTILAKVPDAKVFRSGRDFAAWIGLTGRDRGTGGKHRPGHISKRGDRTLRVLLISGASAHLRQEKRRGVSDPWLRELLGRRPYKVAMVAFAAKTARIIWAMLVKGEPYRNRATAPAAA

SEQ ID NO: 434132 - protein, 398 aa, unidentified
MTESSDCESVQVFIGVDVGKDTHHAVAINRSGKRLFDKALPNDENKLRSLISDLKQHGQILLVVDQPATIGALPVAVARSEGVLVGYLPGLAMRRIADLHAGEAKTDARDAAIIAEAARTLPHALRTLKLADEQIAELSMLCGFDDDLAAQTTQASNRIRGLLTQIHPALERVLGPRLEHPAVLDLLQRYPSPEKLASLGEKKLAAQLCKLAPRLGKRLAADIAQALAEQTVVVPGTNAAAVVLPRLALQLITLRKQRDEVALEVEQRVLAHPLYPVLTSMPGVGVRTAARLLTEVACRAFASAAHLAAYAGLAPVTRRSGSSIRGEHPSRRGNKALKRALFLSAFAALRDPLSRAYYTRKMSQGKRHNQALIALARRHCDVLFAMMRDGTFYTPQGS

SEQ ID NO: 434133 - protein, 409 aa, unidentified
MIRYVGLDVHKQWTQVAWHFPDGSIQRERIATQPGMLKAFAQRLGSGDVVALESTTNALAIARLLRSRAGEVLVSNPLRTRLIAESKIKTDKVDADVLAQLARSGFLPTVWQPPVELEVLRRRSAYQAALTRQITQVKNRLHSVLHRHLVEAPVAELFSQAGRGFLGQVELPLDERAQVDLDLELLEQLEAARSQARQVLARHALVSPQAQLLMTIPGIDYPTAIGLVAAIGPVERFREPRKLTSYFGLAPSVHQSADKCYSGPISKRGRAHARWLLVEAAHCAVRSPGPLRAFFLRLKKRKGTNVAVVAAARKLLVIIHHMLSSGEPYRYAPVYTTHVKLARLEYLATGVPKKGGVPKGTKRSASYGSGLRTRTLRSRQDRIRLLEAEQQYNSFIKEREVSRKSRNSC

SEQ ID NO: 434134 - protein, 378 aa, unidentified
MKRILKIGMDVHTTNYTLCAMEPIIGEDDRVFATIKVTPDYKNILMFIENLKLKLGLNDEYDIQCGYEAGCLGYSLYNQLTAVGIKCVILAPTTMLTPQGVRIKTDMRDAYMIAQCLSYGGYHAVYIPTEDDDSVKEYLRMRNDHKLALKKIKQQINAFCIRHGFCYDGTKWTLSHLKWLKKLEITNGLHRETLDEYMTSYEEQEAKIERYDKRIGEIAEQTRYHDKVKKLGCFLGIKTHTALSLIVETGDFERFAKGNQYASYLGLAPGENSSSDNIHRLGITKAGNSHLRQLLIEASGGICKGAVGHKSKELRARQNGNTAEVIAYADKANTRLRSRYYKFIRHGKKRNVAVAAIARELACFVWGMMTDNIEMKAA

SEQ ID NO: 434135 - protein, 382 aa, unidentified
MQASTVDTPTAGHCGTIFVTIELGQKTWLVTLHSPDRDRISRHKLEGGDHSGLLALLESIRARAALKLGAAPKVVSCYEAGYDGFWLHRLLTAAGITNLVFDPASIAVEQRSRRVKTDRIDGELMLRTLMAHLRGEPRVVRIVRVPSVEQEDARRASRERDRLVKEQTAHTNRIKALLRLAGMAVGYPRRGNWLHWLAQQRDWQGQPLSPHVLAEVTREHARLMLVREQLAALEQAQAAQAPAVPAAMAERRDLLQRLKALGPAFSTTLTNEVFYKDFRNRRQVGAYCGLTSSPWRSGGIDREQGISKAGNPRARLKAIELAWLWLRHQPESDLSRWFRTRTVNAGKRARRIAIVALARKLIVALWRYLTTGLVPAGATMKA

SEQ ID NO: 434136 - protein, 459 aa, unidentified
MKKKKIKQTKGMEEARPFEGLSKVNQNAAGVDIGATEIMVCVSGGEAIQLVKAFGNYTVDLQAICEWFRKHEVKTVAMESTGVYWIPLFEELERQGFECLLISSRSLRKVAGQKTDVADAQWIQTLHSYGLLKGSFRPQGDLVALRTLLRHRAQLVEHRAPHIQHMQKALLQMNIQLSQAVTDVMGMTGQMIIRAIVAGLRDPEELASFRDPGCKHSEEEIAKALTGTWREEHLYVLKQSLELYDFYTEKIEACDEEISRQYGMIRPDWGSGELPVVPNKKLHTHSKNAPKDAREIREHLYRINRVDLSLVDGFGISLAQIVTMEVGSNIGEKFPTEKHFSSWLGVAPKHDITGGKVLSNHTLKTKNRAGQAFRMAAQSVKKADCPFGVLYRRLRSRLGPAQATVATAHAIARVVYKMLKYKVEYDPLSVNEYQAKYEEQQVKYMKKRAAKFGYQLIPA

SEQ ID NO: 434137 - protein, 351 aa, unidentified
MPHKSTVRAVTAIGIDMGKNTLHMVGLDLRGAIVLREKVSRGRVASRLANLQPCLIGIEAGMATHYVARELAALGHDVKQVPPTYAKPFRQGHKNDFRDAHAVAEAVQRPTTRFVPAKTNEQLDLQALHRVRSRLVSERTAVINQIRGFLLERGIIVRQGLRFLRQQLPDILAKRTDVLSPRMVRIVADLAGDWRQLDERIETVTDEIETLAKSDDNCRRVMTVPGIGPIISSAMVAAIGSGAAFARGRDYSAWLGLVPKQMSTGDRTILGRISKRGNGYLRTLFMQAARVILLRPANWPKHGFGAWLIRAAQRLHPNVLAAALANKLARIAWTVLAQERSYEARVTKAAA

SEQ ID NO: 434138 - protein, 395 aa, unidentified
MFIVGIDVAKRSHEVCMITSDGQTVQRPFSIRNNCTGYNLMLETIRKHTNIKSQIVFAMESTAHYWLALFTRLRKDGYHVILLNPIQTSAMRDMFIRKIKTDAKDSFIIAELIRFGRYAESNVAQDRLLALKELCRNRFYLVDMAGDLKRKLIALIDRVFPEYEAQFDTIFCKSSVALLKKYPTPQKLSNAHLDKLTELLWNSSNGHFGEWKARELRELARNSFGVEDCDGAYSTLILLMLDQIQSLSEKADALEKEIFRLFQSFDTTVTTIPGVGPIIGAVILSEVGDISRFSSADKLAAYIGVDPSVNQSGEFQAAHAHMSKRGSPYLRRCIWMASQVAVQRDPMFRAYYEKKAAEGLKYMTIIGHVTRKMTAVVFAVLRDHKVYEPVLPTAA

SEQ ID NO: 434139 - protein, 457 aa, unidentified
MSQARRSRGRQELSPVHPNAAAIDIGATMHVAAVGPDCDEQPVRTFQTFTADLHRLADWFAQCGVKTVVMESTGVYWIPIYEILEQRGFEVMLVNARDAKHVPGRKTDVSDAEWLQRLHEYGLLRPSFQPQAEMAGLRAYLRQRERLLDYAAAHIQHMQKALTQMNLQLHHVVSDITGVTGMRIIRAIVAGERDPAILASYRDARCHASVETVRQALVGNDREEHIFALTQALELYDVYQAKVVACDGQIEAVLTRLKQSAVPPAEKLPAARHKAHSSNAPAFEVREVLHAILGVDLTQIHGLGPYLALKLVGECGTNLSAWPTAKHFTSWLGLAPHNKISGGKVLSSKTRRTSNRAATLLRLAAITVGRTDTALGAFFRRLSGRVGKAKAVTATARKIAVLFYNTLRHGMTYADPGASYYEDRYRQRVLSNLQRRAKSMGFVLQQAEPAGAQAGVS

SEQ ID NO: 434140 - protein, 365 aa, unidentified
MQQIYIGVDFHARQQTICYLKIETGELVISELQHQDKEQVRAFYQQFQGPVIVGLEASGYSLWFEAMLEQLGCEVWLGHATEIRRRARWRQKNDRRDAELIWDLMVHDEFPRLHRPALPSREVLRMLRYRQKLIKLRTMAKNSLQAIALQAGLAKGQQLFSAAGLEQFRGAALSPVLAWQREHWFSLLQPLNQQLLETMVWFKVESKHDPCVTRLRTHPGLGLLTSLCLVHTLQPVSRFRNARKVAAYAGFDPVERSSAERQRFLGISKAGSRLLRYLLVEAAHTAVRYDQDLQRFYKRLGQRRGRPKAKVAAARKLLIRAYIMMRDEIDYAEFRRRAVAARLARQGQRPNVPEVLIGQPASSGE

SEQ ID NO: 434141 - protein, 340 aa, unidentified
MNELKNKKHYLGIDISKDTLDLSLIHKSSYGTFKDKKVLNSFNGFKILYSWLLKEKVDINECLICMEHTGAYGLLLFAWLSQTGIDYCVEPGLEIKRSIGMTRGKSDRVDARRIADYAYTHVEKLKLFKFPSTLMIQIKQSLTYREQMVKIKTALKNSLKSHNEYQKVSGLIKISEQISQQIKEQEKNIKKIENQIVDLINTDKNVKKNFEMAKSVKGIGFVISAFMLVTTNNFTGFENGRKYACYAGVAPFEFVSGTSIRGKTKVSNLGNKKIKALLSNGANSACKYDLELNAYYKRKSKEGKDHKVIINAISCKLINRVFAVVKRQTPYVSIYEQNFA

SEQ ID NO: 434142 - protein, 351 aa, unidentified
MSRNTDIVIASSIGIDTGKNTLHLIGLDDRGAIVLREKLTRGRIAARLANVPQCLIGIEAGMATHCVARELIALGHDVKQVPPVYAKPFRQGHKNDFRDAHAIAEAVQRPSTRCVPVKTDDQLDLQALHRVRSRLISERTAVINQIRGFLLEHGIPVRQGLRFLRQQLPDILARRIDVLSSRIIRIIEDLSGDWRRLDERIEHVTEEIEELAHGTESCRQLMTIPGIGPIIASAMVAAVGSGAAFAKGRDFAAWLGLVPKQMSTGDRTILGRISKRGNRYLRTMFMQGARVILLRPRNWAKHSFGSWLEAAAKRLHHTVLATALANKLARIAWTVLTQGRNYEARVMAEAA

SEQ ID NO: 434143 - protein, 342 aa, unidentified
MKITTVGIDLAKNVIQVHGINEQGKKVFNKQLPRKYVLTHFAQLPPCLIGMEACSSAHFWARKLQSQGHTVKLMAPQFVKPYVKTNKNDAADAEAICEAVTRPTMRFVPIKNGEQQAVLSLHRARQGFVKARTAQANQIRGLLMEYGITIPQGISHITKRIPELLEDAENELPVVFRQLLQRLGNHLKALDRQATELDEQIQAWHRGSEASKKLARIPGIGPLTASALVASIGDARSFRNGRQLAAWLGLVPRQHSSGGKPRLQGISKRGDTYLRTLLIHGARSVIRVATGKTTPIHCWAVNLVERRNKNVAAVALANKNARIVWALMTQNREYQSDFVRTV

SEQ ID NO: 434144 - protein, 378 aa, unidentified
MIEHTPEALDSWLNELHQRAKGRIAIAVELKKGPVVYALQKYPFVTVFPVHALSLARYRQAFWPSGAKDDPQDAELALDLMLRYPHKIKAIEVDNPDIRLLQQLVEQRRLLVEDKRRFVNRLINTLKQYYPQPLEWFSHRDSSLFCELIIRWPSLQQLKRARSDTVRHFMNAKGGPAVAYTEQRVASIASAIPLTTDKTVIEANALMATALASQIKLTGDLIRTYDERIESLFDTLPDAELFKSLPGMGPCMGPRMLAALGDNRDRFNNAEEIQNYAGIAPVTERSGQKSWVHWRWQCAKFVRQTFVEWTAKTVNSSYWARLYYQSQREKGKSHQSAIRALAFKWIRIIYRCWKTRTRYDEAKYLLALEARKSPLLKP

SEQ ID NO: 434145 - protein, 350 aa, unidentified
MNVKHYIGFDVHKKSVSYCVKLAEGTVIEEGKLRASREALRQWAGKRTEPWHGAMEATLFSGWIYDTLQPYAAKLEMGHPAMMKAIGAAKKKSDRLDARKISDLVRCNLLPACWVAPSEIRELRRMLRYRNLVVDQAVQMKNKISGLLMESGTEYNKKRLHGEKYFTELLETLEEVPDSVKELLKLSRGALESLQATQQQIVLQLQKHPKLVERVKRLKSIRGVGDVTALTWALEIGDPHRIPSIGDGLSYCGLTSALVESADKQQRGPLSKQRNPHLQTVLIEAAKLAPRWNPQLAAVHERELQRGHRNRATLEVARKLVAYLLAVDKSGKPFEVRTPAIPEKQVKPAA

SEQ ID NO: 434146 - protein, 347 aa, unidentified
MNKSVTTPSATIFCGIDVSAATLAVAVIEQDQPLQQREFANRSSGHKALLGWLGKRKACVRISMEATGVYSLDLALALDAASEVELAVLNPKLANRFQQTLARSKTDAADAVVLAQYSQRMPFTRWQRPSLNGLQLRALARHISALVTQQSRERNRLHALKSSSTAPRAVIDDLGRSLASVARRIVKLRRAAMELIRAGAQLNERFCLLTSMPGIAAVSAIQLLAETVLLAPDLTARQWVAYSGLDPMHCISGASVHKRSRISRSGNRHLRRALYMPALAAVRWDRHLKAFYEALQARHKTKLQALIAVARKLLHAIYGIFKTKTPYDGNKLFPQMNLTPELQSASR

SEQ ID NO: 434147 - protein, 339 aa, unidentified
MGEVSTIGLDIAKNVFQVHGVDAAGAVVVRRALRRRQVLAWFAALPSCLVGIEACATAYYWARELRRLGHEVRLIPPAYAKAYVQRNKNDPADAAAICEAVGRPSMRFVAIKTERQQAVIGLHRVRNLLMKQWTMLRNHLRGLMAEFGVVAPQGRRGLNELLAILADADDRRIPSPLREGLAAIATTLRDVERRLAAIERQLVAAGRQDATYRHLITAPGYGPILSSAMAAIVTDPSVFRTASDFAASLGLVPRQEGTGGKVWLGPISKRGNGYLRRLMVNGATALLNSKSAKQDPWLARLLATKPRKVAAVALANKMARIGWALMRRQEDYRNMPAAA

SEQ ID NO: 434148 - protein, 364 aa, unidentified
MTSFLRYCVGLDISKDSLQVCLSVIDSTGRVTVKATTKVVNKPASFMTLVNWVTRHRKIDLPLFYLMESTGVYHEAVAWYLHQQDQSVSILLPNKAKYYLKSLGYKSKNDKIDAQGLSRMGLEQQLPVWKPLSKNLYALRLLTRQHQRLQELKTQSTNQQHALEHSAFDSRFIDKQLTKLVSVYEAQIDALETAIKELIDEDPILKPRVERLIAIKGLALLSVAVLVAETNGFEGFTNQRHLVSYAGYDVVENQSGNHSGKTRISKKGNSRLRRILHMPAFNAVRFDEPTCKALYDRVYERTHIKMKAYVAVQKRLLLMAYALWRHEVKYDPEYLANRAEKDKKIVPLVGTTQDRPAEAELSYL

SEQ ID NO: 434149 - protein, 344 aa, unidentified
MSEVITIGLDIAKHVFHVHGADERGRAVFSKKISRAKLLDFFAAQPSCKVALEACGGAHHWARQLTQLGHEVRLIPPAYVKPFVKRQKSDAIDAEAICEAAQRPSMRFVAVKSEEQQAAGLLFRTRDLLVRQRTQLINAIRGHLTEYGWIAPKGPSHVAMLADLIEEEEMASSLPEAAQAMFRLMLDLLAGLNSKITDLDKEIARRAREDEVSRRLMTVPGIGPISATAIAALAPPAETFAKGRDFAAWLGLTPLQRSTGGKQKLGATSKMGERTLRRLLIIGSSAVVKQAAKRGAPKGSWLEQMLARKPRMLVTVALANKMARIICALLLKQENYKAPVAVKA

SEQ ID NO: 434150 - protein, 339 aa, unidentified
MYHIGWDVHKKRINGATLDGKGNVINESQFEHSVKGAKDYLHGYPPEYTHIVMESSSHIYILYDYLVEKGYDVKVAHAKAMHRITKSSKKNDRRDALQLAKHLLANDIPESYIPSREIRKKRSILRTRIEFMQERTRLKNKIQSILQMEGITLKTKTSFCNRWIAELRKIKFEREIRHKIDLYLVQHDHLTKLIEEYSKRISQMAKKDKEIKLIMTIPGFGELTSMIFLVELGDYKRFELVKQVASYVGVIPSSRSSGERVRHGRICKDGNPYIKWALTQSASSAGNSRSAIGKYFQRKLIRKGYQKACVATAHKLLRIAIGVLRNNKPYSDSLVEVCG

SEQ ID NO: 434151 - protein, 347 aa, unidentified
MTIVEDRPVITGGVDTHADLHVAAALDPLGGLLGVQEFPATATGYAQLLGWLGGFGGIALVGVEGTGSYGAGLARHLAAAGVRVVEVDRPDRQDRHRQGKSGPLDAVSAARAAQSGRASGAPKGRDGAVEAIRALMVAKRSARHERTQAINQARALIVTGPDELRARFAGHTPAALAGAIAALRPRPGDVPGYATRVALRELGRRVQFPDAQLDRLDELIGPLVTARAPGLLALHGVGPDTAALLLVAAGDHPERLRSESSWAHLCGVAPIPASSGKVAGRYRLNRGGNREANQALWRIVITRMRSHPATRAYVERRTRQGRSKREIIRCLKRYVAREVYRHLRDGA

SEQ ID NO: 434152 - protein, 394 aa, unidentified
MAFKIFRKNCCGLDVHKTWIYACMGITDTNGRTEYKQARFSSFTKGLQKLADWLAKYDCNDVCMESTGKFWIPVFNILEKTCWVTLAYPKYTKPQKGNKTDHKDAKWICDLYMCDMVNPSFIPPPDIRQLRDLMRYRSKLTNIMTSEKNRALNCLTVSNLKLDDVFSDVFGKSSRSVIRYILEHPGETFQVAPFIDRRCKHPVEEIQAVIDGTISHQQAVKLRECLQHLDELEVHKTNVEKEILCLVRQYPYQLELLQTVPGFSGNIMTAIALISEIGADMSVFPSAKHLVSWAGCCPRNDQSSKKVKSTRISRAGVYLKPLLVQVAIQPFTANADKLSAAGALEIRCQICDGRFLSMWAALFIFLGCPLPPCPKNLHVHNGRIVILASVAWIF

SEQ ID NO: 434153 - protein, 416 aa, unidentified
MDVIVARCAGLDVHKNTVVACVRTPGPDGARVSTVRRFRTFTAALGQLRDWLVAEGVTQAAMEATGVYWKPVWHVLEGAPGLEVLLANAHAVKNMPGRKTDVADAQWLAQLCECGLIRPSFVPPPEQARLRDLTRYRKKLIEERTRETQRIQKLLEDAGIKLDSVVSDILGVSARRMLEALIEGVRDVDALAGLAHTSMRAKIPQLRRAVEGRFGAHHALMLGMHLQHVDQLSDAILRLDEEVDRVIRPFQTALRHLITIPGVGRRTAEVIIAEAGVEMHRFPTAGHLASWAGMCPGNHESGGKRRSGRARKGNRALRAALCEAAWSASHAKSGYLGAQYRHLLRTFGKDGQTRAVFAVGHTILVITWHLLANDCDYQDLGAEHFTRREDPEARQRWLIRQLEALGNTVTVEPNAA

SEQ ID NO: 434154 - protein, 355 aa, unidentified
MATVPQEEVRVTVGVDTHEDVHVAVALDQLGRGLGELSIPTTRRGYARLVEWASGFGVVDTFGVEGTGSWGAGLARWLRAEGLAVVEVDRPDRKARRHGKSDTIDAEAAARAVLSGRATTVPKAGDGPVEMIRVLRMTRRSAVKNRTMTANQISSLVATAPEELRAQLRGLTTSRRVAAAVKFRAGENLTSVTEATRYGLRELARRYQHLTDQIDRLDAQLDRLVAETAPDLLAKKGVGTHTAAALLVTAGDNPERLAEEGSFAHLTGSAPLDASSGKQQRHRLNRGGDREANSALYLIALTRLATDEDTKLYMKRRLAEGKTKKEVFRCLKRYIAREVHQCLVSNPALQPALDT

SEQ ID NO: 434155 - protein, 418 aa, unidentified
MKEQYAVLVGLDWADQKHDLCWRETDTGQVHTLVLQQSPERINEWVCELTVKYPGQRIAVCLEQSRGAVVYALMGYAAVDLYPVNPSTLADYRKAFNPSGAKDDPSDARLLLELLERHPEVLKVWQPDTEQTRLLRLLCEDRRKAVDMRTTLCNSLRSKLKEYFPQALKLVSESLFSELTCAFLMKWPRFEAAAAAKPETVRRFYYAHHSRSEKHITQRLEQIATSRPLCTDTAVMRASIMRVQTLIKQIRVLNRAIQEYDKQINELFKAHPDHFIFKSFPGAGAQLGPRLLTAFGTDRDRYEAAVEVANYFGISPVIERSGKQEWIHWRWHFPKFLRQSVVEFACKSIGFSAWAKVFYDAQIKRGKGHHAAVRALAFKWIRIIFQCWKRGIPYDEAKYLAALDRHGSWIAQALKKAA

SEQ ID NO: 434156 - protein, 401 aa, unidentified
MDHCTAGLDWASEAHAICIVDDHGAVRESFSVAHDARGLAELVRRLRRYPDLRLAIERPDGLLVDTLVDAGIRVVPIHPNKLKAARERYSSSGAKSDGGDAYVLADLLRTDGHRFPELAPLSDETRTLRALVRTRDDLVKAKVALVNQLAAQLAVFWPGAAAIFYRLDSDIALAFLERYPTPEAAVHLGERRLAAFLRRNAYCGRKPVAELLERLQQAPRGLVRASESEARGECVKALVRALKALLPQIAELEGAIAVALADHPDGALFQSFPRAGEVNAAQLLAEIGDVRERFPSDDVLAMEAGVVPVTKRSGKAVSVGFRWACNKRLRRALTGWANNTRRASSWARALYDRARARGADHPHAIRILARAWLRVLWRCWQDRTHYDDVRHLAAAAARFAA

SEQ ID NO: 434157 - protein, 360 aa, unidentified
MKEYSGNSVGMTIGLDLGDKYGQYYTLDEAGVNIETGRVMLLPSALEKRFGKLERSRMVLESGTHSGWVSRLLESFGHEVVVANARKLRLISQNENKDDAVDAELLARLGRVDPRLLYPIRHRGPEVQSDLALLRARDALVKVRGQLINHMRGTVKCGGGRLPQCSTASFHRKAEVGIPAELKAALEPLLEMTEELSGQIRAYEREVERLCRERYRETELLQQVGGVGTLTSLCYVLTLEDPHRFAKSRAVGSFLGLRPGKDKSGEQDPELRITKAGNPQLRRLLVQSAQQMLGPFGADCDLRRWGLKLAGRGRKNAKKRAVVAVARKLAVLLHRLWVNGEVYDPLYQAQRHPVSQEVSA

SEQ ID NO: 434158 - protein, 346 aa, unidentified
MNNHNKKCTIKVLGIDLAKQSFQLHGVDEQGKVVLRKNLSRNKLTSFVANLPPCLIGLEACGGAHHWVRVFKSLGHTVRMMAPQFVKPYVKSNKNDAVDAEAICEAVQRPNMRFVPEKSISQQDIQCIHRIRSQLIARRTAQANQIRGLLMEYGIIIPKGISYIRKVIPHILEDADNKLTSLLRELLNELYDEMVYLDERISSLENKLKTISHQNEDCQRLLTIPGIGLLTATALIAAIGNISVFRSGRELAAWLGLVPRQHSTGGMPTLMGISKRGDCYLRTLLIHGGRTVVRVAHLYTDKRNLWICELDKRRGKNISAVAVANKNARIAWALLSKKESYQVTAI

SEQ ID NO: 434159 - protein, 563 aa, unidentified
MSTSASISLGVGFDTARYGHHVAFLRPDLQPAAQAFTFAESPAGYAQLRRALEQLQQKHGSVHFHMRIDAAGEYATNLERFLRALPWEKTLSVGQPKQNRDYCKVHFPKRKADPVEALACARFALVEHPAPTPETPVAFDQLREIAGALESQGKQTTRLVNQLHNRLARVFPELALEVSSLRAAWVLRLLAQYPTPARIAAAHLSSLVSIPHLSEDQAQKIQTAARQTVASFQGPVVEGLIRQAVRSIQRSQKTTRELMRLLEVAYAALPKGPHQQIQTIPGIGPQTAAALVAKMVSIDRFATPGSVVNYFGIFPEENTSGVDKFGRPVPPGTMRISPKGNDLVRRCLWNAAKTAIVHNPVIRVVYARQRARGKRGDVVLGHCMGKLLHLVFAVWKTDRPFTPPAKDPGEGSQAVPLEAEEARGRKGRRPERPAVTQAPSNIPPAAPARKTAGAVSAAAGSGRRIDFAWLRQQVTMEQVLRELHWWDCLKGSGARRRGPCPIHGPSSPQGRCFSVHLEKKVFQCFDASCGAQGSVLDLWAQSQGLPLPQAARDLAHRLGITPE

SEQ ID NO: 434160 - protein, 343 aa, unidentified
MKITRVGVDLAKNVFQVHGVNRAGRCVWKRQLKRSNWLQVLTETLEPGCEVGMEACGGSHHWARELRSRGFVVKLVSPQFVKPFVKSQKNDANDAEAVCEAISRPSMRYVPIKSAEQQDLQAMHRIRDTLMRHRKAKANQIRGLVAEYGIVAPKTIVPLRRAIPDWLENAENGLSDNFRALLFGLWEDFQQLEQRVKDVDRQIEAVSNTNADAKRLKQLRGVGPLVSTALVAQFGDGRQFTRGRQASASIGVTPRHAGTGGKNLIYGITKRGDPYLRSILIHGARAVVSQAKRRDDALSRWVTDLADRTHTNVAAVALANKTARMAWAMLRYGTDYDPELARA

SEQ ID NO: 434161 - protein, 365 aa, unidentified
MKHVTTYVGIDAHKKDLFIAMLIGDATSPVTWTVPNEPNAVRRLVRRLERDAPGPVRACYEAGPCGYVLQRQITTPRVSCQVIAPALVPREPGERIKTNRRDARKLAELLRANVLTEVRPPTPEEEAVRDLCRARDDAREDLQRCRHRLGKFLLRRGLHYNGRNWTRAHRQWIDSLAWTHAAERVLLEDYQLAIDHVEARLIELDRRLVEIAEAAPYREPVGWLRCFRGIDTLTAMLLLAELHNFRRFKSPRALMAYLGLVPGEDSTGEKRRRGRITRTGNALVRRLLIETAWHYQHRPSVGAALMWRRKGQPGRVIAIADKAQQRLCRRFRRLAEQHKPAPKIAVAVARELAGFLWAALQAPAA

SEQ ID NO: 434162 - protein, 341 aa, unidentified
MITTIGLDIAKSVFQVHGVDAAGNVIVRRRLKRRYVLAFFQKLPPCLVGIEACASSHHWSRELQALGHTVRLMPPVYVKPYVKRHKNDSVDAEAICEAVTRANMRFVATKTPEQQSCLTLHRARHLFIRQQTSVINAIRAHLAEFGIVGPVGRHGVEQLLGVAADATDKRLPEVARACVAALGAQLRMLKVQILQFDRMITAWHRSSEASRRLDDIPGVGPALATALVASVADPEAFQSGRDFSAWIGLVPKQNSSGGKDRLGSISKRGDRYLRSLFTAGALAVIRYAKIHGTKHRPWLTALLARRPTKVAAIALANKIARMAWAMMAKGERYKEPASLAA

SEQ ID NO: 434163 - protein, 354 aa, unidentified
MTSPNFKNVNFFVGIDTHLKNWTITIRANSLELKTFSMNPSASDLNNYLNKHYPNGNFKLAYEAGFAGFAPFRRLNEFGLNCIIVNPADIPSTGKEKAVKSDPIDSRKLARELEKGELKPIYIPTVSAEELRALMRLRFRHVQNQTRLKNRIKGFLHNYGICIPNEFISNSRWSNNFILWLKDLSLSSSAGTFTLNNLIDQLIESRQHLNDVLHQLRKEARKDNIAPIISALCSIPGIAFITAMTLFTEIIDINRFSKFDKLASFVGLVPSIYSTADTEYSRGISFRHNKFLRPLIIEATWIAIRRDPALSIKYFQLCNSMPKNKAIIRIAKKLLSRIKHVWENQEEYSFSLVA

SEQ ID NO: 434164 - protein, 369 aa, unidentified
MGNSTTTSWVAMDTAAETIQVAIFRGEEATPSEEFEVTADGRGIGRLKKKLEKEPGAVKCVYEAGPCGYGLYRTLKASGYDCQVIAPSLTPKKPGERVKTNRLDARRLGIYYRGGQLTPVRIPDEKQEGLRDLLRARDDVRRSLQQSRQRLSGCLLRHGYHFKEANRWTRKHWAWIKAIQFPDETVQMVVAEYVTAIETLIQQMQRFDQKIHEISQRPEYATKVASYSVLRGIQTLGAMTIIAEGGDLRQYGQAPQFMASIGIVPGERSTGARQKRGSITKTGNVYLRRILIEAGWSYQKRIHAGVTIQKRRRNQPEALLAIARKADHRLHGKFSKLQFRYNKIPTVANVAVARELAGFIWAIGQLVEP

SEQ ID NO: 434165 - protein, 348 aa, unidentified
MVHFVGLDVSVKATSVCVVDDAGKVILEQKVPTDPADIIAILTSLGVSFGRIGIEAGPLSQWLVNALTAANLPVICVETRHMKALLTAQQISKTDRNDARGIAQMMRVGLFKPVHVKTLVAQEQRMLLTSRKLLQRKLLDVESDLRGTLRNFGLKVGVVGGSRYEARVRELVEGFPGLAAIVEPLLSVRRVMRQQFAVLHKMLLDTVRGDPVCRRLMTAPGVGAVVALTYRATVDQPQRFVHSRAVGAHVGLTPKRYQSGEIDYDGGVSKCGDALLRTMLYEAAHSLLTHGRQWSWLKAWGIRVAQRRGMRRAIVAVARRLAVVLHRMWVDGSEFRWRKDSAAVSAVA

SEQ ID NO: 434166 - protein, 314 aa, unidentified
MIHAGLIVGIDVSKARLDVHVHPTGEHWSSANGRAGIAGLAKRLAGLMPAAIGMEASGGYEQPLARALHAAGFDVHILPPARVRAFARAIGQGAKTDALDAMMIARCLEASRDRLVRYAPDPARERLSALGTHRRRLIAERNGLASQLDTIAEPVVRRMIQARLRSIALGLVCLDKAVRTLLAATPHLQQQVDRLCQAKGVGPVLAGALVADMTELGHISAKAAAALIGVAPHARQSGASTRPGRCAGGRKALRDILYMATLSAIKARDPVLAGFYKRLREKGKPFKLALVATMRKMITILNAIARDDPAFQTA

SEQ ID NO: 434167 - protein, 341 aa, unidentified
MSQSYLGIDLHKRRSYVVLMDEGGDVLDERALPNGDMAEYLAERVPRATTAVMEATFNWPFMYDLVSEHVERVLLAHPQKVKLIAEATVKTDKVDVHTLTHLARTGYLPESYAAPKWLRELRRLMRHRQNLIADRTRHKNRIHSVLHSYNLSSPLSDLFGSKGRAFLAELLCDPAGPLTPSACQVIEDSMAAIDFYNERIQGLDQAFSAYARTDPAIDLLRSLPGVGLISAITIRAELGEVERFRNGHQVARWAGLTPKVLISDQMVRHGSITREGSTYLRQAMVSVALRAVRFSPSMRAFYQRLAKRRGSGIARVALARKLVILSYQLLRTGQPYREGDR

SEQ ID NO: 434168 - protein, 341 aa, unidentified
MGEYIGLDVSLKETAISVRRDGQRIWRGKCPSDPTLIAEVVRKRAPAAQRVVFETGPLSVWFYHALSAEGLPAICIDARHAKAALDMAPNKTDANDADGLAHLAEVGFYRAVRVKGYDSMLVRTLVAARSRLVQITTELSNQIRGLMKTFGLVVPRSKGGTFEAEVQRLLAGQEELAQILLPMLEAWRSVRSRASALGRQLLACARQSAACQQLMSIPGVGAITATSFTAAIEDPANFRTSRSVGAWLGLTTRRYQSGEVDYDGHISRRGDAHLRGLLYEAATVILTRTHADSDLRRWGLQLRERIGFKRAAVAVARKLAVIMHAMLKSGEPFNRAVSTTA

SEQ ID NO: 434169 - protein, 401 aa, unidentified
MDNTKMFYVGIDVSKDKSDICIKDEKGNDLIHRFEITNKKADLEMLYETVESIKRNIPGNSDVVFGMEATGIYSLPLYSALKRDGYKVKLYNPIQTNGYRKINIRKTKTDPIDSAIIAEMLRHSEAPQVSEIQDMHLFQLRELVRVRHRLIEEQALCKVQMVRNIDTIWPGYGGVIKRVFGAASLAILKKYSVPSKLRSESFEHFYELVKKKSRSKISRSKAEEIYANAGNVLTIPELDSVIAIEIKTLITQLELYDEQIQSVEGKIDQMMKLTDTKIMSIPGIVDILGPTILGEIGIIERFSNVKKLVAFAGLDPVVNQSGRFENKSGKISKRGSPLLRHALFLAANSAIQNDENLKRFYTKKRSEGKHHFSALNAVAAKLLRIVYWVLKNNKEYQIQLN

SEQ ID NO: 434170 - protein, 306 aa, unidentified
MEHYVGLDVGLEETNLCIVDHEGKTVREVKVSTEPAAIRSALEGYADRLSRVGVEASSLGLWLHRELHAGGLPIIVVEARHMRVSLSTMRNKTDRNDARGIAQMMRLGWFRAVHVKNIEMQKMRTLLTNRKLLKRKLVDIENHIRGALRTYGLFVGFVGRGHYEARVRELIKRTDFVFSTMIETMLDVRRAIFDGYSRLHRAVLQVVQHDPICRRLMTVPVVGPVASLSFKVGVDDPLRFTRSRTVGAHFGLTPRRHQSGTSIDYEGRITKQGDVSVREALCEAAASLLLRVRKWSALRALGSSGC

SEQ ID NO: 434171 - protein, 419 aa, unidentified
MNKQLHEPGLFIGIDWADQKHDCYVIDRDGKGFHQELKQSPEDIDTWVSEMLRRADGKPIAIMLEQSRGPLVHALMFRENVLLFPINPKQFARYRESYPGGGKDDPTDALYLARMLRERIATLRAWQPDDENTRLLAHLSRQRRKLVDGQTKLRLQLLAQLKSYFPVVLELFGKQWQLPLLLSVLGRWADPRQLRRADRRLIRRVLSDHAIRNEAQQNGIVERIRSAQLLTRDDALITPAAMAVKLLAHQIQQARKTIGQFDAKIAEAMKQHPNAHLFTSLRGAGPALAPRLLCAFGSQKDRWEDADSLAAFSGIAPVTRKSGKQCQVHRRYACPKFLRQTFHEFADSARIYCPWTKARYRMLRDRGMKHHAAIRKLARSWIRILFRVWQTGTPFDCDRYIGQLKKRCPEITRYLPQEN

SEQ ID NO: 434172 - protein, 405 aa, unidentified
MSELEKDLVFAGVDTHKDTHTLCLLDHMGRAIGTFRFAADAKGYDALAGKIGGPATCVGVGVEGTGSYGAGLTRRLLELGYCVYEVMVPGRARRKPGRPKSDPADAEVAARQVLARANLSKPKDQSGWTEELRQLMIARDRLVQATAAMINAAKSLIVTAPEDLRRSLEGLSRKNLRNALSTLDPAAGGIILALGSLGKAWDLQDREADAIEERMKRVLEANAPALLAIYGCGTVSAAALAVAGGGNPERLRSEAEFASLCGVAPLLASSGKTERHRLNRGGDRRANRALYQIAVTRMSYDQRTKDYVGKRKRDGKSKKEAIRCLKRYIAREVFRALRNPLEIKGPSWKDLRPARQALGITLVEAGKALNVGFQRVSYAETGRLMNVRFLEEYDAWLKSQAKSES

SEQ ID NO: 434173 - protein, 336 aa, unidentified
MRTVFGVDVSKASSEVAIVINGEKIHGYTMPNDAIGFTRLLDDLKTVQKPEIIFEARGVYSRRLQALLEENGYAYTQLNPLEAKKQLDSLRVRKTDKIDAETLAISQFVLNRKPTYIQEEVYQELRDLSRFYQNLTEDIVRTKNRLHKVLQVTFPEMENILSTPTREQYWNLVMTFPYKDFVLELSKDEPLEGIRQSTSKRISNKRVAYLAQKLAALDNQSYCAVKKNSPRLEEVRYYAKELLRLSEQRQAVLEQMVELAQPLPEYEILLSIPGIAETTATSMIGELGDIRRFQSANQINAFIGIDLRHYESGNFLAKEHITKRGNPYARKILCCG

SEQ ID NO: 434174 - protein, 403 aa, unidentified
MGAVSGIDWAAEWHDVDVADEHGTRLLAARFAHDERGVCALIAALIEHRVARVAIERPDGLLVGRLLAAGITVLAIHPNQVAAARDRFRAAAGKSDRFDSFVLRELCRTDSHRFPVLAPLGDETLALRALVRTREDLVGARVALANQLRAQLDCFWPGAARIFSDIDSPIALAFLARYPSPADARGLGAKRLHAFLARHAYCGRKTPEQLLKRLHSAPTAAIGELETDARRSAVCGLVSTLAPLVAQIGQLTSEIAGAIRRHPDGPVFQSFFRDPKSVVCAAGLLAEIGDNRARYPHSDTLAADGGQAPVTKQSGKHRAVGFRRACDKRLRNHLGVLADSTRRWHPWARDIYQRARDRGCDHPHAIRILGRAWTRVLWRCWQDNRPYDPTQHRALTRHLAHQG

SEQ ID NO: 434175 - protein, 344 aa, unidentified
MKHCKLLSIDLAKTVFQICGISNRNTTLFNRQVRRAKLLMEVLIIKPEVIIMESCYSANYWGRLFISHGFKVKLIPAQHVKPFVKGNKNDKHDALAIAEASLRPNIYFVPVKTTEQQDVQCLHRVRQRLINSRTGLTNQIRGLLTDYGIIFSKGHHKILQSLPLLIEDLENNLSFPMRELCNDLLEELKVKNQQLEKIEQKIKTLSSQQKGFAHLMAMPGIGLINASALVSAIGDAKQFNNARGFAAFLGLIPKHEQSGIKLVSKGISKNGNRYLRTLLIHAARTIVSRYKNTDDPLKQFALKIKEKRGKHKAYVAVAHKMSRIIWAMLTKDKAYNPDYILTKK

SEQ ID NO: 434176 - protein, 309 aa, unidentified
MTQVDVGIDVSKDHLDVVILPDGETLRVENDKAGRCALAKRLRALAPRAVGLEASGGYERAILKALLKADLPVRRLNPWRVRQFAQALGVLAKNDRIDAGIIARFVAVLPTRKVVADEAAEAIAELVTARRQACEDLTRCRNQAAHAQGNLVKRLARRRAEHLEQDIQVLDRALAKAVADNPEHAHKDALIQSVPGVGPVCSHTLIGLMPELGRLTNRQAAALLGVAPYDHDSGKMKGKRAIFGGRQAVRDVAYMAALAAGRHNPTLKAFKDRLLEAGKKPKVAIVAVMRKLITILNALLRDNAPWKAA

SEQ ID NO: 434177 - protein, 365 aa, unidentified
MSVYVGIDVHRKRSQVAVVDQAGQVQVNRNVPNGVEPILRVIGDVPVGTPVAFEAAYGWGWLVEFLETYGFDPHLVHPSRCKAIAAARLKNDKVDAATLAQLLRADLLPEAWIAPPAIRQLRALLRHRCQLVRVRTMLRTRIHAVLADHGLDRPTGCWSGPGRAWLASLEVPAVSRRVIDDNLAQLDALEAPIGHLDAEVHQRAKADPRVKVLTALPGVGELTAMIILAEVGDVSRFPSARKLASWAGLTPTVRGSDRTVRHGHISKQGSTWLRWILCEAAQTAKRHPDFAATYAAISHRRGKKIATTAIARKLLTRAYHLLSEVPATPATDPKTDPSQPPPAGRVTKPRASSHFRMSRPTSRAR

SEQ ID NO: 434178 - protein, 376 aa, unidentified
MKNTIMCGADVHDNSMTTQIAVNKERPETRVFPYTTNGRRNLLKYLKLVARKHGADRVVVAYEASSLGFGFCDECTDAGIECYVLAPTKMPKSEEDRKRKTDKWDAQKILEQLRAHILAGNELAKVWIPNLETRDDREVIRMRLALGQKLTSAKTQVRTLLKRNGMEKPKDVGKAWTVSDRHWLHWLTEPESKLADGACVGLASLLRQIAFLEEETEQLDNAVKALADTERYKVAAEALVEQLKGVGLLTAMVFLTEMGDLRRFKNRKKVGAFIGLVPSSNESGEHNDRKGHITRQGPARVRKVLCQASWARIGSDVDESKVHARIVKKNPKKKKIATVACMRRLGVRMWHIGMQAQIEAGVYETKQLPCSKRIAV

SEQ ID NO: 434179 - protein, 347 aa, unidentified
MLATNLESVSPVVIGGVDTHKDIHVAAVVDSKDVLIDCNTFATTRAGYRSMLRWMRSFGDLKRIGVESTGSYGAGLLRFLDNAGIEVLEVTAPDKSARRKKGKDDTLDAENAAHAAFAGIRTVTPKSRDGMVESLRVLRVARKTAVVARKAALQMLQTQIVSAPEELRDQLRNLTRMQLIRTIAAWRPDATDFRDTKTATRIALRSLARRYLELNDEIADLDVPIRALVEALNPGLLARPGVGVETAAQLLVTAGDNPKRLRSEASFAALCGVSPIPASSGKTVRHRLNRGGDRAANSALHMIVISRLRMDDTTKAYVAKRTAEGLSKLEIIRCLKRYVAREAYYLI

SEQ ID NO: 434180 - protein, 317 aa, unidentified
MTQTNITTAGIDTSKAKLDIAVHGRTERWQVANVLPGWHALAANLAKAGVTRVGIEATGGYERGVVEHLRAAGFIVKVLQPIQVKAFGRVHLRRAKNDALDAALIAACAATLDQPRIAPDPRLAELAEYLTFLEQVEEDIARFKTRLEHIDEPGLRRIVTSDIARLKARRAAQIRDIAKRLRGHDDLAKRLDLVLSIPGIGERTALALLIRMPELGRLSREEAAALAGLAPFDDDSGKSNGPRHIAGGRGRLRRSLFAAALPAAFRWNKALIALYARLIAKGRVHNAALVACARKLLIYANTVVQRGTPWTEKPLSV

SEQ ID NO: 434181 - protein, 334 aa, unidentified
MENLAVFVGIDYHKDSVQVCVMDDTGRVLGNRSCGNDPQAVADYANRYGCVRGAVLESCEGSADFADHLLARTGWSVDLAHPGYVRRLGQSPDKTDYSDARLLADLERVGYVPRVWLAPQWIRELRRLVRYRRQLVNERRNTKLRIRALLREHRRPCSAPCWGKAWFDWMGQVDLPEDSRWILDRHLDRLQQLNGDVRVVEQRLDDVTKDDAVVQSLLTRPGVGPVTAWVLRAEVGRFDRFRSGKQLARFCGLSPCNASTGLRQADSGLIRACNKNLRSVLIEAGHRLKRYDSRWSALANRLRQAGKPGSVIAAVVANRWMRWLYHEMKTFQAA

SEQ ID NO: 434182 - protein, 427 aa, unidentified
MKDECSRVEAFWQLKKEIRGSKDYLIVGIDVGKNRHSAFMGTATGKTLLKGLRVENSDSGFEHLLAHVQFYQGRDGFNRVVFGVEPTSVYHKPLAEFLIEHDFMVVYVTNEAITKNRALLDGRWDKNDDKDAANVADLISQAKCHYYDLPHINLRDVRGLLSLRRRLKRQEHGTRIRIRNNLVAQYFPELDKLWNQSQPESLAIVRWCLAPEKLRRLAFEDFFQMVTTRYRGNRQYQRLMKIWSMAPYSIGCKSGKALDVEARILVEGLKQVQEQIREVDKAIENICASFADYKLLLSIPGFGPYVSAVVLAAIGNPRRFRNVNQVKRLAGLDLSASRSGNTSRTAVPVLSKKGKAELRYAVYQAALIASTANTLFMFYYQKLLKGREREKGIRTKMRVKLAAKLLVIAWTLMKKKEPFDLGYLKVE

SEQ ID NO: 434183 - protein, 338 aa, unidentified
MYYTGIDLHKKTSFISTLDADGKIVTRANLQNVEEDILAHFATLDKETKIVIESMASWYWLYDLLTGEGFEVVISNPAKTKAIASAKIKNDKLDSHMLAQLLRADLIATVHVSSLETRKLKELLRHRSRLVRDATRMKNRIHMLLMKNNFRSPFSDLFGVKGLRYLEEIDLPDYHRQQVETYLLLYQKLREQIEPLTKRVRALAKENHTAQLLMTIPGIGPITAMFIMAEVDDISRFRSYRNLASYAGLVPSLDASAGKEKRGRITKQGSRYLRTALVEAAQAAARMQNCRVSIFFRRRIVKGGYQKAIVATAHKILQYAFYVWKNQTPYKETYPVCA

SEQ ID NO: 434184 - protein, 352 aa, unidentified
MVVAVQYRSPSLNKNVMVQIYGIDLGMSSFDVSFLSESGSVRHLSGVKNTVHGISKFLLSLPSSAVLCAEHTGVYGDLLLRLCTLNRTCLCFVPGYQIKHSLGLQRGKSDPLDACRIREYAERFYDLLRPCFYPGEEMSELQELYRTRSLLVESRKRLDTLNIGDNCKSSVSLAAGHARRAVLAELNTQISGLDHEIEALIQNSSEFSRNYQILTSIVGVGPVTSCELIIKTENFRKLDTAKKCAAYAGIAPYPKESGKMKCGHKISPMGDKQLKTLLFLCARSAKEHNKEIRLYFLKKHKVEKKHFFVAMNNIANKLLRLIYSLIQKQQTYDRDYIQRDPRCVVISDTNKC

SEQ ID NO: 434185 - protein, 341 aa, unidentified
MNNINLLGIDLAKDVFQLHGVDEKGNAVLKQRLTRKALIEYIANLQTCTIAMEACGGSNYWARKFESFGHTIKLISPQFVKPFVKGNKTDRNDAEAICEAASRPSMRFVSTKTIEHQDMQALHRIRSRLVQERTAIANQIRGLLMEYGLIIPQGIYNIKKRLPGILEDGENELSIIGRNFLLDLLTQLDERTVKVDEYEELIKNIFKRSEECKKVEKLEGIGLLTATALISSIGDVKTFKNGRHLAAFLGLVPKQHSSGNKQQMQGISKRGNVYLRSLLIHGARAAVRAAVNGKKEDAKSKWIIGLVDRCGKNKAAVALANKTVRTAWALLANDTEYKKVA

SEQ ID NO: 434186 - protein, 355 aa, unidentified
MVVVGTDVHKHNHTFVAVDPVGRELGQLTVKAVSSGHARAVAWAREQFGTELVWAIEDVRNLSARLERDLLAAGQHVVRVPTKMMAAARAAARTRGKSDPIDAAAVARAYLHDPDLPVASHDDVSRQAKLLTDRRDALVVNRTRLTNSLRNRVHEMDPDREPGPRKLTALKHQEHLRQWLSTQPGVLAQIALDELDDIIACTRKIKAYDKQIRDLARQHAPALLDIVGCGDLSAVKLLGESAGALRFKSEAAFARHGGIAPIPVWSGADNNKKVRLSRSGNRQINAAIHRIAITQIRDKNSQGHAYYAKQRAAGKGKADALRRLKRHLCRITFRALTTDHERRQPTPTTALQTAA

SEQ ID NO: 434187 - protein, 352 aa, unidentified
MVVVGADVHKRTHTFVAVDDVGRKLGEKVVAATTAGHAEAVMWARERFGTEVVWAIEDCRHLSARLERDLMGFGQSVVRVPPKLMAQTRASARTRGKSDPIDALAVARGFLREPDLPVASHDEVSRELKLLVDRREVLVAQRTATINRLLWRVHELDPDHAPKAGSLDLAKHRRILGDWLVTVPGLVAELARDELADITRLTETINALAKRIGERVRVVAPVLLSLPGCAELTAAKLVGEAAGVTRFKSEAAFARHAGVAPIPVWSGNTAGRVRMTRSGNRQLNAALLRIAVTQIRLDGLGQTYYRHRIAVSGSKTEALRCLKRRLARVVFHHLHTDHQNPNPALPTGSGLT

SEQ ID NO: 434188 - protein, 297 aa, unidentified
MSPSRTRFIGMDVHKDTMAVAYVAQEHGAEVTSLGTIGTRQCDIDQLIRKRQSKATHLIFIYEAGPCGSWLYRYLRKKDDDCWVVAPSLIPAKAGDRVKTDCRDAMQLARLARSGDLTAVYVPQVQAEAMRDLTRAREDALSDCKDATFRLKAFLLRHDIRYTGRANWGPAHLRWLSEVVCPTPTQQIVFQEDVRAVQEHTERLQRLEHELHEHVQAWRLSPVVEALQALRGVQCTVAVTVVAEMGDLTRFDTPRELMQFLGLGPAEYSSGEQRRQGTMTKAGNTHARRVLVEGAWA

SEQ ID NO: 434189 - protein, 394 aa, unidentified
MKLVGIDVGKNSHHFCVMDKETGEFNVAPSSFSNNKEGFDFLINSLKPYSKKSILLGMEDTGHYHVALLKFLLSNGYTVALINPKTTDLTRKMEGGITKNDKLDTITICDVLDTPERKKQYRITKVDRFDLYEQRQLTRHHHNLKEELNVYCNRLQKSIDLVFPEFNTLFSSKYGIVYMNLLKTFGSAEAIASTDIRTIRKFFEIKGKGNRISLTPEKLKECAKNSIGISSEVETIQIKHLVSQIMLIKEQIAEIDKKIEEFSIPNNSPILSIPGISHFSGTSILAELGDIGNYSKPSQIIKFAGVAPYHYESSQYNAQHTAITKKGSKYLRKTLYQIILPVINNNPVFKKYYLLKISQGKGHRCAQGHCIRKLLRIIYHLLETGQSFDPALLR

SEQ ID NO: 434190 - protein, 349 aa, unidentified
MGEVSTIGIDIAKSVFQVHGVDTDGAVVIRKRLGRTKILNFFTDLPPCLVGMEACATSHHWARELKRLGHDVRLMPPTYVKAYVKRSKNDAADAAAICEAVTRPSMRFVPIKSAEQQSALMLHRTRDLLIRQRTQLINALRAHLAELGLVAAKGREGLHQLVTIVMESCDEKLLSDARFACQAIVMQLHPAQTQINGLDKRIIQTHRVNADSKRLDTIPGFGVILSTAVVATMTDPKAFKTGREFAAWIGLVPRQNSTGGKERLGSISKQGDRYLRRLFVLGAIAIVGTARMRPEKYPWVIKLLTRRPAKVVAVALANKMARVAWAVLAKGESYRAPTRPGNAAIAAAA

SEQ ID NO: 434191 - protein, 362 aa, unidentified
MIVLGADTHKSSHTIAAVDTSTGQVLADRTVAVGARGFAALVLWARGLDGERVWALEDCRHVSGALERFLICRGERVVRVSTRLMAGTRRSSRERGKSDQIDAVSVARAALAAGIETLPTAALAGPELDLRLLVDHRERLVRTRVALNNTLQWNLHDLWPELTLPGGALFSKKWTTKIARRLARAEQTMRVRIARDELRRMRELTQAIKALQAEITVLVTEIAPQLVAEPGCGPLTAAKLVGEIAGAERFTSDAKLARAAGIAPIPASSGRTDRHRLDRGGNRQINAAIHRMAVTRARCDPETQDYIARKKTEGKTQRDAIRCLKRHLARRIWHLLQPPRRHSKHPFLDIDGMCRGSVLANR

SEQ ID NO: 434192 - protein, 353 aa, unidentified
MSNILAIDLGKNNSAVCIFDRSSLKCRYKTLRTRKQVMHDLFVDYQDQIEIVLFETGSQMGWVADILWALNIPFEVANTNHAAWKWKNNPNKSDRKDAQRLAMMYHTGFFPTVHVPRRAVRQKRSLINYRDDVVKRITKIKNSIRAILGREDIPLSSGKKGWTIKSLKSIREMAIPVKEVEDLEQIWKGQLHSELNQLDSTIQELNAVESKLNAVGESDEKIKLLRTIPGVGPRLSEAVVAIIDDPHRFKNGRHVSSYLGMVPRRWQSGQVDITGRISKCGNKLLRTLLVEVSWLGLREPWMREIFNKVKHGDKKRAKVAIVALARKLLVICWAMLKNETAFDVDYAKRFIKC

SEQ ID NO: 434193 - protein, 338 aa, unidentified
MDTYAGIDLHSSNSFVGVINGEDQRLYGKRHPNRLDDVLRALDPFQDSLKGVVVESTFNWYWLVDGLQEHGYPVHLANPSAVKQYEGLKHTDDKWDSFWLAHMYRLGILPEGYIYPKEHRAVRDLLRRRLLFVRHSSAHILSLQSMINRNLGLKMSNNEIKKLKPQDIEGLFDCPNLVFMANNSLAAIKFLKKISLDIEKKVKSQVKMRKEFLMLLTIPGIGNILGLTISLEVGDIGRFPAAGDYSSYCRCVESKRVSNGKKKGENNKKNGNKYLAWAYVEAANFARRYCVKAQSFYQSKEAKKNNTVAIKALSNKLSKASFYIMRDQVAFDEEKLFG

SEQ ID NO: 434194 - protein, 400 aa, unidentified
MDETQRFRWFLGIDVSKETFDGCCITMKGERLFSLSTSMNRKGFQELIKQLSGPSVSQESTLVGMESTACYHVNPYSFLISLGYTVIVMNPLLISNFVKLQLRKTKTDKKDATVIAQFLLLNRDSLSQTILSSDISDLRDLSRQRESLVDQMSSTKSEIKRLLTMTFPELEHISGLFSKSMLRLLCHYPSAASIKQAKRSKIAKILIPGSYGKQTDVSVDRILKAAKVSVGTSSATKEIIIRQKASLLIQWEQHLQELTDILIELCGGKIQREKEILTSMKGIGEKSAVNFLIEIGGDMKQFESHKQVIAMAGLDPALYQSGKIDRKGKISKRGNRHLRRVIWIMTTKVIQFNERFKQYYLKRIKDGLPYKMAVLATAHKLIRVMFAMLKNKTLFDPRMN

SEQ ID NO: 434195 - protein, 348 aa, unidentified
MEQYVGLDVSQQTTHLCIIDNDGKTVWRGQCASTPEAIAKTIETKAPKVVRVGLESGPLSTWHWHALKAMGLPIVCLDARHAQTALSLQVNKTDKNDAEGLAQIVRMGWYREVGVKSLASHTARAMLGVRAQLVGMRTNVMNQIRGTLKTFGIVLGKGKGSGRAFEQQVQQIAQRGGLLGDTLQALLAVRRSLGEQLLKLDRRVSTFSKDNAACRHLMTAPGIGVLTAIAVVTAVDDPARFKRSRSVGAYFGLTPKRYQSGEKDVTGRISLCGDPLVRSYLYEAANVLLARTGKWSALKTWGLQLAKRSGMKKAKVAVARKLAVILHRMWVTGEAFRWSNSETTMATA

SEQ ID NO: 434196 - protein, 385 aa, unidentified
MALTGLSGNEGAAMSEESEAFVGLDTSKTKISVAVADGGRCGEVRFYGDIDSSPDAVNRLVKKLSARYQRLHFCYEAGPCGYGLYRQLTALGHQCDVVAPSMIPIRPGDRIKTNRRDAITLARLHRAGELTPVWVPDEAHEAVRDLVRAREGAMLDLRMKRQQLTAFLLRHDRIFPGRKTWSRAHVRWLCEQRFEHPAHQIVMQEYRHTIDDAETRLARLEGQLAEVVPQWSMAPVVEAFQAMRGVGFLAAVIFVAEVGDVRRFESPSQLMGYLGLVPSERSTGDRVRRGGITKAGNRRARWVLIEGAWTYRLPARVGRTLQARLDGLPKAVRDIAWKAQTRLCGRYRRLTAAGKKPCLVTTAVAREMAAFLWAIGQQVAPHLAG

SEQ ID NO: 434197 - protein, 374 aa, unidentified
MPGAGGHPLPAADVRPFDRQVIKTVAEQGRIRLFPNPEQLLGAAFARPRTTSLGDRTMPQPDAFVGIDVAKSELVIHLHPEGTCWRVANDTPGLAGLGRRLKRLAASSVLRIGFEASGGYERQLARLLDRLGLEAYLLDPARVRNFARAERQIAKTDPLDAAVIARCLAALHAELTPNRHDPEAIRLAEHVRLRDAAVDQTIQLRNQLESIAEPFLRRLINSQIAKLKALIMRIENAMRQLIGASPKLAERDRLLQSAPGIGPINAASLIARMPELGHLSSRQVAALAGVAPFDRQSGLRTRNARCSGGRPAVRRSLYLAALVIARSRKGPLAETYQRLRNNGKPNKLALTALMRKLIITLNTMLRNNSTYQPN

SEQ ID NO: 434198 - protein, 399 aa, unidentified
MFAGWDWGTAAHDVTVIDDAGGKVERFALPHTEDGIARALMRLAAHGDPGQLPVAIETSRGLVVDRLLAAGHPVIPVHPNAFHAVRPRWGAARAKNDPGDSFKLADYIRTDIHRLPILAPTLPETLELQALTRQRGDQLGMRIAAVNRLAALLDAHWPGGKTIFAKLHSPIALNFLDRYPNPDAAAAITAARLETFCRRHSYTGRRTGNELLARLNAAPRPASRLGQPVIAQLIRSQVAVVRSLQTSLDHLDAVIADAVATHPYAQLFAGLPRVGVLNLAQIIGEVGPILERANSFDQLTAETGIAPVTRSSGKTHTVAFRHASNHHARQALISWIDNSRRASPWAEQRYTAARQRGQRHPHAIRTLGRAWLRIIWACWRTKTPYRPTEHQPAQQPIAA

SEQ ID NO: 434199 - protein, 352 aa, unidentified
MLQMNYYIGLDAHSSTCTAVVVDEAGEQKLRQTFPTTEANLVEFVSKISGITHLTFEECTLSQWLYVTLIEHVDHVLVCNPVYVAKKQGAKTDYRDALHLAQELRTGHLKAVYHDESHWIELRVLTNNYLALVDDIVRAKNRLKAVFRAEVIDTNTSKFYEDKDRAKELKNPNARFVAESLYDQIHQLEKLKSEYRERFQKNLKKYKPVRNLTTVPGIDLIRASIITAVVCTPTRFKNKHQFWGYSMLVRHIQISAGKIYGNKRVHGRKELRDVFLGAAESALRGDSSLRDYYDALRARGVDHKEAKIATARKIASLCLSLLKNNDTFQNDYDQQQQERTNLRKELNLQAHV

SEQ ID NO: 434200 - protein, 388 aa, unidentified
MLPSIRNASPERTATVRPDLTLYASLELSRATWLVTCLLPETERMSKYSTPGGDGGALLSLLERMRTRAQQMTERPVKIVVIQEAGLDGFWVHRLLEANGIESRVVDPASIAVPRRRRRAKTDAIDGETLLRTLLAWSRGEPRVCAMVVPPTPEEEDSRRVCRERAILLRERIRHTNRIKGLLAGQGIMGFNPLHKDRRQLLDAARTGDGRPLPHQLKAEILREIELIELLLRQIADVEAAREVLAGPKTAKVPSPVVLLKQLKGIGPEIASVLYFEGLFRSFGNRRQLAAYAGLAPTPWRSGTVDQEQGISKAGNPRLRRTVIELAWLWQRHQPASALSRWFHTRVGNERGRIRRISIVALARKLLIAVWRYVTQGEVPEGAVLKAA

SEQ ID NO: 434201 - protein, 344 aa, unidentified
MAEYVGFDVSKEETAFCIKNKDGAVLARGKTLSDPKALFHALKKHTLCPERIVLETGTMSAWLARELRRLGMPVDVIDARQAHAVMKLQHNKTDANDAELLAEITRTGFCRPVAVSSETAQEKRMLLKARNHLVRQRRDTENTIRGLLGSLGIRFPKGAGKLGLRVRSVLQERAELSETIEPLLSCIETLKRAINRLDAAVMAQAKVDPSCRLLMSVPGIGPVTALAFVATIDDPQRFAKSRAVGAYLGLTTRRYQSGEMDYSGRISKHGDGMLRSLLYEAANSLLSVVRKAHPLKDWARRIKKRSCHKKACVALARKLAVILHKMLITGEPFRWPQEKECVTT

SEQ ID NO: 434202 - protein, 344 aa, unidentified
MKIKLLGIDLAKNVFQLCALNQANKVLYNRCVRRARFRSTIAQIEITTIAMEACSTAHYWGRAFEAMGHRVLLVPAQHVKPFVRGGKSDARDALAICEAAQRPGLHPVPIKTIEQQDIQLLHRLRQRQVQHSTALANQMRSLGREYGVLFAKGLNSLMNQLPEALEDGSNELSAVARYALAEQLQCLRETRASMCNLYRQIEQLAVLQPAYTHLLALPGIGPLNASAYLAAIGNGRQFQCGRQVSAWLGLVPRQYGSGGRIQLQGISKSGNRYLRTLLIHGARAAISRGLKNCPPLARWVQPIIARQGFNTAVVALANKLARISWVVVTTGEPFDLKLAFKPAS

SEQ ID NO: 434203 - protein, 409 aa, unidentified
MNKVDIAPFEVFCGIDVGKSLNHIVALDRYDDKPLINRKVPQEEAEIRAALEEAGDFGLALVVVDQFGAFGRLVVGVAKSMDIPVAHMSPRRFRQVAETYGEDKFDEKDAFILADASRTTPRNIEFVGNRAESMAEIKVLSSRRDDIVEERTRCYNRLHDFIHQVSPPLEELFSKRKLHNDLEIRLIARYGGPIGFRQAGRARASTWAAELKYHCVDGPKKVEHVFDVLDRQTVMLPGAAVIEEQIRSIASRIIELLAEEKRLNLMIDQRAKMIPEVDLLQSIPGVGPVYAALIAVEIGDIGRFRDSNHLASYAGVAPRKEESGTSVHKRRKRKGGNRRLKNALMQSSQRSVQCDPLARAYYGRKRAEGKKHLQALRALARHRVTVIFAMLNEGTFYEPPVEVDENGRG

SEQ ID NO: 434204 - protein, 418 aa, unidentified
MGRDRRAVEVVHARCAGLDISKRDAKVCVRIAGAGRRKTVETVTTWGSMTSQILALRDHLIAGRITCAVMEATSDYWKPFYYLLEDAGFDVLLVNARHVKNLPGRKTDVADATWLAQLGAHGLVRASFVPPEPIRHLRDLTRARTAITRERSREVQRLEKLLEDAGIKLSAVASDILGVSGRAMLESLIAGNNDPAALADLAKRRLRSKIPALTEALTGRFTEHHAFLARVHLDLVDQHTAAINDITTRIEATIKPFHWFRDLICTIPGISTLTADVIIAETGADMTRFPTAGHLASWAGTTPGNNESAGKVKTSHTRPGNPYLQGALGAAAMSCAQNPGTYLGARYRRIAQRRGPQKANVAIQHSMLIAIWHMGTNGCLYDDPGADHFNRLHPERAKKRAISQLEAMGYNVTLTHAS

SEQ ID NO: 434205 - protein, 400 aa, unidentified
MLSIGIDVSKGKSTVCGMKPGGEIVYAPFEVQHTREGMSELVSLLRSSGEEVRVVLESTGSYHCPVVTALLENGIFVSVVNSLRMKRFCSQSIRKVKTDRIDAMQIALYGLAYWQELQPTKLPEDTYRELQLLARQYYQMTSLLIKAKVDFNAICDQVLPGMQELMNDHAGRHKLSDFVLRYHHTTHILEMGETRFRKDYCKWAEKKGYRNCERMAALIFATAQNGIPVLPNAPSTQIVITEAIRVLHTVEASRDAILTQMQALAKTLPEYSLVREMPCIGDTLAPRLIAEIGDVRRFHSKRALIAYAGIDAPPYQSGKFCANNRHISKQGNRYLRKTGYEVMQSYVMHKPANDPIFTFIEKKRSEGKSGKLAMVVGLNKFLRIYYGKVTELYRSLPAIE

SEQ ID NO: 434206 - protein, 430 aa, unidentified
MEIVYPRSCGVDVHKSFIVAVICISESVKPKYIKKRFSTFNNQLIQFRDWLIENNCQNVCMESTGKYYIPVYNALEGHISNVVVANPKWVKAIKGEKDDNKDAKWIADLFKFGIVRSSYIPEKDIRILREFTRYQYKLVNMRSSEKNRFQNALTTGNCKLDIVFSDIFGKSASAIVDTILSNNPYTSEDILSKVHAGCKASHEDILSAVEGIQLNQFQKARIRIVQKHMEYLDSLLDEIQHHIDLMVANYEEYIQLLCTIPGINRQSAITIISEIGTDMSQWSSHRKLAAWAGLAPGCNESAGKKKSVKISKAGVYLKPCLVQVAHAAVKDKNCDYYADKFNKISKRRGKKRAIIAIARKILIAVYHLLKTGEVFNPTDMADVETTKKQRIEYVKNNLRNAFNQLSRTGLSEAEILQLIRKESTNSPQIE

SEQ ID NO: 434207 - protein, 415 aa, unidentified
MRAAELRPRSDDIIVGIDLAAREHQAVIVGADGRRLTRFRVPHSRDGIAELLRRSRAKSWQATGRVLAFEATGHVWQALAAILEERGERYVVVNPLAVFRLREARRMDRTKTDLTDAEQIAELARTGMVTSTRPLHGPYLALRRSWGEYVRVRFEAARLKSLLRQQLFGLFPELLEVWSRVDRPGLLAVLRLGLTPAQIAALPQSEFLTRVCAERGGRRLWRAKVRAAHEKAARSVAPDERLEAAALEARRIVARYDLLEAQLAEVQGEVEALLGEIEEARWLATIPGLGFASVAGIIAHTGPIGRYRHGRQLVKLAGTNPTRNETGERTGGYQAMSHRGRAGLRQVAYMATISCLAHNVRLRAHYDRLVSRPERPLAKMTALGACMNKLLLWAFAVMSKRRAFELDHEWKECAA

SEQ ID NO: 434208 - protein, 343 aa, unidentified
MDVGVLGIDLGKNSCSVVGLDPTGRVVLRRRMRRESIVGLAAKLSGCVVAMEACCGAHHLGRLLAAQGHEVRLMSPEYVRPYVKAQKNDDRDAEAIAEAATRPTMRFVALKTEAQLDVQVLHRVRDRLVGQRTALTNQVRSILLERGIVVPQGRRRLLEALQVLSDQPDGSGVGPRVRLLLDDMLDQWRGLDRRISALDDEFAAMARNDPAARRLATIPGVGVLNATALVAAIGDGRTFSRGRDLSAWLGLVPRQASTGGRPKLLGITKRGSKYLRKLIIQGARAALPSLSRTTTPLGSWLRGLLSRAHGNTAVVALASKLVRIAWALLRNQTAFAAGGLAAA

SEQ ID NO: 434209 - protein, 346 aa, unidentified
MLYAGLDLSRQRLDVHVLDEEGRTIEVMAVHPDADALRTLAAHVLRHGQEVSAAIESMTGGRFVHDQLEFAGWDVAIADSAKVKGIAPLAAKTDKIDAWVLADLARRNLVPEIWLPDPRVRAERERARFRLHLVRHRTALKNRIHATLMTFGHSVPVSDLFGTAGRELLAGLALPEPWATTLATSLCMVDELNIRIDACERDLVRLGADHPYIPLLLTVPGVGWVLAYTIASEIGDIARFASPKKLAGYTGLCPFVRQSGNHDLRGPLAKNGPKYLRWALVEAATHAARDAHYRARYERNKKRLGRQRGAKVARIDIARQLAEAIWHVLTKNEPFSPAGPAIALVA

SEQ ID NO: 434210 - protein, 392 aa, unidentified
MYIVGIDIGKNHHEASIVSPEGKQIGRSLRFATTHKGADSLMSFIFKNIGNSPCVFGMEATGHYWYPIYSFLKAKGYTIYVINPIQSDSLRKMYIRQTKNDSIDSFLIAEVIRFGQFGTTSMADENILAMRQLCRYRDSVISSRTEIKLRIGTIMEQIFPEYEKQFSSLWVSTSMGILEKYLTPENIENAPIDELFEIIKDKSHNRLTRAKAISIKEAAADTFGIKIAQDAFSFQLKQLIDRMNFLDKQIEALDCQILEYYEKFDCYLHTIPGIGIIGAATILAEIGDISRFKNSSSLIAFAGIDPTVRQSGEFNSTHNHMSKRGSPYLRHAIFLAATTCSFHNSPLNAYYKKKRDQGKHHLTATGAVARKLTTIIYAVLRDSKPYEPKKFC

SEQ ID NO: 434211 - protein, 413 aa, unidentified
MTDHTNRNADRVLVAIDIAKQFHDALILWPSGKKQAVKIANTRQGYEELLARTGTESNRVCAGFEPTADYHRNIAYWLQQQGVSCHMVSSLSCARAREMLFKTWDKHDRKDACVILYLMSQGLMRPFHDPLVQGYLDIQELSNTYHQITLARSRCQHSLLNHYLTLYFPEMERYFHTSRAQWFCRFLLKFPTPESITRYRQATFIKRAWDVVGRKVAKQRFLEELYETAESSIGLPVGTKGRVVEMLKLQVIRYLQLTEQRQALEHSAEVLLSESADYRHLKTLPGVGPVIALMILAESGDLRRFRHYRQYLSFCGFNLSAVQSGNQRGNYKLSKRGNSRLRYAYWLAATVAVRQRENSFRYKYERYIQKDPENADLKRKARVAVASKLARVAHALVKNNADYRGYHEFGCGT

SEQ ID NO: 434212 - protein, 356 aa, unidentified
MSSNIKYIGLDVHKEAIVIAVLNDAGKLVMESIIETKAATLVQFLQGLRGELHVTLEEGAWAAWLYDVLQPHVHELVVCNPRRNALLKEGSKSDKVDARKLAELLRAGMLRSVYHGENGVRTLRELARSYQTISKDLRRVMNRVKALYRSWGIPCAGTRVYAPRDREQWLNKIAHAGVRRRAELFYQHLDGLQVLRRQVRSEFLAESRKHTAVKVLRQIPCIGPIRSAMLLALMQTPHRFRSKRQLWKYSGLGVETRDSAQHRYVDGHLQRSKKPSQVRGLNQDHNHEMKEIFKSTAISASRCAGPFHDFYAGLLAKGMKPEMARLTLARKIAATTLTLWKKGGRFDAEYLKPQAA

SEQ ID NO: 434213 - protein, 455 aa, unidentified
MRKKIKKAIPVRYHDGLSQLRPNAGGIDIGGSEVWVDVGNKDAESTRMFETFTADLNRMGDWLKSCGIQTVAMESTGVFWIPVCQILESKGIEVYLVNARQAKNVSGRKSDMLDCQWLRILHSYGLLPASFRPAKDIGVLRAYMRHRQMLIEYAAAHVQHMQKALTQMNLQLQHVISDITGWTGMKIIRAIVAGERDRRRLAALRDARTKANEETIAKALEGDYRAEHLFALKQSLELFDTYQKQITSCHDQIEQHLKSLATKADPAELKAARTRKRRHRNQPEFPIREQAFRISGVDLTQIDGIHDSAALSLIAEIGVDINAWKTEKHFSSWLALCPNNKISGGKILRRSTRKTANRPREILQLCAQSLLRSHSALGAYCRRMCGRLGTPKGIVAAAHKLAVLVYRMLKFGHQYTDIGQERYEQQYKQRVLQRLARRAQDFGFQLIPCPEKQVP

SEQ ID NO: 434214 - protein, 424 aa, unidentified
MNNVQAEKLGFVKGKVLIVGVDVAKRINYARFIDSQGYELCKHYRFQNDLDGIKSFISKIKSLERQHGLERTVIGMEPSGHYWEPLAYQLKEYQLGQVFVNPYHVKCSKEMADNSPSKSDLKDALLIAKLVLDGNYFKMYLPEGTYRDLRNLTRERYQLRKKLNNSKNRLIAQLDSYFPEFFKVFKDPLGQTAVYILVHHPFPQDITALTLEELATAIKGASKSRLGLKKALELKQAANDSVGINEGLASARYRIKSCLTEIAFYKRQLSLLEEQMFQYLNNTGFSRNLLSIPGVGVVTAARFLGEIGDISRFDSPEQIIKLAGLNLKTNSSGQRKGKTAITKRGRAELRSLLYQSALVMVCRNEQMSKSYHYYRTRSINPLKSKQALVIIMKKLVRIIYALMTKDELYDPAVALRGDIVTTAA

SEQ ID NO: 434215 - protein, 440 aa, unidentified
MSALPPFCLREVGRFQRDLNHQDTLYSKRDPTEARSQADPRLECSPSMSAFLGLDVAKSSCVAHILTDGAPRTIEFENNPRGFAKLIRWLPDCDATSVSACMEPTGNYHLDLATRLFEEGYTVFVANPWSVKQFGKAAMNRAKTDRADARVLAQFARAGLCRYPWAPVADERAELTALNRRRGELMERKVALSNQRHSARCAGVKDSLDQELDFVKQAIREIDAAIRDHIRAHEDLHEEYRLLQSIPGIGPVAAAAIMAEMADWRRFDNADQLCAYAGLVPQPHESGESVRKDTPLCPLGSHRLRRACYMPGLVVIRTQALFSEFISRMRRESRRPKVIIAAIMRRLLRLVYGVLKTGKPYDPAYQPDRPQPRTDSQESVDATMDPRGETEAGSAGEQPAKGYPRGAHQPVIARGRLRLPHARTPSPSPGGRLPIPEKTH

SEQ ID NO: 434216 - protein, 339 aa, unidentified
MRLYVGADLHANNIFMAVIDKKGKRLEQKKLPNDLPVILEYLKPRRKEIVGIVVESTFNWYWLVDGLMGTGYPVHLANPSAIQQYSGLKHVDDKHDAFWLAQMLRLEILPEGYIYPKEERPIRDLLRKRRHLVKLRTSLLVSLQNIISRNCGLQCRANEMKRLKEDRVSPLLEGNADLALAGKTSKEIIDQLTRQIHRIERSIVQRVELKESYRYLLTLPGVGKILALTIMLETGPIARFAQVGDYASYCRKVPSRWTSNEKTKGKGNLKNGNKYLAWAFSEAAEFARRYDAQARAYYTRKMRQTNFMVAHSALAHKLSRAAYYLMKDQVSFMPEKLFS

SEQ ID NO: 434217 - protein, 388 aa, unidentified
MFFLGIDIGKNTHVASLLDEKAKIIFKAYSFANTLDAAEALLVKLEPYKDSLEIGMEATGHYWLSLYSFLAEHKFIVHVLNPIQTDGWRKGIEIRKRKTDVIDSVLIADLIRYGNFLETSLADEDILSLRNLSRFRVYLVNSVSDLKRKAIAVLDQIFPEYASVFSNVFGQTSKELLKSLSLPSDYENLSATKIEEVLSNITQKKKASKTISTLSDKASRSFGISFCKDSFAFQLKLIIEQICFIEEQIASVELEIDQLMSKLGTNIKTIPGVVSVIGAVILGEIGDIERFDNPSKLVAYAGLDASVSQSGEYEASSGKLSKRGSPYLRKALYMAAQRAEFCDPVFHAYYEKKRNEGKHHLVATNAVARKLCHTIYAILKKDVPYEVQ

SEQ ID NO: 434218 - protein, 418 aa, unidentified
MKVVYPICCGVDVHKTFLVATIISAQGITPHYSKKRFSTFNNSIFQFKQWLIDNNCFDVCMESTGKYWVPVFNLLEDTIHVTIANPKWVKAVKGNKDDTKDSKWIGDLFRLGLVPGSYIPIKPIRILREYTRYRSKLVSCRSSEKNRFQNAFTVCNVALDAVVSDMFGKSASSITDYLVSADSFDPEYCSSLLQRSLKKKADTVIQSIEGYQMTKEQKERIVMVRSHLDFIHQSIATLDEKLDKMVAPYEGAITLLCTIPGVARASAITIISEIGTDMSQFANSKRLCCWAGLTPSNNESAGKKKSVRITRAGVYLKPALVQVAHAAVTSKHSPYYKLKYERIGKRRGKKRAIIAIARMILTAVYHMFVTGEVFNPSDLYKIDMPQELVDKQKEKAVKQAAKLLISLGLIKATDISVA

SEQ ID NO: 434219 - protein, 351 aa, unidentified
MWIIGVDYHPSVQQIAFVNTDTGECGERRLSHSDREAEKFYRELKAAGCSVRVGMEATGHARWFERLLAELGFELWIGDPAKIKAKRVRKQKTDRLDAALLLELLLEDRFPRVWVPSPENRDLRQLLWHRHRLVQMRTRIMNQLQAAAMNEGVRRKKALWSKSGRAQLESLPLAPWAARRRHDLLELLDRLSPTIEELSAAVEQQVKHRPEVLRLMTHPGVGPITALAFVLIIDSAERFACGKQIASYVGLIPGEDSSSDRRRLGHITKQGNSLLRFLLVEAAQAVVRRDPDWRRRYTHLAMRRDKRIAKVAMARKLAVRLYWMMRKEWNYEQLKKFGSYAGESEHGHGVQ

SEQ ID NO: 434220 - protein, 340 aa, unidentified
MAAVTYGIDIAKNVFQIHGVDEDGRVVVRKRLSRAQLNRFFSNHPPTLIAMEACSGSHYWARVLSDNGHDVRLIAPQFVKPYVRGNKNDGNDAAGICEAVGRPDMRFVAAKTPEQTSILMLHRVRDRLIGQRTALINQIRGYLAEFGIVIRKGASCVRRELPSILEDAENAVPWSAREMFAALYEELVLLDGRLKKQDGRLRAVFDADPQCKKLAAVEGVGVLTATAFVATIGDPTVYKNGRQVAAWLGLTPREHSSGGKQRQLGITKRGDCYLRKLLIHGARSALRVTPRRQDRKSRWVEGIRARAHDNVAAVALAAKNTRILWSLLANEGEYNPALSA

SEQ ID NO: 434221 - protein, 347 aa, unidentified
MEKDSKKTAEKTRRYVGMDLGDKKSRVCIVDEQGKIVSQEWVVTSPEAFLKRFSGEAPMLMAMEVGTHSRWASELLRRCGHNVRVADARQLALITNSDAKCDKRDARTLALLVRADPRLLSPLEHRAETLQQDLTAIRMRDNLIETRTRLVSSVRGVVKATGARLPHCETACFPTEVADGIPEPLRPALAPVLEVIDQLNEEVYEYDCRLEHWARTRYPDSTRLTQVKGVGTLTALTFLLTVGDKERFSRSRSIGGYLGLRPRLGDSGDSHPQLRITKAGDGLLRKMLVECAQYIVGPFGQDSDLRRWGLKVIEEGNGSKRARQRAVVGVARRLAVLLMSLWKSGQT

SEQ ID NO: 434222 - protein, 410 aa, unidentified
MSPLYVGIDVSSKSNVAYLMKPDGSKHSNFSVPNTRDGSRQLVKRILSAITSESLTDVVIGLEATSVYGDNLVCFLREDGSLAPYNKKIHVLNPKQVNKFKLSYNDLPKNDYVDSFVIADCLRFGRINKEVYLDDYRYAALKNLTRARFFAVQNLTREKQRFLNQLFKKYSTMAQEKVFSDTFSTTALAVYESFESAEALANMDLHQLTEFIIEKGKKRFPDPDSVAKAIQKAARSSYRLPKTVNDSVNQVLSISISSMKALESQIKAFDKAIAAQMELIPNTLTSVNGIGPVYSAGIIAEIGDINRFPNQAALAKHAGLVWSQHQSGDFEVQNTRLIKSGNRYLKYYLCEAAMSLVRCDAEYSRFYHLKYKEVNKYQHKRALALTARKFVRLVFRLLKDNCLYRAPEAH

SEQ ID NO: 434223 - protein, 345 aa, unidentified
MQIAILGIDLGKNSCSLAGLDETGAVIKRRRVRPENIPAFTQSMPACVVAMEACCGAHHLGRLLAAQGHTVRLMSPEYVRPYVKAQKNDERDAEAIAEAASRPTMRFVALKSEEQLDVQTLHRARDRLVGERTALINQLRAILLERGVRVAQGRHKLAQHLAAMLDAGNDPPIGPRMRQLIEDMRAEWLALDHRIAAFDNEFAARARSDADARRLATIPGIGVLNATALVAAIGNGETFARGRDLAAWLGLVPRQVTTGGKPRLVGITKRGNKYLRKLLIHGARSVLPGLAASATPLGGWVQGLLKRMHKNAAVVALANKLARIVWVVLRRGAAFEAAAASSAAA

SEQ ID NO: 434224 - protein, 365 aa, unidentified
MTKDNKISFKGKSIYLGIDNHKNSVTVYFICENINHGCHTFKPSGKEIGRYLRRNFPDGTYYSAYEAGYCGYKLHEELQAEGIKNIVINPSDVPTNDKEKKRKNDAMDSYKIARGLKNGDLSPIYIPSRMRQEDRSLVRLRSQLVKDQTRCKNRIKSTLSFLGLEIPDNILESHWSKRYIEYLKSMAEAKKSTDSETLLILIDDLLQKRASILRVTRKIRALSSTEPYAEMVEKLRSIPGISILTAMTILTEIIEIRNYGPEELSRYLKLDHLVSYVGLVPNEHSSGEKESRGPITKRGNNYLKKVIIEASWIASRKDPALLLALQNYSERKIIKTKAIIKIARKLLNRIRFILLNEFYYETMVN

SEQ ID NO: 434225 - protein, 373 aa, unidentified
MTSIIRIGVDTSKSVFVLHGVDASEQPVLRKKLRRRQVLEFFAKSEPTEIGMEACGGAHYWARELRALGHEAFLLPPQYVKPYVKRNKNDSADAEAICEAMSRPTMRFVPVKTADQQAALMLVGTRDALVRRRTQLTNMIRGYAAEFGLTAAKGLAKIEPLLTRIAEDAKLPELAKQLFALHAQEYASLKRAIEKLEAELMAWHKHNEISRRLVEIPGIGPIGAILAAMKVPNPQAFSCGRDFSAWLGLTPKDHSTAGKTRLGVITRAGDEALRSVLVAGATAVIQHVRRGQGRPSPWLLALLRRKPPKLAAIALANKNARIAWKLMVSGERYNPARASTESEGRGAALRDGSAPRPSLTSPGRSRKTVAMNA

SEQ ID NO: 434226 - protein, 368 aa, unidentified
MKQVTTYVGIDAHKKDLFVAMLIGHAPTPVTWQLANEPQAVRRLARKLEREAPGAVQVFYEAGPCGYALQRQITTTRVRCDVVAPALIPRKPGERVKTNRRDARKLVELGRAGLLTAVQPPTPEDEAVRDLARARDDAREDLQRCRHRLGKLLLRRGLHYAGRNWTRAHRQWIDSLRWMHAAERAVVDDYLLAIDHTEARLVELDARLSEIAATESYREPVGWLRCFRGIDTLTAMLILAELHDFRRFASAPALMAYLGLVPGEDSSGEKHRRGRITRTGNALVRRLLVETAWHYQHRPGVGVALARRRKGQPSRVIAIADKAQQRLCRRFRKLAAEHKPPPKIAVAIARELAGFLWGALQPTPAPAT

SEQ ID NO: 434227 - protein, 355 aa, unidentified
MDSKKYIGMDVHKESISIAVMNGAGKIVMECVIETKASMILQFIDGLRGDLQVTFEEGTSAAWLYDLLKPHVTKVVVCDPRKNVSMKEGNKSDKIDARRLAELLRLNHLSPVYHGEHGLRSLKELVRSYLTITKDLVRVMTRVKAIYRSWAIPCTGKQVYAPRHRVEWLGKIGEPGVRRRAEFYYQQLDALRSVRQEVRRELLAEGKKHKAWKLLCQIPSIGPIRAAVLLGILQTPHRFRTKRQLWTYSGFGIETQSSADHRSVDGQLERVKKQSSIRGLNRNCNHDLKNLFKGAAIVASSKPGPFQEFYTALLTKGLRPEMARLTLARKIATIVLMVWTRGACFEAQHLKPQTA

SEQ ID NO: 434228 - protein, 338 aa, unidentified
MTIETLGIDIAKNVFQLHGVNGGGRVVFKRRVMRDQLLEVVARLDRCTIAVEACTGAFYWARKFEGLGHQVRLISPQYVKPFVRRQKNDGNDAEAICTAARQPHIPFVPKKTVEQQDIQTLHRARQRMVNHRTAVVSQIRGLLLDRGFAMAKSITRARRLVPEILADTTNELTALAREAISELYDLFRDLDRRIASFDKKIDGIFLESEPCRRIATIKGVGPKTATAIIAAIGDGSEFKNGRHLAAWIGLVPRQFSSGDRKILMGISKRGSQHLRSLLVHGARAVVRTAPSKMDPNNTWVNQLRERRGFNRATVAVANKNARIIWTVLRTGEPYRAAF

SEQ ID NO: 434229 - protein, 346 aa, unidentified
MMIIGCDFHPSWQQVSWLDSETGERGEQKLVHGSGDGQRFYQQRTGPMLIGMEATGNSQWFIELVQDMGHEIWIGDAAQIRASYVRKQKTDKRDAAHMLKLLLEGRCPRLWTPDREQRDLRQLVLHRHKLVLIRSRVKNELQHLALNKGVQRKHRLWSQAGQKLLRELPLKPWAACRREDLLGLLAMLDQQIGKLDGAVQQAAEQHPQARLLMTQPGVGPNTALAYVLTIGEVSRFPRGKQVASYLGLIPREESSGGRQKLVAITKQGNRLLRSLLVEAAQVTVRYDPGFRREYLHRCHSKPKAVAKVAAARKLAVRLYWMLRTQKPYPEVVRIESSSRVALVGAS

SEQ ID NO: 434230 - protein, 446 aa, unidentified
MLDVVTKTDKTPVLGRMLSKYVGRKTSSIENDITKARNHSRQRGNIMRVVFGIDVSKASSEVAILVNGEKIHGYTIPNDAIGFNRLLGDLKTVHQPEIVFEATGVYSRRLQAFFENNSYAYTRLNPLESKKQLDSLRVRKTDKIDAEKLATSQFILNRKPSYIQEAIYQELRDLSRFYQNLTEDIVCAKNRLHKVLQITFPELENILSAPTGEQYWNLVMTFPCNSFVLESDDATLTAIIRQSTVKRISEKRVTYLVDKLTKLANQSYCAVKKTSPVIEEAKYYAGELLRLSEHRQSVLEEMVTFAQSLPEYEILLSIPGIAETTATSIIGELGDIRRFHSANQINAFIGIDLRHYESGNFLAKEHITKRGNPYARKILFKCIHNIASASHTNPCHIADFYEKRKRQSQVTSTKPHTIASIHRLIRTMYYLITHNKLYDYTSTQNR

SEQ ID NO: 434231 - protein, 402 aa, unidentified
MNAVGIDVSKGKSMVAIMRPFGEIVSAPFEIKHTASGINSLVELINSVEGESRIVMEHTGRYYEVLAHQLSEANLFVSAINPKLIKDFDNDSLRKVKSDKADAVKIARYALDKWQNLKQYNVMDELRNQLKTMNRQFGFYIKHKTAMKNNLIGILDQTYPGVNTYFDSPARSDGSQKWVDFASTYWHVDCVRKMSLNSFIDHYQNWCKRKKYNFSQSKAEEIYGKAKELVPVLSKDAITKLIIKQAVDQLNSASTTVESLRTLMNETASKLPEYPVVMAMKGVGTSLGPQLIAEIGDVSRFTHKSAITAFAGVDPGVNESGTYERKSVPTSKRGSADLRKALFQVMDVLIKTHPQDDPVYQFLDKKRAQGKPYYVYMTAGANKFLRIYYGRVKEYLSSLPES

SEQ ID NO: 434232 - protein, 422 aa, unidentified
MSYCPVAGIDVSKQFSDMCILSPDNKIFAQEKIYHDETSINRANALLQKAERLFFSKPVIVMESTSHYHLILFQFFSEHGYDVIVVNPLQSNSMKDFSIRKRKTDRVDAFKLAMMYRTKTLRPSQIPQTATRALRQLCRHRAELLNDVSSYKNRLTALLDQTFPGYDKVFSDVGGVTSCAVLVRFPTPTILLVEEESELVEVIAAASKSGYSFAKKKAGLLISAAQKAQTLGIHSCADETLIVCTIQMLRTLSESVLQIETAIDNLLAQIKEMRNNVSLLQSIPGVGSHSAALLLGEIGDISLFKKPKQLAAYFGLDPTERQSGSFRGTKNKLSKRGSPYARAALHMGVVNSICKRGKDSAANPVLLSYYEKKCKNKPAKVAQAASMHKLVFIVFAVLRDQKPFELKTPEQHAVEQGFVKAA

SEQ ID NO: 434233 - protein, 409 aa, unidentified
MTVFCGIDWAERHHDIALVDEAGTLLAKARITDDAAGYHKLLALLAEHGDSPEDPIPVAIETSHGLLVASLRTGSRRVFAINPLAAARYRDRHGVSRKKSDPGDALVLANILRTDMHTHRPLPADSELAQAITVLARAQQDAVWTRQQVANQVRSLLREYYPAALLAFQGKQGGLTRADARVVLTLAPTPAKAAKLTRAQLRAALKRSGRLRGCDAEAERLRDIFRAEHAHQLPGVEDAFGHQLLALLKQLDATCEAADDLAEAATAAFHQHADSEILLSFPGLGPMLGARVFAELGDNRGRFTDARALKSYAGSAPITRASGKKRFVGRRFVKNNRLINAGFLWAFAALTASPGANAHYRHRREHGDWHAAAQRHLLNRFLGQLHHCLKTRQHFDEQQAFASLLPAPA

SEQ ID NO: 434234 - protein, 342 aa, unidentified
MSKFVVPGGDVSALLERFEHLQRKASARSGRSFRIVSIQEAGLDGFWIHRVLEDSGIESYVVDPASIAISRRRRRAKTDRIDGETLVRALLAHKRGEPRVCAMLHVPTPDEEDSRRLVRERKALINERIRHVNRIKGLLFSQGVSGYEPLNRDRRERLEALMTGDGRPLPKALKAQISRELARLELLIEQIGDVEEARDAVLAEAEHSTRGPALLLNLRGIGPEFAAVLWSEGLSRRFDNRRQVAAYAGLAPTPWQSGQISQDQGVSKSGNPRLRATLIQVAWLWVRHQPTSALAAWFKARVSQNGGHRKKSTIVALARKLLVALWKYVNAGVVIEGAVVRT

SEQ ID NO: 434235 - protein, 432 aa, unidentified
MSERKSLELRVSVDVGSRRHSVAIGLPDGQVLEEFEIAHRPEGFQEFFSRIEKHQKAQGCGVAVAMEGYNGYARPLDTLVRQRGYRLYNINNLKLARFKEIFPGAAKKDRIDARKGLELFQLRDHLPLAKGVLQEVTGTPKENEILKRLTRRRRRLVNERVRVVNNLQSDLQAVCPGLLEITTEASNQWFLNFLLSADSLPQLARLRKSTLLKIPAVGRKYASLIEQWQKRAHFSDEIEWVNEMVREDALRCLELDEKIRTLEAKIEEIAKSSKIAKILLSIPGFGPVCTSELAGEIGTVERFSKEGSLALYLGMSTLDNSSGDYHGSKQPKHVNTRAKAAMMIALDRHRKYVPESQRYYEKKRTEGKKHNQAIRSLGRHLCRIIFRMLRDQRNYEIRPQQGNTKTKVRSRSCVKTKIRRPKISATHLKQKV

SEQ ID NO: 434236 - protein, 413 aa, unidentified
MSVPDPTQPPRSTAGVDWASTDHAVSIVAPDGEQTDRFSISHDKAGLRTLVRRLLAAGVAEVGIERPDGPVVDALRGAGLVVYVIPPNQVKNLRSRYGSAGNKDDRFDAYVLADVVRTDQRRLRPLLVDAPVTTALRQTVRARRDLVAHRVAVANQLRAHLQTCFPGAVGLFADIDSAVSMAFLERFTTQDRADWLSPKRLAAWLVSVGYSGRTPPETLHDRLRHAPQGATGPAGDSAAAVTAAFVAVLRTITAQIEVLAARISEQLDLHPDTPIFTSLPRSGRVRAARLLAEIGDARGRFPTPDSLACLAGVAPSTRQSGKVKAVTFRWGADKQLRDALCDFAGDSRHANPWAADLYTRARARGHDHPHTVRILARAWANIIWACWSTNTPYDPERHRALQRILNQDQPAAA

SEQ ID NO: 434237 - protein, 362 aa, unidentified
MKSTTVAVDLAKSVFQLAVADASWKVVETHRLTRSQFERWFHNRAVSLVVMESCGSAHHWARHLSGLGIEVKLLPAKYVRAYVKRNKTDAADAAALLEALRASDIAPVRIKSVEQQALQGLHRTRSLWMATRTSRINALRGFCREFGLVIPQGSRTGVEAMARALADPRSAIPELIRGSMKLLIEEIRLLEQRIAQLEQELSAQVKHSPACQELLSVPGIGLLTATAMVAATSGEVGHYRDARHFASWFGLTPKEYSSGSTRRLGRISKRGDRYLRMLLTHGARAVLRSALMARQAGHQVDGLKEWALRVQGRTNHNKAACALANKIARICYAVLKHHEPYGSQTRREENKKTNRTAYAVAG

SEQ ID NO: 434238 - protein, 408 aa, unidentified
MNSITNQKINQVTEKTLVIGIDIAKRTHYACAVDERGRVLQKSFPFSQSREGFDAFYERLLVLRAAHEKSEVLVGFEPTGHYWMNLAAYLSAHGIPFVMVNPHHVNRSKELDDNLQTKNDQKDALVIARLLRDGRFSYPRLLENVEAELRNGATLRSKIQEDLNALQNRIIRWIDRFFPEFTMVFKDFGKMAYAALEMTPLPSDIQGKAPEELLFLYRQVEGMKSPQLPKAKQLVEVAQHSIGLTEGLVMARIEIATLLTQYKLMQSQLVTLTEQLTEIAKEMTDYEYLNSVPGISDVTIVELLSEVGSLTHYEHPRQLIKLAGLTLRENSSGQRKGQKRISKRGRRKLRALLFRVMMPLLRHNEAFKKLHEYYYTHYQSPSKEAIDCRTVWKVTEDFTHFVQEESVF

SEQ ID NO: 434239 - protein, 382 aa, unidentified
MSAERVNDCYVALELSQRTWLIGFLLPGTDKVQIMTVAGGDAEALLSALGRIESLAGTRLPAECTMVSMRVCYEAGYDGFWLARYLIDRGIDTTILDPSSFLVSRRGRRVKTDRIDVEAMVFTLKAYLLGDRSVCRPVRLPSVAEEDAKRLSRERTQLKKERTRHVNRIRALLVLHGIRSVPGLWGGRWKEALSNIRTGDGRELGRFIFRELCRQFERLDLVHSQLKSLEKERIQACETEGAINDSGKIRVLKQLDGIGEVGATQLVAEVYHRTFKNRKHLASYLGLSPSPYSSGEVHRDQGISKAGNKQARVMLVELAWCWLKYQPQSELTRWYRARFSGHGSRSGKVGIVALARKLAIAFWRFIEDGVVPEGATLAVTTK

SEQ ID NO: 434240 - protein, 328 aa, unidentified
MGIDVAKATFDFCLLSSTESCLWRGQFSNDAHGIARFLAQLPAPSRKPAQIHFALEATGVYGKALVAALHQAGLAVSVLNPAQVKYFAFSVLRRTKNDTVDAEIIARFCRERKPLATRPLRPIEEQLKVLVHERESRVGEQTRERNRAKKDPFQIALPTLISRQRQQRLKQLDKEIAQLDAAIDSLIASDESLSNQSQLLCSIPGIAAVTAAKLLSELAGKEFQSARQLAAYAGLTPAEFRSGYFLYGKTHLSKIGNAFLRKALYLPAAVARRWCKPLKPWIAILESRKLHHLAIRGAIMRKLLHIAFGVLKHQKPFNPLLVFIPKTL

SEQ ID NO: 434241 - protein, 315 aa, unidentified
MTTKTERYVGIDVSKDRLDLAVLEEKRLEQHTNTTGGVKRLVDAMKELMPALIVVEVTGGYERAVVQALFEAGLPVARVSGYRARQYARAKGQLAKTDPLDAMNLAEYGKHVQPRLFEAKSEQGQCLAGKLARRRQLGEMIQAEKNRLRLVYGEIGLSIERVIEFLQGEMKQLDEEIRGYLNNEPELLEQEQLLRSMKAVGPVTAATLLAELPELGKLDNKQIASLVGLAPINQDSGKRSRYRKTGKGRPSVRNVLYMAALTGIRYNPVLKKQYDGLVARGKVKKVAITACMRKLLVILNAMMRDQVPFQCQVVT

SEQ ID NO: 434242 - protein, 347 aa, unidentified
MVYVGIDLHRNRSQIAVLDQQGGELLSRRIVNDRNTFLELLHGLGDDVQVALEATYGWEWLADLLEDAGYELHLAHPLRTKAIAAARVKTDAVDARTLAHLLRTDLLPEAYIAPRELRELRDLLRHRVALTRIRSALKQRVGAILAKQGIARPYSNLFGPGGSRFLAELELREGPRRRLDSLLALIAAFDREIDTTTKEIEQRASEDPYVDVLCQIRGVGRYIAMLVIAEVGDITRFPSARHLCAWAGLTPTVRSSDGKARLGHISGQGSPALRWALVEAAQHAPTGGGPLRAAYERIAKRRGKQVAKVAVARKILTLCYYGLRDGEIRCLAPRAKARTIRTTAVTR

SEQ ID NO: 434243 - protein, 339 aa, unidentified
MNSMAVGVDIAKQVFQVHYVDQHTGEIVNKPIKRAKFLEHFANRAPSLIGMEACGGAHHWARQLAKMGHEVRLMPAEFVKAFNIRNKNDAADARAIWLAVQQPSKPVAVKTEMQQAMLALHRMREQLVKFRTMQMNGLRGLLTEYGEVMSRGRAKLDQEIAIALGRLAERLPGALIDTLREQWSGLARLDEQIAEIERRMLEWKKEDKAVKAISEIPGVGLLTATAAVAMMGDAKAFRSGREFAAWAGLVPKQTGSGGKVNLHGISKRGDTYLRTLLIHGARSVLSHAKEPGPWVEQMKKRRPANVVIVALANKTARTIWAVLAHDRPYRKDYVSVKPA

SEQ ID NO: 434244 - protein, 350 aa, unidentified
MENAATIGLDIAKNVFQVHGADIDGTPLFNRKLRRAEVLGFFERLPLCLVGIEACGTSHYWARCIAKFGHDVRLIHTTYVKAFVKRGKSDAYDSEAISEAVTQKTMRFVPIKSADQQAAAMIFRTRSLFVRQRVQATNALRAQLAELGIIADTGHGSFKFLAGTVRGIEETGFPKAARDALEEIVQQIECLSERIRKLDHQIVARANRDEDMRRLMTIPGVGPLIAAAVKAIAPDPSAFNSSRHFAAWIGLTPKSHSTGGKVLLGRISKMGNRQLRSLLFLAAVTVLGTVKDDSPMVRWAKRLRERRPFKVAAVAVANKLARIIWALLVKGGVYARSKIASSSEAAASEA

SEQ ID NO: 434245 - protein, 353 aa, unidentified
MRKSYFVGVDLHKAVVQVCVLDENGEVVNEKRFRGQTLAEGLAAVALVKSYRRARVAVEAVGFNRWFVDALVAEKVDVLVVDPVKLNLRASGKKTDRRDAYELARRLRLGDLDRNAKTYYATDVELGQRRLTRTKHALVKERQRTVNMLKSFLAAHRLPCPGREPYSSRGLKELGELKRLLTRIDETLGYTFSILVRLLEDIQTSIEALEGRIEHEAKAPAIAALDEAVPSVGPQTALTLVCELGDVTRFRDSRAVASYAGLVPRVANSADTSHHGSITKRGNEEIRWILNECAVRLLATNELAMKWAEPRLKRAHKNKVRTALARRLLVGIYVTLRRGEVFSLERCLTTKAA

SEQ ID NO: 434246 - protein, 341 aa, unidentified
MKSTTIAVDVAKEVLEVAVSVRPGQVSVQKRLSRAAFVKFCTDQPPATVLLEACGSAHYWGRRLQSIGHRIVLLPPHATRPYVFRNKTDRTDTRGLLEAFRNEDIHPVPVKSVSQQALTALHRLRSTWLATRTARINTVRGLLREFGCTIPVGAHHVLAKTWNLLADPESGLPDALRPGLAAACTEIRDLEGRIRVVEEQLQALADQTPAVARLRSIPGVGLITATALVACVGDVQRFPSGRHFASYLGLTPRERSSGLVRRLGSISKRGDVYLRMLLIHGARAVIWAAKKRPTPDRLRVWALHLEKLRGHNKAAVALANKLARIVWAVWKHDVDFREVAA

SEQ ID NO: 434247 - protein, 345 aa, unidentified
MSVYVGIDVHRKRSQVAVIDARGEVLVNRNVPNGVEPILKVIGGLPPGTPAAFEAAFGTGWLVELLEGYGFDPHLVHPLRCKAIASARLKNDKVDAAILAQLLRADLLPEAWIAPPAVRQLRALLRHRVALVRLRTLLRNRIHAILADHGHDRPGGGYWSGPGRAWLASLDLPAVSRELVEDDLALIGALETVIDRLDWEIRQRGRSDPRVKVLTQLPGVGPFIALVILAEVGDVSRFGSARKLASWAGLTPTVRGSDRVAHYGHISKQGSVLLRWALCEAAQTAKRSPQFAASFQAIAQRRGKKIATTAVARKLLTRAWHLLTDADRAATPPPAQAAAPPAQTW

SEQ ID NO: 434248 - protein, 404 aa, unidentified
MKGPIVSIDVSKGKSDYQAFKEMNVKYTGSRSIKHTKEGFDEIVSLVREMEKKLETEVCVVYEATGVYHRVLKKVLEDNNIKQFIINPLLSAKTRKNDSLRSPKTDKLDPKSIAKTYYSHSLHNSHKPETIYHELRELSRYYEDILVHIRKDKVAFRAQLDIVFPGYDTLYDDLYGPVALAIIEKYPHPEILQKKKINTVSKVIQNKTCHRQAVSDTMADKAIEYSKTIYSGCDKDDIEVLILQRFIKKLNEDMAEAERTIGEMIKLAQELPDFNIIKSIPGIGDNLAARIIAELGDMTRFKKKNELVAFAGLDPRISESGQNDGDHMHITKKGNKRLRCLLYLAVTCSIRLKRDDNSIKDFYIKKKQQSNPMCSKAAKTACASKLVRIIYSMCKTGELYQYNK

SEQ ID NO: 434249 - protein, 342 aa, unidentified
MEISTIGRDWAKSVFQVHAINDAGEVVVRTTLRRSQVLSFFAKLPPCLVGMEACGTSHHWAREILKLGHEVRLMPPAYVKPYVKRGKTDANDAEAICEAVTRPTMRFVPVKSPEQQAALALHRTRDLLVKQRTQLVNMIRGVLAEFGIEMARGLHHALALAKRLMDGDAAEVPTLAQRVVASLAHQIGAVQEQLASLEKELVAWHRSSDLSQRLATIPGVGVIAATALAASVSEPERFRSGRQFAASLGLTPLQQSSGGKEKMGRISKMGDRYLRRLLVVGMTSLVRRARTAPASVDPRIPAMLERRPARVVTVAAANRTARIAWAIMTRGGSYRKPVPAIA

SEQ ID NO: 434250 - protein, 421 aa, unidentified
MENTAARKRKQVPEGYLIIGIDPHKKRHAAVAITQDFTIRDKFKFDNTREGLETILRRTRTEMVKADCRGVMFAIETGGHYWRNIAYFLDKQGIPFRFINQYTLKRRREGKDLNHKKNDYRDSEVAAQLLCTGEFTESTIPQGVYAELRTAHNAYRRLVKERTRITNLVKGLLDGLFPEFTQVFKDPCGLTSLSVLSTCAIPAVIAGMTENEFVAAIEAKHQGRLMRKKLRELHYKAKTSIGIAAGARSVSSEISFLVEKHELIRRHICIIERTLVRLVDETEEGKYLLSIRGLNYIAVAGLLAELGCFKSYRSAKQMIKMAGSNPTESESAGKRGAHTPMSKQGRPVLRYCAWTSVIPMLRFNSDFRVWAKQRRERPAHANPLNGREVVGAALNRLLRLSFALVKNQTYYRLPQLVQVTG

SEQ ID NO: 434251 - protein, 518 aa, unidentified
MLRNAVGLDPEAKGFASAYVKAEEGKAKIKSFLSGQEDLKRFVSWVKKQGDVIIAIEGRNGQSKPIENALRSEGIVFYSFKPADVTKFRKAVLGQNKNNARDAESVARYAMALESQGKLEGCRRVFFPDEELRMLTRGYEQKSKAKTMEVNRLWKIIRAASVDLYLTLAGKHPDNEVRENIIQKQGILQLLSEKPDLVEWKGLSEEEFLGAMGNRNYQGRMELIKELKKITKTFEPQSDALTYLIKSSADQVLSLSRQMREIGKLLNTITQENQAMQVLRANKGISTIIASTLVAEMIDIQRFAGNNNLASYSGLCRKEHSTGERSGEASNSVFNRRLKDAFMSAARNFVHFNPESHLSGYCRNLIKGGMKHTEAYKRTARALVRTVFRGLSSLHQAERADEGADEMKMRESDMASGNNNRSDNNHPSNISAFSLAHNKGQSQKESSDSIAGEKVDLSDGKERLPLNGSETHRLSGELETNHLSANREIPEGREELLKLLERIEKKIVTHYPPKPPRR

SEQ ID NO: 434252 - protein, 434 aa, unidentified
MSINCGIDWAEVHHDVALVDENGTVVARKRIDTGTAGLTALLEVIAESGGAPGTTPIAIETDKNLLVVALVEAGFTVYPINPRAVARYRERHGQAGGKSDPGDAAILANILRTDRAMHRPMPAISEHGRAIKALARQHQEAIWALYQTISRLRSVLLEFYPGALQAFPNLKHRAAVAVLSAAPTPASGRALIRRKVVALLHHSGRRNDPNLVERILRELKTPALGQPPQVEEALGHAVTGLLAVIASMQQSVDSLENALGREFDSHPLAPILRSAPGLGPILAARVLAEVGDDPARFATANGLRAFAGTAPITRASGRSHYVKARKVRNKRLGDACHWWAFVTLTKSAGARAHYDKRRAAATTTTPRCATSPTSSSDACGGVCNTTNPGTTTPPGPTIRSRLNVTTAGANRHLDRVRDELGAHVVGDGPAHHPT

SEQ ID NO: 434253 - protein, 423 aa, unidentified
MTSMTPDAPLTNPLPPPSGLVAGVDTHKNTHHVAILDLVGRPVADREFRADGRGYAQVIAFLHEHGDVARVGVEGTGSYGAGLVRALNAAGLTVIEVARQDRQTRRRRGKSDPLDAHQAAVAVLAGTDTAIPKSGDGAVESMRILLAERRSAAKARAQVMNQIHALLITAPELVRQAFRHLSGQRLVNTLAKTRPGTIPSPDPDVVARQTLRRFALRYLTMQAEIDLIEQQLDFLARQVNPTLLSLSGVGPVTAATLLVAAGDNPERLGTRASFAALAGVAPIPASSGQRTRHRLSRGGNRHANAALHRIVLLRMRHREPRTTVYFERRRAEQLTDRDIMRCLKRHVANEVYAALLNPAKDHPAGHELRARRQAIGTPISVLAQSLGVPYQRLRRLEIGTRADPELERLATLALDKISPPQDA

SEQ ID NO: 434254 - protein, 334 aa, unidentified
MNNVSLIGIDLGKNSFHVHCQDATGKALSRKKFTRAKLFEFLANCPSATVVMEACAGAHYIARKISDMGHKPKLISPQFVRPFVKSNKNDFVDAEAICEAASRPSMRFVAPRTESQQEILALHRIRESLVRDKVKTTNQMHAFLLEFGISMPKGLAVIRRLSVVLTENELPPYLAKLLVKLQSHYLYLVEQIRDIENELKLAANQDDTTQRLMSIPSVGPITASALMANLGNGQQYKQSRDFAAATGLVPRQYSTGGRPTLLGISKRGNKNLRRLLVQCARVYILHLEHQSGYLAEWVRHQLSKKHSCVVACALANKLARIAWAITTKQSVYMA

SEQ ID NO: 434255 - protein, 321 aa, unidentified
MIDEADRVCAERRVSNVLADVLMVLQPHHAELKGVVVESTFNWYWLVDGLQEAGHVVHLANTAAMQPYSGLKHGDDRSDARHLAHLLRLGILPTGFIYPRQQRAARDLARHRMRLVQTRSRAIIAVENVLSCHTGGRLSSNQIKRLGGDDIEGLQLHADVRLALHAQIALIGALDAQIGALERRLQERVRLQPGYRTLLTVPGIGAVLATVIALETGPIERFGAAGDFASYARCVGSTLLSNGKKKGTGNVKNGNRYLAWAFVEAAQFARRYSDQAKRFYDRKRAQTNTAVATKALAHKLARACYHMLKQNASFDAARCFG

SEQ ID NO: 434256 - protein, 317 aa, unidentified
MIVLGIDIAKHKFDCALLVEERFRTKVFENNASGVEACAQWLTRHAPGHVHACMESTGPYGQALAEALFDAGHTVSVINPARSRAFAESLGLRSKTDAVDARALKRLCRALSPEPWTPAPRHVRELQELVRRLDALIQMHTQEQNRLAVAHEAVRGSIEQMLTALNEHIQTIKDEIAKHIDQHPDLKAQRVLLDSIPGIGDATSAWLIAELGAKSFTCARSAAAFIGLTPAHRISGTSVHGKPRLSKRGNARLRKALYWPAITALRCNPLVQALGERMRARGKHSMAIIAAAMRKLIHIVFGVLKSGKPFDPTLGAA

SEQ ID NO: 434257 - protein, 412 aa, unidentified
MDVYCGIDWAEDHHDIALVDRDGQLLARRRTGDDAAGLAALLALLAEHGDSPDDPIPVAIETPRGLLVACLRATGRQVYPINPMAVARYRDRHSVAGKKSDHGDSVVLANVLRTDLHAHRPLPADTELTQAIAVLARAQQDAVWDRTTAHNKLRSHLREYYPGFLAAFVPVSGGIMRPGARTILAAAPTPADAAKLTLAQLRGLLKKAGRSRGIDTEAARLRDAFRVAQMRQLPLVEAAMGRQALALLGQLDAACAAAADLERAATESFNLHPDAGIITSFPGLGALTGARVLAEIGDDRSRFQDAKGLKAYAGAAPITRASGKTRSVTHRKIKNNRLNAAGYCWAFSALTASPGARAHYDRRRDDGDRHAAAQRNLFGRLLGCLWHCLITGQDYDETIAFPATTKKISQAA

SEQ ID NO: 434258 - protein, 408 aa, unidentified
MNAVGIDVSKGKSMVAALRPMGEVALLPQEFLHTEVGLEQMAYAIIALGEDTRVIMEATGRYHEPVAAALHEYGIYVCVLNPLFIKQSGGGSIRKVKTDKADAMKIAKYGLDNWVDLREYTPMDTVRQQLKLCSRQYNFYMKTVVSLQNNLISLTDKTFPGVNELFSSPERADGHQKWVDFVMTFYHCDCICRVSETAFAERYQKWCKRKGYHFSAEKAQDVYLGSCGHITTLPKNDNTKLLIATAAQQLLSGKMTLAALRAEMTRLAKQLPEYDTVRAMYGVGETTAVQLMAEIGDVRRFPRRSSIVGFAGVDPAVDQSGKHSAKSVPTTKRGSPHLRKTLYQIVCTYLKKSPVDEPVYQFLDKKRSEGKPYFVYMTAAQNKFLRIYYARVKECLEAFDAQQDTSQR

SEQ ID NO: 434259 - protein, 489 aa, unidentified
MTQRQTAPPKPAPQPQRYRRRKAQAQARLQARQEAECRRVEGLPVTHAHAAGIDVGSWSHWVCTGADQARQIREFPAHTDGLHALLAFLQEQQVDTVALESTGVYWIPLYELLEAHGIEVWLVDPSYTKHVRGRPKSDRRDCQWIYRLHSVGLLAPAFRPDEKTCQLRSYLRQRANLVRYAAQHIQHMQKALEQMNLKLTEIISDITGATGRQIIKAILRGVRDPAKLAKYRDCRCKASAAEIAQALTGSYRQEHLFALRQALQAWEFYQQQRDQLDLQIEQQLTRMKQDRALPALPARKRTYGRKPNEPRFDVRTALYYVVGLDLTEIEGIGEMTALTIISEIGPEVSKFATVKRFCSWLGLCPQLKKSGGRVLSSRTRPGVNRAAAAFRIAANSLYASKGALGAFLRHKKAHLGAPKAVTATAHKLARLVYLALKHGLPYVRQTQEEYEAKVRVQQLKSLKKKARQLGLTVVEPEPAAPTAPAPASR

SEQ ID NO: 434260 - protein, 405 aa, unidentified
MSDQKPTALRFFGLDIHKHYLVATGVDKDGAKVYGPRRVIWADLNDWRRKTLTGQDALVIEMTTNTWEVYDQLAPHVHSLTVVHPPHVHLVTEPMVMNDKIAALNLAVLLAKGMLKPIWIPPEPVRELRALLAQRNKMTRLSTQAMNRLHAALHRRHILPGPGDLFHPSRRNWWLALALPASEKVRLLCDLDTLSFARQQVAILEDHLCQLAAQEPRLPLLLQLPGFSIINSLAVLAAIGDIYRFPAPKHLVGYAGLGGRVHNSGQSSRSGKITKSGRRDLRTALVQAAQTAANTHPFWQAELQRLQPRLGRNKTIVVIARKLLVATWHILTFQCADIHAEPVRVARKFLQSIYTLGLANRPTNLSAAAYVRQQLDFLHLGLDLSAIPWGQKKKPIPLPPSSLTG

SEQ ID NO: 434261 - protein, 352 aa, unidentified
MNAGQIIGTMNGQQVIGLDIAKHVFQLHTVNMATGEIINVQIKRAKVAEHFASLAPCLIAIEACGGAHHWARSLSKLGHTVRLLNAKIVRAFVSGNKTDATDARGIWLAVQQPGVKFVGTKTTMQQATLTLHRQRELLMKMRIMQTNALRSLLYEFGATFAKGKRALFKEIEATLEGLADTLPQMVRDSLHEQVARIKSIEVDMQAIETRLQLQLKQDPQMQRIAQIPGVGLLTATAAIATMGEASAFKSGREFCAWLGLVPKQTGSGGKVKLLGISKRGDGYLRCLLIHGARSVIAHAKEPGPWLQGIKARRPSNVVFVAQAAKMARTIWAITAKAQDYDKGFKSIRPQAA

SEQ ID NO: 434262 - protein, 320 aa, unidentified
MTDFLGIDVGKLHLHCVLLQNDKTPARKTVENTTSGFEQLDAWLRNRKSKAVHACLEATGSYGEAVSEHLYDAGHTVSVVNPQQIKAFGRSAMVRTKTDAIDALLIAQFCQAQKPPVWSPAPREIRDFRALLRRRETLVEMIAAEKNRLESAPDGIVRTTIKEHLQFLEGQLHKVSQQMNDHIDSHPGLRQTIDRLDEIPGFGEVTAMKLVAETNGFSVCTTARQLVAYAGLNPRHYQSGTIHRRGGISKIGNAALRKALYYAALSAKNHSRYFRKFVERLQAAGKRPKVIITAIMRKLLVLALAVVKGKRFDAALALDA

SEQ ID NO: 434263 - protein, 376 aa, unidentified
MRRDSEAFIGIDTAKARNAVAIAEGGRYGEIRYLGEFDNTPEAVSKLVRRLAERHGTLNFCYEAGPTGYGLHRQILSLKHSCIVVAPSLIPRRSGDRVKTNRRDAESLARLLRAGELTPVWVPDETHEAVRDLVRTRAMAVEDYRRKRQHLSAFLLRLGRSYAGTASWKGRHLRWLDEQSFKHPAQRLAFQEMLNAIRAAAERIDRLDDALVKIVPTWTMAPVVAALQALRGIAFLTATVLVAEMGDLRRFDHPRQLMAFVGLVPSEHSTGETRHRGGITKAGNMHARKALIEAAWTYRHAAGIGEKQQRRQVDLPQVVRDIAWKAQARLCVRYRRLMAKGKKATVVAVAIAREIAAFLWDIARHVEPAPVKGSEG

SEQ ID NO: 434264 - protein, 353 aa, unidentified
MIIIGVDAHKQVHVAVAIDDAGRELGHWKGPNSPQGWTDLQQWVRELGGDRRWGIEGAWNYGRGLAQHLVREGEGVWEVNPRWTAAGRRRGRKADKNDRLDARAVAILVRQEGAALPKVTADDDCAVLDLLVTEREAALAEATRLRNQIHQLLLQVDPEYKLHMPKLNSRAGRTALQEFVISSDDVLQRQRVAAVRRLAQRLELALDQSRELARQIRDNAEQRFQLLTEICGVNLLTAGALAGILGPGRRFGTEAQLASYAGVAPLEASSAGLVRHRLNRGGNRRLNAILYRIALTQTRYSPEARRYLERRQGEGKTRREALRALKRYIVRAICRLWNQCKPAAGDEKLAAVA

SEQ ID NO: 434265 - protein, 347 aa, unidentified
MQITTVGIDLAKIVLQVHGVNERGKAVLRKQLRRKEVLPFFAQLPPCLIGLEACGGAHYWARELQALGHTVRLMAPQFVKPYVKTNKNDVADAAAICEAVARPHMRFVPVKDPHRQALLALHRARQGFIKQRTAQSNQIRGLLAEFGLILPQGIGHLFAHLPALLENADNGLPGLLRELLARLRDHLRLLDQQIAALDGQIARWHRDHPASQRLAGIPGIGPLAASALVATVGNAREFNSGRQMAAWLGLVPRQHSTGGKPTLRGISKRGDVYLRTLLIHGARAVLCSVQRKPEQAPPWLTRLLARRHPNIAAVALANKNARIAWALLAHDRRFDTHYRPQPMLAQA

SEQ ID NO: 434266 - protein, 412 aa, unidentified
MQDILTCAMGLDVHRDVIVACLARGELGTEPEIEIRSFSTLIPEMRKLRDWVLEVECRHVAMESTGIYWQPIYEMLEPCFDGQINILVVNARHMKNVPGRKTDMRDAQWIATLLRAGLLNGSFIPDKTFRELRHLTRYRKSIVHDITAQKNRIDKFLQSSGFRFTAFLSDAFGASGRNIIRHLMEYGDISREALDKCLKTQTRKRIDEILVALNGSLSEHQRSFLRMIFEHLESLERHRHTVEDAISEEIVKHEAALSLLCSIPGIDVTAAASIIAEIGTDMSAFPDSQHICSWAGLSPGNNESAGKRKSAHINKGNPYLKSMLCEVGWVISGKRTLYLSGWYWRVKQRKGAKRATIALARKLLTLIYTMLKTGTPYNEESFEIRRKQSERKRASRMVNELQKLGYFVVAPD

SEQ ID NO: 434267 - protein, 376 aa, unidentified
MFVGVNMSRTTSPTQETGMKILAIDLGKSKSVACVYSVETAESRFNKVGTSPGQLHELILKVRPDRIVIEVCSAAGWVADLVETVGIELQVANTAAPAWRWSNTKRKTDRDDALRLAQLSALGQLPRVTIPKRDVRQWRALIRYRHHLVRRRTQLRNRIRALFDREGLTLPTGKQCWTNAGIAMLHEWARSLDEAPDQELWRGELACELEILQIAELLIARVEAKLDRLAEANTACQLLQSIPGVGPRLAEIVVAVLDDASRFQKGKQVGSYAGLTPRQYQSGDCDRQGRISRQGNPLLRSLLVEVSWVGLQYNPWMRAVYEQVRRGSPTRKKIAIVAVARRLLIRCWAMLRDGVPWRPPNTEPIPSRTCGVVGAH

SEQ ID NO: 434268 - protein, 324 aa, unidentified
MTGQVCRGQVCLADREHLRAWLARFAGCDDVAFAVEGCTGWRYVAEELAAAGIAVHLAEPADTAFARGRKRHAKTDKTDCRHLRMLLAEGRLPECWVPPGHILECRALLETYHDLRAEHTAWVQRIHAVLFHHGAPALGAGTLRTEQGVAALRAVTAEWLSPAGQLQVATALEILEALEARMHELRHQLTDAARHLAGAKVLAERLYGVGPVTALAITCWLAGKDRFSSSRQAVRFAGLDVTVYSSDRKGPPGRLSRQGPPVLRWAVYEAGKTHARASAPDHAYYAQVKDRCNGKRAALSEARKILRQACHILAELGDDALAAA

SEQ ID NO: 434269 - protein, 416 aa, unidentified
MQGRDGAHWAGVDWGQRVHDVCVLDAHGEVLDERRFDNSSKGLGELSGFLSGFADVQVAIETPRGPVVEALLDRDLAVFAINPKQLDRFRDRFYPSGAKDDRRDAYVLAHSLKTDAHAFKAVSAEHPVIVELREWSRMHRELSEERVRLTNRLQAQLRRYYPQLDGFGVPLWSPWILDLFTAAPTPERARSLRRATLVRLLRRNRVRKWTLEEVREALREPGFTVAAGTVAAASAHAETLVERIRVVSDQHQRAAKRLGELTERYRSTELGEVDSDEDSSQQHDVDILRSLPGVGKLVLAVLLAEALELLQRRDYHGLRAFSGVAPVTRRSGRKLVVLRRHACHQRLAWAVFQWARAAMSNDPEWHARYAALRARGHTHGRALRTLGDRLLRIACAMLEQGTMYDADRLAPVQRAA

SEQ ID NO: 434270 - protein, 320 aa, unidentified
MMAQNDLVVVGIDVAKDKVDACIRRFTLRQTFPNTAQGHRKLVAWLRKYQVGKAVMEASGGYEREWRNVLHNAGIEVRIVDPRRVRSFAQSAGRLAKNDPIDAEMIAWFAETFSQAPGQIPDAAREELAALAKARKALVDVKIRLQAQDEHAAPEPARKAYARVLKSLAAEIDKLEAAISAKVKATPEFAERAEIIESVPGLAQATSAILIAGMPELGQVSDEVAAALIGVAPYDDDSGKRRGERYIKGGRRWVRNAIYMPCLGAATQYNPVLKAFYQRLLAKGKEPKVALVACMRKLIIILNTMLARRQKWNPGRYAMA

SEQ ID NO: 434271 - protein, 400 aa, unidentified
MDERQRFRWFLGIDVSKETFDASCINTKGERLFNLSASMDRKGFEELMKRLSTLSTPKESVLVGMESTACYHINLYSFLVSLGYSVMVIHPLLISNFVKLQLRKTKTDKKDAYVIAQFLLLNRDCLSQTILSSDISDLRDLSRQRESLVDQMSSTKSEIKRLLSITFPELEHISGIFTKSMLRLLCQHPSAASIKQAKRSKIAKVLIPGSYGKQTDVSVDRILKAAQVSVGTSSATKEIILRQKASLLIQLEEHLQELTDILIELCQGKIQGDMDILTSMKGIGEKSAVNFLIEIGGDIKQFESHKKVIAMAGLDPALYQSGKIDRKGRISKRGNRHLRRVIWLMTTKVIQFNERFKQYYLKRIKDGLPYKKAVLATAHKLVRVMFAMLRNKTLFDATMN

SEQ ID NO: 434272 - protein, 405 aa, unidentified
MNAVGIDVSKGKSTVTIRKPGDVVLMSPCDIPHTQSAINDLIKQIKSLEGETKVCMEHTGRYYEPVATWLSDAGIFVSAVNPILIRDFGDDSLRTPKTDKADSKKIARYTLDRWAKLKQYGIMDKTRNQLKTMNRQFGFYMAQKTAMKNNLIALIDQAYPGANDFFDSPARNDGSQKWVDFIHTYWHVDCVRSKSLNAFTEHYQNWCKRKNYNFSAEKAAKIYQISSDLIAVFPKNDITKMLIWQAVALLNTASKTVESLRSKMNELASTLPEYPVVMDMNGVGATLGPQLIAEIGDVSRFTHREALTAFAGVDPGKNDSGKHIQNSVRTSKKGSPYLRKTLFQIMDSLIKRSPVDDPVYAFMDKKRSEGKPYYVYMTAGANKFLRIYYGRVREYLSNLSNNETI

SEQ ID NO: 434273 - protein, 376 aa, unidentified
MTGVGNGMAPSLCAKMKKYFIYRVQNTDGILKEDPSMNNISIVGIDLAKHVFQLHAVDVRGHKLFSKKVKRDQLSAVVASLPPCVVAMEACGSAHYWAREMTLLGHDVQLLPPQAVKPFIQGHKNDARDAAGIAEAAARPATRRVTVKTQEQQSLQALHRVRSRLVRARTAVGNELRGLLNEFGIVVAQGHRVIRQGDIRRLLDEQRESLGVALCEVMHDLLNEWQALDIRVTEYDRRLMSYVQAAPCMQQLMSVPGIGPINATLLVAHMGDAKRFPNGRQFSASLGLVPRQHSSGGKSVLKSITKRGNSEVRRQLVHGARSALRKFQRQEHPDRLAQWIIQLAARVGQRKAIVALANKMARICWSILAYKQPYQA

SEQ ID NO: 434274 - protein, 342 aa, unidentified
MAALKLNRAGIDVSSQELVVKLEKKGVSQTEVSIFENNKAGHKKLIKYLTKGGSKAQVCLEATGVYHFELALCLFKSSAIDVMVVNPKVIKHFAIASMQRAKTDRVDAEIILEYLKRMEFIDWRAPEEEHLQLQALSRRMYQLKQEIVRETGRRHAGDYSHVLENTVNNDIEVNIRHIKGRIALLQSKALEVIQSNDILQKKFNLLISIKGIAKTSAIQILSELVCLPADMAAEQWVAFTGLDPRAVESGSSISKPRRISKAGNKYLRTALYMPAWVAVQTEASVKAFYDKLLTAGKKPMQAIVAVMRKLLHAIWGILHSNKPWDGQKFFAVTADQRAVVKA

SEQ ID NO: 434275 - protein, 356 aa, unidentified
MNKSNKLDFTGQQIYVGMDIHKKSWSISIFTDTLEHKTFTQPPDVEVLVKYLKRNFPGGTYKAVYEAGYSGFWIHDCLKEHGVECSVVNPADVPTKDKERRHKTDRVDCRKLARSLRSGEIGSIYVPSRSKVEDRSLIRTRHSMVKKQTRCKNQIKSLLHFYGIQIPEELTKGHWSKRFVSWIESIRLERISGTIALKVHLEELNNMRKIIVDITRSIRSLANSEEYRDNVRLLKSLPGISTLTAMTLLTEIYDIRRFKNLDKLCSYIGLIPDTDSSGKTERRTGITKRRNAHLRGILIESSWIAVCKDPALLMTFQTLCRKMPKTNAIVRIARKLLNRIRYVLKTQQEYVPAVVQ

SEQ ID NO: 434276 - protein, 341 aa, unidentified
MSKVSEAVGAAVFAGIDVSAATLAVAVQREGREGLRQKEFANSVSGHKQLIAWLLQCGGGVRVSLEATGTYSLDVALALDAAEGIEVAVLNPKTVNRFAQTLRRSKTDAADAAALAEYSRRMEFVPWQRPSRGGLELRTLSRHIATLTEDHTRWGNRLHAAQASATTPRCVLDDLKRGTAAIARRILKLRKQAVAMVGEDTELARKFEQLKGIKGVGETSAVQLLGELAGLDPEMTVRQWVAHSGLDPLHQISGSSVRKQARISRHGNSHLRRALYIPALVGARHDPHMRAFYELLQTRHKTKLQALVAVARKLLHAIFGIFKTGTDYNGAKLFPQLIPTL

SEQ ID NO: 434277 - protein, 338 aa, unidentified
MTFKRIAIDTSKHVFTLHGVDEQERPMLRRELKRAQVESFFAKQEATEVVLEACGGSHHWGRLLNKLGHRVRLIPPQYVKPFVKRAKNDRNDAEAISEAASRPTMRSVVVKTAGQQADGIILKHREMLVSQRTQAINALRGHAAEFGVVAAKGIVKVAALLSVLAADNAIPATARAMFRKMGAHIEALDQHVEAMDDELAALHKANPVSQLLVAIPGVGPLGAITMALTVEPGNFASGRHFAAWLGLTPKEHSTGGKQRMGKISKAGNERLRQLLFVGAMSVIRFAKPGSKSASAWLLQLLERKPRKLVAVALANKTARIVWAMMSRREAYRRQPVAA

SEQ ID NO: 434278 - protein, 377 aa, unidentified
MSEAITYVGLDVHKASISVAMVSGAGSKPIQWELRNEMGELKKLVRRLRRESGGELRCAYEAGPTGYGLQRFLVAQGVSCQVVAPSLIPRRAGDRIKTDRRDALKLGELLRGGLLTEVHPPTVAEEALRDLCRCRDDARGDLLRARHRLSKMLLRRDLRYTAGRPWTDQHRTWLWTLKLEHVAERAVLEDYLLAVDQVVARLAEIERKLLALAQEEPYRERAGWLRCFRGIDTVTAMIVLAELHGFERFACPRKLMAYLGLVPSESSSGGSVRRGAITKTGNRHLRRVLVEAAHHYRHRPAVGKALQARRSGQPATVIAIADRAQQRLHRRYTRLVLGRGQPVGKAVVACARELTGFIWAVLSGIDTRSIQKETATD

SEQ ID NO: 434279 - protein, 346 aa, unidentified
MMIIGCDFHPSWQQVSWLDTETGETGERKLVQASGDAERFYRQVAAPALIGMEATGNCHWLVDLLSELGHELWVGDAAQIRASYVRQQKTDKRDAAHILKLLVEGRFPRIWMPSSEVRDLRQLLLHRYKLVIMRARVKNELQHLCLNKGVQRKHKLWSAAGQQILRELPLQPWAGRRRDDLLKLMAMLDQQIEPLDQAVKAEAQRDKMALLLQTQPGVGPITALAYVLTLGDVSRFPRGKQVASYLGLIPREHSSGGRQKLGAITKQGNRMLRMLLVEAAQIAVRYDPQFRREYLHRCHKKPKAVAKVAAARKLAVRLYWMLRTQRPYPAVVRIESSPRVALVGAS

SEQ ID NO: 434280 - protein, 334 aa, unidentified
MFYVGIDIAKRKHEAVVTDDKGDIVVKAFSFTNDLTGYNYLLGKIKLVTISREQIVIGMESTSHYWLTLYTRLIKDGYNVHIFNPIQSDALRGMYIRQSKTDARDSFIIAEVIRFGKYSESNVPQEKLFALRELTRNRYFMVDSVSDLKRKTTALIDQVFPEYEKLFSNNFGVSSMALLLKYPTPEKLKNVSLQSLAKLLSKASNGYFGLGKAKEVKETAKSTFGVIDNCGIYATLISTYIKQILFIQDQVKEIDSQIAEIMSELDSKITTINGIGQALGAVIISEIGDISRFQNSDKLAAYAGVDPTVKQSGDYCAVRNHMSKRGSPYLRRAI

SEQ ID NO: 434281 - protein, 371 aa, unidentified
MKENSTFIGMDVHKNSIDIAIAPKGRKAQVRHYGKIDGTLAALDKVVRKLVSQGDRPHFVYEAGPCGYQIYRHLTAKGFECSVVAPSMVPKQSGNRIKNDRRDSMMLARLHRAGELTAVYVPVAEDEAMRDLSRAREDAKGDEKKSKQRLLAFLLRSGHRYSGRSPWSQAHMRWLADIKMVHPSQQIVLQEYIDTLSHCTLRLQRLTEQIRQLLPQWRLFPVVQALQSLRGVSLIVAATTVAEIGDFKRFQNPEELMNYLGLVPSEHSSGEKTRRGSITKAGNSHVRRMLVEAAWAYRFRARVSRALLKRQEGLPQEIRDIAWKAQVRLCARYRHLWAKGKVKQVVTTAIARELCGFIWAIANETDVPMTA

SEQ ID NO: 434282 - protein, 345 aa, unidentified
MKITTIGIDLAKNVFQVHGVDEHGKAVFNKPLKREQMAAFFVNLPPCLIGMEACGSAHHWARKLQGMGHTVRLMAPQFVKPYVKTNKNDAADAAAICEAVTRPSMRFVPIKNVEQQGVLALHRVRQGFVKARTAQANQIRGLLAEFGVIVPQGIGHITQRVPMLIEDAANELPGVFRLLIQRLLDHLKELDRQVQELEAQIVAWHRQSDLSRKLGQIPGIGPITACALVASLGDAKNFKDGRQVAAWLGLVPRQHSSGGKQNLLGISKRGDTYLRTLLIHGARSVIYHAQNKGQGSAQCGWLHGVLQRRNKNVAAVALANKNARVVWALLAHGRSYEAGYVRESV

SEQ ID NO: 434283 - protein, 339 aa, unidentified
MKYTPVGVDIAKHLIQVHFIDENTGEVIDKQLRRQDFLAYFSNREPCLIGMEACGGSQYWARELTKLGHKVRLLQARFVKAFVMGNKNDVMDARAIWMAVQQPGKEIAVKTEEQQSVLVLHRTRRQLVKFRTMQINSLHGTLLEFGETIHKGRAAMEREFPEALERMKERLPPYLITVLENQYNRLNELDSLIEDIEKQLTSVAKQNETCKRLLDIPGVGPLIATAAVATMGEASAFKSGREFAAYVGLVPRQTGSGGKIRLLGISKRGDTYLRTLFIHGARAAALLTKEPGPWVTELKKRRPASVAIVAMANKLARTVWAITAHGRKYDKNHVSIRPY

SEQ ID NO: 434284 - protein, 407 aa, unidentified
MNAFGIDVSKGKSTVAVLRPFGEIVVSPFDVSHSPKELSKLVTLLKTLNGDTKVVMEYTGNYYLPIALFLRNNGFFVSVVNPILVKDYSTKSLTVRKVKTDKKDALKIASFALDRWNELSPFSAQSEARLLLKSYNRQYNQYNKLKIILKNNLIALLDQTFPGANTLFSTPTRKSDGHEKWVDFVLKFSHSECISKKSFSFFLKSYLSWCKKFGYKFSKSKAQAVYDFACNCSPSLSFSDSSALLVSNAIIQLNSINETLASLASEMNKIAATLPEYDSVMSMFGVGSVLGSQLIAEIGDVSRFPNKKALVGFAGLDASPFQSGNFNPQSRSISKRGSAALRKTLFQVMSVVLQRAPTNNVIFQFMDKKRSEGKHFYVYMTAAANKFLRIYYARVTEHLNLFTTTTA

SEQ ID NO: 434285 - protein, 355 aa, unidentified
MNDTKYIGLDVHQATISAAVLDSAGKLVMEAILETKAETILQFIQGLRGSLRVTLEEGTCAAWLHDVLKPHVAHVLVCDPRKNALIKAGNKSDRIDARKLADLLYLDKLHPVFHGETGNRALKELARSYLALTRDTTRVMNRLKALYRSWAIPCAGQRVYAPRYRSEWLAKISEAGVHRRAEIYYHEFDALRSLREQVRRDLLVEGRKHKAMKLLRQIPSIGPIRAALLIALMQTPHRFRTKRQLWAYCGLALKTSTSGEFRIVEGQLKRARKFLAIRGLNTNHNHDLKNIFKGAATRAAAVPGPFQEFHAGLVARGMKPTMARLTLARKIAAITLIVWKKAVDFDAEHLKQQAA

SEQ ID NO: 434286 - protein, 453 aa, unidentified
MAQGSGLTRGDRNRNRRIGVLRGVVARDRAVLAVDLGEDKQVAVLVDHEGRVLARKVVRAKAHQLGGLLEWAAGQAAGAGFAGLAVACEPTGHRWKALMGAADAAGHGFCCVQSLAVARAREGDDYTRDKTDHRDARLIGKLVVRLDCYLPERADETWARLRHLGARRFALVADVVACGRQVSDLLACAWPAALGTAARPLESTTWLAAMGVVTDRCCGDPGRLRKTGYDRFVAAVRRELPRWGARNLCHKIVRGLWEALADAGGVRAQRRGALERVHLLMGDRRSLLGRLAEVESRMCAVLGELGLTGLVTSIDGLSAVGAAVILAETGELSRFASARSVVKHAGLNPAENTSATLAGRTRISRRGRPGLRTAAWRAAWAGLRHNRVLRARYAHLTGRAGSQLSGGQARAACAAALLRWLYAVITRRQAWDARIAAGTIPARAGTVTPPAAA

SEQ ID NO: 434287 - protein, 402 aa, unidentified
MTALAQEEVRIIGGADTHINTIHVAAIDTVGRVLGDREFPTTPAGYSDALAFLGAFGVVECLGVEGTSSYGAGLTSAARSAGITVREVIRPERSVRRLQGKSDPIDALQAARAVLSGRAAVSPKDAGIEALRAMHNARKSAVKARTAAMNQIHQMLVTAPVEIREKYRQLKEKKLVSALALCRPAAKSGIGGVVLTALKYLAQRHQFLTAQAEELLVQVRDLVAAENPTLLSAKGVGPSTAAQLLITAGGNPERLRSEASFAALCGTAPVPASSGKTVRYRLSRGGDRDANCALHTIALVRMSSDPRTREFVVAQRAKGRETPELIRILKRAIAREVFRHLTQPFAVAGIEDLRQTRREKNIPLRTVSAALGTYPIHVSRIERGIYHDREFTDRYRIWLDAA

SEQ ID NO: 434288 - protein, 347 aa, unidentified
MQYYNKQHNYYCGIDLHARTMYLCILDSKGDVKLHKNLKTSPDALKKAIKPYLDDLVIGVECMFSWYWVADFCKDNNIKFILGHALYMKAIHGGKAKNDKIDSYKIVSLIRGGTFPQAFVYPRNMRATRDLLRRRMHLMRKRAELLSHVHNTNTQYNNDRICKNLRYKSNRKLVEGRFADPSAQKNVDLDIELINYYDKLLVEIECYIQKHAKINDYQSYMLLKSVPGIGKIISLVLLYEIYDIKRFPRVQDFASYARLVKCRAESAGKSYGTSGAKIGNAHLKWAFSEAAVIFLRGNPKAKAYVEKMTKRHNKGKALSILAHKLGRAVYFILKRKQAFNMDKFLPA

SEQ ID NO: 434289 - protein, 343 aa, unidentified
MQAVTTIGLDIAKSVFQVHGIDSQGQVVIRRQLKRRYVLTFFQKLQPCLIGIEACATSHHWSRELQALGHTVRLMPPAYVKPYVKRQKNDATDAEAICEAVTRVNMRFVTTKTTEQQSCLVLHRTRHLFIRQQTSVINAIRAHLAEFGIVAPVGRNGVEALLAVVADQNDKRLPEVARACLAVLGAQLQSLKAQILQFDRQIMVWHRSNETSKRLDAIPGVGPTLATALVSSIGDPKAFRSGRDFSAWIGLVPKQHSSGGRDKLGSISKQGDRYLRSLFTTGALAVIRYAKIHGTKHRPWLKALLARRPTKVAAIALANKIARMAWAMMTRGERYREPVALAA

SEQ ID NO: 434290 - protein, 459 aa, unidentified
MRQKSKRTKGIEQAHPFDGMSKVNPHASGVDIGAEEIVVCVASNETTQLVRGFGNYTVDLHAIADWLTEHKIKTVAMESTGVYWIPLFEVLEQRGFECLLISSRSLRRVAGRKSDITDAQWIQTLHNYGLLESSFRPQADLIALRSLLRHRRSLVDHRSPHVLHMQKALLQMNIQLSQAVSDVTGVTGQAIIRAILSGVREPKILASLREPGCKKSEEEIGKALTGTWRGEHLFVLKQAVALYDFYTEQIVECDEEIERMYGETRPDWDGGELKPLSSRKRNSHSKNAQYDTEKIRQHLKRVSGVDISLVDGFGVSLAQTVILECGTDMSKFPTENHYCSWLGVAPKHEISGGKVLKNTTLKTKNRAGQAFRMAAQSVKQAECPFGVLYRRLRARLGPAQATVATAHAIARVVYRMLKYKVEYDPLSVNEYQKQYEEQQIKYMKKRAAKLGYQLLPVPA

SEQ ID NO: 434291 - protein, 467 aa, unidentified
MQQPIEVQVDEHEPIVERVVGIDVAKASGMVCLRVPHETIPGRRVTKVWSVKATTRALVELGDHLRCQGVQRVVLESTSDYWRPFYYLLEAAGLTVWLVNAAQAKNVPGRPKTDKIDAVWLAKLAERSMVSPSLVPTEPMRQVRDLARARFDLVADRARVKQRIEKLLEDALIKISSVLTDIHGVSGRAMIEALIAGQRSPKALAELAKGRARARSAALQEALDGRFTDHHARLARLLLDQLDELTARIDQVTALLEAAITALTPPQADTDTPTGDSGGDSGDSGDSGDSGDGAPAQPAPGRYARAVERLCAIPGGGPDSVRAVIGEIGLDMSVFGTHQRLCSWAKVAPRTVQSGRKTGRARTGRGNPYLKSALAQMAMGAAKTDTFLGERYRRLIKRMPKAKALVALQRSILVIIFHLLADPTAEFTDLGSDFYQRRIDRARRTTHLLRQLHALGYQVQLTETEAA

SEQ ID NO: 434292 - protein, 340 aa, unidentified
MKLYSGIDLHSSNSYLGIIDETGKRVFKRKLPNDPEMILAALSQYKNDIVGIVVESTYNWYWLVDLLMAEGYTLHLANPTAIQKYSGLKYADDQHDAFWLAEMLRLHILPEGYIYPKEDRPIRDLLRKRSHLVKLRTSLVISLQNIITRNNGVRIKGELLKALTTDHAAPFLEANEDLALAGKVSKASIDFLTRQIKTIEANIEGKVALREPYAQLVTIHGVGKILGLTIMLETGPISRFDKAGNYVSYCRKVSSKWISNDKGKGKGNKKNGNKYLAWAFSEAAELARRYYPEARAFYNRKLKHTNVAIAHGALAHKLARAAYYIMRDQVPFMPEKLFAS

SEQ ID NO: 434293 - protein, 381 aa, unidentified
MRIVCGLDVHKDSVFACILNDKGDKFECKYGVLTPDLEELHQLLLTHDVKEVTMESTSIYWHPIWRILDDIEELKLVNPYFIKQLPGRKSDVRDAAWIAECTMKDLIRGSFVPSTIVQRMRQYNRRIFDLNKEIVYKLTKLDTVLQHCNIRISNYVSSTDSKSYKDVVRLLSEGITDANHLACVIHGRTVNRVGKDTIVDSLTGVISDVDIDLIRQYLEEIELAQSHKQACQEKLTQMCKTEFPQEFENLQTIPGVKERSATSILSEIGADMKMFVTASALVSWCGLKPRNEESAGKIKSRRITHGNKYIRKTMIECAWGASKTQNCFFSQFSYTQTVIRKKNAMKVKVAIARKMLIAIWHVLSDSKPYIDYKKPDTTGNS

SEQ ID NO: 434294 - protein, 366 aa, unidentified
MEVTTIGIDLAKSVFAVSGADSRGRVVIRRQLRRAQVMGFMRGLPRCVVGMEATGGAQYWARQFTALGHAVRLMSPALVMPYRKGNKTDRNDADAILEAVSRPSMRFVMVKSVAQQDLLALHRVRAQLVKSRTALCNQLRGLLRERGVAVRMGVAALKRSLPAALADESSELSGEMRELLSEMSQWLRTLEQRIASCEARITRKFKHDERCVRLAEVPGVGPLTATALVAAVGNAQRFKNGRELSAYLGLVPRQHSSGGKTVLLGITKRGDRYLRTLLIHGARSALRQCKLKGDARSDWARRISAARGPNVAAVAMANKNARILWALLSRGDRYRSSRVLTRAVLRPGSPPPVKRARGAKLRVAKD

SEQ ID NO: 434295 - protein, 363 aa, unidentified
MFTERTSIGLDVHARSVAAAAIDSLTGEVVQGRLTPSYEHIRSWISSLPGPVAVAYEAGPTGFGLYRDLAAAGVRCEVVAPSKLQKPSGDRVKTDARDALHLARLLRLDEVISVAIPSVDQEAARDLVRAREDCRGDLMRARHRLSKLLLRHGIVYYGGRAWTGAHDRWLRTEAAPQLILPATRMAFDADYDHVLTMQARRRRLDAAIEEMAAASEFTPIVRRMCCLRGVSTLTGFALAVEIGDWNRFTGNTIGSFVGLVPSEYSSGSSRVQGSITKTGNTHARRLLVEAAWHHRPRYHIGAVMRSRWEQAPAAARARGDEGNRRLHQRWVGFLERSKRPVIANVAIARELAGWCWSLAVMDC

SEQ ID NO: 434296 - protein, 427 aa, unidentified
MKKADLLSTLFVGIDVSSRENVICFLDFQSQKPLASFSVPNNQPGASTMADRIVEFMHQHKDLSFVTVALESTSYYGIHIANYLSSCTFLLPFNITVYCVNPMLIHSYKKTFVGMSKNDYVDAFAIADFARVGKITSSPWRGSQFLALQRLTRHRLHLAKSLTSEKTYMLSNIFLKFSQFPILDKDSQPFSNKYSATAASVLTDFLSTDEVADMPLEKLVDFVCDKGKNRFSDPEKTAVLLQKAARDSYRLDKCLYEPLTIALGSSFNVVKAYTKELKVINSAIEQTIKGLDPSAYTILLSIPGVGPVYAAGIIAELGSIDCFKSQDALAKYAGLTWRESQSGKFKADETSMTRAGNIYLRYYLLEATTHLIWHDKAYAEYYHKKFDEVKLHQHKRALVLTARKFVRLIFGLLAKNQLYSQSRESLT

SEQ ID NO: 434297 - protein, 320 aa, unidentified
MTASVEPVYVGIDVSKAKLDVCLLPSGQIAVFDNEAQGIRQLVELLGKQPPVARCLLEATGRYDRRCAADLMEAGFPVAVVNPRQARDFARSLGRLAKTDTIDARTLAEFAKIGHVRPSEKTPENRAILDDLMTRRRQVTQMLAAEKTRREGLIHKIARASVDKVVRLLEQQRENLDRQIARLIESDDDWKGRRDLLASVPGVGVTTASQLVADLPELGKLNRQQIAALVGVAPLNRDSGSLRGHRTIFGGRAAVRTGLYMATLSAMRCNPLIQPFAQRLIAAGKAFKVAMIACMRKLVTILNVMARNNQHWRLPVPQNP

SEQ ID NO: 434298 - protein, 324 aa, unidentified
MNPIYIGIDIAKTSFALAIPQRQGGFLDYTLTNNQAGFSQLLNLLPTDCHCVMEASGPYYLPLALFLTQHDRLLSVVNPLVVRRFSQMRLRRTKTDKADARLLSQFGTNQTPPRWQAPTTLMSQLTQLQTLLEQYIKQRTALHNQRESFTHSGVPNPVLEQSLQKSLDHLDEQIQALEKQLDQLATSAYPSLYANLRSIPGVGTKTALCLLVLTQGFSRFESAKQLVSFVGLAPRIFESGSSVKGKAHICKLGNSRIRQLLYMASMQAKKANPACAALYDRLVESGKPKLVALIAVAHKLVRQCFAVASQGVKFDPKAALSLAS

SEQ ID NO: 434299 - protein, 345 aa, unidentified
MEQISRIGMDTSKHFFQLHGVNATEKVVLRKKLRRKEMVAFFKTLAPTIIGIEACGASHHWARLLQSFGHRVKLIAPQLAKPYVKRGKNDAADAEALCEAMNRPTMRFVPVKTAEQQAALMIVGLRDRLIRNRTQLSNAIRGYAAEFGLTAAKGMAHLDPLLERIQTDESVPDLARELFAAQAAEYAQLQAQIDDVDAKLMAWHKADECSRRLAKVPGIGPIGAVLLTMKTPAPQLFKSGRQFAAWIGLTPKDHSTAGKVRLGVITRAGDEGLRSVLVVGATAVIQHVRRGGRGSPWIVDLLKRKPPKLAAVALANKMARIAWKLMVTGKNYAAKSAPAALASVS

SEQ ID NO: 434300 - protein, 343 aa, unidentified
MAHFVGLDVSVKETPVCIVDDAGKVILEQKVPTEPADIIALLASLGVTFGRIGIEAGPLSQWLVNALTAAELPVICVETRHMKALLTAQQINKTDRNDARGIAQMMRVGLFKPVHVKTLVAQEQRMLLTSRKLLDVESDLRGTLRNFGLKLGVISGGRYEARVHELVEGFPRLAAIVEPLLSVRRVMRQQFAVLHKMLLDMVRSDPVCRRLMTAPGVGAVVALTYRATVDQPQRFVHSRAVGAHVGLTPKRYQSGEVDYDGGVSKCGDALLRTMLYEAAHSLLTQSRKWSWLKAWGIRVAQRRGIRRAIVAVARRLAVVLHRMWVDGSEFRWSKDSAAVPTVA

SEQ ID NO: 434301 - protein, 331 aa, unidentified
MHYSHYIGVDISKNTLDAVIYAAEMRRSDTKHLTNDKTGLKELVAWAKAAGAKPNDMLICAEHTGVYGNELQLFCEKKGIALCLESPLQIKRSMGLVRGKDDQIDAIRIAQYAYDHKDKLKLFHRPSGNIITLANLLRERRLYVRQKATLMAQQAEIGSYETATSRNRRESLIDRHAAAVRSVEKQMMEIIKGDNALKKTYDLISSVVGIGPITAIDTIVYTNNFQNFETPRQYASFIGVAPFDHTSGTSVNGRTRVSQFCRKQQKVSITMAARSAIVNDPWMKNYYHRKMKEKGEQRNQHGVVLNAVKFKLVLRMFSVVKSGTPYKVMKY

SEQ ID NO: 434302 - protein, 368 aa, unidentified
MSKSITFVGLDVHKNSIAVAIADAGRNAEVRNYGIIGGGLDDLDRLVKKLAAPGKDLHFVYEAGPCGYEIFRSLTAKGFDCAVCSPAHVPKSPADRVKTDRRDAMMLARLHRAGELTYVFVPRVDDEAMRDLTRCREDAKKAQRITQQQLSGMLLRLGFRYPKDNWTKAHFGWLADQKMPTPQQQVVFQEYIHAIKETTDRVERLTSQIETLIPTWRMAPVVTALQALRGVSIIVAVTMIAELGDLTRFESPKKLMAFLGLIPSEHSSGEKKKRGGITKTGNGHARRVLVEGAQGYSYPARMTRPLLKRQEGLSQEVRDIAWKCQVRLCARFRRLMAKGKSRNAVVTAIARELAAFMWAIANKTPIAA

SEQ ID NO: 434303 - protein, 422 aa, unidentified
MLGIGIDWAEEFHDVALGTQEKGVIEQFRIDHGPAGVSALIERALRLEPDPAEVRVVLETRHGLLVEALLDAGFSVVPVNPDLVARRRGPARKKDDAEDARICCLLALDRHAALKTLVPHGELGGELRAIGRDDERAARDQRRLLNRLRADLQTTYPAALVLAGKDLGAPTVLRLLQRWPTQPELAQASREELVEFARAGRHGWPDRFADRVAAALAAPSLPTRDYLVRAKAAGIRLAAVQLLALHEARRGWQARMAELLLGGPRTGRDHTVKDPDPGKAFPGGEIYLSMPGLGDLLAARVAGEIGEHIGQFDHPAGLQCYAGSAPVTRRSGKSDFVVARRLAHNHYLGAAVHQWAFCSLTRSGWAREFYDGKIAAGKSHHAALRALSNRWLEILWHCLTKRVLYDETVHVANRNRALGRAA

SEQ ID NO: 434304 - protein, 348 aa, unidentified
MEAYDGPQIVGMDLHRRRSVLVRMAEDGHKLSTVRIASSPARLAAEIKRAGLHPKVVLEACYGWYWAADTLTAAGAEVHLAHPLGVREFSHRRVKNDELDARDLADLLRMGRLAEAWIAPAEIRELREITRYRGKLVQLRTSCKDQVHGVLAKLGIEVTCSDIFGAWGTQWLDELPLPQPYSWKVASLRQLIGWLSAEITVLEQVTADLLAGHDAYRAVQALPGIGPVPVAVDGIGDITRFRHPARLCSWAGLTPRHYESDTKVVRGRITKQGSRPLRWALIEAVQRTPAGTPIHQARDAIIARRGPQARNIAKVAAARKLLTYVFYAMRDGHVRALDTPGAAAPETA

SEQ ID NO: 434305 - protein, 410 aa, unidentified
MDRVYERCCGIDVHKKIVVACFRCGRKQELREFGTTTKELLRLADWLIQNECQMIAMESTASYWKPLYNVFESCELKAMVVNARHMKAVPGRKTDTNDAEWIADLLQHGLLRSSYIPDKSQRELRELVSYRKSLVGEKNRELNRLQKMLEGGNIKLSGTVSDINGKSARNILNMLVSGKEITHENLPELIVGNLKASPEQILDDLQGVLSPLQKKMLRVVLLHIDELNQHIASLDDEIDRNMQDQYRDAVDAVDAVTGIGPDSAKSILAVIGIDMSRFPSDAHLASWAGLCPGNNESAGKRRSGKTTKGNKMLKTTLVVCAHSAVKVKSSYFYAQFQRISARRGKKRAYVAVAHSMLIAIYHILKDNAPFVDLGSEYYNQFNKERKINLYLKKLKALGWESDTAAVSLPA

SEQ ID NO: 434306 - protein, 449 aa, unidentified
MSTWNLGIDLGVTNAHKAVLATNEGKFVWPKPWSFSTREADLDQLDRRVRQAAPPGTTCRAVMEPTGMSWFSVAVALQKRGWQTHRVKSQKVHALRQYYKKHAKSDRLDSEALAKMPVVDEEGLYPLYLPDATTLACQRLCRQREHFLELAVAAQNRIQAIDHLALPGLGKTLGEPFSPAARAFRDELYDPRKVLTLGEAGLSAFLARFAAAGDDPAAARKRAQRVYDVCQNAVALYRQSESEPAMYLDYPVLCQEVHRELHFLTLYEQQVQEIEQAIWPLYRQLHPSGYLESIYGVGVHGAPVFVSFIGDPHRFASPREWRAFVGLIPESAQSTTTDQKGLHITQAGQDILKKYAYLGADVARHYDPQIAAIYYDQMVNKGHHHIQAVCACATHLLDRILVVLQDGRPYELRDVDGRVVTPEEARAIIAQKYTVPKEVRARLRKQRAR

SEQ ID NO: 434307 - protein, 341 aa, unidentified
MEKLYYIGLDIHKKTISYCVKEIDGTIVEEGKIEAERKALNKWLDRLPGSWKGAMEATMFTGWIYDYLKPHAVDLKVGHPAMIEAITAAKKKNDRSDAAKLADLLRVNLLPECHMLSEEIRELRRILRYRNLVMRTGTRIKNKISGLLMETGTPYNKTKLHGKKYFRNLLERIEDVPDSVKEMLQLSRSSLEMFEVVQKKLINTLQKDKLIQERVERLMSIKGVGEVLALTWVLEIGDHLRFHNARQAISYCGLCSRQKESAGKERRGPISKKRNKHLQTTLIEAAKVAPRWNPQLAVLHEKELARGNHNRATISVARKLVEYMLAVERQKKDFVPSELAA

SEQ ID NO: 434308 - protein, 411 aa, unidentified
MRLFVGDDWAEDHHDVEVMSEAGKVLAKRRLPEGVAGIAQLHELIGRHLGEDADEAEVIAGIETDRGPWVTALVTAGYLVFPVNPLQASRYRERLGVSGAKSDAGDAHMLADMVRTDSHQLRPAAGDSAEAEGLKVLARTHKTLIWERTRAVQRLRHQLREYYPAALEAYDDLDAPDTLELLGKAPDPARAAKLTRAQVSAALKRARRRNITDKATAILAALRSPQLGQPAAVTAAYAATVRSLIAVITVLNEQVKILQRQVEENFGRHPDAEIYQSQPGMGAILGARVLAEFGDDPHRYADGKARRNYAATSPITRASGKKKVVAARFIHNDRLVDALNAQAFTALRASPGARALYDELRARGIEHNDALRRLANRLVGILHGCLKTRTLYDEATAWSHRQNLPQSSVAA

SEQ ID NO: 434309 - protein, 386 aa, unidentified
MYFCGIDVAKRSHIAVVLDEQGQVVKPAFTVHNTRSGFEQLHHVLSSLSGPVSIGLEATGHYWLALFENLSAHYPVIVLNPLQIHAYRRSGVRKCKTDRADAFWIADFVRIGQRPPASQNAPLLLQLRELTRFRSHLTAQIGDCKRKVLSVLDRVFPEYDTIFSDVFLRSSRHLLAEAVSAQDFADFDLAELAQRLQETSRGRFGQEKAESIQQLARQSIGVTFLADAARVEMRCLIEQIDLLETQRDLLDQKLAEWMDLIPQHITTIPGVGPVTGAAILAEIGDVQRFETIEKLVAYAGVDAAVYQTGQFEAKEMHMSKRGSPHLRHALWQAAFVASQYDPELRTYYQRKRTEGKDHGVAVGAVCRKLLNRIYVVLKEQRPYIVR

SEQ ID NO: 434310 - protein, 364 aa, unidentified
MTNLAAGIVGGVDTHKHTHHAAVLDTTGQLLGTKEFGTALGGHHALLTWMQSHGTVQAIGIEGTGFFGAHLTRFLVEQGARVVEVNRPNHSSRRSDGKSDRLDAEQAARAVLAGTATAVPKTKSGPVEVIRMLRVARASAVKARSQAMNSIHNTVISTPSPLRDELVQLAKRTLVNRCVGLRPETEELLELVDQPDRLLLAAAKVTLRDLARRWKTLDQEVKKLSRQIEALVEHAAPELVEMFGVGAELAGQFLVTAGENAERIRNEAAFAKLCGVAPQPASSGRTTGRHRLSRSGDRAANSALYIVAMVRMRHHAPTRAYVERRTAEGRTKREIIRCLKRYIAREVFRMLPGVNSPASVAAVS

SEQ ID NO: 434311 - protein, 337 aa, unidentified
MNKQDFAGIEVSAKELLVTLRRGEQTLPLESFPNTPEGHRAVARHLARKGRVVRVCLESTGVYGLDLALWLQKRSGLEVMVANPRAVRHFAQALMERSKTDPLDARVLLEFAVRMPFQPWQPPSATALHLCALARRLEAITDLCVAERNRLHAASAAQALPAAIRQDLRRSIAFHQRAVARLTRQALALIAGDPRLQERFQQLDSIPGIGSTSAIALLGELSLLAAGLEVGQWVASAGLDPREYSSGTSVRKQTRISKAGNRHLRRALYMPALVAVRHDPHLRAFYQHLLARGKQKLQALVAVMRKLLHAIFGMFQHRQSYDGSKLFPVAFATPEAA

SEQ ID NO: 434312 - protein, 341 aa, unidentified
MEHYAGIDVSLECSSVCVVNAGGKIIREAKVASEPEALIAWFASLGFGLERIGLEAGPLSQWLFAAMREAGLAVELLETRHVRKAFEAMPVKSDRNDARGIAQLMRLGWFRPVHCKSMGAQETRAALTARKLVQTKLRDVENSLRGILRGFGLKVGKTTELGFAGRIRELVAGHPHLETISDALLAVHAVLQNEFKAFEKRVRKMARSDTRTRLLMSTPAVGPIVSLTYASAIDDPARFKSSKRVGAHFGMTPKKHQSGETDYTGRISKIGDRSVRTALYEAAHIMLTKPVKGCSALKSWAMRIARRAGMSKAKVALARKLAVIMHRMLVDGKPFKDVAAA

SEQ ID NO: 434313 - protein, 315 aa, unidentified
MADTKKWIGIDVSGKELSVGVYPSGETRTFAYEPESVAELGVFVASFKPELIILEATGGLEVGVAGELYNAGMPVCVVNPRQVRDFAKSIGILAKTDNIDAVVLGRYGEAVKPQIRPMPNEEEKAIKEIVARRRQLIDMLVQEKNRYTRASKQTGPDIMKHIKWLEKRIKDLDKDLSEAVKKSPMWAEKGSILKSVPGVGDVLSSTLISDLPELGALNHKEIAALVGVAPFNCDSGKMHGRRQVWGGRRNVRRVLYMGVLSGIRCNPVLRAFYEKLVAAGKKPKVALTACMRKLLVILNAMVKSKQAWKAEFVNA

SEQ ID NO: 434314 - protein, 323 aa, unidentified
MKNSPIFAGVDVSKARLDVASTDSDVTWSVTNAPDGIAQLVQRLREVAPVLVVMEATGGFEVAAAASLAAAEIPVVIANPRQVRDFAKSTGQLAKTDAIDAKILALFAERVRPQVRSLPDDAARALDAIVGRRRQIIDMITAESNRLGFALPAVQKGIKKHVRWLERQLSDIDSELDELIRKSPIWRAKSDLLRDVPGVGPNLARTLIAELPELGRLSHKQIAALVGVAPLARDSGLFRGKRMIWGGRAPVRSALFMSSLSASKWNPVIRVFYRRLRDRGKSPKVAHVACMRKLLIILNAMIRDGRKWDPAIPLDQLRFQHSC

SEQ ID NO: 434315 - protein, 351 aa, unidentified
MKTQQTAPPKLFIGIDIHKRSWKVHCATNLSMGRTFSMSPDPKGLWEYVERHFPGHDVSTAYEAGCCGYRAHRCFEGYGWHSLVVNPADIFRRGKERHTKTDRIDAQLIARELKDGRLECIEVPDRCREQLRSLFRRRNDLVKDMRQTKSYIKMQLLYYGIEVPEVYDNDHWSHGFRDWLDGLEFEYESGKEVLRSRMRTFRFIDREFRDVSTLLRRHTKAHYKRDYMLLRSIPGIGPIVASGILSELGNLRRFNNIKQLAGYVGLAPGIYQSGDTVRHTGVSMRAHRLIRSYFIEASWQAIRTDPVMQGYYRKHQGKNVKSVIVKVARKLLSRTLAVIKTGVPYEIGVVE

SEQ ID NO: 434316 - protein, 411 aa, unidentified
MENVFPCCAGLDVHKESVEACVRRIETNGGLDQQTHHWGTMTRDLLAMADWMAAQGVTHVAMESTGVFWKPIYNILEGRFTMLLVNARHLKQVPGRKSDVRDCQWIAQLLQYGLLKGSFIPPRSQRELRDLTRHRTQLVEEKARTANRIHKILQDTNIKLSSVATDVLGASGRAMLEALITGEEDPVKLADLAQRKLRGKIPQLEKALEGHLTEHHRFMLQLLWKQLAQQEELIVELDRKIEEQTRPFAAEIERLDTVPGVDRRVAEVVLAEVGPDMKPFPTHANLASWAGMCPGNEESAGKRVRRRITPGNRWLKRTLAQATWAASHSKNSYLASQYRRLAGRRGRKRALIAVGHSILVIFYHMLKAGTSYTDLGGDFFDRLEPQRLTRYYVKRLESLGHKVTLESCAAA

SEQ ID NO: 434317 - protein, 402 aa, unidentified
MMILKQSVSADIAKDKFDACFSVLTAEHRVVVKATRQFANTPTGFAEFSRWAGKWENPQAQLVFIMEATGVYYENLAWRLHQQGRQVVVMLPNRARKFAQSLGHKSKNDRIDAKALAHMGAERHLAPWQPMSPQLYLLRKLTREHEQVQLMRTEAINRLHAESHAMLPGKGTQRRLNKTLQLYEAQLQQIAREIKATLQADAQLEERIQKITTIPGVGLLTAATLVAETNGFALFTSHKQLVSYAGYDVVENQSGNRVGREKISKQGNSHIRRILHMPALNAVSRKVPVCRALYERLTGKGKRKMVAYVAVQKKLLVLIYTLWKRNQAFDPQYGQKQEETENNNLIQEAGASLSGVSEADKDAITEETEPGTGEKEIAPAQARATQDELPLPVGPGALFQVD

SEQ ID NO: 434318 - protein, 415 aa, unidentified
MAIDIGKAFHAVLVELPDGAHQRFRMANSAEDYDRLVAFLRTLPGMLRVALEPTGNFHRTLAFRLITEGISVVSVSSVAGARYREALFNSRDKNDPKDAMVILQLLKHGLVQHYHDPLLAGHHDLQELAKTYRQVTLARKRLADSLLNHYLPLYFPEIARYWESTRVEWFVAFLSRFPTPQAVRVLSLPDFIEAAWPLIGRKINKRAKLEEIYELAQSSIALPVAVDSPAIDTFRLQLAHFARLAELRRELEAQAHRLLKDRQDYQCLCSLPGVASVLAMVILAEGGDLRRFRHHRQFLKYCGLDLAKCQSGQFRGRETLSKRGNALLRMAFWMAAQRAVRMTENSFRDKYERYMKQDPGNADVRRKALTAVAAKMARVAYALVKRLEPYRGYHEHALPSGSIPLNRAVGASATP

SEQ ID NO: 434319 - protein, 410 aa, unidentified
MLFVGDDWAEDHHDIEVVDEQGHQLVRRRLEEGAAGIAALHALIADHLDDQGEPAEVVVGIETDRGPWVQALLATGYTVYAINPLQASRYRERHGVSGAKSDPGDAHVLAELVRLDRDHHRPVAGDSAIAEHVKVVARAHQSMVWSRQRQTNTLRSMLREYYPAALAAFDDLAGRDALAVLAIAPTPAAGRRLRVARVEKALRAAGRQRHLTATAQRIVEVLHGEQLEAHPGVVEAYAASTRALVAVIIELARQCEVLKGEVEAGFGRHPDAELYLSQPGLGPVLAARVLAEFGDDPARYADARARKNYSGMAPVTRASGKARVVLARHARNRRLADALYFQAFAALSTSPGARAYYDAHRARGNTHHQALRALANRLVGILHGCLRHQQPYNEATAWPAATDKTNAPAA

SEQ ID NO: 434320 - protein, 342 aa, unidentified
MNVTTIGLDIAKNVFHLVGADAQGKQVLKKRLTRGKVLAYFANLSPSLVGIEACGGAQYWARQLVTLGHEARLIHPKFVKPYLRGDKNDYNDAGGLCEAVAHPQMRFVPVKTEAQQDLQAVHRVRDGLIKERTVWVNRARGLLSERGIVLAKGVGTFRRRVPELLEEADNGLSAPFRQLLGELLEQVRALDARIAEYDKRVVQISKGDDACQRLQTIPGVGPVVATALVASVGDARVFANGRQLSAWVGLVPRQYTTGGKPRLLGITKRGDKRLRAALIHGARSVVRHAESKDDRLSRWIRRIQASSGTNVATVALANKLVRIAWAVLRRGECYRATPLAAA

SEQ ID NO: 434321 - protein, 373 aa, unidentified
MNTIYIGVDFHARQQTICYLTTETGELVTTELKHEPKTAVRAFYEQFSGQVIVGLEASGYSPWFERLLEELGHQVWLGDATEIRRRARWRQKNDRRDAELILDLLLHDEFPRLHRPSLQSREVMRMLRYRQKLIKMRTMSKNSLQSLALQSGIARRGRLFTREGKAELDAAVMSAAMQWQRAHWWQLLEALNQQALEAMTWLKGASQNDVSIARLRTHPGIGLLTSLCLVHTLQPVARFRNTRKVAAYAGFDPMERSSAERKHFLGISKAGSRVLRYLLVEAANTAVRKDEELKRFYQRLAQRRGRPKAKVAAARKLLIRAYIMMRDEIDYAEFRRRAVAARLARLGQGPPIPAALIGQPASPARQEPPARGK

SEQ ID NO: 434322 - protein, 429 aa, unidentified
MIMGFTKPIEHFNLQRKKVITMNTLYVGIDVSSKSNVVYLMLPNGDKHSNFSVANSHEGSTLLVKKIYSALTSHSLDTVLIGLEATSVYGDNLVYFLREDATLAPFNRKIHVLNPKQVKKFHDTYNDLPKNDYVDSFVIADCLRFGRINKEVYMGEYRYKALQNLTRARFFAVQNLVKEKQRFMNVLFKKYSTMTQEKVFSDAFSTTALAVYDEFESAEALANMDLHELTDFIIEKGKNRFPDPDAVAKAIQKAARSSYRLPKTVNDSVNQVLSISITSMKALESQIKEFDKAIKALMELLPNVLISIPGIGPVYSAGIMAEIGDINRFDNQASLAKYAGLAWKQHQSGGFEAEVTRLIPSGNRFLKYYLCEAAFSLVRCDKEYSDFYHLKYKEVNRCQHKRALALTARKFVRLVFRLLKDNRLYCPAK

SEQ ID NO: 434323 - protein, 380 aa, unidentified
METAYDGRQVVGMDLHRRRGVLVRMTGDGRRLGTARITSSPAGLRKAIAVAGTDPRVVLEATYGWCWAADVLQAAGAEVHLAHPLGVKAFTYRRVKNEEKDAADLADLLRMGRLPEAWIAPAEIGELRELTRYRLKLVQRRSGCKDQVHAVLAKLGVPVTCADIFGVWGNTWLDGLALPQPYAGKVASLRKLIAELGSEITLLDTVIADLLAGHDGYRAIQALPGIGPVLAAVIVAEIGDICRFSCPAKLCCWAGLTPRHRESDAKVARGHISKMACAGGTGPPRRSEVCDGGGWWAGSAPGAADVRLHRPGHRRVLPGADLARGQGEPAGVAAPVRRDAGCGLRGRGVHRLAVCGGGTATGGHRRAPGRAGADRGPAGQ

SEQ ID NO: 434324 - protein, 352 aa, unidentified
MIIIGVDFHPEFQQIASVDTDTGEFQEKRLVHREEAENFYRALAGKKVRVGMEASGHARWFERLLSELQFELWIGDAAEIRTKRVRKQKTDRQDARLILQLLLEDRFPQIWVPSWENRDLRQLLWHRHRMVQARTRIMNQLQAVALNEGLRSKKRLWRERGRQQLESFRLAPWASRRRRDLLELLDRLNPTIAELTQAIEQETEKCPPAQRLRTHPGVGALTALAFVLIIGEADRFHCGKQVASYLGLVPLEDSSGNRRRLGHITKQGSSILRFLLVEAAQVTVRSLPEWRSKYFHLAMRRGRKIAKVAMARKLAVGLYWMWRKGWNYEQLTKFGSHAGQPGNRHGVQSNTE

SEQ ID NO: 434325 - protein, 328 aa, unidentified
MFESTAVTIGLDVHASSIRLAAIRGDELLDERTLPYDLEAVERSLRRWPEVRCCYEAGPTGFDLYRHLVERGIACEVVAPGLVPQRPGDRVKTDGRDARKLARLHAGGLLEPIYVPTPELEAARDLVRAREDARLDRMRDRHRLSKFCLRHGRRLPGVSWSVVRRKWLGEQRFGFAAEQQTFDCYLHTVDLVDRRIEALERSIRATAEQGPWRELVGRLRCLRGIDTLTALALATEIGDFGRFQRAEELMAFVGLVPSEHSSGEQRRQGSITKVGNSHVRRLLVEAAWHARRRPSVPGAANSVSTRAGSGWPPAASPRRRSLSPAPAS

SEQ ID NO: 434326 - protein, 427 aa, unidentified
MAARERVGEPEFVAFVGIDWADQKHVWCLQAANSTKRESGELEHKPEVVEAWVSELCQRFGQGAIAVAVEQVKGALVYMLGKYECLHLYPVPSTMSASMRQALYPSGAKDDPRDADLLLDLLLQNRDKLRRLTPDNEVTRRVQNLVEERRKLVEEKTAQQNRLTGYLKVYFPQMLEWFAKLDTKLACEFLERWPSLEELQAATPAEVRKFFRQHRGRHAELTEWRVQGIGQAMSAIRDGAVIEAKRMVVQVIARVLRTLLEGIAALDGKITEAAEAHPDFFIFQSFPGAGAALAPRLLAALGSQRDRYASAEEVQKYSGIAPVTERSGKKKWVHFRWACPKFLRQSFHEWAGHSIAQSVWARAYYQQQRQRGKDHHAAVRALAFKWIRIVFRCWQDGAAYDENRYLATLAKRGSLLIPVPAATATSL

SEQ ID NO: 434327 - protein, 366 aa, unidentified
MRKVMAGMDLHGNNVMVGIVDDQGARLQHRRLACELPEIIEFLAPYKAELESIAVESTFNWYWLVDGLRAAGFPVVLANPAKIDQYSGIKHADDKNDAYFLAELQRLKILPTGYVYDPELRPVRDLFRRRMSLMRQRTTLFLSAKSLHQRTTGRGLELRRLKAMEPEEAAALYTHPANQLIAQIQKEHIDSLDQSIRQIEKAVLKVALQQPYYQRLQTMPGVGIILGLTISMEVGNIDRFAGPGQFASYCRTVDAKRISNGKTKGDNNQKCGNKYLAWAFVEAAHGARRFDATCRRWYDRKAGKKCTTVATKALACKLAKAAWYVMAKGTEYQAGKIFPGLTEPKAEETSGEQASASKGVGPNPED

SEQ ID NO: 434328 - protein, 329 aa, unidentified
MAARKRSVMTDLATLGLDIGKHKVSACLLREGRKKDKTFSNDSAGYGACIAWLKEHGAERVHACLESTGGFSEAFATTLYDAGHIVSIVNPGRVKAFGKTEMVRTKTDKVDAALIARFCQLHRPDPWEPLPQNIRQIQALSRRLDGLIDMRTQELNRLEAPGNTEAVQASLREGIAWFDAEIVKIEHQLQQLIKDDPDMRNKRELLLSIKGIGERTADRILGEMPHLEQFRNAKAVAAYVGLSPREWQSGTLRGRTRISKIGNSRLRKALYFPAITAMQSNASIRNFSQRLRAAGKHGMLVIVAAMRKLICLAYAVVRSGRPFETPRMA

SEQ ID NO: 434329 - protein, 344 aa, unidentified
MEHYAAIDVSLEWSSVGVVDAAGQIVREAKVRSEREALAAFFTESGLAFARIGLEAGPLSQWLHAGLVEAGLPAILIETRHVKAALKAMTVKTDRNDARGMAQLMRMGWFRPVHAKAPMVQEIRALLTARKLLVAKLRDVESSIRGIQRGFGLKVGAVSKGKFEARIRELVTGQVMLERVAEPLLRARAALRTEYTTLHRDLLRTVREDAVCGRLMTVPGVGAVVAMTFRSAIDQPERFAKSKAVGAHFGLTPKKYQSGEIDRTGRISKVGDAMVRTALFEAANVMLTRAVRFSTLKAWALRVAGRHGMKKAKVALARKLAVVMHRMWVDGTSFCWGEASVSAA

SEQ ID NO: 434330 - protein, 402 aa, unidentified
MNAVGIDVSKGKSMVAIMRPFGEIVSAPFEIKHTASDINSLVELINSVEGESRIVMEHTGRYYEVLAHQLSEANLFVSAINPKLIKDFDNDSLRKVKSDKADAVKIARYALDKWQNLKQYSVMDELRNQLKTMNRQFSFYMKHKTAMKNNLIGILDQTYPGVNTYFDSPARSDGSQKWVDFASTYWHVDCVRKMSLNAFIDHYQNWCKRKKYNFSQSKAEEIYGKAKELVPVLPKDNITKLIIKQAVNQLNIASATVESLRTLMNETASQLPEYPVVMAMKGVGTSLGPQLMAEIGDVSRFTHKGAITAFAGVDPGVNESGSYEQKSVPTSKRGSSDLRKTLFQVMDVLIKTHPQDDPVYQFLDKKRAQGKPYYVYMTAGANKFLRIYYGRVKEYLSSLPES

SEQ ID NO: 434331 - protein, 346 aa, unidentified
MTIVEDKRAITGGVDTHADVHVAAALDPIGGLLGVQEFPATAAGYAGLLGWLGGFGTIALVGIEGTGSYGAGLARHVTAAGIRVVEVDRSDRQDRRRQGKSDPLDAVSAARAAQSGRARGAPKGRDGAVEAIRALMVAKRSARSERVQTNGQARALVLTGPDDLRTRFARHTAAGLVSGLASLRPRPGDVVGYATRIALRELGRRAEFLDAQLERLDELIAPLVAARAPGLLALHGVGPDTAALLLVAAGDHPERLRSEAAWAHLCAVAPLQASSGKVTRYRLNPGGDRQANHALWRIVLTRMSAHPPTLIYAGRRTKEGKSKKEIIRCLKRYVAREVYRHLRAAG

SEQ ID NO: 434332 - protein, 390 aa, unidentified
MSQPFVASRSLTAFEQDTTLVAVIEMSQSKWLVAAVVPGVERRPLKKLDADAGALLKLLRRWCEEARKSGHTVKRIVCAYEAGRDGFWLARWLQGQAIETYVIHAASIAVSREHRRAKSDRIDTELLMRSFLGWLRGEKRHCSMVAIPTVAEEDARRPGRERESLVAEQTRIVNRIKAVLALFGIASFNPRLRKAAQKLETLRAADGAPLPENAHAELRRDLDRMRLLHEQIGAIESERLRRLAQAPAAATGPHAMVRLIARVLGLGIETADMLVSEVLTRNLRDRRAVARYAGLTGAPDESGKRRREKGLARAGNGRVRRGMIQLAWRFLIFQKESRLVRWFRERTADGRRNIRKTMIVALARKLLIALWRLATTGETTEDIKLRPAGA

SEQ ID NO: 434333 - protein, 395 aa, unidentified
MEAPMTVAKDPGRCVTRFEPKRTLIAVIEMSQSSWLVAAIIPGLKRQPLKRLEVDEAGLLQQLERWREEATRAGHTVKRIAVAFEAGRDGFWLARWLRARGVEAHVIHPTSVAVCREHRRAKTDRLDTELLKRAFLGWLRGERGHCSMAVVPTLEEEDARRPTRERESLVAERTRVVNRMRACLARLGIRSFRPTLRRAPERLEELRTPEGDALPPNTRAELQRDMARLRLITDQIRELEIARAARIDHAPAQGANVMVLLLARVVGVGLETADMLVHEILSRGLRDRRAVARYAGLTGSPDESGARRREKGLAKAGNARVRRGMIQLAWRFLRFQEGSALAQWYRTRTAEARGGSRKTLIVALARKLLIALWRLATTGETPTGVTLRPTMVVAA

SEQ ID NO: 434334 - protein, 442 aa, unidentified
MSALAVLDPRAAFVDVGSEKMHVSIGGGPPEVFGTVTSQLHALRDFLLEHRVCSVAMEATGVYWLPLYGVLEAAGLDVRMVDGRQTRHLPGRKSDMQDCQWGATLHAHGLLRAGFVPPAHIRRLQDYLRLRGEHIAAAAGHVQHMQKALERMNIKLHDVISSLTGTSGLAVVRAILGGERDPAALLELCDGRIRKAKAERVVESLRGKWADEHLFALGQAVQSWDHYQAQIVDCDRRIAEVLARMPGGDAPAAGAEQPAKRRTQPGVNAPQIDNLRDLLERMCDGKDATTLPAHSEYTVLQLVAEVGTDLARWPTEKHFASWTGLAPGSAQSGKRRAAVRRRRNRAGKIFCVMARALARSKYIALGGYYRRMAARRGGLVANKALAHKLAILFWRVMVKGMDYVEKGLAHYEAQVLETRQRLLRKLAKQFGQQLVPIQANPA

SEQ ID NO: 434335 - protein, 379 aa, unidentified
MQIMILGIDLGKNSCSLVGLDESGMVVIRKRLRRDGVIGFAAKLSPCAIAMEACCGAHHMGRSLAALGHEVRLMSPEYVRPYVKAQKNDDRDAEAIAEAATRPTMRFVELKSEEQLDVQTLHRVRDRLVGERTSLTNQIRSLLLERGHVVAQGHARLRFLLSELLDTDTVALSPRMMFLLGDMRTRWEELDRRIAAFDAEFAAMARADVRARRLTEIPGIGALNATALVAAVGDAATFAKGRDLAAWLGLVPRQATTGGRPKLLGITKRGSRYLRKMLIQGARSAMPTLAKSDTAIGAWLRGLLARSHSNVAVVALAAKMARTVWALLHRAKLQEHAGAGESIRHIEMRTWRKRAGCDELRVVKGRWPDSLSVSRKPPA

SEQ ID NO: 434336 - protein, 403 aa, unidentified
MRHVIAFDISMGKSYMVIYNAQKQCIFEKEIKHSKSEFEELQKKIHELTNETGKSPEIVFEATGIYSRQLERFMQDNQYTYCLLNPLEAKLQCDSLRIHKTDRSDAHRLAITHFTVTRRVSHGTDHLFHQLKSLSRFYSELDGELSMIRSRMHKVIQLTFPELEKMFTSKSDLFLNFVQLFPHPDCVLNLSKTIIKNRIRANTNKKISTIMAEKKAIQILEIAKNSYPAVSQNDVLCDQLKVYARRYQELLHQKEHCINKMVHLAEQRAEYSIILSLPGIGPNTAVRLMAEIGDITRFANNKQLNASAGIDIRRFQSGKTFYKDKINKRGNKHLRKLLFLIIQNMIKQRRYGRNHIIEYYDKLKTQPYNKCHKVASIACVNKLLKLLFHLITHDIHYDYRLTA

SEQ ID NO: 434337 - protein, 344 aa, unidentified
MESVPIFVGLDYHSGSVQACVVDAAGKVLLNSKRASSVPDVVSVVQSLGHVQRVAIEACCGAADFGDHLAHATGWRVSLSHPGLVSKMRSSIDKSDRSDARVLADLCRTGYLPGVWLPPEPIRELRTLTRRRHQLTDAIRRAKTRIGALLRDKRVATPPEIVTKWTLRHVAWLKALTLPPCARMVLDDLLAEIHYHAQRRDTIDAQLEQATAGDAMIARLRQVKGIGPVTAWTLRAVIGRFDRFRNGKQLSRSCGLTPKNASSGERVADAGLVRAGDPTLKTVLIQVAQRVVRCAGEWNSLYLGLLERGKPACVAIAAVANRWTRRLWHDLKGMGDGGGMSAAA

SEQ ID NO: 434338 - protein, 343 aa, unidentified
MKLMRIGVDLAKNVFQIHGVDCHELPVWRQRLPRDRWLQTVLEKIEPGCEIGMESCGGAHHWARQLQARGFRVRLIAPQFVKPYVKSNKNDANDAEAICEAMSRPSMRFVAIKTIEQQDIQATHRIRAGLIEQRTAKANQIRGLVAEYGLVAPKELLMLRRAIPCWLEDADNGLTARFRRLLDGLWDDLRALDGRVSKLDGEITAIATNEPSAVRLQQLRGVGPMIATALVVALGDARQFANGRQFAASLGLTPRQHSSGGKDRLLGISKRGDTYLRTLMVHGARSALRTAKSKEDRLSQWAVRLAERSHPNVAAIALANKTARMAWAMLRHGTDYQPNQAAA

SEQ ID NO: 434339 - protein, 400 aa, unidentified
MRVVFGIDVSKASSEVAILVNGEKVHGYTIPNDAIGFNRLLGDLKTVHQPEIVFEATGVYSRRLQAFFEDNSYTYTRLNPLESKKQLDSLRVRKTDKIDAEKLATSQFILNRKPSYVQEVLYQELRDLSRFYQNLTEDIVCAKNRLHKVLQITFPEIENILSAPTGEQYWNLVITFPCNSFVLESDDATLTAIIRQSTAKRISEKRVTYLVDKLTKLANQSYCEVKKTSPMMEEIKYYAGELLRLSEYRQGVLEEMVTLAQPLPEYEILLSIPGITETTATSIIGELGDIRRFHSAKQINAFIGIDLRHYESRNFLAKEHITKRGNPYARKILFKCIHNIASASHTNPCHIADFYEKRKRQSQVTSTKPHTIASIHRLIRTMYYLITHNKLYDYTSTQNR

SEQ ID NO: 434340 - protein, 366 aa, unidentified
MKETSTVRVNGNMIFKGHKLTIGLDLGDRWSNYCVLDEAGEVLLEQKLATTPEAMKQTFERIPRSLIALETGTHSPWASRLLKELGHAVLVAHAQKVELISKSKRKDDRHDARTLARLARIDPELLGPVRHRSAKAQIHLTVIRARAELVSVRTALVNAARGLAKPHGERLPKCGTGQVSRELASELTAELREVLEPLLKEIESLNERIKEYDARMEKIAKENYPHVALLKQVKGVGTQIALTYVLTIDDPHRFPKSREVGCFLGLRPGRRDSGQSQPQMHISKEGDRYLRTMLVQGAHYILGPFGEDSDLRRWGLRLAERGGKNAKKRAVVAVARKLAVLLHRLWVSAEVYEPLRNSHKAMRAVA

SEQ ID NO: 434341 - protein, 344 aa, unidentified
MDYFAGLDVSVKETSICIVDDTGKIVREAKVASEPEALLAALKKPAYHSKRIGLEAGALSQWLFSALAEAGLPVICVETRHMKAVLKAQINKTDRNDARGIAQMMRAGLYRPVPVKTLRRQKLRMLLTHRKLLQSKAIAIENDLRGTLRNFGLKVGMVGTVKFEARIKERVENLPDLAALVDPLLVVRRVLRQQLGILHRRLLAVVRDDEVCRRLMTVPGVGPVVALTYRATVDVPARFRTSKAVGAVFGLTPAKYQSGEINRTGAISKCGDDMMRVMLYEAAQILLVRSAKWSWLKAWAMKIARHRGMKKAIVALARRLAVIMHRIWVDGTEFRWTREGAATA

SEQ ID NO: 434342 - protein, 341 aa, unidentified
MEDITLIGIDLGKHSFHVHGQDRHGKALLRKKFSRKQLIEFLAKFHACTVVMEACAGAHHMARQLAGFGHEVKLIAPQFVRPFVKSNKNDFVDAEAICEAAGRPSMRFVTPKNEAQQTLSALHRVRESLVRDRIKTSNQIHAFLLEFGISLPIGHAVVRRLPAILAEQSLPPRLVQVLQRLHAHFKYLDGQIAEVEKDLAAQLADDDLGQRLMTVPGIGPITASMLASEVGDGKQYRCGRDFAASLGLVPRQYSTGGRSNLLGISKRGDKNLRRLLVLGARSYMQRLERQTGPLACWVRAMLMRRHSNVVACALANKLARIVWAIAAYHTSFEMKEAPMDV

SEQ ID NO: 434343 - protein, 397 aa, unidentified
MIAVGIDISKAKSTVAVIDSDGTVLASPFTMAHTQPEMEAFVTYLKGLGKPTTILMEYTGHYHYPVLKKLQDEGFPVCIVNPYQMKKYGDVEIHKAKTDKKDALRIAAYALEKSYKLVPYSSMEQKYEDLKFLSRQYNQRISYVAKLKVQLIALLDQTMPGITRILPLNSRNPEKCALLLFIKRFKSFDEIQRIGKARFLASYDVLAKKASERSASSKGLSIYELAVDSITTRGEDPYIWLSQNQCVDLLSATQNAADEIISQMRNIAETIPEYKVLRAMHGVGDRLGPIILAEIGDVHRFHSGKALNSYAGNDAPPYQSGQFESRNRHISKRGSSALRKACYEVMQALKLAKPQDDPVYLFMLKKEQEGKPFNVAKMAGVNKFLRIYYARAMELYK

SEQ ID NO: 434344 - protein, 342 aa, unidentified
MKRIAIDLAKSVYQVAESVQVGRVDRRKRLDSGAFTRYVQEQIEPVEWVMEACGTAHHWGRLMQEKGHRVVLLHPRYVRPYRRRNKTDRNDCDAILEAARCQDIRPVPVKSVQQLHKLREGWKKSRVQRINLLRGILREAGVEAPNGIKPFLRQACELIERPEVRALRGALQVVLAEINLYEQSMRECEEQLARWHADDEIVHKLDEVSGIGLLTASALKTAVGKPERFASGRHLSSWLGMTPSEYSSGERRRLGRISCKGNVYVRTLLIHGARAALLAAKRCKARTPERLTQLQSWALQTAERIGHNKAAVALANKLVRICWAVWCHERRFSGNWHSTKPA

SEQ ID NO: 434345 - protein, 373 aa, unidentified
MGNVEKVYAKGKPIYVGLDVHKREWVVTVLCQGEEVYHGVVVPDTEVLIRFLRNFYASEVHAVYEAGPTGYWLHDALVKAGFDAIVTPPSLVPRIGGRVKTDRRDSKKLASMLAGGFLRRVYVLTPEERAHRQLLRTRNQIENHRRKTQNQIKSMLLFHGKRAPASLKERWSQMHISWIEKLEWEYPALKISMDAMLTMYHNLTEQYKQLTHEIEKLAQTERYRERVGLLTQIPGIGIFTAMAILVELQDIERFRRADQLASYLGLTPSQHSSGERICMGHITRCGNYEVRTRLVESSWTLIRYDTGARATYERIKHQTGSGRKAITAIARRLALRIRRVLLDKVQYSLSAGGHLATGRDKKREVKRFILRKV

SEQ ID NO: 434346 - protein, 368 aa, unidentified
MNEYKLKAAPTAVSKEQNSQKNPKANRILIGVDAHLKSYEAARKIDNGAVGVAQSFRSKEAFLLYVEKQREQAEEVAVVYEAGPLGYTLYRELKASDIECLVCAPRSGEQKRKRRKNNSIDARTLSSDLFNYLNGNEQALQAVRVPSEAQEQARVESRQHDALVEERKRIGAMGNSLLLSQGYGSWSNWWRPKAFERLSQGVAPWIVKHLGRWVGILRELDQQIQQAKAELTQHYQGPRPKGMGAPSLAQLNAEVLDWTLYSSRRKIGCLAGMVPSEWSTGEGQRLGAITKVGVPAIRRIITEMVWRMILFQPEYKPVQKWREVLEGPNRGLKKKAVVAIGRQLIVDIWRLQTGRITAQELGLIMIEA

SEQ ID NO: 434347 - protein, 381 aa, unidentified
MPEEIDQWARGLADRLPGGKIAVCLEPSKGSLISALLKDDHWVLYPINPRMLAKCREALAPSGKKDDPADAQLLLELVGKHQAKLKPWRPAAEHTRTLPFFVEPRRKLVQDKTRLTNRLTSVLKGYFPHVLRWFAALDTPLVWDFLKQWPTLEAVQNTDDTALRTFFRAHHAHNPAINQQRMDGIRQAIPATTAQAVIRSSVMVVHTLVEPVRGLAEAIHRFEQEIEELTRSHADLQIFASLPGAGPVHAARLLSALGTDRSRYECVEDFRTFAGIAPIIERSGKTIVTHFRWFCPTFLRHSCHEFAGQSIPYSRWAKAFYRHQRMRGKDHQAAVRSLAFKWTPIIFQMWKSRTPYHERTYMAALQRRGSPLCQVLAEHPA

SEQ ID NO: 434348 - protein, 360 aa, unidentified
MKVQRTSVGLDVHARSVVACGLDGDTGEVFQRRLCPDHREILEWIGGLPGPVAVTYEAGPTGFGLARFLAAEGVVCRVAAPSKLQRPAGDRVKTDSRDAAHLARLLHLGQITDVAVPSVAQEAARDLVRAREDCRGDLMSARHRISKLLLRQGIVYYGGQAWTGKHEMWLRGQQFGSPALMLAYEAALDAMVACVHRRDRLDEAIVALAADSEFTALTRRLGCLRGISTLTGFGLAVEIGDWSRLTGRSIGAYLGLVPCEYSSGATRSQGGVTKTGNGHARRLLVEAAWHHRAPYRPGRDLRRRWDAAPVAARERGHAANHRLHDRWAGFDRRKKRAVVANAAIARELAGWCWSLAVMAD

SEQ ID NO: 434349 - protein, 432 aa, unidentified
MNYNQNKRLNQLDENILIVGVDVSKKFHVARAQDFRGVEFGKGIKFDNSRKGFIQFEEWINSLQFENSKTKILVGMEPTGPYWLPLARWLKAGNYWMVTVNPAHVKKSKELDDNNQAKTDYRDARVIAQLLKDARFSEPNLLEGVYEELRNAKNIRKVMVNDLKRIKNQMANWLDRYFPEYKRGYANWEAGSFLYILERYKLPSKIAKLDVIKVYSNVKEKFSRGVGQKKIMNLIRASKESIGITEGSRMAEKELEYLLKRYNELVSDINDIEITIESLCEELPEVQKMTQIKGIGITTACGIVAELGNIKEYRTPKQMIKMAGLALTENSSGQKKGKMSISKRGRKDLRKILYQAVVGMIRTNEAFHKLYQYYRYRAKNQLVGKQAIIVLVNKLLRIIHTIVVKDVDYDELKNARSYKTPRRVFFSSIDRF

SEQ ID NO: 434350 - protein, 356 aa, unidentified
MTSTTKYIGMDVHKESISIAVRNAAGKIAMECVIETKASMILQFVDGLRGDVHVTFEEGTWAAWLYDLLKPHVTRLVVCDPRRNALLQEGNQNDRVDARKLAELLQNNQLRSVYHGDHGLRTLKELVRSYMTITKDLSRVMTRVKAIYRSWAIPCSGKQVYSSHHRAEWLGKINESGVRRRAEFYYQQLDALRPLRQEVRRELLAESKKHKAWKQLCEIPSIGPIRAAVLLGILQTAHRFRTKRQLWTYSGLGIEVHSSADHHVVKGQLERKKKHIEIRGLNENCNHDLKNLFKGAAVVASTKPGPLEEFYAALLAKGMRPEMARLTLARKIATIVLIVWKRGVCFDAQHLKPQTA

SEQ ID NO: 434351 - protein, 360 aa, unidentified
MHATTVAVDLAKSVFQIAVADEHWHVVETQRLTRSQFERWFLNREIGLVVMEACGSAHHWARWMNSLGIEVRLLPAQYVRAYVRRNKTDATDAAALLEAVRASDLRPVRVKSVEQQALQGLHRIRSLWMGTRTSRINALRGFCREFGLAIPQGARTGLEVLGRVLADPNTAVPGLIRDSAKLLLEEVRLLEARIAQVERELANAAKHSPACTLLLSVPGIGLLTATAMVAATSGDVTHFKDARHFASWFGLTPREFSSGGTRHLGHISKKGDRYLRMLLTHGARSVLRAATVAVEKGKVLSGVRHWALAVQARSNHNKATCALANKLARICYATLRDHETFDEKAALERKAQRQSFAMPA

SEQ ID NO: 434352 - protein, 369 aa, unidentified
MNKNILFIGMDVHKESIEIAIAEGSNIEVRRYGKIGGTHDAMRKTLRKLVSLGKTLHFCYEAGPCGYELYRYLVSEGHDCWVVAPSLIPKKPGDKVKTDKRDAIQLARLFRAGELTPVYVPDREDEAIRDLSRAREDAMLIQKSARQRLKSFLLRHDIRYQGKSSWTEAHLRWLADEVRCPSPAQQIVFQEYVNTVTEAQHRLQRLNEQIEVFVKQWRLYPVVEALMSMRGVKMVVAVTVVSELGDLSRFENPKQLMSFLGLTPSEYSSGQRQTRGRITKTGNGHVRRILIEAAWCYRYPAKVSPEIQKRQENIPLPIRNIAWKAQLRLTQRYQHMQRKGKPHNVTVVALARELAGFMWAIANEVKYPR

SEQ ID NO: 434353 - protein, 324 aa, unidentified
MQVREAYSMNKENPTEINIGIDTSQSQLDIYVRPIGEYFSVDNTSKGAKEAVRRILTYQPTRVLIEATGRLEMLFVCAAQEARLPVVVCNPGQVRQFAKATGRLAKTDRLDAQDIAHFGEAVRPAVSELKPEKLRRISDLIAVRSQCLGMITMQKNRLQRMPTSVHKPLQRILKAIQKEVERIDQQIDKLVEAIPQWQSQRDLLMSAKGVGKVVAYTLMSELPELGRLNRKEIAALVGVAPINRDSGSFRGKRRIHGGRRKVRTALYMSMLSAVQHDPKIKSMYERLVAAGKPKKVALVACMRKQLTILNTMMKNGTHWDEKLA

SEQ ID NO: 434354 - protein, 370 aa, unidentified
MSNATTFVGLDVHARPVKACAFVPETGETIRKSFGYEPGEIASWVSSLPQSARCVYESGVTGFHLCRELNAMGAACVIGAVSKMHKPAADRGRKTDRRDAQFLAVQLALGVVTEVHVPDAECEGARDLARALADARDDAVRAKQRLSKFLLRHGLVYDERNAVGQRRNRWTGDFWAWVGRIDLGDAAAMATLDHYCERVREADAAKAALEAKVKSLAQQPRWKPTCDALKCLKGIDAVTAASIACEADGFARFATASGFAAWVGLVPSEHSSGESRFRGGITKAGNKHLRKLLVEAAWHYKGASRSPKDLAKGQVVDAATRRHANAGVRRLVDRRRSMDDAGKQSSVANVAVARELACWCWAVGRMAEGA

SEQ ID NO: 434355 - protein, 339 aa, unidentified
MFYVGLDVSIARTAVCIMDATGQIVLERSVASTPEAIMAIVRASGESVERIGLEAGINSAWIARGLDEAKLPVIVIDATHAAAALKTGFRNKTDKNDARGIADLMRVNKFRVVSVKSVAAQRDRALLTVREQLRRQSLDARNIIWSILQVEGLKPPKLSSPAFQVLVTQSLDDESLAPLLGPLVAVVEHIDSQVAGLDKAIAARAKASTACRRLMTVPGVGPLVALTYAAGVDDPARFSDSRTVGAHFGLTPRRFQSGEMDWSSGISRAGDAGVRRALYQAANVLIHHSRGWCALKSWAVRLAKRRGLGKAKVALARKLAVVMHKMWTMGEDYRMTAAA

SEQ ID NO: 434356 - protein, 418 aa, unidentified
MRNSWTPYKFTFGGTRMYNAVGIDVSKGKSTVAVLQPAGVIIRKPFNVNHTSSELDELAKYIGSLEGETRVVLECTGRYHEPVVKTLSEAGLFVSAVNPHLIKNFGNNSIRKVKSDPADAKKIARYTLDNWIELRQYSSMDNTRTQLKTLNSQFSFFMKQKVAAKANLIALLDNTYPGVNKLFDSPVRDDGSEKWVDYAYSFWHVDCVRKIGLKTFTERYQAFCKKHHYNFQPAKPAELFLASKDLIAVFPKEASYKLLIQQSIQQLNLASSHVEELRSKMNELASTLPEYTTVMGMYGVGKTFGPQLIAEIGDISNFSHREALTAFAGVDPGVDQSGTHNSKSNKASKCGSNRLRKTLFQIMSTLLQTAPEDDKVYQFLVKKRAEGKPYYVYMTAGANKFLRIYYGKVKECIRNLEQ

SEQ ID NO: 434357 - protein, 471 aa, unidentified
MKLPSNQKTNQPVNKKKVSSHLEQINHNAAGIDLGGAEHWVCVPIEKAQKNVRRFGCFTPDLMAMADWLIECGVTTVAMEATGVYWIPVFQILENRGLEVKLVNAHYVKTVPGRKTDVNDCQWLQQLHTYGLLSGSFRPEDQICVLRSYIRQRDSLIKNASTHVQRIQKALIQMNLHLHKVISDITGLTGITIIKAIVAGERNPLVLASLKDPRIKSSAAEIAQALTGDYRAEHLFVLKQEFSLYEVYQKEIAALDAEIEQCLASFEPKTLDKPPTTIKKRRKKPTANHPPFDLHKYIYRIAGVDFTLIDGLDALTVQTILSEVGLDPERFPTVKHFTSWLGLCPGQKITGGKVKSSKTRPVINRAANAFRMAAFSLTQSRSALGAFYRRLRSRLGAPKAITATAHKLARMFYRMWTTKGLYSDPGMDYYEQKYQQQVLNNLKKKAHALGLELVPISPDPQNAPSSPTLAT

SEQ ID NO: 434358 - protein, 434 aa, unidentified
MMRGNEQEPSLKEKRRCAMKMPPPAPSSEGAVIKYVCGIDIGSQCCVGCICRPDKSVVIKSITFANAREGWQIWEEKLKQLDAPAGEILIGMEATSRYGENLYQELEQRGYVLRLFHPGQTHHFHQQRGLRAKTDRLDAMTIARALLSGEARMGYVPDEQVATYRELVRLHTQLSDTAASYQNEIQALVVVLFPEFTQVFADPCLPTALAVLKAFPSAQALVEAGVEALVQVLRAQPAAHYGRPTAKKLVALANQSVSSGRARAGRSTSLRILCDQLEHTQANLARLNTEIEQLLNTDPGVKGLQQVPEFGPKTLAVLRAELGDVQRFSRIDEVIAYGGMDIEIKESGHRIGKAKLSKHGSGLLRRVLYMSALRCIHRKESAFGAYYQRLVQRGLKKGSALMAVMRKMLAVAAHLLMHEDEEYDPSKVCGSRAG

SEQ ID NO: 434359 - protein, 367 aa, unidentified
MKQQTSATTETGIKGRNIIDFTGKTIYVGIDVHQKDYQVAKVLNGFCLGNHRMESNREKLIEQLKSHYPGATFKCVYESCAWGFTLQRTLQASGMECIVVHAADVSTTDKEKRRKTDKVDALKLAHGYASGSLKGIHVPNEETQKDRSLIRYRKQLTGDINRSKNRLKSLLKYQGIDLPPQYAGNNWSRNFLNWVEQQAEKDALLKETLMLLLEQIKLLRQLLLKTERKLREMRKTKYAQKADLACSVAGIGPTTAMLFLLETGDINRFKGFDSLNDFVGLCPDTDSSGDTHRDRGITTRRHKQLRSALIEAAWQAIKTDPALMDSYQTLLKRMKGTQAIIRIARKLLRRLRAVLLSGRPYQKGVIA

SEQ ID NO: 434360 - protein, 343 aa, unidentified
MKYYSGIDLHTRDSVVCVIDQKERKLVNAKAPNDLPSIVSLLEQAPRRPSVAVEATLNWYWLVDGLQEAGYKVKLAHTMGLYMITGAKVKTDRRDAFSLARLLRLDAIPEAYIYPKELRPIRDVLRRRNRLVRLRAEAYVAIKRKFQQYGLPYCDKAIQRADEKELLSWFTHPGIRSSLEMELARIRLYSRELKTVEKYILSTVENQPIFEHLQTIPGVGKILALTIYYEVGEIARFPSARQFCSYARVVPGMAQSGNVVRRGTGSKQGNPHLKWAFNQAAAISVRHYGYVRNFRQKHLARRRSKARRLISLSIVAHKLAIAAYHVLRDDVPFDKELMFGKAS

SEQ ID NO: 434361 - protein, 412 aa, unidentified
MLKIVYPVCCGMDVHKSFVVACIASTNDHGVTTYRSGRFSTFTGDLRRLAAWLHAHSCTDVCMESTGKYWIPIYNILESSCRITLAHPKYVKAIRGKKTDKKDAKWIADIFKHGLVCGSFIPPADIRQLRDLMRYRAKLTGFSTGEKNRAQNCLTVSNIKLDDVFSDVFGKTASAITQRLLENDAPFDVTPFLNKKLKASADRIQAAVDGHICAHQAGKLRVIRSHMENLAACKKSLEVLIFGLAEKYLPTLDLILTVPGIQVFAAIGILSEIGADMSVFQSSKHLCSWAGLTPQNNESAGKKKTTRISRAGAYIKPLLVQCALCAIRKKSNPEIRSRYLNLKKRRGHKKAIIAIARMLLTAIYNIIKRNEKYNPALYRKADTPPRNREVSVNEAIYILQRQGYLVTAPQSA

SEQ ID NO: 434362 - protein, 356 aa, unidentified
MTNQATQYLALDVHQATIVATLRSADGSVRMRATLPTEARAVVNLVRGAGPHVRVALEEGTQAQWLHDVIAPVADDVVVCSTRGRSEIENKNDRIDADRLSELLRIGAVKPVFHSALDTLSLKELVRNYLTLVEDATKTKLRIKSMFRARGIRTPGRQVFIRERREEWLEQLPSPGARLHAEHLLTALDTLTALRRRAKAAMVAEAQKRAAWKVLRSIPVLGPVRIACLMAIIVTPHRFRTKRQLWPYCGLAVVTRSSGEHEFADGLLRRRRRYAPATHGLNRNYNRTMKNVFKAAAAAALIKTGPLKDFYDHCIQRGVRPELAKLTLARKIAAVTLRLWKKGELWDPNKLTMQAT

SEQ ID NO: 434363 - protein, 361 aa, unidentified
MGDLSSTTKKLVCGLDLGDKESWFCICTAEGAVVEEGKVRTTMAGLTQRFQSCAPMRIALETGAHSPWVSRLLSQWGHEVWVANPRKVRLIGNSRRKNDRLDARSLADLLSVRPRLLYPIQHVSAQAQTDRATLQARDALVRARSGLINHVRGLVKSLGSRLPSCSAEAFATKAKVAVPDGLAPALLPLLEQIAEMSRLIRSYDKQVLELLRTSYPQAEELRRQISGVGPITALAFVLGLGDPHRFARSRQVGAYFGLVPAQRDSGQCAPQLGISKEGNPYVRRLLVQCAQYILGPFGQDSDLRRFGQRLVASSGGKGAKKRAIIAVARKLSVVMHRLLVTKQAYQPLKSGEPGGELQAAA

SEQ ID NO: 434364 - protein, 344 aa, unidentified
MTYFTALDVSLRFVSICIVDDMGQVRYEAKVPAEVHRIVGCLRKFSDQIKTVGFEAGALTQYLTYGLQAAGFDVVCLEARQVNAALAAMRNKTDKNDARGIAQILRTGWYSRVHVKSLESHQIRALLASRKAILKKCIDLENELRGLLRVFGMRLASKVPHGAYDAVVRQQVETEPLLARALLPLLEARQVLYRTYLKLDNEVKAIVRHDRICQLLMSVPGVGAITALTFKAAVDDPHRFKRSRTVAAHFGLTPRRYQSGEIDNPGRISKAGDPEVRCALYVAAHSLLSRSAAWSTLKAWGVRLAKTRGHRRAVIAVARKLAVILHKMWIDGTEFRWSAEPVQA

SEQ ID NO: 434365 - protein, 399 aa, unidentified
MFYCGIDIAKYKHEASVIDMSGKALSNSITFANDRQGCEKVLAIFEKSEITPDNIVIGMEATGHYWLSVYTFFLELGYTVKVINPIQSEAFRKMYIRQTKNDSKDSYIIAQIMRFGEYSATTLSEDNIIALRQLSRYRLALVDACGDCKRRVIALLDQVFPEYDKLFSDTFGKTSSELLLNCPTPEDMLAVSTRKLTNILNKASRGRFGKEKAEELKDAAKNTFGIAFAKDAFSFQIKQLMQQIIFTEKQLSELEEQIANLLHETNQYITTITGIGDVLGAIIVSEIGDINRFERPNQLVAFAGLDVTVKQSGEFSGTKNRISKRGSPYLRRAIWLAAQRAAFCDPILSEYYQSLKARGKHHLTAVGAVARKLCNIIFVILKENRPYLPIPPKKSQNLS

SEQ ID NO: 434366 - protein, 381 aa, unidentified
MEISPSPAAPATDPQPATLFVALELSKAKWLVGLHSPMADKVSRHTIAGGDAPALLMLIGAARRRAEASLGGTVRVVTCYEAGYDGFWLHRLLVAHGIANQVIDPASLLVNRRARRRKTDRIDLAGLLRTLMAWHRGEPQVCSMVRVPSPEEEDQRRRGRERERLVKERVQHLGRVKGLLMTQGVRDFQPARRGWRDRLEALRTGDGRPLPDCLKAEIARECRRLALVDEMLDELERERDAASDGKAPQQAALLTKLRGIGPTSAHLLAGEVFHRDFANRRQVAAYLGLEPSPWQSGQVDQDQGISKAGNRRARRVAIELAWLWLQHQPDSGLSRWFKDRVGVARGRVRRIMLVALARKLIVALWRYLASGVVPEGASMRA

SEQ ID NO: 434367 - protein, 314 aa, unidentified
MKKAVEIFVGIDVSKAWLDVAVHEQKETTRFRNEETGITSLVKKLKKRKPKLIVLEPTGGFEMLVVAELSQAGLPVAVVNGKRVRDFAKATGQIAKTDKLDARVLAHFAAAIRPEVRSLRTEEEAQLTALLTRRRQVLEMLTVEKNRLVTVRANMRPDLEAHIHWLFNHLKELDQEIEEFVKGSPLWKEKDTLLQSVPGVGPVTSATLLGMLPELGLLNRQEIAALVGVAPMNKDTGNKQGKPSIYGGRAEVRSVLYMAALSAKKHNPFIRKFYQRLIQHAKEKKVALTACMRKLLVILNAMLRTNQPWRSQTA

SEQ ID NO: 434368 - protein, 355 aa, unidentified
MSQEKYIGMDVHQATISAAVMDADGKLLMECLLETKADTIVEFIQGLHGTLSLTFEEGTSAAWIHDLLKPHVSRLVVCDPRKAALLKEGNKSDRIDARKLAELLRTNQLKPVYHEEHGIRALRELGRSYLTITKDVTRVMNRIKALYRSWGIPCSGTSVYAPRHRAEWLAKIVEPGVQVRAEHLYQQLDSLQPLRLQARRVLLRESHKHSGVKLLRQIPSIGPIRAALLVALLQTPRRFRTKRQLWAYSGFAVETHDSGEYRYVRGKLQRNRERITVRGLNDNHNKDVKNLFKSAAISASTRPGPLRDFYVARVEKGMRPTMARLTLARKIATITLTIWKKGVGFDPQNLHRQAA

SEQ ID NO: 434369 - protein, 398 aa, unidentified
MRIETQPQDHPTATTGETARLLVSFELSQSKWVLTIRAPASAKLSRFTVPSRDTEKVSSLLTAQRQQAERRTARPVQIVSIYEAGLDGFWLHRWLETQEVESHVVDAASILGPQRRRNAKTDRIDGEKLLRSLAAWLGGEVGVCSMVVPPSVAQEDLRRLSRERGELVDERTRLSNRVGGLLANQGIAGFKPLKKGARQALQTLRTGDGHELPPHLRTAIERILQRLELLSEQIKAAEAERDALLRAAQVAAAPEAATAASPEMAAAPLLLRLRGIGPEFATVLPLECLNRDFDNRRQLGAFAGIAPTPWCSGSVEREQGISKAGNRRLRTILIEAAWSWQRHQPDSALTQWFRKRIKGQSARVKRIAIVALARKLLVALWRYVKHGVVPQGAVLKAV

SEQ ID NO: 434370 - protein, 410 aa, unidentified
MEIVREYVSGLDVHKKSVVAAVITPQGRRVKTFSTTTRALLELVDWLKAEGVRHVAMESTGIYWRPIFNLLEQTEMEVLVVNAGHMKQVPGRKTDVKDAEWIAELLQYGLLKGSFVPHRGQRELRDLLRYRRTLIEQRADEVKRVQKLLEGANIKLANVAADVLGVSGRAMLEGLIEGQQGTAELAHLARGRMKSKQRQLEEALEGSFGPHQRWMLRRHLDLIDFHDGKLKELDAEVAERMRPLLAALNHIDAIPGLGQQTAQEIVGEIGTDMSQFPTDRQIASWAKLSPGSNESGGKKRPGRTGKGGPIRHIMIRAALNVSRNPNSYYGAMYRRLCKRGCKERALVAVAHALLVAIYHMLRDGTVHQDLGANYFDERRREQSARNAVRHLQRLGFRVTIEKEPGQCPAA

SEQ ID NO: 434371 - protein, 392 aa, unidentified
MYIVGIDIGKNHHEASIVSPEGKQIGRSLRFATTHKGADSLMSFIFKNIGNSPCVFGMEATGHYWYPIYSFLKAKGYTIYVINPIQSDSLRKMYIRQTKNDSIDSFFIAEVIRFGQFGTTSMADENILAMRQLCRYRDSVISSRTEIKLRIGTIMEQIFPEYEKQFSSLWVSTSMGILEKYLTPENIENAPIDELFEIIKDKSHNKLTMKKAISIREAAADTFGIKIAQDAFSFQLKQLIDRMNFLDKQIEALDCQILEYYEKFDCYLHTIPGIGIIGAATILAEIGDISRFKNSSSLIAFAGIDPTVRQSGEFNSTHNHMSKRGSPYLRHAIFLAATTCSFHNSPLNAYYKKKRDQGKHHLTATGAVARKLTTVIYAVLRDSKPYEPKKFC

SEQ ID NO: 434372 - protein, 390 aa, unidentified
MNEEKGKRIIGLDMHPDVFAAAALSADQSRQNADWVQDRMPTAGLEAWAKKQLRKEDVVVLEASGNSFAVATRLHAIGYTALVLESAQAGKIRDNFCNDDRHSAVKLAKVYRSGMAKVVWQPDAKTREYREVFFAHRNAVKDATRCRNRIRSFLNEHCVRLKPGVRLTQASGEATAKAAKDWTILQLELLRQKFSQLREVESRRNQLERIMVRELAANGRWASLWRLMGIRHRVAFALMAMVGDVHRFATAKKLVGYIGLAPRKDQSGNDKKGYDKGVGNFGRGDLRGLLIQSAHNALIQKDSPLHKWGWKLLMKKHRNEAAVAVARKLTVSIWHLLMGHFTPLLEATEHLHVKLLKLATVIGKDGLASLGFANREAFVTAQIKSIQLST

SEQ ID NO: 434373 - protein, 367 aa, unidentified
MKQQASATSETQVKDKMIIDFSGKLIYVGIDVHQKDYQVAKLMDGICLGNHRMAANSDLLIKHLNSHYPGAEFKCVYESCAWGFNLQRRLTAAGVQCMVVHAADVSTSDKERKRKTDKVDALKLARTLAAGELKGIYVPDETIQKERNLIRYRSRLMRDINRSKNRIKSLLKYQGIEIPAQYAKNNWSQNFLTWIEQQAAKDELLADTLLLMLDQIKLLRQLLVKTEKKLRELRNGKYAEKVKLATSVSGIGPTTAMQFLLEAGDITRFKGFDALNDFIGFCPDTDSSGETDRDRGITTRRHKQLRSALIESAWQAIRVDPALMNSYQELTKRMKGVHAIIRIARKLLRRLRAVLLTGIAYQKGVVA

SEQ ID NO: 434374 - protein, 321 aa, unidentified
MRNAVGLDISAKTFDVVTIINGETDYRKFSNDEQGCKSLKEWISAKREKDIYVCMEATGNYYEQVADCLAEEYHVSVINPLKIKAYAQKRFSRIKNDKQDAKLIAEFCQTALIEELPKREKPTEQQYSLKRLLSLQSQLLEQQTSQKNRIKAAKDSFVQKIHEKQLKELENHLNAVKKKIDQIIKSDKKMKELTKRLETIPSVGKTTAISLMSHLINSTFENAKQFTAYAGLNPQQNTSGTSVNKKSTMTKYGNRRIRGSLFMAALVAFRNNYFPAFTNRLKKAKKPKMLIIGALMRKILVVAFNLYKTETDFDKTRYQTA

SEQ ID NO: 434375 - protein, 381 aa, unidentified
MKKNNKTAKTAKAVKRADKPTHAEKPGKGPITIGMDLGDRTSRYCVLDGDGKVVKEGSAATTRAGMTQVYGSMKRCRIAMEVGTHSPLVSRLLKGMGHEVIVANPRQLKAITDSSRKDDKVDAQMLGRLARVDPELLRPIRHRGEEAQLDLMMIRARASLVKTRTELVNAIRGFSKSVGERLASCDTDQMGWEKLAELPVGLQAVLKPLAEQISAMTASIKEYDKELEQIAKVKYPETRLLTQVGGVGTLIALTFVLTVEDKERFQRSRDAGCYVGLRPRRSDSGESQPQLRITKEGDMYLRSMLVQGAHHILSERGVDSDLKRWGLKLAERGGKNAKKRAIVAVARKLGILLHVLWVTGEVYEPLRNTHSAERRSGKQAA

SEQ ID NO: 434376 - protein, 337 aa, unidentified
MNYVGIDLHKKTISVCVVDHNRAVLYRKRFYCADLQAIEAFFKQLGPFRAVIEATASYEWLFQRLEPLAERGVLAHPQKLRIIAESTRKSDQLDAQVLAEFLALDMIPEAYRPTPRERAHRRLVRQRGHLQKRIKGTRCKIRAILADYNADRKDLFTIEGLKYLGRAKVSEQDRFVLDQLTTEWQFYVDQCGALDRCLREFAKSAKPKEAEARAVLDSILGVGPVTTEVVLSELGTLTRFRSQKRVCAYAGLVPGQRESAGHRRDLGITKQGSPLLRWVLTEAAWRLVGKSQYWRTIFEALAKRRGRKRAIIAVARRLLCVMVSMLQSGRRYQAARV

SEQ ID NO: 434377 - protein, 380 aa, unidentified
MSQMPNTVIAVIGIDIGKNSFHVVGLDDRGAIVLRQKWSRSQVEARFANMPPCLIGMEACVGAHHLSRKLHGFGHDARLMPAKYVRPYSKGQKNDFRDAEAIAEAVQRPTMKFVATKTADQLDLQALHRVRERLVSQRTGVINQIRAFLLERGIAVRQGQRFLRAELPRILATPPDVLSPRMLRVIEDLAGDWHHLDERIEGLSNEIEAIARQDIGCERLMSVPGVGPIISSAMVAAIGAGDAFSKGRDFAAWLGLVPRQMSTGDRTILGKISKRGNRYLRVLFVQAAWVVLIKPMSWERHGLKSWIEAARSGCTATCWRSRSPTSSPASPGAFWLTAEASRRAKFKSRKSIAGSQVYCRGLREDESRWRFGLPGACEHW

SEQ ID NO: 434378 - protein, 369 aa, unidentified
MSAVPVGAATLLWLETDERMAMSTMTETARCVTAGVDTHRDVHVVAVLDERGAQLGCEPFAADPAGYRKALTWVRSFGPVERVGVEGTGSYGAGLTRYLHNQRVKVVEVSCPDRQRRRSHGKSDPVDAVAAARAAQSGEASAQPKSRTGNVEALRALRVVRRSAAHSRIDSVNQMRALLVTGPEKLRESFRDTTVWRMVTAAVRLRPGDPTTPAGAVKFALRELARRVQALEDELDRLDAIIGPLVKATAPTLVARHGLGPDTAGALLVSAGDNPERLHKESAFAHMCGSAPIDASSGVVVHKRLNRGGDRLANEALWRIVMVRMVSDPRTRHYVERRTKEGKSKREIIRCLKRYVARELYPYLVEERS

SEQ ID NO: 434379 - protein, 338 aa, unidentified
MKFKRIAIDTSKHVFTLHCVDEQERPVLRRELKRAQVEAFFAKQEATEVVLEACGGSHYWGRLLSRLGHQVRLIPPQYVKPFVKRAKNDRNDAEAINEAASRPTMRSVVVKTVDQQADGIILKHREMLVGQRTQAINALRGHAAEFGVVAAKGIAKVAALLAVLAADGAIPATARAMFAQMGGHIAALDQQIAAVDEELAALHKANPVSQLLAAIPGIGPLGAITLALTIEPGNFTSGRHFAAWLGLTPKEHSTGGKQRMGKISKAGNERLRQLLFVGAMSVIRFAKPGSKSASAWLLQLLERKPRKLAAVALANKMARVIWSMMSRGEAYRRQPIAA

SEQ ID NO: 434380 - protein, 329 aa, unidentified
MSKLSKKVIGVDVGAKFLTVSFTDNVNQDQVFNIQNNQRSILSFLKKFPTEDYCLVIEATGNYSSRILHLSLDNGFESSLINCMSVKYFSRMKNIISKTDAEDAKVIRLYGEIFRPEVYIPKSIEIEHLDQEIKLLNDLEEEKRRYSVKLKSLRYNPQLNPNTEKHYEKRLKQLDKEIREVEMRLPQLQDEEFREIKGLIQSVSGIGEKTSLQLMTATSGFKNFDSSKSLVKYFGLAPRIYQSGKKSYSPGKCRTSKTHIRSLLYVCSWTAIKHNTQCKELYLRLLEKGKPKKLALIAVCNKLLRICFGVVKNKTAYQQNFQKNFKILT

SEQ ID NO: 434381 - protein, 465 aa, unidentified
MPENEEARERKKRPAKVLPVMRPLVAGIDLGSREHWVCGPEQGDGKPNVRVFGTTTDELEKLAGWLMEQRVESLAMESTYVYWIPVYELLQAKGIEVLLVNARQLHNVPGRKTDFRDCQWIQLLHSCGLLRGSFHPSDAISRLRALQREIANLVRDRTRTVQRMQKCLDQMNVQIHRAVSDLTGTTGMAMVRAIVAGERDATRLAALRDSRCEKTAKEIAGYLTGTWREEHLFNLASALRQYDFLGEELERYDARLLEDIKALEPPERRDEQVPPHPNAKKQKALNRRGENAMRTELWRFAGVDLTRIDGISAGTARVVLTEVGCDLTAFPCEDNFVSWLRLCPRTLISGGKPLKKRRNGLGANRIANALRMAAVTLRNSKTALGAEYRKTARTKSAAVAVFVTARKLATIIYRLLRFGHDYVDIGENAYEARFATRRIASIKEAARSLGYALVPAPSRPQQARG

SEQ ID NO: 434382 - protein, 318 aa, unidentified
MRIKERDLQARQQTLAMLDTGTGEVVNRTLPHEGESVREFYSTLPGPVRVGIEATGSMKWFLQLMQELGIDCQVGHPATIRAAEPRRQKHDQRDAELLLELLVENRFPSIWQPSQELLDLRGLLLHRHQWVRLRTRIQNALQAIALANGLRRGSSLWSESGQRAIASLPLATHTAQRRSELQAMYAGFEAEIEQLKQQVLQQAGPRPTAGLLMTHPGVGPITALATDVFLGDPKRFSNGKALASYIGIIPREHSSGGRQRLGGLSKQGNPLLRLLWCEAAAHAVRRDPELRRFYRRKLVQKGLGKARVAAARKLGPGN

SEQ ID NO: 434383 - protein, 358 aa, unidentified
MKIIGCDYHPSFQQIAMLDLDTGEYIELRLLHAGGEAQRFYESLSGAVRVGVESSGNMLWFERLLQRLGHELWLGDAGVIRAKAPRKQKTDVRDARHLLQLLRENNFPRIWVPSVEERDLRQLLKHRHTLVQMRTRVKNQLQHIALNQGLQKKSKLWTQAGQELLRGLELDRWTARRRDDLLHLLEYLEKQIEALDQAVKAEAERRAEVRLLMTHPGVGPVVGLATVLTLGEVSRFPRGREVAAYVGLIPSENSSGQRHRLGAITKQGSSFLRFLLVQAAASAVKGDAEWARAYKRLARKKHHGVAKVAIARKLVVRLYWMLRTQTRYPEVVRMSGSPSHPVARLQAERLSGHPASRR

SEQ ID NO: 434384 - protein, 334 aa, unidentified
MKNYKNYLGFDVSKNTLDYCLLIPERDTVKRGSVANEKKSLQTLFAAFSKEGLMMEDTLVVFEHTGIYSTILAVFLCGNGWNYAEVPAIEIKRSRGLSRGKSDTIDAQEIAKYAMRNEDKIQLSEVPEIIYQQLNLMNAEREKLIAAIKSFERTSEGEEFLGKEVYRSVKSANRKTVTFLKSQLKTLELAISKLVRSDEDLNAKQELLRSIPGVGEIGTLYLLLTTKGFLRFRNARKYACYCGIAPFGRTSGTSIRGKSRVSPFADKKMKSILHLLSLTAIKYDHELKLYYERKQAEGKPKMLALNNVKFKLVNRIFAVIGRGTPYVKTQQFAA

SEQ ID NO: 434385 - protein, 298 aa, unidentified
MMKTSTTTAGIDTSKSKLDVAVHGRTEHWQVANSLAGWRILTTKLTETGVSRIGIEATGGYERGVVEHLRAAGFTVMVLQPIQVKAYGRVHLRRAKNDVLDAVLIAACAAAIDQVRDAPDPRLAELAEHLTFLEQIEDDIKRSKTRLEHIHEPGLRRLVLGDIARLKARWLAQIRYLARRLRAHRDLAARLDLVLSIPGIGERTALALLICMPELGRVSREEAAALAGLAPFDNDSGQHRGQRRIAGGRARLRRSLFAAALPAAFRWNKALVALYTRLTAAGKAHNAALIATGHRDRQ

SEQ ID NO: 434386 - protein, 343 aa, unidentified
MEEITTIGLDIAKSVFQVHGIDASGEGVVRRQLRRRQVLPFFRKLPSCVIGIEACATSHHWARELEKVGHEVRLMPARYVKPYVKRNKNDAADAEAICEAVTRPTMRFVPIKSPEQQSVLMLHRTRQLFVRQRTALINAIRAHLAEFGIVAGIGRNGVEKLLELIAEGADERIPPAAHECLMALVAQLAMVKRQILEADRRVLSWHRASKTSKRLEAIPGVGPLIATALVASIPDPHVFRSGRDLSAWIGLVPKQNSTGGKDRLGSISKAGNRYLRQLLVVGALSVIRRAKQLGTTRHPWLVRLMERRSVKIAAVALANKIARIAWAMMARNESYRTPPPTTA

SEQ ID NO: 434387 - protein, 403 aa, unidentified
MNAVGIDVSKGKSMVTILRPFGEIVSSPFEIKHTSSDIHSLIKLIHSIEGESRVVMEHTGRYYEALAHQLSAADLFVSAVNPKLVKDFNNDSLRKIKSDKADSVKIARYALDKWQSLEPYSSTDELRAQLKVMNRQFHFYVKQKTAMKNNLIGLIDQTYPNANTYFNSPTRSDGSQKWVDFVSTYWHVDCIRKMSLNAFVEHYQNWCKRKKYAFNKSKAEEIYTKTKELVPVFPKNEITKHIIRQAIDQLNSTSVTVETIRTLMNETASKLPEYSIVMQFKGIGPSLGPQLMAEIGDVTRFTHKGALTAFAGVDPGVNESGSYAQKSVPTSKRGSSNLRKTLFQVMDVLIKTMPQDDPVYQFMDRKRTQGKPYYVYMTAGANKFLRIYYGRVKEYLSVLPDPS

SEQ ID NO: 434388 - protein, 342 aa, unidentified
MVYVGLDVSGKSLVGYAVNERKRCVYEGEQPASRVGLRALVRQIGVGPTLVAFEAGNQMKWIADTLKTLDGVQVHVVHPNEVKWITESRGKTDRVDAKKLAELARAGILPRAVHIVEGPVRELRELVSARQQLQRKRVALINTIRGYVYQEGHRLPEKFFAGVAWREKLARVSVSAPLRLIIQTFMTSIEALVVAEQQLTQRLRAIADPRCDLVETVPALGPLASRVVLSAVDEAQRFDDQKAVANYGALAPTIYQSGAVRHLGRINRDGRQEVRRVLLQCAHTVVRMKSAGAKPLQQFYARIATRRGKKIAVVALARKLLTTAYGVLKSGTPYDPRKLQPA

SEQ ID NO: 434389 - protein, 347 aa, unidentified
MKHFAGLDVSLDETTVCVVDEAGGIVREARVPSEPEALVAFFRGLGLAMERIGLEACSLAAWLHEGLTAAGLPAVCLETRRAEAAMGAMPNKTDRNDARGIAQIVRTGWFRAVHVKSPACRSWRALLAARRLVLNKMRDLENGVRALLREAGLKLGRPARKELAARVRELVGADAVLSASVEPLLAIVATMAHELAQLTRRVLAIVRDEPVCRRLMGVPGVGPLTALAFRATIDRPERFRRSRDVGAHLGLTPKRYQSGETDVQGGISRCGDELARTALYEAAHSLLVRSRRWSSLRAWGMQVARRRGMARARVAVARKLACVLHRMWADDAEFRWGKQETASAVPG

SEQ ID NO: 434390 - protein, 417 aa, unidentified
MKDSRKRYIGLDVHKHYLIALGVDEDLNVVLPARRVELPHLESWMKKTLTRQDDVVLEMTTNTWQLYDELCAYAGSVMVVHPPHVALITRSQVMNDKIAASILARLLAKGLLVGIWVPPQEVRELRGLVAQRKKMTGLATQAKNRLHAVLQRHHLVPPEGNPFHELQHEWWLALPLGALEKVNTQSDLDTLQFAEQQLARLTSLMTRLASEDEHITRLLQIPGFGVVTAVTVWAAIGTIERFADAQHLVGYAGLGTRVHDSGMSTRTGRITKAGRRDLRVVLIEAAQVAANSHPHWKAELARLEPRLGRNKAIVATPALACGASVARKLLVVVWYILAQHKTDRFAQPEQVAQKFLKFAYQLGKANRPKGQSAAQFVRQRLDVLQLGSELTSIAWGSKKPILLPPSTNKVSDVPNTK

SEQ ID NO: 434391 - protein, 344 aa, unidentified
MEHYAGIDVSLESASVCVVDATGRIVREAKVASEPDVLIAWFRGLEFRVTRIGLEAGPLSQWLYAGMRDAGLAVELLETRHVRDAFKAMPVKTDRKDARGIAQLMRLGWFRSVHCKSLPAQEVRALLTARKLLQTKNHDVEMSLRGVLRGFGLKVGPTTPRTFAARIRVLVAGHPTLSTVAEALLAARSTLFEQWQQLEKRLRSLAREDHRVRLLITAPGVGAIVGLTYVSAIDDPSRFRSSKAVGAHFGLTPKKYQSGETDVTGRISKIGGGVRTALYEAANVILTRPVKGSTLKSWGMRLAARAGMRKAKVALARKLAVVLHRMLADGTEFLGDKAAAAVAR

SEQ ID NO: 434392 - protein, 427 aa, unidentified
MFDNDYNRQVERRQRIKKTTLVLGIDIGDDFNAVAYMHKEGTILSRHPIVYNSRAGFDQFVRITEDLKAKHGMKDVLIGLEPTGHYWRKIAFFSMDQGYAVRFIKTTSVKHERELNESSSAKSDIKDAITLANLTREGKYIDTVIEDGVSRQLRTLSKVREKILRQSTGAKNTLHAVLDDYFPELKKLFYAMHTRGLWAVLETCPFPEDVLKCDQSAIAEIITKASRSKTEGTKKARALYLAAQTSIGLKRVGDADRYRMQVCLNEVKQTERMLHEIKKELKGLLLQLPAAQYLLSIPGVGHLSAAIFLGELGNPEYFHRAKQIIKYAGYDPQESDSGKRIGRKVISKKGRWLLRKYLYLMSVSAVNHSTFFRKYYQRRLKTKNRFGQLLKKKEALCAVAIKLIKVIFALLRDKRAFQDTVRFALAA

SEQ ID NO: 434393 - protein, 427 aa, unidentified
MPYHIAGIDVHKKMLAVVVANVEGEGDYRFERHKVGTSPGELRALAGWLVEREVEEVVMESTAQYWRPVWEALELHWRPKRRTRDGASPISGTLHLAQAQSNRGAGGRKKDFPDAERLVKRLVAQELTLSFVPDAEQRLWRTVMRRKYQITRSRVQLHNRLESFLEEAHIKVSSVVSDLLGTSARRMLHALAEGETDPAALAALADQRLRATPDQLRDVLGACADLHPVYRRLVKLTLEELRVIEDHLAQLDQQMADLLGQHHDAVHRLAEVPGLGVDSAQQIIAEVGAAAATFPSSKHLASWMGACPGSEESAGTNYSHRCPKGNRQMRRVLNQAANAAVKAKGTIFAIVYRRLVPRLGHAQAIGVIAHRLCRLIWKILHQGIRYEERGPAVSEQAKKARARKMIRELRSLGYSVELLPAGSISPA

SEQ ID NO: 434394 - protein, 349 aa, unidentified
MDHYAGIDVSLELSSVCVVDAKGKIIKEAKISSEPGALVIFLRGLGMVVERIGLEAGPLSQWLHAGLTQAGFEVVLLETRHVKAALSAMTVKTDRKDARGIAQLIRMGWFRPVHCKSIGSQEVRALLVGRKLLLGKLLDVEFSIRGILRGFGLKMGMVTRRSFEARVRELCAGQSMLEQIFAAMLVARSALQTEYTKLHKAMLTIVRKDEVCRRLMTTPGVGPLVAITFKTGVDDPSRIGKSKAVGALFGLTPKKYQSGQTDVTGGITRVGDEMVRTALYEAANILLSRVTRFSTLKRWGMDVAKRRGAKRAKVALARKIGVILHRMWVDSTNFRWTKEAPTAPRLIQA

SEQ ID NO: 434395 - protein, 324 aa, unidentified
MKTYVGIDVSKDTLAVALPLSADTWKVSNFTNSPDGIHRLIRALPKETHVIVEATGSYSVLLTYLLCQAGIAISVINPKQSHHFGKMQLSVTKTDMSDAVLLARYGQMAQPPIYEMDSAIMLCLRQKRTLLRQYKKQQRALANLAHSFSPLPIKDDQVQVSLTQMLAHFQEAITLLTGEIQQLTEQHFPSQIRRLTSIAGISTTIATALIDVTGGFRQFHSAKALAKYIGVVPVVYQSGKANTTKGICKTGDPQLRAMLYMASWSAIRYNKPCQEFYQRLKAAGKSTKLALVAVVNKLLRQAFAVVKFDEDFDPNYLPVLRSLT

SEQ ID NO: 434396 - protein, 423 aa, unidentified
MEVMHRRVAGLDVHKQTVVACVRIMAGRRPTRECRTFTTTTQGLLELLGWLTASRVTHVAMEATGVYWTPVWKILSEGDFTLVVANAAHIKQVPGRKTDINDAMWIADLLACGLIKASFVPPEEIQELRSLMRTRKQLVREQTRHVQRIEKALEEANIKLGTVLSDLMGASGRRMIEAMIAGQRNPHQLAALAERSVKASPKELHDALHGRLREHHRFLLQLHLRQWDALDAAIRQIDEQVAGHIERADQEAADGQPPFRGLIARLCAIPGVSSLSATAILAEIGRDMSRFPTAGHLVAWAGLCPGQNESAGKRKSSRLRKGAPWLKTMLVQCAWAAKRAKHSYYSAQFHRLCARRGPQKAICAVAASILTAIYHMVQSGASHRDLGADYFDRRTPQAKAKRLVAQLAKLGFAAQLQPLAEAA

SEQ ID NO: 434397 - protein, 341 aa, unidentified
MKNLFIGVDFSKEKVDVAILFADGLVETAARVFNEFKTTVSGYRQLVKWVEQNSCGIDSSLWLFCGENTGDYSKGLCNFLYGKGYDMWLENAKSIKDASGLRRLKSDRADASMIAEYAMRNYDKAVMYEPLSESLTQLRELFLYRQMIVRHRCSFQVRRGEKRLTMEKSPVKTMISQSGRHIVSELNKEIEKIDKRIADLIKSDEELTEVFTIVTSVPGIGTQNAVCLMVYTDNFRRFNYDSRKIACYYGIAPFGKDSGTSVHSDPRVHYMANRQIKAMLTQAALAAVNFNPIMARYYMRLVERGKKKQVALNNVKNKLVHLITAMVRNRQLFTTEYKITA

SEQ ID NO: 434398 - protein, 371 aa, unidentified
MNSIHYVGMDIHKENYTLCCYSFEQDEIQYKQTVSPDYKMVLRYLEQIRLRHSEEIEFVCGYEAGCLGYTLYHQLMNHGVKCVILAPTTMGITNTTRIKTDKRDAGNIARCLAFRTYSEVFVLTAEDESVKDFIRMRDDQKKALKVIKQQILAFVLRHGYRFDGGKNYWTGKHIAWLKSLYFGGTLQEAIEEYLITFDYLSDKIKRLDKRIEELSAGERYRENVKKLSCLIGVKTHTALATIVEIGDFKRFAKPSQFAAYLGLVPGEDSSGGKHSRGGITKAGNSHVRKLLVEAAQCYTRGMIGHKSVDLKKRQDGNLPQVIEYANKANERLRRKFYRMTLKNGTKRNVAATAIARELACFMWGLMTDNVA

SEQ ID NO: 434399 - protein, 343 aa, unidentified
MQAVTTIGLDIAKSIFQIHGVDAAGNVIVRRKLKRRYVLPFFQRLSPCLIGIEACASSHHWSRELQALGHTVRLMPPAYVKPYVKRQKNDAADAEAICEAVTRANMRFVGTKTPEQQSCLMLHRTRHLFIRQQTAVINAIRAHLAEYGIVAAVGRSGVEELLGVVADPSDKRVPEIARACLAALGAQLRMLKAQILEFDRMITAWHRSNETSKRLDAIPGVGPALATALVASVADPKASRSGRNFSAWIGLVPKQHSSGGKDKLGSISKQGDRYLRSLFTAGALAVIRYAKIHGTKHRPWLTALLARRPTKVAAIALANKIARMAWAMMARGDHYKEPVALAA

SEQ ID NO: 434400 - protein, 475 aa, unidentified
MAKSNKRISGHIAGSKGNLLTERLKSTDLEKTMIVPIEIGKTHHKALIADYFGSILESPFEFHSSQEGITFLHNKISKVSTACHTERVFLALEACGHYYRKPAASIYAFGYKDLFVLNPLSTAQCRKAGLTWSKTDNIDLRAIGQALLNGYGTIYRPEKPLWGDLRELCRYRRFQVKHCTALKNKTHVMLDHLLPGVTELNIFKDSCLWHSAALDFLTKYSSTKLVSRLRPLSIIKFFRRRGRRLSPEDTQQMVNWTKQTFSQRAASDCTREQILKSLLGELKQLSENISQLEIDILGYLVRTPAVLLLSIDYIGPIRAAEFAAESAPFEQYPKSRSLIKGAGMDPTNFQSATFESSAHPISKKGSRRLRYIAVDIGDALMKHNAYFASCANRLLDKGKSKKCACIAPATRFMRVAFWMIKDQKPFQPANELGISKDPLGKIADFLTKHHAADRIEEYVSLAKKHFDQSQPKEVH

SEQ ID NO: 434401 - protein, 370 aa, unidentified
MGNRSMFVGLDVHKETIDVSIAEGERHGEVRHYGVIKSDLEPLDKVVRALRAPGRRLHFVYEAGPCGFGIHRHLTNRGEDCVVVSPSMIPKRSGERVKTDRRDSQMLARLHRAGELRAIYVPDDTDEAMRDLVRAREDAVVVGTQAKYRLKAFLLRQGRRYPGREGWTLPYRRWLTDLSFPSGAQQVALQEYRDAIAETEQRIDRLTEQLRQLAPAWRWAPVVNAFQALRGVSFITGVSLVAELGDLKRFRQPRELMAYLGLVPSEHSSGPRVRRGAITKAGNPHARHLLAEAAWAYQGKPRIGRKHADRQEALPKVVCDIAWKAQLRLTARFRRLVARGKAKPKVATAIARELTGFIWAIAQEVSPALQ

SEQ ID NO: 434402 - protein, 323 aa, unidentified
MSSHEIVGIDVAARKLVAVGEEVALAAAYENTPAGRRALVAALRHSPRPVRVVLEATGIYFLDLACELAAAGIAVMVVNPKATHHFAEAILQRRKTDPVDAAMLREFGRRMDFVPWQPPRHELFAFRALTREAQALSKVVAAAKNRLHAITATKLAPHALIGALERQIAHNQALIDELVAAALAQAASDPELARLVARTDSAPGFAAKAAVLVVGELAVLPPMTARQWVAQAGLDVREETSGISLARRPRLSKRGNKRLREALFYPALTAARCCPAAAGFVERLVRRGKTRLQAIVALMRKLLHGFHALWRYDEDFNAEKLFA

SEQ ID NO: 434403 - protein, 423 aa, unidentified
MNTAWTQHSHFAALDWASDHHDVIVLDRTGAVVAEFRFAHSAAGWAEFTEKLKPFPGTPFTLETSSGPAVDQLLQRRFTLYPLAPGAAARYRERKAPSGTKSDRHDTWAMADALRTDGHAWRVLRPQDEATATLRALCRDEISLIEQRTLLVNQLQAALREYYPAALAAFADWTVPTPWAFLQQFPTPVALQTAGPRKWEKFLHTHKLWRPQTRDERLARFAAANALPASAAVVSAKSLLAVSLARVLTTLQQQIDEYRRRIVAAFRAHPDHDLFGGLPGAKDVLAPRLLAELGSVREEYPDADALMCQAGVSPVSYQSGQIERCRLRRACVKSLRATVHLWANASRATCAWAQAYYEQKRAEGHSHASALRGLGKRWLKILWRLWQNRERYDESKHLRSLERRGAKVWAKLQAGLVPAAQTA

SEQ ID NO: 434404 - protein, 401 aa, unidentified
MPELWAGTDAGKAEHHCVVIGTDGKRELSRRVANDESLLLQLIADVLELSEGSPVTWAIDLNAGGAALMIALLTDNGQRVLYIPGRTVHHASGSYRGDGKTDAKDAFVIADQARMRRDLQTMHRGDDIAVDLRILTSRRLDLAADRTRAINRMRAQMLEYFPALERAFDYKKSKAALVLLTGYQTPAALRRIGTNRLAVWLKNRKVRSSQLVAATAVQAAEAQHTAVAGEKLAAAVVAKLAREVMALDEEIAETDALIESRFRDHPHAEVILSMPGLGPVLGAEFIAHTGGDLSVFATSDRLAGVAGLAPVPKDSGRISGNMRRPRRYCRRLLRVFYMSAMVAARCCPTSKAFYDRKRAEGKGHKQAVIALARRRLNVLWALIRDGRTFETTAPPSPTALG

SEQ ID NO: 434405 - protein, 365 aa, unidentified
MDPIYIGVDFHSRQQTICYLKTETGELVTCELKHQDKDEVRDFYRKFQGHVIVGLEASGYSLWFEAMLEQRGFEVWLGDATEIRRRARWRYKDDRRDAELIRDLMVHHEFPRLHQPTPQSRDILRMLRYRQKLIKVRTMTKNSLQAIAMQAGLAKGRRLFTLAGQTEFKAIAMSPVLQYQRDHWFELLKPLNQELLETMKWFKAAAKGDATVARLRTHPGIGLLTALCLLHTLQPVSRFRNQRKVVAYAGFDPMVRRSADSALHLGISKAGSRMLRYLTVEAVHTAIRHDKDLDRFYKRLTERRGRPKAKVAAARKLLIRAYIMMRDEIDYAEFRRRAVAARLARRGQRPNVPEVLIGQPVSPVQ

SEQ ID NO: 434406 - protein, 461 aa, unidentified
MNRERSKKKQKRAGQGGAVPSLNCIEPNAAGIDVGATEIFVAVPQDRDLSPVRSFETFTQDLHRLKEWLQQCRITTVAMESTGVYWIPLFQILEEAGLEVCLVNAQHVKHVPGRKSDVIDCQWLQYLHSVGLLRASFRPEDRVCVIRSLLRHRDSLVQMAAAHVQHMQKALTQMNVQIHHVLSDITGQSGLAILDAMVAGERNPLVLAQLRHSRVQASEEEVVKSLVGDYRREHLFTLRQSLEAYRYYQRLITGCDAEIEQQLQNFDGHLPPDAPALPPERYPHPQRKNEFRFDMRSELYRIFGVDLTAIPSINALTGYTLLAEVGTDWSKFRNLQAFASWACFCPQNKKSGGKVLSAKTRRSANRVNRALRLAAQTLERSTSYLGIFYRKMCARLGRPAGITATAHKLARIIFHMVTTRRAYDESIFAAEEHRQRKHLESSLRRKAAKLGYQLIPLPQTA

SEQ ID NO: 434407 - protein, 336 aa, unidentified
MAVDELGRASPAHRVKHERTAFQDYLESLPPSSPIALETSGHWYWMVDAMEQAGHQPVLVHARKAKLLMGLVNKTDKLDAKGLATLLRNGTVPAVWMAPGALRDQRELPRLRMTLVRVRTALKNRIHAAFAKYGIALTEVSDLFGAKGRKLLEHRLPQLPVETQRAVCVELALLDEVEEQIDGLETRIRQVVKATEIMQWLLSLPGVGEILAIVIALELGSVERFPDAEHFASYSGTVPRVHESGGHRRYGGAVRKDVNLYLKWAFIEAANCVVLNQAHWPERHAVQLYQRLHRTKGHAKAVVAVARHLAESTYWMLKRGEPYREPARPSRRVPQG

SEQ ID NO: 434408 - protein, 477 aa, unidentified
MAKKTKTTKTTKTTKTTKTTKTTRPAGAKAGAKRTPLLPVHHRAAGLDVGATFHVVAVPPDADPQPVRSFKSFTGDLHELADWLKVVGITTIAMESTGVYWVPVFEILEAAGFEVLLVNARDAKNVPGRKTDVNDAQWLQQLHEHGLLRGSFRPRDGIARLRALLRHRERLVEYAASHIQHMQKALMLMNVQLHHVVSDITGMTGMKIIRSILDGVRDVNVLANHRDRRCKASFDTVRKALRGNYRSEHVFSLRQALELYDFHRAKVDECDTEIERALAELNVDRETPTAPLPEVRHSRNPGEPKFELRTALYTLLGADLSQIHGFGPHSILRLVGECGDDMRKWPSAKHFTSWLCLAPGNKISGGRVLSSKTRRSSNRAAVVLRMAAINVGKTHTALGAFFRRLAARAGKAKAVTATARKLAVLFYNALRFGTTYVDPGENHYEQNYQERVVHQLHRRAKQMGFTLVKENATVGVS

SEQ ID NO: 434409 - protein, 339 aa, unidentified
MQVYAGFDLHANNNYLGVVDEQGKKIFKKKLPNEPGTILNALDPLRQELVGIVVESTFNWYWLVDLLMDEGYEVHLANPTAMQKYRGLKYSDDIHDAFWLAEMLRLGILPTGYIYPKDERPVRDLLRKRGHFVQIRTSLILSLQNIIARNCGTQMKSNDIKRLREDMIAPILEYNEDLAMAGDASKEMIDHLSRKIREIELFIEKKVKKKETYRYLRTLPGAGIVLGLTITLETGDIGRFPKVGDYSSYCRKVSSEWISNGKKKGKGNKKNGNKYLSWAFSEVSECARRDNDIVQSYYNRKLNSTNRMVAHTALAHKLARASYYIMRDQVPFDPEKLFA

SEQ ID NO: 434410 - protein, 391 aa, unidentified
MFYIGIDIAKKNHEASIIDSSGKSLSKSISFPNSTKGIEKFNNFISEFGVTTNNCIIGMEATGHYWISLFSYIIDLGFTCYVINPIQSDAFRKMYVRQTKNDSVDSFIIAQIMRFGEFSISNFSDENTFALRNLTRYRFALVDECSDWKRKLIAILDQVFPEYSSLFSNIYGVASKELLSKYPLPEDMLSIPAEELGDLLCKCSKGRLGINKAEEIQSCARETFGIKFAKRSFSFQIKQIISQISFLEEQLKEIEIEISYLLEDICPIITTITGIGSVLGASIVSEIGNISRFERANQLVAYAGLDTRVKQSGDFSATNTKLSKRGSPYLRRSIWLAATVAAFKDPALSIYYQGLRARGKAHGTAIGAVARKLTNIIFAVLRDQKPYTPNI

SEQ ID NO: 434411 - protein, 358 aa, unidentified
MSHYRVGGDAQRRYSQFAVLDQDGQLRQQTRVDHEPGAIQAFLDGLPDGTPVALESVGNWYWIADEIEAAGCLPLLTHAAKAKVMMGNVNRTDKLDAKGLAKLLHLESLPTVWLPPGEIRDERGLHGTRMALSKLRTALKNRIHATLAKYGITSTEHSDIFAGTGRIWLQGTIGRLPPETGRCVAQEIEALDGLQLQITQLEDRIRERIALTPSIQLLKSLPGVGNILAVVIEREIGSIDRFETSGQFTSFAGLVPTVHASGGKTRFGHMRKPCNQYFKWAFIEAANVIVRHRHHRAWKTKYVCQVYDQVSHHKGHAVAVGAVARHLAEGAYWIIKRQEPYRPPAVRQASPKQVRGRA

SEQ ID NO: 434412 - protein, 344 aa, unidentified
MAKMPIAVLGVDLGKNSCSVAGLDVNGAVVLRRRMTREGLVAFASKLPTCTVAMEACCGAHFLGRTFASQGHTVRLMSPEYVQPYVKSQKTDDRDAEAIAEAATRPTMPLVTLKSEAQLDLQVLHRARERLVTARTRLTNQLRAVLLERGVILPKRRATLRHRLHELMAGELPISPRVLRLLQDLREEWESLDERIGAYDDELAALTRENPQARQLATIPGIGVINATALLAAVGDGSAFAKGRDLAAWLGLTPRQHSTGGKTKLLGISKRGNKYLRTQLLHGARAALVHFAKTSTRIGAWIRQLLSRAHPNVVVVALAAKMARIVWAVLRHGRAFEYQAHSMS

SEQ ID NO: 434413 - protein, 285 aa, unidentified
MNQIIRIGVDTSKSVFQLHGVDAAEQPVLRKQLRRRDFVRFLAKLPPTRIGLEACGGSHHWGREISALGHQAVLLPAQYAKQYLMRGKNDAADAEAICEAMGRPRVQTRFVPIKTADQQAVQMLIGMRDRVIRTRTQLSNAIRGYAAEFGLVTAKGLDKIEPLLARIAGDPGVPELAKELFAAHGVEFAQLKARLREIDARLTAWRQGNELSKRLMEIPTVGPIGAMRLAIKVTNPKAFRSGRDFAAWIGLTPKDHSTAGKQRLGVITRAGDESLRQNLVLGAPR

SEQ ID NO: 434414 - protein, 502 aa, unidentified
MAFAFVASLKLICRPRRLHHPAVPVGMVPVVALYVDKEAGCFFVSKIWRPTIMEHSANEIRVCVDVGSQEHYVAIGLSTGERLDEFSLAHTPEGISGFFRKLKSFEKKHSLPVVVAMEGYNGYARPIDSQVLVHGYKLFNVNNLKLARFKEIFPAPAKTDPIDAWKIFELFSMKDTLPMAKNALQEVGAIPEENQKLKRLTRRRRSLVKEKVQTLNRLFADLLAVCPGLTSLTRTIENLWFLRFLTARDDIRKLVRIQRKSLVKIKGVGKKYVDVITNWQKTAEFSVEAEWVGSMIVRDANRILELLSEIAALDTTIERLSTNSEIAMRLCSIPGFGPISSGELAGEIGNIERFQTEASLALYLGMAVLDKSSGKHTGTRQSRSVNTRAKAAMMAGVAHLIRSDNEAKAYYEKKRTEGKKHNQAVRALGRHIVRVIWSMLKQARDYEIRAKEVVKVEKDQIVEDPKERLPHGTTNSGAPKAQKNCREPSEKDPTALQIRVVV

SEQ ID NO: 434415 - protein, 428 aa, unidentified
MNYNTQNAKIASITEKTLIVGIDVGSETHYARAFSWRNYEYSKKPFAFSNDEAGFAAFKEWMDDIAEKHRMEVIIPGMEPTGHYWLNLGAYLQEQGMKPVHVNPHHVKKSKELDDNNPSKNDRKDPKTIAGLVNEGRFSYPYIPTGIYAEIRNLSNLRIQTQEEITRIKNRMARWFSIYFPEIKDVYRDPDAVSGLMVIKQAPLPCDIRELGVEGVNKIWRDARLKGAGIKRATTLVTAAEHSIGNTEAPRSARKEIRNLLEDYEGYKKRMDELMEEIEKTLSEIPYIDKLMEINGIGIKTVSCFIAEVGDIGRFDNPKQVQKLAGYAIVADSSGKHNGESRISHRGRKRLRYALYEAAISVIGKNKEFKEIHSYYRTREKNPLKKMQSVIAVACKLIRIFYTILTKGVDYDGQKMLNDIVRPEIQPA

SEQ ID NO: 434416 - protein, 338 aa, unidentified
MKLYAGIDLHSNNSVVSVIDEQDRVMFEKRLPNELERIIVALMAFKEALVGIVVESTFNWYWLVDGLMQAGFRVHLANTAAIQTYEGLKYSGDEHDARWLAHLFRLGILREGYIYPREARGVRDLMRRRMQLVRTRTTQLLAMQTVLMRSQGHSMSANDLKRIEVEELDALIDDASLASGLRANLEVVHTLNAQIARLEREVLGQVKLAAQFEPLLSIAGIGKILALTIMLETGEIARFAKVGQFASYARCVESQRLSNGKKKGEGNSKCGNAYLAWAFVEAAHFAVRYNTRVRRFYERKAARTNKIVAIKATAHKLARAAYHVMRERVPFDEARAFG

SEQ ID NO: 434417 - protein, 442 aa, unidentified
MTTLTQINLNAAGIDIGSKEIWVCVPEGRDESSVKCYGSYTEDLRSISKWLKTCGVKTVAMESTGIYWIPLYEVLGGDGFEVCLINSRQIKNVNGRKSDIADCQWIQQLHTYGLLKSSFIVDKEIKRIRELNRQRENLLRTRSTHILRMQKSLEVMNIKITEVLSDITGATGLRIIRDILSGKRDPEELSNNRDFNCKSSKEEIKKALDGNYLEEQVFILQQELGFYEYCTKKIEECDKYTEELFSKYEKKLASKEDLKNNGEKKKKPNKNTPRYDLSGCLYEIAGVDLTQVDGLSASTVQTILSEIGTDMSKWDGVKNFTSWLKLCPNNAITGGKVIYQKSSKTKNRATQALKMAALALTHSDSWLGRFYRRKRATLGPAKAIVATAHKLAKIVYHMLKFRVPYKALDKNYFEDMNRERLIKNLKTRASKFGFILEPILAD

SEQ ID NO: 434418 - protein, 405 aa, unidentified
MVDIMVSDFKKGRYNLMKIFVGIDIAKLNHFAAAISSDGEILLEPFKFTNDADGFQLLVSKLESFDKNSIIIGLESTAHYGDNLVRYLVAEFYQVCVLNPIKTCQMRKNNVRKTKTDKVDTFVIAKTLMMQDDLRFITFFDLDMMDLKALGRFRQKTIKQRTRLKIQLTTYVDQVFPEIQYFFKSGLHQHAVYALLKEAPSPKEVASMHMTHLANLLKVNSHGHFTKELAKELRVLAQKSVGANDSAISIQITQTIQQIELLDSQLEKIEAEMTDIMKFNDSVIMTIPGIGYINGGMILGEIGDIHRFSNPNKLLAFAGLDPSVYQSGNFQAKTTRMSKRGSRVLRYALVNAAWNVVRNNATFKAYYDAKRAEGRSHYNALGHCAGKLVRVIWKLLTDEVEFNLE

SEQ ID NO: 434419 - protein, 337 aa, unidentified
MIVIGVDVHKHSLTAVAVDELGRTVAERSGPVGGEVLVWAQTLEVERLWAVEDCRHVTRGLERTLLEAGERLVRVPPRLTAPQRRRGRVRGKSDQIDALAVARAALQEPTLEGPRAGEAELRELKLLVEHRDDLVAERRRCQQRLRWHLHELDPTLMVPLGALDRAVWLDRLGRQLARREQSTQVRIARDLVGRCRTLTRSIGELDRELHARTKTLAPQLLELAGCGALSAAKLLCEIGPIDRFRSDAQLARHAGVAPLDASSGKHQRHRLDRGGNRQLNCALHRIAVTQGRVHPPARAYLERKQTEGKTRREAIRCLKRQLARTVYTTLKNEPLLT

SEQ ID NO: 434420 - protein, 389 aa, unidentified
MIYVGIDVAKDKHDCCILGTEADKLYPVFTIPNNKAGFDELYEKIFSVTDDKSEIKVGLEATGHYSLNLLGSLIDKDLTTCVINPLHTNLYRKGLSLRKTKTDKVDASSIAMMLMTDKTLKPYSDTSYHNEELKSLTRYRFDKVQERAKLKSSVARLINILFPELEKLVPNLHMASVYALLSEFPGASYIAESHLTHLRNVLETASKGRYGRDMAVTIRDAAKDSIGSVMPAKSMELKHTIHLIEVMTEEIDEIEASIKSIMDTCNSPIMTIPGISYRMGAMILAEVGDFSRFSNADQILAFAGLSPSTYQSGQLDSNYSHMEKRGSRYLRYALFNATKYVCHWDENFGAYLSKKISEGKHYNVAVGHATKKLVRTIYRMELTGEAYRK

SEQ ID NO: 434421 - protein, 428 aa, unidentified
MKIYPRTRPIQRYIALDIHKEYILAGGMNTSQVWVLSPHKIEMGKFREWAKKNLCETDAVVIETTTNVWDIYDIVQPLVGHAVVAHAGAVRQIAEARVKTDKEDVKRLIRLLIADIVPEVWVPPQPVRELRGLISYRQRLVKTGAVFRNRLQSLLHSHNLVLPEEGLLSQEWWDEQEKISPLEKLQIGQEIALLEQIEKHKAEVDQELGKQSLGETWGRNAVRLMQLPGIGVVIAMTVLAAIGDIHRFESAAKLVGYSGLGAGVHDSGQEHIEKRITKSGRKKLRWATLAPHCVWCSAGVIEAAWRAVRMSPYWKEQYEKFFHRMRRESQAIVVVARKLLVAVWQVLSKEETDERASEEDLAYKMLLWSWSLSEETRQGLTYKQFAKYALMQLGVQTDITRIVRKNVPRRIAPRDEVLARMAELGLML

SEQ ID NO: 434422 - protein, 407 aa, unidentified
MIFVGDDWAEDHHDVHLMDETGARLASRRLPEGLAGIGEFHQLLARHAEEPDQVVIGIETDRGLWVDALAAAGYQVYAINPLAAARYRDRHSVSGAKSDAADAKLLADLVRTDRHNHRLVAGDTADAEAVKVLARAHQNLIWTRNRHTNTLRSALREYYPAALKVFDDLHDRDALAVLGRAPGPLQAANLSLSKIRSALKAAGRQRNLDTRALEIQAALRTEQLAAPAAVTAAFAATTCAAVGIIAELNRQITDLEAELATHFETHPDADIYLSLPGLGVVLGARVLGEFGDDPNRYTTAKSRKNYAGTSPLTVASGRKRAVLARHVRNRRLYDAIDQWAFCALNTSPGARAFYDGRRAAGDLHHQALRALGNRLVGILHGCLRHHTPYNEHKAWAHRHTNPDTRAA

SEQ ID NO: 434423 - protein, 437 aa, unidentified
MGNCAGVDWAGEKHDVRVCDEAGEELLAASFVHDEKGLRALCRTLLRLKVELVAIERPDGLLVERLLDAGLRVLPMHPKQVAASRARFRAAGGKSDRFDAFVICELARTDSHRFRVLEPDSDQTKALRALTRTREDLVHARVALSSQLRAELERFWPGPIGLFTKLDSPISLAFLERYPSPADARGLGAQRLAGFLTRQHYSGGQKPAELLAKLRRAPEGRVGDAEMIARRAIVLALVAAITPLVDQIKQLTEQIATALREHPDGEIFLSLFRDPRSVVTAAELLAEIGDCRARYPTRDALAADAGQAAVAVESGKRKTANFRWGCNKRLRGAFCTLADSTRHWHPWAQDRYAAARARGHEHPRALRTVGRAWSRIVWRCWQDRTPYDPARHRALQQHIAVTIPTPSGPRPDLAATQRMADEAVTETAGPQGRARSV

SEQ ID NO: 434424 - protein, 342 aa, unidentified
MSEIVTIGLDLAKRVFQVHGADGAGHAILRKKLSRDQLLPFFSALPPCTVAMEACGGSHFWGRQIALLGHEVCLIPPAYVKPFVKRQKNDAADAEAICEAAQRPSMRFVPVKSEEVQGAASVFRVRELMIRQRTQAINALRGHLTEFGKVVPKGAANISRLIAIVDDPDSGLPAQAVVTFRVLVDALVGLDAQIEKLNAEITHRAKENEVAQRLMTIPGIGPLIATAIAVLAPPPKTFRRGRDFAAWLGLVPRQYSTGGKQRLGATTKMGERSLRRLLIIGANSVIIKRSVHQAARPGTWLAGMLSRKPSLLVRVALANKMARVAWALMIKGESYRAPAAAA

SEQ ID NO: 434425 - protein, 323 aa, unidentified
MKITIIGIDLAKSLFQIHGVDERGKAVLRRQLKRKDMAKYFANLEPCLIGMEACGSSHHWARKLSEFGHTVKLMSPQFVKPYVKTNKHDMADAEAICEAVSRPNMRFVPIKNVEQQAILSVHRARQGFVKARTAQSNQIRGLLSEFGIVIPQGIQSIMKQMPEILEDGENDLPGLMRNLLKRLTENLKEMDRQVDELEKQIVLWHRENEASRKLEEIPGIGPITASAIVATVGKAKEFKSGRQLAAWMGLVPRQHSSGGKQNLLGISKRGDTYLRTLLIHGARAVIRFAENRAEPEGWLRKLMTRCNKNVAAVALANKNARIV

SEQ ID NO: 434426 - protein, 310 aa, unidentified
MERIFVGLDVSKARLDVHVRPTDEQFAGAYDEAGVATLVHRLAGLRPTLIVLEATGGYESTVAAALAHAGLPVAVVNPRQVRQFARATGQLAKTDQLDARVNARFAELVQPAARPLATEQAQVLGELVARRRQLVDMLGAEQNRHRQARAQGLPQRIRAHITWLARAIEELEGEITRLVRASPVWRETEDLLTSAPGIGDITAHALIADLPELGQLTRRRIAALVGLAPWNRDSGRWRGRRMIGGGRAAVRRALYMPTIVAIHHNPVIRAVYRRLTAAGRPKKVAVIAAMRKFLTILNAMLRDRRLWQPA

SEQ ID NO: 434427 - protein, 344 aa, unidentified
MDHFAGLDVSVKETSVCIVDDSGKIVREVKVASEPEALLAVLKNPSYHFKRIGLEAGPLSQWLFSALAEAELPVVCVETRHMQAVLKAQINKTDRNDARGIAQMMRVGLYRPVHVKTLRSQKLRMLLTHRKLLQSKAIAIDNDLRGTLRNFGLKVGMVGTVKFEARIRELVETLPDLAVLVEPLLVVRRVLREQFVILHRRLLAIVRDDEVCRRLMTIPGVGPVVALTYRATVDVPARFRKSKAVGAVFGLTCSKYQSGEVDWSGRISRCGDEMMRVMLYEAAQSMMRSKKWSWLKAWAMQIARRRGMRKAIVALARRLAVIMHRIWVDGTEFRWTREQVPAAA

SEQ ID NO: 434428 - protein, 409 aa, unidentified
MQPIIKSCCGIDVHKKMIKACIAKGPLDKPPKFQVRTFSTMTSDLLKLKDWLKENEVEKVAMESTGVYWKPIFNILDDEFPIVLANPQALKNIPGKKSDVSDSKWIATLLRCNLVPGSFIPPRPIRELRDLNRTRRKLVGIMVSDKNRLQKVLEDANIKLTSVVSKIDGVSSMNLIQALMTKDELTREEIKALVHGKLRSKIDQLVEALNGKLTDHHRFLLKIHLENIAFMAEQIQELDEEIAKRMIPFHKESNLIQTIPGISTTTASAIIAEIGVDMSQFPDAAHLSSWAGICPGNNESAGVKKSGKTRKGNKFLKATLVEAAWSASKKKDSAYSAIYNNIAKRRGKKRATVALGHQILMDAYRVLKTGEPYVDEGAEAVFQRNSAGRQKSAIRLLEQSGYIVTKAAA

SEQ ID NO: 434429 - protein, 359 aa, unidentified
MQKQNYELDFTGQDIYAGIDAHLKSWKITIMVQGISCKTFSQNPDADILKNYLSKNYPNGNYHSAYEAGFCGFSAHRELINQGIDNMVINPADIPTTDKERKQKEDKRDSRKIARSLHNNELEAIYVPDMEIEGLRSLVRYRKTLVKEINRYKNRTKSLLYYYGISVPMELEKSSGHWSKRYTTWLKGLELKTEYAASTLNSMIETVEHLRVKLLEINKQLHILEKEGEYSDTIVLLRSVPGVGLIMAMTIITEIEDIQRFGNLDRLCSFVGLIPRTNSSGDNDKVGEITPRSNRQLRSMLIESSWIAIRHDPALMMRYSELCQRMEPNKAIIKIAKKLLSRIKHVLKNKEPYEKGMVK

SEQ ID NO: 434430 - protein, 410 aa, unidentified
MLFIGDDWAEAHHDIEIVDAEGRRLARRRLPEGVEGLATLHGLIADHLDEDTAADQVTIGIETDRGPWVGALTAAGYTVYAVNPLQAARYRERHGTSGAKSDPGDAHVLAELVRLDRAHHRPVAGDSATAEHVKVLARTHQSLIWSRQRQTNALRSMLREFYPGALAAFGEELDGRDALAILAIAPSPDDGRRLSRSKIAAALRRAGRQRNLETTAERIQTTLRAPQLAAHPGVVGAYAAAVRSLVAVIAEMVTQIEVLSAEVQAGFGRHPDAEIYLSQPGLGPVLGARVLAEFGDDPTRYTDPKARKNYSGMAPITRASGTRRIVLARYARNRRLADALYCQAFSALTTSPGARAYYDAHRARGATHHQALRALANRLVGILHGCLHHHRSYDETTAWPREKTEAHLAA

SEQ ID NO: 434431 - protein, 417 aa, unidentified
MDNEVFYGRCAGIDVHKKSITVCLRIGRGQEVKEFGTLTHEIREMVAWLKENGCQMVAMESTGSYWKPIYNIFEQEGLPAMVCNAYHIKNVPGRKTDKDDAVWIAKCLSRGLLNPSFIPDREQRELRDMTRFRKSQIEERARNINRLQKFLEGANVKLAGWLSDIDGRSATLLLELIIGKSDFTVDDVVERMYKGMKSSPEELYHSLVGSITPTQREFFAHVMSVIREQTKQIESTDAMISRSLSDNYKEAIKALDEIPGIGRVSAEQIVAEVGIDTSRFRNQHALSKWAGVCPGNNESAGKRKSGRTPPGNKTLKSTLTQCAKSAKNNKSSFFHAQYNRLVSHRGKNRATMAVAHSMLIAIYFVLSGCVYEDLGADYYTQFNRERKINSHIKQLSKLGVNIPDDLLAAIVNNTLDE

SEQ ID NO: 434432 - protein, 332 aa, unidentified
MATIPVYVGLDYHSSAIQVCVGGKDGGVLGNKRFGNSVEEVARYAEQFGPVVGVTLEACSGAAEFAEALIARSGWPVDLSHPGYGARMKLNPDKSDYNDARMQYELGRTGLVPKVWLAPREVRELRMLVRLRQQQVNERRAAKLRIGAILREQRCFGAPAKPWTRPWLAWLAGQAPLSEQARWVTEWHLRSLQRLNEDINQIQARLHQVTMDDPQVRRLQEEPGIGPVTAWMLRAEIGRFDRFHNGKQLARFCGLSPRNASSGARQASAGLIRAANGDLRACLIEAGHRLARTHPRWRVLAASLRARGKPGSVVAAAIANRFVRSLHHRLAA

SEQ ID NO: 434433 - protein, 454 aa, unidentified
MREKTSAGEQLMSLEVVHPNAAGIDIGNAAHYVAVPPDRDAEPVRRFDCFTQDLHAMADWLKRCGIATMAMQSTGVYWLPVYEILVERGFEVFLVNARHTKNLPGRKSDVQECQWLMKLHTYGLLNDSFRPSEEICVLRTYWRQRDDYVKAASASTQRMQKVLTEMNVQIANVISDLSGVTGMAILDAILAGERDRYKLAELAHPRIQASKEEIAKSLEGNWRRELLFVLRQERDVYREYQKHIAECDEALQAHLKTLEDKAEPGTKPESPKPGKRAGGNAPRFDLRSELYRISGTDLTRIDGINVMIAQTIVAEVGLDMNKWPTEAHFASWLGLCPDNKITGGKVHHRGTRHVENRAATALRMAATSLWRSKTYLGAKFKRLRTQLGAPKAITAMAHTLARLVYRMLKYGQDYVDKGMAFYEQRYQHQQINWIQKKAKELGLLVTATSALEQC

SEQ ID NO: 434434 - protein, 340 aa, unidentified
MQTERKNYLGIDVSKLWFDVSLLVVIDHAKQPLLTERFDNNAPGIKAFRTWLKLQQVSYDSNSLLVIENTGVYHRLIWSFCSKHNLPLHIGNAAHIKWSLGITRGKNDVIDSQRLCIYCCKQADELKATPVLDPVFMKLKDLMTSRSRLVAQLHSTKNYIKEIQCTNDNALLSMLDKAHKAAIEGIKKSIVQIEEMMEQILQQNKAVYTNYQLIKTVPGIGHLTALYIICCTNNFAAKPSGKQLGSYAGVVPFTNSSGTSIKGRNKVHKMANKELKKLLHLCALTAIKYNPEFKQYFNRKKAEGKNGMVVLNAIRNKLVLRVVAVVNKQEPYVNNTKIAA

SEQ ID NO: 434435 - protein, 350 aa, unidentified
METENANTKKLFIGIDIHKRSWKIKTATDLFDGKSFSIEPDSKILKAYVDKNFQGYEVYTAYESGSCGYSAHRDFKSYGWHSIVANPADISKTGTSSHQKTDKLDARLICRELKDGRLQSIEVPDTEREQLRSLFRRRNDLVRKLRKIKSQIKMKLLYFGIEIPRDFDNPNWSHSFREWLRKVNFEYKTAEFALMSMLEEYEFIEKQVRNTSNELRAYCRQHYKKDYDLLRSIPGIAGVVACGILSEIGDLRRFSLKQLAGYVGLCPNMYQSGDNYRTKGMSKRSNRLIRSYFVEATWQALRFDPVMQNYFRQHKGKDIKKTLVKVARKLLSRTLAVIKTETPYQAGVIE

SEQ ID NO: 434436 - protein, 319 aa, unidentified
MGKSNIEFEQVIDRGCGLDVHRDTVVATVMGRGIITETRTFGTTTRSLKELGEWLESLKVTDGAMESTGIYWKPVLHVMRDYPINLMVVNARHIKNVPGRKTDKADSQWICKLLISGLLKGSFIPPENIQELRDLHRYKKKLIGTIASEKNRIIRVLEDANVKLSSVVSDTSGVTATYLINGLIQGRKDLDQLVMECYHKKLQASPEQIKEAINGRLNAHHAFILKSMQKHIASVEAQIAEIDVEIGKYISDFEKEIELLQTIPGVGKEGAIGIVAEIGVDMDVFPSEHHLASHSGMCPGNNESAGKKKVQEHDKGTNI

SEQ ID NO: 434437 - protein, 487 aa, unidentified
MSVVTGHVCDIGEAAKAVIPFERVSITTYPNRCGIPNEMMEEDMAQRKRTALELAHPNAAGIDIGSASHFVAVSPDRDDEPIREFKSFTEDLEELADWLVCCGVDTVAMESTGVYWIPLYEILEARGFAVNLVNARHVKNVSGRKSDVLDCQWLQQLMSYGLLSGAFRPADEICMLRAVSRQRDMLLASQGRHIQHMQKALTQMNVQLANVISDIVGETGQKIVRGIIAGERDGHVLAKMKNARIRASEEEIAKSLQGNWREEHLFALKQAMALYDNYGTLLTECDTKLESMLATLVGDDDSDPGRGRRASNSKNAPQFDVRTYLFRLCGVDLTRINGINPTTALKVIAEVGPDMSRFKSAKHFASWLGLCPGTKISGGKVLAGASKRTTNRAAQSLRLAAAALHKSQSALGAYFRRFAARLDRAKAITAVAHKLARLIYTMLTKGAEYTDQGQDYYEERYRQRVMHHLAKRAEKLGMQLVPAPQST

SEQ ID NO: 434438 - protein, 301 aa, unidentified
MNNSVIGLDIAKNIFHMYSHDEDNKPIKKKLKRAELLSFFANYPVSLIGIEGCGSAHHWARELIKLGHEVILLNARYVKSFVMGNKNDFNDAPGIFDAVTRPNKRVVVIKTIEQQDIQLVHTIRNGLIGKRTALANQTRGLLSERGIIIPKSIIQLRKQLPLILEDAENNLTPLSREMFAEHYERLVVLDDAIKTQDQRISRLCQAHELSKRFVEVLGVGPLIATAVLFDIGDGKGYARSSDYSASLGIVPRQNSSGDKQVYLGISKRGNRYIRTLLIHGARSVLNHCDKKQDNTAYGYKH

SEQ ID NO: 434439 - protein, 346 aa, unidentified
MTIVDSRAITGGVDTHADSHVAAALDPIGGLLGVQSFATTPDGYRQLLSWLGAFGEVDLVGIEGTGSYGAGLSRHLQAAGIRVVEVDRADRQDRRRQGKSDPLDAVSAARAAQSGRATGMSKGRDGAVEAIRALMVAKRSAKSERIQTINQARAVVLTGPDELRIQLAGLGAAEFVAKVAALRPRQGEIVDYATRMAVRELGRRVEFLDEQLKRLDELIVPLVKIQAPVLLTLLGIGPDTAALLLIAAGDQPDRLRSEAAWAHLCGVAPIQASSGKVDRHRLNRGGDRHANHALWRIVITRMSSDLPTRRYVERRLKEGKSKMEIIRCLKRYVAREVYPYLRPGAD

SEQ ID NO: 434440 - protein, 346 aa, unidentified
MNQIIRIGMDTSKYIFQLHGVDASEQVVLRKRLGRSGMLSFFTKLAPTVIVIEACGAAHCLARELGKLGHTVKLIAPQLVKPYVERNKNDGRDAEGLCEASSRPRMRYVPVKTAEQQAALMLLGVRDQLVMRRTQLSNTIRGHAAEFGLIEAKGLDKLASLLAAIEQGDSVPVLARDLFAMLARQYAQVQVELKAIEARLLAWHRGNALSRRLAEIPGVGPVTAAALVMKAPDPHAFRSGRMFAAWLGLTPKDHSTAGKTRLGKITRAGDERLRQFLVVGATSVVKQATGKHHRGPRWLLELVKRKTPKLAAVALANKTARIAWKLMTTGESYDGARMPKASAAAA

SEQ ID NO: 434441 - protein, 429 aa, unidentified
MALSSKEILVVGIDPAKEKHSIVALSYPEKVLRSADIQNTPAAIARMDDRMRQLAQKENLMLVYATEDSSKYGDLLARMLRQRERTIHTVSPAKTSVYKKFYGDDKTDRVDARCVADITLRNPEKIILDKELMKRDDLVDALRSLTRYYDDLGDTKKRFINHLHEKLTQFWGYQYKLFFSRIDGKTACKFWKEYPSPGKVKGLSQKDLQDFIYEKSKKSISRRRAGEKARAILAVAGEFPDLYSEKVLKLKEKSLANLVDMMAIIAEQLKETKAQMKKLVGESGYKLDTFPGVKVVRAAKLIALVGNPHRFRNSGKFARYNGTAPREWSSGKRKKHYPSRQFNRKLKDQMMGIAVTAVRCDPVSREYFQRQIKRGKTKRQAYKLTARRISDILLSMMKHRTEYDGERHRKSPHKISNDGAGQKAPQPVA

SEQ ID NO: 434442 - protein, 307 aa, unidentified
MTAAGIDVGKARLDLAVDGQAGVAGFANDRAGVAKLIKRLRTLGTTRIVVEATGGYEEPLLEACCDAGLWIARVNPRQARAFASATGELAKTDDIDARILALMARLFADRLRPYVAPPSWQRQLRDWLRRRGQVVVLLQAQKQQAAMAPASVRKLAARTIAALARELAAIERTIKTLINEHATPALRSSKGLGPVFQATVLALLPELGHLDRRQIAKLTGVAPMNRDSGQGQGKRRIRGGRAPVRVALYMATLSAVRWDPMMKAHYQQLRARGKLAKVALVACMRKLLGIINARRRDELRAEGSALA

SEQ ID NO: 434443 - protein, 415 aa, unidentified
MCKVIMIGCDLHDATTVLKVADGPDATVRKGFATSNRLAMIEWIKDFASQRGASRIVFAYEASGQGFGLYDDLTDAGIECHVLAPTHLPHTTHSRKNKTDDKDALMILDEVRAHVLAGRTLPDVWVPNHQTRDDREIVRLRLEVATQRTRLKNQIRNLAKRSRLAFPDDFTSSGDWSKRSVAWLREVAAGTTGALREGVRTALASLMELYQAMSAQIQALDQAIKRLSRTERYARSSRKLKLLSGVGTLTAMVFLTELGDLARFANRRQLAAYLGLAPSAFESGEREDRKGHITKQGPPRVRHVLCQAAWAALRVSPEWKAKYDRIRRGSKSRSRIAIVAIMRQLGVEMWQTARSPELDAMLDERDALASQKTKKTTSAWAPQKGAAPSTPPSPRPRRGEAEATATRKGLVRHPE

SEQ ID NO: 434444 - protein, 334 aa, unidentified
MALELLAIDLGKRSFHLYGIDTDGMILSRKVSRAKLAEVVNNLAPMAIAMEACASAHYWARCWLAAGCEVRLINPRFVKPFVKGSKNDAVDAEAIFEAAMRPTMRFVPVKSTDQQDLQSLHRARDRLICQRTALINHTRGLLAEYGIVLPQGPSRFTARAPAAIAGADLSDLARTIFGELLDQLDDLDRRVKKLDATIAGLCHTNETCRRLAKLPGVGPVVATAIVAAVNDGRQFRSGREMAAWIGLVPRQYTTGGKPRLGGIGRRANHYLRRQLIHGARAIVSRSAKHDDRQSTWLKALVARRGFNRTIVALANKTARIAWVLLSREEEYAAP

SEQ ID NO: 434445 - protein, 361 aa, unidentified
MHVPIRTKEVNAMPSLAERVDVVIGVDTHKNTHTAAAVAAATGAKLDELTIGTDSDGYAALLTWAQSHPGDRVWSLEGAGGYGAGLARFLAAAGEVVFELDRPVRAARRNGAKSAPLDAVRAAREALSREHLAEPKTDGPRAQLAALMAARRSAVEAATLAQHQLHALVIAAPDALRALFRGQTTAVMLATAAKLRPHTGWDPTTVTTAQVLRRLARRSNDLTEEAVEHEKAITTLVKAWRPDLLELPGIGPIVAAQVLTAWSHQGRIRSEAAFAMLAGTAPIPASSGMLTRHRLNRSGDRQLNRALHVVALSRTRYDQRTRDYIERRRAEGKTDREIRRCLKRYISRQLYRQLEHGGRLA

SEQ ID NO: 434446 - protein, 403 aa, unidentified
MIFVGIDWAEAHHDVCLVDDVGQVLAKRRVPEGLEGVSKLHALIAEHAEEPASVVVGIETDRGLMVGSLLAAGYQVFAVNPLASSRYRDRHATSGAKSDSGDARVLADLVRTDRHKHRLVAGDSALAEAVKVLARAHQGLIWTRQRQVNQLRNTLREFYPGALAAFEDLDAPDAIATLELAPTPSRGRALSKAKIISALRRAGRQRNLEAKAAQIEIQLRLPQLEAPALVAEAHGHSVAASVAVIKQLNQQTAALEKELAASFETHPDAEIYLSLPGLGFVLGARAMAEFGDDRTRFEHPKARKNYAGTAPITKASGTRKVVLARVARNRRLADACYQWAFAALTSSDGARSRYDSLRARGQTHHQALRALGNRLVGILHGCLTNRQIYLEDMAWRTPFNVAA

SEQ ID NO: 434447 - protein, 339 aa, unidentified
MFYSGIDQHKRDSFITTYDDDGAIVNQERVPNTPLRIQRYFAQFPGPHKAVVESTGSWYWLADLLRNLHVQLSLAHATRLKAISAAKVKTDKVDSDILALLLRADLIPEAHMICPEQRAPRDLMRTRLRLVEKGASCKNSIERLLEKFNVRSVCELDDLYHLQAACHDAQIALVQEQIHTLEATLHHYLIPNPHVQRLLWIPGIGKVNAFTIYTEIDGIERFPTDKQFFSYCRLVPGAANSAGRTKHRSGSKAGNRYLKIAFSHAAVRAVQYYPEIRTFFKTKARRKPIKIARTLVALEIARIVYQVLKTGNNFNQCFKNKPLSRTKQSQWPRLASPPA

SEQ ID NO: 434448 - protein, 414 aa, unidentified
MLKIVYRICCGMDIHKSFVVACIASTNEQGVTTYKSKRFSTFTGDLRRCADWLSENNCKDVCMESTGKYWIPVYNILEPTCNIVLAHPKYVKAIRGKKTDKRDAKWIADIFKHDLVSGSFIPPADIRQLRDLFRYRWKLTNFTTGEKNRAQNCLTVSNFKLDDVFSDVFGKAASAITAWILEHPTEKITDISAFRTKGMKATNEQVLAAVDGEMCEEQAEKLRIIRSHMDSLELCKLNLESLILSTAEKYLPQLNLVMTAPGIQSFAAIGIISEIGVDMSVFPTSKHLCSWAGLTPQNNESAGKKKTTRISRAGAYIKPLLVQCALCAIRAKQFPEVRNRYLALKKRRGHKKAIIAIARMLLTAIYNMLKKNEPYNSELYRKSDRPPVHREVSVAEAIFILQRQGYLVAAPPTV

SEQ ID NO: 434449 - protein, 401 aa, unidentified
MRPILSIDVSKEKSVAAAFLDLNCPLSKPKVFQHSRKELLKLSAFLRDLEQTYQVKPQVVMEATGNYSKPLAEFFHSEGFEVFVLNPLTTHQIKKKTIRKIKTDPVDVARIAQVFYNSECTQFEPQSEMITSLRELSRQYEGLNNTTTEVEMRLISLLDCVFPNYGSLFSSTRNKASLALLRAWPTPELLLKASVDEIAEVMKPSMRPLSWRRARAQKALDAAGESVGCRSAQQSAAISIRHMVDLLVHFQDILTDIRTQMNSIAALSPQYELLRTVPGIGEVTACVILSEVGDINRFATKKQLVAYAGLDPAVFQSGKFTARNNRISKRGSPYLRKALYQAAFVGISDRKGQAVNPAIRRFYDLKKSQGKLGKVALCAAASKLLCMVFGIMKSGKPFELR

SEQ ID NO: 434450 - protein, 355 aa, unidentified
MDSEKYIGLDVHQATIVVAVMDSSGKLVMESILETKAATILQFFAGLRGTLSVTFEEGTWAAWLYDLLKPHVDKLVVCNPRKNALLKDGNKSDRIDARKLAELLRGNQLKPVYHGETGVRMLRELARSYLTIVKDLSRVMNRLKALYRSWAIPCAGRDVYYTRHRAQWLAKIREAGVRRRAERLYEQLDMLRHLRQQARRELLAESRKHAITAKLRQIPYLGPIRSALAVALIQTPHRFRTKRQLWAYSGLALETRISAEYRYVEGQVRRSKKLLSIRGLNKDHNHDLKGLFKGAATMASARPGPFQDFYQAALAKGIKPTMARLTLARKIAAITLTLWKKGENFDAQKMKSQAA

SEQ ID NO: 434451 - protein, 319 aa, unidentified
MALPLTFVGIDVAKDWLDIWLEPLKRFERLANQPAGWAALIEHLHALGPPAGIILAFEASGGYERGLRTALLEAGFAVRRLNPLRVRLYARSLGRHAKNDRIDARVIARYAAAAETVPEILDPVREHLAELVTHRRRLVDEQVAIGNRTAMLQDAALKAHNRERLALLERQIGETDRLIGAVLSGAAPLVAKLRLLTTLKGVKQGTAATLVALLPELGRLTRRAIAALVGLAPFDHDSGRRKGTRTIAGGRAPVRTALYMAARAAARSKSPLGDYYRRLIAAGKTAKTATVALMRKMLVTLNAMLRDAEPWKHARKTAA

SEQ ID NO: 434452 - protein, 321 aa, unidentified
MQETIVGIDVAKKKFDVALLLGEKTTSGAFKNTPEGFTMFQRWLERHGVERAHACMEATGTYGEDLATYLHSAGHVVSVVNPARIKGFAQSELSRTKTDKVDAALIARFCKAMQPEPWQPPVPEVKQLQALVRRLDELQGMLTQERNRFATADDIVKPSIADVITVLEQRIEQVRHLIRDHIDRDPDLRNKRDLLESIPGIGPATSAMVLAEFGDVTRFHDARCMASFCGLTPRHRQSGTSVRGKSMLSKTGSSRIRKALFMPALAAIKYNPVIAAFRVRLLANGKPRMVVVGAIMRKLVHIIYGVLKSGRPFDPAIAAAA

SEQ ID NO: 434453 - protein, 357 aa, unidentified
MRFYTKQHQFYCGIDLHARTMYVCILDHHGEILLHRNMPARPETFLKAIAPYRDDIVVAVECIFTWYWLADLCARESIPFVLGHALYMKAIHGGKAKNDKIDSHKIAVLLRGGMLPQAYVYPAAMRATRDLLRRRMHLMRKRAELLAHIQNTNSQYNLPEIGKKLAYKGNRDGVAERFLDPAVQKSVEVDLALIDHYDRLLREVELTIVQTAKQHNAQALYRLQSVPGIGKILSLVLLYEIHDITRFPRVQDFVSYCRLVKCAKESAGKRYGTSGKKIGNAYLKWAFSEAAVLFLRNNPQGQKWLARLEKKHGQGKALTILAHKLARAVYYMLTRDTVFEMDRFLNGYGSRVGEPAA

SEQ ID NO: 434454 - protein, 340 aa, unidentified
MDATTYGLDVAKRVFQLHWVDAHTGEIVNRRFGRDELIGFLAQRPAGRVALEACGSGHWWARKIRALGHEVVLLHAKFIRPFVQTNKTDAADARAIWTAVQQPEMRTVAAKTAEQQAMLALHRMRALLVKFRTMQINQLRGLLYEFGATFKAGRVAGLAAIRARMAELEDALPAMLFGSLRDQLQRIDGLEQDIDQFEKRIGTWQKQEAACRAIAEVPGVGRLTATALVAMIGDPKTFKSGREFASFLGLVPRQSGTGGRIRLGSISKRGDPYLRTLLIHGARSVMYHSKAPTPWQTEIQARRPANVAVVAMAHKMARTAWAILAHGRPYQKDYVSVKPA

SEQ ID NO: 434455 - protein, 339 aa, unidentified
MKDQDVSDVVRTKKRTAMRYIGIDVSKATFVVAYSSDKGGEIHTFNNTTAGIRQFIGTLPKDGSIHCVMEATGNYSALLLYMLNVAGITVSMENPLKVKNFAKAMLSTIKTDKSDARLITLYGEKMNPRPFKVQGEAILRLRQKRTVIRQLTKQITAMSNLRGSLACLPVPDKGATHTVDETIKFLEKKRDRLQSELTDLVEVEFSRQLALLTTIKGIGITLATALIITTGGFTYFQNAKQVSRYLGICPTYEQSGTSVNIKGHINRNGDAYTRGLLYIAAWPASRFNAQCKETYTRLRQNGKSGKLAMIAVANKLVRQAFAVVAHDKEYVDGFVSNRP

SEQ ID NO: 434456 - protein, 347 aa, unidentified
MRFYTKQHPFYCGIDLHARTMYVCILSQDGEVMLHRNMKASPDALLKAIAPYRDDIVIAVECIFTWYWLADLCAQEGLPFVLGHALSMQAIHGGKTKNDTIDSQKIAVLLRGGMLPQAYVYPAAMRATRDLLRRRTHVMRKRAELLAHIHNTNSQYNLPEIGKKIAYKANRDGVAERFPEPAVQKSIEVDLALIGHYDQLLRDVELSILKTAKQHNAQTLYLLRTVPGIGEILSLVLLYEIHDITRFPRVQDFLSYCRLVKCTKESAGKRYGTSGTKIGNAHLKWAFSEVAVLFLRANPAGQKYLTKLEKKHGSGKALTLLGQKLGRTVYYMLQRQTAFDMGKFLNG

SEQ ID NO: 434457 - protein, 412 aa, unidentified
MNNTISDLDTDLTAVSEAEGNAAQAEAQNASDDTYAQAVQEQLAIARSSADCRYIGIDLHSNNIWLSVIVNEQRPSGPVGKVIFSRSISTQRVDGTLPEDLIKPVLEKFCKDQPHIACVEATYNWYWLANLFEKNGWNLVLADPSTVSEAKTKAADDRKDAEYLADRLRYNALRYAVIMPKELREIRDLVRTRGVAVAQRAREKIIVINMLTNQIGRKITGKELKELIKEHAEFGMEAPMLLNWGLTEAVRKSLDYHLKQVTSISQGIQELEEHINAVGKNLRYTKELQKMPGCGPVISSILASEIGSIKRFATAANFVSYCRLASTSKLSNGKSKGLGNAKNGNAYLSWAFTELATLMVRYSEAAKRHFEKLMRRYGQLRVKAIRVLAAKLARSVYQCLSKNEPFDVLRCF

SEQ ID NO: 434458 - protein, 316 aa, unidentified
MNEIIVERFVGIDVSKAGLDVCVEPAGSVSQVAYEDAGVEHLVGQLKDINPTLVVIEATGGLEVRIASALAAKGLPVAVVNPRQVRDFAKATGALAKTDQIDAAVLAGFAKAIRPQVRPLKDEQARALDDLVDRRRQLIGMRVQETLRLGTATSKPLQKSLKKHIAWLDRQVDDVDRDLTKRLRESDVWRAKDDLLRSIPGVGSVTTVTMLAKCPELGTLNRREIAALAGVAPLANDSGKHRGKRFIWGGRAEVRAVLYMASISAMRCNAAIKAFAERLKKAGKPPKVVIVACMRKLLTIMNSMLKNNAPWNPKIA

SEQ ID NO: 434459 - protein, 367 aa, unidentified
MEKSSKVYVGMDVHKESIDVTLAEQDGELRRLGQIGGDRGSLLKMARKLQSRGGERVFVYEAGPCGFWIHRELVALGERCMVVSPALVPKRAGDHVKTDRRDSERLASLARAGELEAIHVPDIRGEAIRDLVRGRDDAVIAQRRVRQQLKALLLRNDIRYVGKTSWTGAHRRWLSELKLPEPAQQIVFEEYVDAITVATGRIERLTRAIQTETRTWRFAPVVSALQAMRGIQFVHAVTLIAELGDLTRFASARQLMGYLGLVPREASSGEQRRQGSITKAGNSYARRALIEAAWAYRHPARVTRIIATRQTGLPKAACDIAWRAQLRLSSKYRRLNARHLNHNKIVVALARELSGFVWAIGQSVKPQ

SEQ ID NO: 434460 - protein, 345 aa, unidentified
MQSMYYIGLDVHKKKISYCVKDASGNVHAEGAIPATRADLDRWMKTLPQPWTAAMEATIFTGWIYDHLKPHAAALKVAHPLMLRAIAAAKKKNDRIDANKIADCLRCDFLPECYMASTEIRERRRTLRYRNLLVHQAVQLKNKISGLLMEAGVSYNKQKLHKVGYFKELLATNPDIHEGLGPLLRLCRETLVRLQKTESALVRSLQRDSLLAERVERLMTIPAVGPITALTWVLEVDDVKRFSSIKKAISYCGLCGAEKSSADNIKRTPISKQRNKHLQSVLVEAAKMAPRLSPELALIYDREKQKGNTNRATLAVARKLVAYLVAIDRSQRDFLVVEKENCAAA

SEQ ID NO: 434461 - protein, 335 aa, unidentified
MHHVGLDVHWKTSTLAILDENGRKVKEHTVRGSWPRLLAWLQEYDKPFQVCFEATCGYGYLYDELAKIAERVVMAHPGQLRLIFRSKRKSDRVDALKLAKLLYLDEVPAAHVPDQDVREWRELIEFRRRLVDRRTSVKCQIRSLLRTYGVYAPKGLWSRSGVAWLKEQSFPTLTGTLRRDMLLTEYVVYHEKVKAVTKVLNGIARQHPGVQLLRTIPGVGARTAEAVMAYVDRAARFRRANQMSSYFGLVPCQDASAGKNRLGHITKQGPATARKYLVEATWQGVRRSPTIRAHYERIVGGKKDRGKLALVGTTQWLVRCMFSMLRTGEAWREAA

SEQ ID NO: 434462 - protein, 342 aa, unidentified
MSRELYIGVDVSKNWLDLAYYDGVSVDWNHGHIRVDNKQSGYNRISKWLKRLGTDKSSVLFCMEHTGLYCHDFRLWLEQEDYIYGMVQPRKMHRFEPDLGEQERALDRIKTDEADSYRIAMYCEKHCRKIRSSPSKLPGEAFFKLKRLLAERKQYAKHTVLYKQQLHDISTYDTDGSRERKQSELDHLKKMIAQTDAEIHQILKEDPCLHRNYELLYSVRGVGLVVALETIILTENFTSITNPRKYACYIGIAPAKKESGISVRGGEHVSKKGFTQAKADLSIACLTALTRDPNIKAYWERRKAEGKKTGVVLNAIKFKIILRMFAVIKRQKPYIEIDGYRK

SEQ ID NO: 434463 - protein, 412 aa, unidentified
MTAIDQFAAHVGLDWADKKHDVCVQFKNGERVFDVIEHTAEALDAWLTELHQKVKGRIAIALELKKGPVVYALQKYPFITVFPVHALSLARYRRAFSPSGAKDDPQDAELAFELMLRYPQKIKAIEPDNADIRLLQQLVEQRRQLVEDKRRFVNRRINTLKQYYPQPLEWFSHRGSLLLCELIIRWPSLQQLKRARRDTIRNFLNARGDRAMALTEQRVASIDNAIPLTTDPSVIEANALMATALATQIKVVSEIIKTYDERIEALFDILPDAGLFKSLPGMGPCMGPRMLAALGDNRDRFNSAEEIQNYAGIAPVTERSGQKFWVHWRWQCAKFVRQTFVEWAAKTINSSYWAKLYYQGQREKGTSHQSAIRALAFKWIRIIYRCWKTRTQYDEAKYLMALEARHSPLLKP

SEQ ID NO: 434464 - protein, 355 aa, unidentified
MNDAKYIGLDVHQATISAVVLDSTGKLLMESVLETKTATILQFIHGLRGSLHLTFEEGTCAAWLHDLLKPHVTQVLVCDPRKNALLKSGNKNDRIDARKLADLFRTGLLAAVYHGENGVRTLKELARSYLAVTQDLTRVMNRLKALYRSWAIPCTGQRVYAPRDRCEWLAKITEAGVRRRAEFYYQQLDALRTLHQEVRHALLAESKKHNAMKWLRQIPSIGPIRAALLIALIQTPHRFRTKRQLWAYSGLALKTYTSGEYRFVEGQLKRSKKLLAIRGLNANHNHDLKNLFKGAAIRAAAVAGPFQEFYAALVAKGMKPPMARLTLARKIAAITLLVWKKGVRFDAEHLKQQAA

SEQ ID NO: 434465 - protein, 324 aa, unidentified
MTRGIFVGVDVSKDRLDVAFRPSGEKLIVPNDRRGITRLVRTISGFTPECVVLEASGGYERRLLERLAEEELPVALVNPRNIRELARASGRLAKTDAIDAAVLAHFAEVMKPELRRLPDPETRKLRALITRRNQLVRMMTAEQNRQLQALESVRAGLTAIIRCLKKQIAVLDKQLAALIRATPAFRQKAELLRSAPGVGPVVSATLIAHLAELGTLNRKKIAALVGVAPFNRDSGRLKGKRAIWGGRGDVRAMLYMSTLAAVRLNPSLRAFHSRLRSAGKSPKMALTACMRKLVVMLNAMLKTGNRCSEERIRPVEIISAEVST

SEQ ID NO: 434466 - protein, 424 aa, unidentified
MKRTQNEKILQIKHQTLVVGIDIGKETHYARAFDFRGIELAKLLRFENTAQGYAALDEWMAKIMQQKEKAEAIVGFEPTGHYWFTLGDYLQKKGHKLGIVNPFHVKCTKELDDNSPSKSDRKDPKTIAMLVKDGRFRDVYIPEDLYQELRESVLERERIQGQLIALNNQIIRWLDIRFPEFSEVFKDWRGKTAWAALRAFPTPAKVIEAGLTGIMTVWQSQLKKPSQKRAVKLLSAATKSIGRTAGAEAAEIALQNMLSQYEMILQQRCELEILMQELLLRVPNASKILQIKGMGMLTAAIIVSEIGDIKRFKDPRQILKMAGLNLRENSSGKHKGKTTISKRGRRRLREGLFNVMIAILAHNEEFRQLHQRNLTRAKNPLNKMQSIIALCGKLIRVLYALLTKGCEYNATKLMNDINRSALAA

SEQ ID NO: 434467 - protein, 408 aa, unidentified
MSIVFGIDVSSRDSSVCVLQSGVTREYKITNDTIGFKTLLIDLKEYAEHPQIILEATGIYSRRITRFLDEYDYDYVLLNPLKAKKEINQGLRRNKTDRNDAYHLALAQDRNQHQPNRKEPEAYHQLQSLSRAYEELTHDIISSKNRLHKYLQLTFPELETIFNNSRGVNYWYLVELFPHCQDVRNLEVSTIAKQIKDFKGYGINRAQKLAIKLKHLADLAYPAVDQDDPERDEVVYYANRLLRLTADRERRSEEMIKLAKTLPNRDLEILMSIPGIAEITDVRILAELGDIRRFSNPNKINAFVGIDPGRYQSGEKDSSLRISKHGNAVARKILYRAIGQIDLAAKTSPCHIADYYERKKQFSQTKGFKKIAIASIHKLLRTIYILIITDQMYDYNVANNNQKDFCRN

SEQ ID NO: 434468 - protein, 346 aa, unidentified
MEQYVGLDVSLKMTAICIVDRTGKMDREGMVASDPAAIAAFVRLHAPHVARIGLETGATSTWMWTELNKMGLPVICIDARHAKAALKMQINKSDRNDAVGIARIMQCGWYKEVRVKGLDSHAIKAVLVSRALLVKIKRDLENQIRGLLKNLGLVIGRAKMNMFVVRAAELIEDRPELAAAVEPLLKAREAVEKQIADLDRKVMRLARNDVQVRRFMTAPGIGPITALCYLATIDDPTRFKRSRSVGAYVGLTSRRYASGEVDWTGRISKCGDPMLRSYLYEAAGVLLTRVAKWSVLKAWGMRVAKRSGLRKAKVAVARKLAVILHRMWIDGTEFKWSSKEDATQPA

SEQ ID NO: 434469 - protein, 365 aa, unidentified
MTVIHYIGLDVHKKTISYCIKTADGQIVREGKLEASRAVLRAWAEGLTAPWHGAMEATLFSGWIYDTLKPYAEKLVMGHPARMKAISAGKKKSDAIDARTIADLLRCNLLPTCYVMPPELRDLRRLLRYRNLVVQQSVRMQNKMAGLLMESGTPFLKNKLHGKKYFTELVKSLQEVPESVKDLLRMSRSSMEMFQATQKQLVERLLSEPALEQRVERLMSIRAVGPITALTWALEIGDPHRFASIADAVSYCGLTAALRSSAGKQQRGPISKQRNAWLQSVLIEAAKLAPCWNPQLAALNAYEFKRGHANRATLQVARKLVAYLLAVDKSGQPFQVHTPPSPAKTKANNKTRRKNRKAAGLLPAA

SEQ ID NO: 434470 - protein, 429 aa, unidentified
MYYVGIDIASKKHYVCILDTNKELIIKPFSIAFDIQGLMLLSKKLKSISLDKSNFLIGIESTGIYSENLYEFLNDLGYKVVLLNSYQTAKYRDFSTIKRVKTDIIDSFIIAELLANGKYKASFISDEEYTSLKTLNRLKASLNEKIKNIKREISTMIALVNPEITEVFPNIFSKSALILLQEYPTATELKSASPEKLTRLFRRVKGNNFSIQKAKQLVDNARNSVYSGKAYKQRSFVIKTNVTILITLMQEKKQVELKIKELIDSNLDTKNQEKIDNLKTIPGVSDKTIVTILSECGNLNRFNSIKAFIAYLGLYPTLYQSGKTSVTGKLAKRGIPLAKHALYLASVSSIRHNSEMKKLYFDKKSQGKSSKEALIIVAKKLASIIYAIFKSNKPYNPNRVFMPSPKPCVFLQKQWVFKEHWLDLMFNLI

SEQ ID NO: 434471 - protein, 561 aa, unidentified
MLAAELDYVVGVDTHRDRHTLAVVAAPSGGVVAERSVGASARGYAQAVRFAEKHAPGARVWAVEGAGHYGAGLARHLSRRGETVIEGGRGPREERRVRGKDDPLDAIRAARAALASDTLALPRMGQRREALRLLLVARRGAIEVRRRALVQLRSVIVTAPNQLRAELQALPERRLLDRCSGFRRSRSSPLDELATKLVLRTLARRIEAATTEANELECEILGHVRALAPRLLDERGVGPIVAADVIVAWSHAGRVRSEAAFARLAGVAPVPASSGQTIRHRLSRGGDRQLNRALHTVVLQRRLHDPTTQAYIERRVAEGKTRREATRLLKRYLARHLYRLLQQTEPLMTRRAIRASFTITGPGNVYVPRMSSLSWWFAAHPAWEPGEDWPQEVPVVCYETDDEIVLIDPFLAQDGSFDPHGKTVRVLLTQGAHHRGTAEVVERYGASVWTPPHAVWRKIPNPATTDELPAGIDALELDGEPQQVVFFIQEHATLVTGDVLTGRDGVMHVFVDEADREPLLASLERIAELPIERVIVPHCETPIFVDGAARIRAAVAEARQS

SEQ ID NO: 434472 - protein, 336 aa, unidentified
MYGGIDLHSNNSVIAIIDDTDRIVAQKRLPNDISKIIGFLARWQDEMAGVVVESTYNWYWLVDGLQDAGFQVHLANTSAIKQYEGLKHSGDDTDAQHLAHLLRLGILPTGTILPREHRAVRDLARKRMQLVQSCTAHVLAVENIMTRQLGGRMTSNQIKRLTDDAIDSLPLAADVSLAIKANVAVIATLQSQIELLEKRLQERVKPRPQYGLLISVPGIGQTLATVILLETGPIDRFADVGNFASYARCVDSVHTSNRKKKGEGNVKNGNKYLAWAFVEAANFARRFCPEAKRFHERKKARTNNIVATKALAHKLARASYHILKEGKPFDVARCFT

SEQ ID NO: 434473 - protein, 348 aa, unidentified
MAMTIVEIRAVTGGVDTHADMHVAAALDPIGGLLGVREFPATATGYGRLLSWLGEFGTVCLVGIEGTGSYGAGLARHITTAGVRVVEAGRSDRQDRRRQGKSDPLDAVSAARAAQSGRARGASKGRDGAVEAIRALMVARRSAAGERTQTINQARALVLTGPEDLRARFTRHAAAALVAGLASLRPRPGSTVGYATRIALRELGRRAEFLDGQLERLDELIGPLVAARAPGLLALYGIGPHTAALLLIAAGDHPGRLRSEAAWAHLCGAAPIPASSGKTVRRRLNPGGDRQANHALWRIVFTRMGSDPATRAYVERRTAEGKSKKEIIRCLKRYVAREVYPHLRGTAG

SEQ ID NO: 434474 - protein, 341 aa, unidentified
MKLYGGIDLHSNNSVIHLINEQGESVFKKRVPNDLSSIVMLLRPFQDRITGLVVESTYNWYWLVDGLMAAEFKVHLANTAAIQQYSGLKHGDDDSDANWLANMLRLSILPTGYIYPKEERMMRDLLRKRLQLVQLNTLNMLSIQGLYTRHLNQRLNSNKLKQLTVEQLAVDFTDPNVCLAVNGNLSVMQCLTQQIKLIERTLKQQLKLKDAFVNLTSIDGIGLILALTIMLETGDISRFSKVGHYASYCRCVNGARYSNGKKKSNTNTKNGNKYLAWAFIEAANFAIRYNDTVKRYYQRKLSKTKVVVARKTVAHKLARACFYVLRDQVEFDVNKAFGYSR

SEQ ID NO: 434475 - protein, 368 aa, unidentified
MTVTIVDVARPVMGSGDVHPDLHAAPCLVTGGVDTHLDLNVAAALDGIGGLLGVAEFPATLAGHRQMLGWLSGFGPVARVGVEGTGSYGAGLARFLRRAGVAIVEVDRPNRQARRRAGKSGPLDAIEAARAALSGRACGAAKSRDGNVEAIRALVVARRSARSAKIQALNQIRHLGFTAPDELRQRLAGVSRQQLAAKAAALRPGSMREGADPVMPATKTALRILGRRVLALDAEKARIDALLSGLVTQTAPQLLALHGVGIDTAAALLVTAGDNPGRLRSEAAWAHLCGTAPIPASSGKVTRYRLNRGGDRQANRALWGIVITRLRNDPRTQAYMTRRLAEGRSKPEVIRILKRYVAREVYRHLPRP

SEQ ID NO: 434476 - protein, 415 aa, unidentified
MLKIVYPICCGLDVHRDFVYACIATTENGVTTYKSHRFSTFTKGLQELLSWLWENNCKDVCMESTGKYWIPVYNILEADCKIVLAHPKYVKAIRGKKTDKKDAKWIADIFKHDLVSGSFIPPADIRQLRDLVRYHAKLTNFTTGEKNRAQNCLTVSNLKLDSVFSDVFGKASSNIIGHILANPSEKISDVSAFRTKRMKATDEEILEAVDGEMCPEQAEKLRIIRDHMSGLDLCKANLQSLILSTAEKYIPEIDLVCTVPGMATFSATSVIGEIGVDMTVFPTSKHLCSWAGLAPQNDQSAGKKKTTRISRAGVYIKPLLVQCALAAVKSKNKHPEIYNRYSALKKRRGHKKAIIAIARMLLTAIYNILKKHEPYNAELYRKTDTPPEHRNVSVEEAVFILQRQGYLISPPVTIG

SEQ ID NO: 434477 - protein, 339 aa, unidentified
MREVSTIGVDLAKKVFQVHGVDAAGETVVRRVLRRARVLAYFAQLPPCLIGMEACATAYYWARELGKLGHRVKLIPPAYAKAYLRRNKNDAADAAAICEAVSRPSMRFVEIKSEAQQAAAGIHKVRDMLMKQRTMLINALRGLMAEFGIVVGAGTRHVGELTAILADPEEQRIPALLKDGLRRMAEMLRGLERQLEGIDKQIVDWGRGNAACRHLITAPGYGPILSSAMAAIVVNPAVFRSGRDFSASLGLVPRQDGTGGKVKLGPISKRGNGYLRRLLVNGAMSVLNSKRAKQDPWLVKLLANKERKVAAVALANKMARIGWALMTRQEDFRATSAAA

SEQ ID NO: 434478 - protein, 342 aa, unidentified
MQNMMIGVDLAKNVFQVHGASQTGEVLYRKKLSRKQFSAFMALQEPSLVIFEAYGSAHYWAREMEALDHEVRLIAPQYVRPFVKRQKNDAADAEAIVIAARQPEMRFVEPKTIEQQSRAAVFRGRERLVHQRTADVNALRALLYEHGHVFPTGIRHLNRMTALIEDEISGLPMLIREECKDLLAQIAEKTARIIERTAKLKTLAAQSDKARRLQTMPGVGPLTAVAVEAFGPDMAQFKTGRDFAAWLGLVPKQHSSGGKERLGRMTKAGQADIRRLLIIGAMSRLTWLGRRTIPAGSWLSRMLARKPKMLVAIALANKMARQIWAMLTKNENYRDPALAVVA

SEQ ID NO: 434479 - protein, 312 aa, unidentified
MAKIICGVDVSSKTLDARIGQDGRCQSFDRTPEGIRALAAFCKSHDVEFVAMEATGGYEKLPFGLLWLAGVPCAILNPRSVRRFAEAMGILEKTDEIDAGVIAHFAEVKRIVPQPPASATQQELEALVTRLRQITDLRASQTNQRRLVTDARVLEDIDELVALLNRQTRALEAKIAQSIDADPLWKALDAAFRSIKGVADRTVARLMADLPEIGTISGKKATKLVGLAPLANDSGKLKGKRSIFGGRAHVRSILFVVAELVRRHEPDFRKFHETLTAAGKPKKVIRVALARKLLVRLNAKARDARKELGLAV

SEQ ID NO: 434480 - protein, 342 aa, unidentified
MYYVGIDYHKSVAVACIIDGKGKELETIELPSTPEGMDMFIDKMGKKKFKVLGEAFTYSIDLHNHLIGKGVSSELVRPTDLKLITLSKKKTDKNDAATIAWYLRMKETDQIKLNYSFILKDKQLEFRSVCRLREKISDLKGQMSQQIKSHMRCNGEYLPVKEFGDKPKMSVKRVQKYIIENFDGDFTLQEYLREYIYLEERSKEVEKEMTRFEFDKEAVRLLETIPGIGELSAMELMSMIVDISRFPSSDVMRAYFGMAPKVRDSGDDVNHSHVTKQGDPMMRHVADRVVRLHLMHSDESVIRKSYESVRKRSNHGVAMMAASNKLLDVIFSVLSNKKPYYC

SEQ ID NO: 434481 - protein, 428 aa, unidentified
MPRAPISERPAGPLTLQCLAVPGRIAMRFFVGIDWASQTHAVCVIDEAARVRWQGSVAHSADGLAELIRQLRRFRAGSALAIAIERPSGLLVDTLVDAGFQVVPIHPNVLKASRSRYSAAGSKSDPGDAFILADLLRTDGHRFRPLRPLTDDTRALRALVRGRDDLVAQRVALANQLRAVLEHGWPGAAVIFADLDSPIALAFLARYPTAQHAARLGEKRLAQFLTQHSYPGRRSAAELLARLRDAPPSQAGEAEADASGEVVRSLVTVLTPLVAQIQQLSAAITAALRHHPDGPLVQSLPRSGAVNAAQILAELGDDRARFPTDEQLAAEAGVAPVTHASGKHHAVVFRWACNKRLRHALTTFADNSRHASAWAAAVYTRALGRGCDHSHAIRILARAWVRVLWRCWQNHTPYDVTRHRAAQLVLAA

SEQ ID NO: 434482 - protein, 417 aa, unidentified
MSSGVRLTDEELEGKVVAGVDTHADTHWLCVLDGRGRVALSREFDATAEGCAALADAIGDPAGCAAVGVEGTCSYGAQLADELAARGHRVLEVLRPKRPPRRPGEGKDDARDAERAARDVLAGEGTSVPKLRGGWVEGLRALLNARERCVGACVSARNAALAVARCAPEAERRRWEGLSQAEMMRGCAALPERDATPVERALLALGRTWEAARAEADALEGAMEAMVAANLPSLAAVPNCGAVSAAKLVVAAGENPGRLRSEGAFAMLCGAAPVPASSGKTDRFRLNRGGDRRANNALHMIVAGRMRSDPRTAEYVERRRAEGKSTREIMRCLKRYVAREVYRALTRPGDAPAPPDPAALRAARRSAGLSQRQVAEALGLSQSSVSGAERGVWSNRLAAARYARWVEDGMPMDVAVG

SEQ ID NO: 434483 - protein, 373 aa, unidentified
MRTWVSSTSMKQKEKHNTIGLDLGEGRHRFCVLDEAGEVIEQGSLSNERAALARLTQCYRGALVVMEAGTHSPWISRYLKELGSEVIVSNPRKVRAIYQHERKSDQRDAQMLARLGRMDRALLYPVRHSSEQAQQDLLRIKLRDSLVRARVGLINSVRFSLKSLGYTVRNPSSERFHKVVWETLPEAVRQMISPSVQALAELSVRIKVLEHEINVLARTKYPQTLWLQQVPGVGALTALYFVLKIEDPQRFENVRDVGAYVGLCPRRDQSGGNDPQLRISKRGDAYLRRLLVSAAQYILGPFGPKSALRAYGLMLAADGSARAKKRAVVAVARKLAVLLLSLWKNRTDYEAFPHWQRIEDKRSGTIAVHRVKA

SEQ ID NO: 434484 - protein, 346 aa, unidentified
MNYCGIDLGGVSSYVYVTTDRGRKLWSGPVATTKEGFQGRLRRFLREGLAIAIEAGNQTAWVYEVLVAMGAKVTVVNPNKVKLIAESRRKTDKVDARILCELLRIDALPCPVHMPGRQTRALRGLLVARRQLVAARTKLCNVVRGMLRQEGIRLPAGALSSLVGWERLFVNSFSCEHVMTVVRAYYQSFKALTQSIHELDRKLAERERKSPEAKRLQTMPRVGRIASLTFLAAVDDVHRFPSSRKLVGYSGLAPIVRQSSERTEYGSISREGRRELRAVWVQIAHLVAIDRHRDTQRLRSWFSRVARRRGKKTAVVALARRLLVIAYHLLREETVYDAARLRRRAA

SEQ ID NO: 434485 - protein, 340 aa, unidentified
MEVVHERCCGVDVHKKTVVACVITPAGQQTRSFGTTTRELRTLADWLEAEGVTHVAMESTGVFWRPVSNVLDGRGLTLLVVNAQHIKAIPGRKTDVKDAAWIADLLRHGLLRGSRIPDRAQREQQELVRYRTRLLQERAQVVQRIQKVLEGANIKLSAVLADVVGVSGRAMLEALVAGTADAEALAALARGRLRAKHAALTEALEGSVGPAQRVLLDSHLHQLDFLDGEIARLSEEIAERFRPFEAALVRLDTIPGIGQRAAERILAEIGADVSDFPTAGHLASWAGLCPGNHQSAGKRLSGRTRHGNTWLKAALVEAAWGAVHTRDCYLVSLILWSGPV

SEQ ID NO: 434486 - protein, 335 aa, unidentified
MIVVGVDVHKQSLTAVAVDEAGRALAELTAGSGGELLAWVDSLAAERLWAIEDCRQLTRALERALIGAGERLVRVPPKLMAPERRAGRMRGKSDPIDALAVARAALREPRLDYPRPGEDRLRELKLLVDHRDDLVDERRRAQQRLRWHLHDLDPSLAVPPGALDRPVWLDRIGRRLARQEQSVQVRICRELVARCRSLTRTILELERELQTQTAETAPGLLELPGCGALSAAKLLGEIGPIERFDTDAQLARHAGVAPLQASSGNHQRHRLDRGGNRQLNCALHRIAITQARSTRRHAPTSPANRPRGKAAAKRSAASNDSSHERSTPPSKTGRP

SEQ ID NO: 434487 - protein, 329 aa, unidentified
MSALVCGLDVHKDSTYATILNYEGKVINQMRMDNEKVLSYLAHYKVNKVAMESSTAIAPLYRKLAGKGFDVVVSHPKKTRYIAEAKIKSDRVDSKAIAELARLDALPLAYVPDVETSKLREKVRRRAFLVRERAKLKVKIKSILTYEGIKVPFDHGLFTLKGVEWLGSLNLESVDSYLRIMNIFNMEIKVLSKQLLGLAENDEDVRLLMTVPGVGYYSALLVKSEIGDINRFPFGERLCSYAGLVPSTHASGKTVWHGGVTKEGSRWLRWVMVQAAQTHVRSFDSTITCMYSRVAERRGHRVALTAAAHKLLLVCYSVLRNKRPYYDQA

SEQ ID NO: 434488 - protein, 413 aa, unidentified
MRVVYERCCGLDVHKETVVACLLRPRAEGPVQREVRTFSTMTASLRALGAWLRAERVEQIALESTGVYWWPVFNILEEAGHAVMLVNPQRMKNVRGRKTDVQDAAWIADLLRHGLLRASFIPPEAIRNLRELTRYRTTQVQQRVQEVNRLHKVLESANIKLAAVASDILGVSGQDMLHALLTEEAPDPAVLAELAQGRLRTKLGLLRQALEGRVKPHHRVLIARLLAHIAFLSESVAQLEEEIERAMVPFQAAATLLRTIPGVNEVAAATIIAEIGTDMGCFGSAPQLASWAGLCPGNNQSGGKRRHAQTTKGNKWLRGILGEVAWAAIRKKGTSFGAQYRRIARRQGKLKAVVAVAHRLLRVIYYVLRDQVPYRDLGADHLSPQEAQRQIHRHVHQLEHLGFTVTITPKEVA

SEQ ID NO: 434489 - protein, 416 aa, unidentified
MDTMYERCCGLDIHKKTIEACFRSGKKKTHMSFGTTSAELRKLTMWLVENDCQSVAMESTGSYWKPIFNILELSGTDMKIIVVNARHMKNVPGRKTDVNDAEWIAELLQYGLLRPSFIPDREQRELRELSRYRKSLVGERAREINRLQKMLEGGNIKLTSVVSEVTGYSSRRLLDRLLRNDEPMTEDVISGLVHTSLAGKSKELEIALDGLLSELQKELLIKVLDHIDDMSRRIADLDDFCRKQMKKYEDALDKLDEIPGIARRTAETILIETGLDMSRFPTAKHLARWAGLAPGNNESAGKRSSGRTTKGNPTLKSTLIQSAKVAARKKNSFFKARYQKIAAKRGANRASVAVAHSMLIAIYHILKSGERFKDLGEDYYNQFNKEKKKKYYLKKLTKLGVNLKEATLSISIQAAT

SEQ ID NO: 434490 - protein, 368 aa, unidentified
MSEYIWVGLDVHLESITAAILERDAVEPEVLKLSGDLMNVRRLFRRLSKKGPVRACYEASGAGFVLHRVLARDGFSCEVIAPSLIPRKPGEHRKTDHLDAVMLVKLYRSGHLTPIHVPTEDQEALRRLLRLRFTYQSQCKSTKHRISGTLLNHGLVYREGRSTWTKGHRRWLAEQRRTLSGPLQIALAAELEHLEYLEMQRDAFDDQIQRYAQTPPYRIPVEALCCLRGVKTLTAFTLLCEIDDIRRFRSPRALMAYFGLVPSEHSSGERERRGPITKAGNAHARRVLVEAAWNNRHNAGADLVLKRRRQGQPPEIVAIALKAQHRLVHKFWRLDQRKHRHVAITAVARELCGFVWAILNAAPQSQTN

SEQ ID NO: 434491 - protein, 297 aa, unidentified
MSDTVFVGIDVSSQTLEVAVSTQTATWQASNDTTGIEKLVSQLIALEPGLIVLEATGGYEFEAACALQAAGLAVAVVNPRMARDFARAMGALAKTDALDARMLAAFARVLHQHPERERFVKPLADAELQRLQALVLRRRQLVQMITGERQRLRLAHAAARPSLERVIDFLKKELDDSDTEVAEHVERHHAELARTLRSVPGIGSTSVAVLLAELPELGRLDRRRIAALVGVAPLNRDSGLMRGQRCIWGGRADVRRTLYMATLTGVRYNPVLRDYYQRLVQAGKRKKLPWSPPCASY

SEQ ID NO: 434492 - protein, 366 aa, unidentified
MKLVGIDIAKYEHAAFIMEASTGESLCDPFFFKNNKEGFKKLYTELNKYSKNELLIGMEDTGHYNFAIESSLLAEGYKVALINPITTKSLRKASLKSVKSDKEDALLITKALLDKAYYRIISIQDEKLKEAKELTRYRTQLTLEMNRKKNVLQRHIDIVFPEFNTLFNNEYTITYLNILRKYSDAYTIAHTDIRSLRKCFKYCNSFSAEELKELASNSVGIHDVSISFIIQSVISSIDLINSQIEELDKKIEELAITQASSITSIPGISIITGTSILAELGDISKYSNAGKVIKFAGVNPYISESGKFSADKTAITKKGSKYLRTTLYRVIIPVIRHNPAFNNYYHLKRNQGKGHLCALGHCVRKL

SEQ ID NO: 434493 - protein, 438 aa, unidentified
MSNKVIFNLDDLFISVGIDVGADFSWMSIALPNQQFVGKPYKILHSSIDSLTTAVSKIKEAEELYSLESRIFLESTGIYHYPLFCYLRDKGFNCSVINPIITKNSTNINIRKVHNDRFDSKKAALVGLKPDLKVSLMPSDLALNCRNLCREYYDLMDNRSAYVNKLQGELRIAFPQYLGIFSKVTINTSLTLLETYTSPSAFLKADKQEIIDIIKSTARFGLTYAQNKYNAIIQAATDANQFGYIIDSNIKRIRLYISFIRKYDEEINSILESLHELVDANEDSDFVKQIHLIETFKGAGFLSAVSIMGEIGDFSAFSKPKQLFAYFGLDPAVKQSGKFEGTKVQMSKRGSAIARRVIHTLTLQSISISRNGEAKNPVLREYYLKKCDSKPKLVAMGAVSHKVCNMIFAILRDNKPFKIIAPQEHIKQYNSAKCDIAA

SEQ ID NO: 434494 - protein, 369 aa, unidentified
MKKIVKYIGLDVHKNSISIANADQGRDAEVRYYGKVAHDMDQLIKVFRKFISQGAELRCVYEAGGCGYHLYRFLISNGIDCTVVAPSKIPRKSGDRLKNDKRDCISLARLHRAGELTPIYVPNEEDEALRDLVRARGDAQNANKKAKQQLAAFLLRYHIVFSGKSKWSKAYFNWLADISMPHPAQQITLQEYIDTVNMCGERVLRLTEQIRNLSEQSRLNKLIKAFQSMRGISLIVASTLAAELGDFSRFEHPEEIMAYLGLIPSEFSSGEKQHKGSITKTGNGHVRKALIEAAQSYRLPARKSRAILKRQEGVPKEIRDIAWKAQLRLCSRYQHLVMKGKNSNVAKTAVARELAGFVWAIARELPQAA

SEQ ID NO: 434495 - protein, 361 aa, unidentified
MTPLSHDTFAAFIGIDWADATHEGCLQAAVTAKRECFQLEHTPEAIDAWVTTLRTRFHGQPLAICLELDKGPLVSALRKYDFLVLFPINPLMLARYREAFTPSRAKDDPTDAELQLDLLLTHRDKLHPLTPQSPTMRALAQLVEHRRRVVGDKVRMTNRLTSTLKNYFPQVLHWFQDKDTLIFCDFLSRWPTLKAVQLARRATLETFFRDHHVRSPEVITQRIQAIKAATPLTTDEGVIAPNALLVQALVAQLRVTLQAIAEFDTASAQRAHSHPDFPLFQALPGAGPVFASRLLVAFGEQRERYRSATALQTYAGVAPVTERSGKKAWVHWRLQCPKFLRQTCVEWAAESIRHAFWAQGY

SEQ ID NO: 434496 - protein, 343 aa, unidentified
METKRYIGIDLHRNCFTACLRLENGREYLKEWKLEDMAKFTGKLRPTDQVAVEVTGNTRLFHDAVAPHVERIVAVNPSQFKVITHSVKKTDPNDARNLALYLAKDLLPEVRMKDKTRAQIASLTQTRDTMVKLRTALKNKVNNLCSAHGVNLNKESLASEKGLKAVLDMHFELLVNLELKIIIDQIRSLNKSIAELEETIGQEGQKLQGHKNLTSIKGIGGLSSGILLSIIGDIADFADEGKLAAYFGIVPRVSNSNETERSGRITKRGTKLGRTTLIQCALIAQRYSPYLKTYYEKMKNRRGTGKAIVALARKFLGIIYRTLKNKWVFADFPNFVLAEEATA

SEQ ID NO: 434497 - protein, 421 aa, unidentified
MHVLYQRCAAVDIGKDVIAVAVRLPGDGPEHRQTIKRTFKTFYGVLKHAAGWLTAQQVTHVAMEATGIYSMPVYHALIEHGQFEKVLVCNAGHVRNVPGRKTDLSDAEWLVHLLECGLLRGSFIPPAQIKAARDVIRYRTKLTESRTSELQRLGNVLQDAGIKVDSVSSTITTRSVRAMVEALIDGERRPVLLAELAKGRMRARIPDLQRALEGRFDDHHALMCRLHLDHLDHLEEMIARLDTQIQDMMQPFRAQRELLTTIAGIGPFAAAAIISEAGADIGETFPSAGHFASWIGVCPGNHESAGKRHSGKPRKGNQHLQHVLVECAWAASRTPGYLQSLYRWHVRKFGGSRNPTAKNKAIVAVAHKLAIIIWHVLATGKPYTDLGADYLDRRIDPAKETRRLIARLQALGHTVTIEPAA

SEQ ID NO: 434498 - protein, 344 aa, unidentified
MHIASIGIDLGKTTFHLIALGERNKVLLRKKFSRPQLLAYTANLPASLVGLEACAGAHFLGTALREQGHQVRLIPAQFVKPYRKSNKNDFLDAEAIAEAVTKQNMRFAQLKTQEQLDWQAMHRVRDRLVRRRTALINEIRGFLLERGITFAAQPIHLRKNLPTVIEDAEQNLSPRLRWLVDRMWQEWKQTETEIQAITEEIERISNEDARCRQLRQIPGFGPLVSTATVAAIGNGSAFRRGRDFAAWVGVVPRQYSTGGKQKLYGISKRGNVYLRRMLIHGARSVLFRVKYDTGGFGQWVHRLAQRAPRNKVVVAIANKLARMAWAVLSSGKDYRHQPLQPAAA

SEQ ID NO: 434499 - protein, 348 aa, unidentified
MAKVNTIGVDLAKYVIQSSVVSPSGKELQNKELTRIKFAEFLAKQNPSLVAFEACATAHYWARYAQNNGHQTQIIPAKAVAPFRQGHKTDKNDALAVAEAANRPNIKEAPLKTIEQQGLQAIQRSRQLLVQDRTSISNHIRGLLMEFGVVIPQGWAALEKHIPRVLEDAENGVPHMYRPTLHRMFERYHQLKVDIAFLDEQIKQLIKQNDACKRLMDLEGVSPISAILLFATLGTGETFLNGREFSAYVGLTPKQYSSGGKTNLIGISKHVANRRLRAVLIQGARSYVHRGLKDPQTPKQKWLWALIERAGCGKAAVALANNNVRTAWALLTKGTAYNRAQTYEALAA

SEQ ID NO: 434500 - protein, 435 aa, unidentified
MEEVTDEPLYRDRVCGTGIGKAGVPATIRVPSDENPSRRMQETRAFGTTRRQVLALADWLRCWQVPAVVMEATGDYWKPVSCRLEAEGFECVLADARQVKNLPGRPKRDTCDSRWLAQDFERGAVRSCFVATPEFRVIRLHTRYRRDLTGERTREKQRVEKLPEPAAIKLSGVLAGLHGVSGRDIMEHLIAGERDPRALAQLARRRARAKIPRLEEALDGAGFFTGHHAALLDAMLRRIDFLDADVDRVSAVIGELLAPREEQLQQAGSMPGWRRRAAQDVLAEAGPDMTRFPTPGHLASWAGRAPLDHQSGQRKGRGKRKKGNRYIGAVTGETSVSAGRTRTREGSRYRRIARRRGKQKAQAALGSTQLKVLHKLWSNPGMRYEDPGEDYYDRQASIRRKTRYHLTELEDLGWDVDLRPRTEPSQDHQDATPAA

SEQ ID NO: 434501 - protein, 358 aa, unidentified
MKSKLIKIDFTNKKIIVGLDVHSKTWYATIIIEEVLTTKTFVADPKKLAEYLKTNYPLGDYIVGYEAGCFGFWIKEELEALGITVIVINPADIPTTDKDKKSKTDKIDSKKLALGIKSGLVKGIYAPDRQSQEYRGLSRRRQDITKKLTRVKNQIKATLKYYGIGYPDEYEDKQKHWSNNFIKWLATLKFKTSYGTEKMESYLRELLFLRTEKLNILRQLRKLSTEEKFKKECKILRSIPGIGIVSAIIFMTEIVEIGRFKSRDEFLSYIGLSPNEHSSGEKRKIGHMTKRCNHSLRTIFIESAWIAIRKDPALTNYYNETYKKTGKSKAIIKVAKKLAARARYILINNTEYVIGVAA

SEQ ID NO: 434502 - protein, 355 aa, unidentified
MSEEKYIGMDVHQATISVAVMDAQGKLIMECLLETKATTILEFIQGLQGTLSLTFEEGTSAAWLHDLLKPHVSRLVVCDPRKAALLKDGNKSDRIDARKLAELLRTNQLKPVYHGEHGVRTLKELGRSYLTLTKDVTRVMNRIKALYRSWAIPCSGTTVYAPRHRAEWLAKIGEPGVRVRAERLYQQLDVLQPVRQAARQDLLSESHKHPAVKLLRQIPSIGPIRAALLVALLQTPHRFRTKRQLWAYSGFAVETHDSGEYRCVRGKLQRNRERITVRGLNDNHNKDLKSLFKSAAISASTRPGPLHDFYAARIAKGMRPTMARLTLARKMVTITLTVWKKGVSFDPQQLHRQAA

SEQ ID NO: 434503 - protein, 326 aa, unidentified
MMIIGVDHHPSFQTIAFFVEETGECGEQELNHSDGQAEKFYRDLKQRGICVQVGMEATGYARWFERLLAELGFELWIGHPAEIKAKRVKMLKYDREDARLILRLMRENNFPRIWVPGPENRDLRQLLWHRHRLVQMRTRILNQLQALAMNEGYHWRKKLFSEQGRALLEKLSLAPWASRRRQELLELLDRLNPTIEELTAAVEREARKRPEALRLMTHPGVGPITALAYVLIIGTPARFECGKQIGTYVGMIPCEESSGGKQRLGHISKQGNSLLRYLLVEAAQAAAHLHPDWRRRYMHLAMRRHKSIAKVAMGRRLEYHIRTKRA

SEQ ID NO: 434504 - protein, 476 aa, unidentified
MLGAGRMTATARADIGARCSSPTISVGPGFAYRRVMTLVSFDDDLDWEFAFDSRLEHPAGSSEEPMAKRSKKRCEELPILHPDAAGIDVGASELFVAVSVGRDPQPVRSFPTFTRDLNALADWLQQCGIRSVAMESTSVYWIPVYQILESRGLEVCLVNAQHVKNVPGRKTDVSDCQWLQYLHSVGLLRATFRPPGFICAIRCLWRHRSSLIQMAAEHVLHMQKALDQMNLQIHRVLNDITGMSGLRILDAILAGERDPVTLARLCHGGVKSSEDTIAKSLEGDYRPEHLFALRQSLAAFHYYQQPVVEVDQEIQRQLGSLETATTAEPTVPKRTKASAYQRRRYEPRTFDLRSELYRIFGVDLTNVPGISAITAQTILCEIGTDVSRFRNASAFASWLGLCPENKISGGKVLYTKSRRVKSRVATALRMAANSLHHAKDYLGEFFRRITRKLGKPQAITATAHKLARIVVSPAQH

SEQ ID NO: 434505 - protein, 361 aa, unidentified
MKKPSQHLIAEVPWKRGQVQLTIGIDLGDVWSHYCTLNQQGEVIDRGRFRTTPKAINTWFTDVPHARVAMEAGVHSIWISEQLEQLGHEVIVANVRELRAISHSDRKSDDVDAEKLARYARLDPEILRPISHRTVEQQQALTLIRARELLVRLRTASINAVRGLTKACGHRMPASSTKCFAQRGQAAMPPGLKLALGPILTQIAEMTLKIKQYDKDIQRLTQTEYVETQAMMTIHGIGHITALTFVLTLGDKSRFRCSRDVGCYLGLRPKRSQSGERDPQLGITKAGNAYLRSLLIECANHILRPHGRDSALRQWGLHLAARGGKQAKNKSAVAVARKLAVLLHHLWITQQSYVPFFQQAA

SEQ ID NO: 434506 - protein, 371 aa, unidentified
MKSIIYIGMDVHKKTYSLCALLKETGEIIGETKIPADVSLIIKFIENAKKSVDSDDVQIKTGYEAGCLGYSLYWQLAAKGIECDILAPSTMHRSAKNKVVKNDRRDAKNIAANLANGTYKSVYVPTDEDVEIKEYIRMMHDFKIELKKVKQHINAFLLRFGHQYPGKSKWVPAHIKWLKELELSDMHREILDEYLSQLEILTEKIERFKYRLEELSQKETYNEKIGQLRCIKGIDTTAAMTMHAETSDFDRFPTANAFASYCGLTPGEDSSGESYHRLSITKQGNSMIRTTLIEAAQVLVRGTIGKKGKKVKSKQKDQDVKVIDYADKAVIRLQKKYHRMIFRGVKRNIAITAVARELACFVWGIETGHIS

SEQ ID NO: 434507 - protein, 327 aa, unidentified
MEYFAGLDVSMEETHVCVIDRDGKVILEVRTPTVPKAIAAALAKGLAVERVLFETGRMAPTLFHGLTALGLPVVCVESRQAYQALRSLAAHKTDRNDARGLAHLARTGFFKPVHVKSLSSHAVRALIIARKKLVGQRVTLENQIRGLAVAFGVRLPRGLSPGFAEKGMAVGRGIPGLDGAIRGLLAARDAILKAIVAIDADMKTLERSSAACRRLMTIPGVGRLTALAFAAAIDDPGRFRRSRDVGAYLGLVPRRYQSGEIDYTGSISKCGDGRLRTLLYEAANVMLTRYRGSLTLKTWAPTLPGGQPCARRGLRSRADLPSSCSPY

SEQ ID NO: 434508 - protein, 402 aa, unidentified
MNAVGIDVSKGKSMVAIMRPFGEIVSTPFEIKHTASDIHSLVELINSVEGESRIVMEHTGRYYEVLAHQLSKANLFVSAINPKLIKDFDNDSLRKVKSDKADAVKIARYTLDKWQNLKQYNVMDELRNQLKTMNRQFGFYMKHKTAMKNNLIGILDQTYPGVNTYFDSPARSDGSQKWVDFASTYWHVDCVRKMSINAFIDHYENWCKRKKYNFSKSKAEEIYGKAKELVPVLPKDDITKLIIKQAVDQLNSASITVESLRTLMNETASKLPEYPVVMAMKGVGTSLGPQLMAEIGDVSRFTHKGAITAFAGVDPGVNESGSYEQKSVPTSKRGSSDLRKTLFQVMDVLIKTHPQDDPVYQFLDKKRAQKKPYYVYMTAGANKFLRIYYGRVKEYLASLPES

SEQ ID NO: 434509 - protein, 352 aa, unidentified
MVSAELEGAAVKVIGIDSHKATLAGCAVDELGTPVDERTLGNDRAGHVALADWARSLGVDRIGIEGSGRYGAAAARRLAAAGFDVRDVPPHLSYRERLRTRRPGKSDPTDALAIDRVAAREQTLPPVRLADRSEDLGLLVTARDELVAEATQLRNRIHADLVVLLPGYGERVPNLVARRHRRGVALELATLSGVRAELTRSRLGRLEETDAATKLLERRLAALLVGHPLLALPGVRVLLAARILAETGDVRRFRSADAFAMFSGTAPIPASSGQTERMRLNRGGDRQLNRALHAMALIQGRYHDRAKAYLARKRAEGKTQREAIRCLARKLARVVFEVLRRSTLATADAFAA

SEQ ID NO: 434510 - protein, 378 aa, unidentified
MVTHTLHPIIVGFDVHKDTIMACTFDRSSGEVGTARQFNNIPDRIARFVRTLRASGYEPEICYEASSCGYVIYRQLRALGVECAVIAPTSIPRRAGERIKTDRRDAEKLATMYAGSLLETVQVPDLELEQVRALVRCRLTLSEDLTRSKHRTTRLLESRGHVYREGQNWTQKFWAWLNRITLEGADETVLRVWVEEIHYLEGQIIAVDTDLAHEAEGERFRETVKLLGAFRGVALLTALTLATELGDIRRFSSPRQLMAYLGMVPRNILRARGRIAARSRKRAIQGRERHLYRQPGNTLQSRLEVERSRKDRRASMRTSSPQPGKRSNGFTNDSMPLPSENPDRWPMSLWPVNWLAFFGQHYNQNTRTPDPAMKQAHN

SEQ ID NO: 434511 - protein, 368 aa, unidentified
MKVTVRYVGLDVHADTIVIAIADEGRAPAKVLATIPHDWKSLHARLKSLATKGRLLICYEAGPTGYVLYRKLVSAGFEVQVIAPSLIPRKSGQSVKTDRRDAAALAHFLRSGDLTQVWVPDEAAEALRDLSRAREAAKKAELAARQQLSKFLLRYGRRWELSTWTKKHLDWIRGQKFEHAAQMRVLTDALRAVEDATARVERLEDDLEELAPKVQHLWPIIRALQAVRGIAFISAVTIISELGDLQRFGSARQLMAYLGLVPSEHSSGLTQRRGSITKSGNSHARRILVEAAQHAFRLPTSSKILRQRQLGLADGVIRIATKAQSRLHRRSLQLYQSGKSRPKIVVAIARELAGFLWAIAQETQLLAT

SEQ ID NO: 434512 - protein, 330 aa, unidentified
MYLGIDTHTRYSQVAVVDDDGNLQNEIRLPNDRLDELVEQYAGGEAAIEASGHYRPVYEMLDEHLDVTLVNPSKNRVIADATVKTDRIDAKRLAHMLRADMLAESYVPSDEIRTLRDLVRTRKALVEERTAEKNRVRAVLKRTDNAYDSELFGPTGREFLAELSLSDADRTIVEAHLSVIDEYDAQIEKLEAKIEQKTLESPAAQRLLSIPGVGQSTAALIVAEIGEIDRFDRQEELVSYAGLDPMVHQSGDMEVHGSISKEGSAPLRWALVQCAHVSVRYDDYLGNFYTRLKQRKNKQIAIVATARKMLVSIFYMLKRQEPYDPPEVST

SEQ ID NO: 434513 - protein, 338 aa, unidentified
MKKYSGIDLHSNNNVVVVIDEADCVVYRRRLPNELGKVLEALEPYRAELAGVVVESTYNWYWLVDGLQAAGYAVHLAHPARMKRYEGLKHSDDDTDAAHLAHLLRLKILPTGYIYPAAERGLRDLGRRRLQLVRHRTMHVLAVENVQARETGARMSGDKVKRLSARGVELLGLPEDVTLGMQANVAVIGALNEQIAKLEKRLLERLRPRPEHALLGTAPGVGRVLSPIILLETGSIERFAAVGNYTSYARCVDSVHSSNGRKKGEGNVRNGNKYLAWAFIEAANMARRWCPEARRFHDRKKAKTNAIVATKALAHKLARACYHMLKTGEPFDLKRCFG

SEQ ID NO: 434514 - protein, 430 aa, unidentified
MKSNTQNAKIKAITETTLVLGIDVGSETHYARAFDYRGIEYSKKPFKFSNDEAGFVTFKAWILDIKEKHGKDKVVPGMEPTGHYWFNLGKFLQDNEMKPVLVNPHHVKKSKELDDNNPTKNDRKDPKVIAGLVREGRYMIPYLPEGVYADLRTASNMRFQLQAELTRIQNRISRWFNIYFPEYKTVYGQPDAKSGMLILKVAPLPEDIMTLGIDGVNQIWRDAKVRAVGKARAKTLIEAAEHSVGSKEGEISARMEIRMLLEDYESRNTRLQEVVALIEELVKKIPMAEKLLEIKGVGIKTVSGFLAEVGDISRFNNPKELQKLAGLALVENSSGKHKGETTISRRGRKRLRYLLFEVAMSLVSKNPEFRELHSYYTTRKLNPLKKMQSLMAVAAKLLRVFFAMLTKGVDYDPKKLVGDIKRPAVYLQVT

SEQ ID NO: 434515 - protein, 411 aa, unidentified
MDRIYDNCCGIDVHKKLIVACFRKGNRQEVREFGATTRELLELADWLQSGNCEMTAMESTASYWKPLYNILESSNLNAMVVNARHMKAVPGRKTDVKDAEWIADLLQHGLLQPSYIPDKDQRELRELVRYRKSLVGERTRELNRLQKMLEGANIKLSGTVSDINGKSARSILEYLLTGKFIDEAKYDEMYAQKIIAHNLKATKEQIIDDLNGVMSPLQRRMMKELLNHLDELNVHIKNLDDEIDNFMKPEEKKASKAIQDVTGIGNTSAQAIISVIGTDMSRFPSDKHISSWSGLCPGDNESAKKRKSGKTRKGNSLLRTTLITCAHATVKNKKSYFYAQFMRISAHRGPKRAYVAVAHSMLIAIYHILKDGVVFKDLGAEYYNQFNKERKINAYLKKLKALGWEAPVVAA

SEQ ID NO: 434516 - protein, 377 aa, unidentified
MVSGKKRHSELTAVPMLPNESLYIGVDIGKFKHVAGFLSKTLLERHKHFEHFPAFIFEQSREGFRAFVERIQAYSPLEQCFILMEQTGHYHRPLLQYLVELDLPVFVIPIQRRQTGMIKTDKRDALGLANQLYTQLELGAQVADTLQVIRRALPPSEAAAQLKGLMRHRYELVNEATQRKNKLIAMCDELFPEFTRVFKDPNAPIALDLREQFPTPRAIATIGSIGNFEGAAHLKSYFGWAPTRAQTGVSFDRTRLTKGGSREMKKVMFLVAWKAIQTDTEWAKLYKCLVPRLCSYDDRMQAYKGKGKVLGHSIGRLIVLIFALLKKDYEVLSQLSPGTEPPAPTLYDPQLHHRHRTGYYSPFPREGAKNRIVQVSQ

SEQ ID NO: 434517 - protein, 419 aa, unidentified
MSFKIIRKNCCGLDVHKTWIYACIGIADSHDRVEYKQARFSSFTKGLNELCDWLAKYNCTDICMESTGKYWIPVFNILEKHNLWVTLSHPKYTKPQTGNKTDRKDAKWICDLYMCGMVKPSFIPPADIRQLRDLVRYRFKLTCMITGEKNRAHNCLTVSNLKLDDVFSDIFGKSSRSITEQILQHPGEFFDVTPFVDDRCKTPIEEIQAAVDGAISPEQAVKLRQCLEHIDELEKHKSEIEREIFRLSDKYEVALNLIRTVPGFDKNPLTAIQVLSEIGSDMSVFPTAKNLVSWAGCCPRNDKSDRKIKSTRISRAGTYFKPVLVQIANALIKSKKHPEFTNRYRRIKARRGHKKAIIAICRMILTAIWHILTDLKPYTPEGFLDSRPVNKEKVLTISQALNLIKQRGYIIKDDVGPVT

SEQ ID NO: 434518 - protein, 336 aa, unidentified
MSQNYLGIDVHKKWCVFTQIDSTGKVMRQSRFRNTLEEVSIFASSLNSKIHLVLEPVLNYLWLLDQFEPYVGSVHVATPFKVRVIAESKSKTDKYDSRMLAELLRTNFLPESWVPRSDIRLLRGLIRQRYHLVKGMVMNKNRIRHLLFQHGIHLKVFDIASPKARLEIQKLCLPDITRQTIDQCLKIIAVFDDQIRRISKHIWACVKDNPTVELLQTIPGIGKLRSAVVYAEVGNVARFHSAKALASYTGLAPTIRSSGDSVWTGGITRNGSKPLRHALVEASINVIRRSPALSRLYHRILYRGNIQKARVAVARKLAIIIYAMLNRNEPFRMETT

SEQ ID NO: 434519 - protein, 369 aa, unidentified
MESILYVGMDVHTSNYTLCTYSIEDDKEFGLVKFGPDYLNIVRYVKRLKEHHGQDTRVICGYEAGGLGYSLYRLLTASSIECIILAPSTIPKAPNERKTDYRDAAKIARCLAYNSYRSVYIPDAEDEAVKEYIRMRDNTKDHIKQLKQRILAMCTRWRKEFDGTKKRWTVAHMKWLQHLEFENPIAQEAFDEYVIQLNEANARLKRYDERIEKWAKLPRYAEKVSKLTCFCGVKTHIALATIAEISDFDRFPNANRFASYLGLVPGEFSSGNNVNRLGITKQGNSHIRKLLTEASQCYARALPGKPSADLLKRQQGNDPKVIAYANKGNERLKRKYRSIASRKARPLAVTATARELACFIWGMMTGNVA

SEQ ID NO: 434520 - protein, 309 aa, unidentified
MDAQYVGIDVSKDRLDVHVRPGGEAFVVARDDKGLAELVERLRAVAPRLIAVEATGGYENVVAAAIGGASLPLAVVNPAQVRHYAQALGKRAKTDPIDAEMIARFTEATRPEPRALPDEATQVLAELVTRRRQIIGIMVAERQRATRLPKRLRKSCERVVRMLEKELAALDTDIDTTVRGSPAWRATEDLLASVPGIGSITARALIAELPELGHLDRRSVASLVGVAPFTRQSGQWRGKSFIGGGRRSVRAALFVATMAAVRHNPAIRAFRQRLLAAGKPKMVAMIACMRKLLTILNAIARDQKPWQPA

SEQ ID NO: 434521 - protein, 318 aa, unidentified
MYYIAFDVSKKVLSGFDGEKELAFDNKKGLKAFKRYLKKKYKDLNDLVIVFESTGVYSNYLKEFCADNNLKVYIINPKRSSNFSKAIGNRSKTDKIDTKKTIYEYRKIIRPEDIKVPKIDKVAQTLSAYLTSYKFTVKKKVSISNHLEALERTTSSLELVALLKGELKRTKKTEEKIKAKIEEYIKKDSQLKEDYKRQMTIPGVGKVSAICLLALFNKYKDTNQAQITALVGLDPTKRESGTSVKGKMKISKNGDRMIRGTLYFPLLSAIRFNKKIKALYDRLLANHKPKQVALIAAMRKLILISHAIYKNKTVYSAV

SEQ ID NO: 434522 - protein, 396 aa, unidentified
MKVCFLNGEGEKLDSFSVSNDLPGAQVLKERLLQCTTNQEVETLKIGLESTSVYSFHPSMFLHHDEDLKRFDTKVFLLNPKQVANFKKSYSDMNKTDEIDAFVIADYLRFGRNQMSIVKESQYVALQQLTRARYQLVRMLTKEKQHFLQHLSYKCNTFSQEVDSSIFGNAMMELFLEKFSLEELADMPLEELAEFLQEKSKNRFGDPKCVASTIQKAVRTSYRLDKVVEDSIDILLGTSIEIIRTYQKQIKELEKSIKRIMAGLTQTLESIPGIGPIYAAGIIAEIGQIERFDDETKIAKYAGLYWRTYQSGRFTAENTSLSRNGNHYLRYYLVEAANSVRKHVLEYQEYYAKKYNEVPKHQHKRALVLTARKFVRLVDALLRNHQLFTPERCVKV

SEQ ID NO: 434523 - protein, 494 aa, unidentified
MPQLAKNATLFNWAGEPKTRRPTKRRASKGKGSKGKTDPTEGLQVANPNAAGIDIGCSEHWVSVPPGRAERSTQRFGCVTAELNRLAEWLKGCGVDTVVMEATGNYWVVLYDILEECRLNPVVVNPRYAKNMSGKKGDIPDCQWMQKLHTYGLFANSFRPTKEIRILRSYLRQRERLVVASSQEIQHMQKALTEMNVQLANVISDISGETGIAIIDAILAGERDPVALAKLKGPRIAASKAVLERALEGHWKQEELFVLEQARLSYTHFQEQIQQCQRCIEQQIEAIQSRLSLEVQVPSERSSQSQIPCDSESGVSPRGNQKVQSFDLGAQLKRILGVDLTQIDGVGPVAAQVILSEVGTDMSRWRTEKHFASWLGLCPDHRISGGKILGRSTRPVVSRARNALRLCAYTLTHSKSWLGAKYRRLKSKLGTPKAIVAMAHHLARLVYRMIKSGEDYVDKGMEVYEAKYRAQRINWLQKQAKEMNMELVQMQTVA

SEQ ID NO: 434524 - protein, 350 aa, unidentified
MLHAGLDLSRKRLDVCLLSEHGELVEEFSAPPDADGLRGLVRHVGQHGVPVRGVIESMTGARFVHDTLEQLGWEVLIADAQKVKGLAPLACKTDKIDARVLAVLSERDLVPAIWLPDRRIRSEREQARFRLHLVKHKSMLKHRIHSTMLSFGHPCPVTDLFGVQGRELLDRLQIPDPWRQSVDASLDLIDYLERQIAEINCDLKASGAEHPYVPLLLTVPGIGWVLAFTIASEIGEITRFPSAKKLCGYTGLCPRVHQSGESDRRGPLTKQGPKYLRWAMLESTMHALRHPAYSERYQRNKQRLGRQRGARVAQIDIARKLTEAIWHMLTNNQPFAPTPASGGATARLAA

SEQ ID NO: 434525 - protein, 386 aa, unidentified
MTQPYDPTKPPVALEHDGTLVVVIEMSQASWLVAAIVPGVARRPLQKLKPDQEALLRLLTRWREEAAEAGKPVTRTALAFEAGRDGFWLARWLRARGVEAHVIHANSVAVAREHNRAKTDRLDTILLLRAFLGWLRGEPAHCRMAAIPSLADEDDKRPSREREHLVGERTRLVNRLKAVLVRLGIRGFKPTLRKAAGRLDALRTPDGEPIPPNTLSEMRRDLERLRLVREQIAAIEAARLERLARAPATGPDAMVRLLARVHGLGIETADMLVREVLARDLRDRRAVARYAGLTGTPDESGRRRREKGLSKAGNARVRRGMIQLAWRFLLFQKDSALAQWYRSRTESARGGVRKVLIVALARKLLVELWRLVVAGQVPRGVLLRPA

SEQ ID NO: 434526 - protein, 329 aa, unidentified
MTSIGQWEMAQTCSKLESHAVVVGIDVSKDHLDAAQYPSGDLIQTSNDTKGLRTLLRWIGRQHAVHVVFEATGPFHRQLESRLAKAGIPFSRINPRHARKFAEATGKLAKTDRVDAMMLARMGALLEPRTSTICNELQSALQELASGRRNLTRDRTALLNRQQNLQLSLLKRLTRYRLRQIEAQIAAIDQAISELISTDESLSRKRTILVSIPGIGEATAAMLIADIPELGTLENGQVAALAGLAPVTRQSGKWQGKSFIRGGRIHVRNALYMPALVAMRHNPDLRSIYLSLTDKGKHAKVALTALMRRLVILANVLLRNDRLWEPRHT

SEQ ID NO: 434527 - protein, 368 aa, unidentified
MGNEAKRFVGIDLSKRTYEAVAITVNPQTITRWNGKLDLRGRKRLLDKLHSGDTIALEAGTASFKIAKEIQSKQGVMVVVLNAANVAIIHASLKKTDKEDALKLARLIEKYSPEELPVVPIPTDQEMERRALVAHETRFRQDRVRLINRLHAVFLRAGFPDHTKRQLGIAASREKLIVSELDGFNLVEAMNLDHMIVEYEKILEDLDKQINDTVVACGEDAEILLSIPGFGIKTTMAVLAYAGDMRRFENPSQLVNYIGFSPRLYASGDIERSGSITKRGNPHVRWLLIQSAWCMVQSKAANPLKDRFEAMLKRGKAKSVAIVALARKLLELVFILLTRREKYRFIDPSLYAIKLRRAGFNLVGAGIG

SEQ ID NO: 434528 - protein, 343 aa, unidentified
MQATIAVDLAKNVFEIAISRFPGKVSERHRLSRTKFLRFFAQREASRVLLEACGSAHFWARELQKLGHEVVLLPPHLVRPYRGRHKKTDRTDAKALLEADRNEEIQPVPIKTVEQRSVTALHRLRSAWMETRTARLNCVRGLLREHGHFIPLGAKKVVPKVLELIADAENDLPDPMRLALGEACEEIRELERRCAGICKQLEALASTTPAVAHLLSVPGIGPLTATAMVAYVGDISRFPSARHFGSYLGLTPRVHATGQRRRLGHVSKQGDEYLRWLLIHGARSCLLAAKRAPNSKPLYTWALEVEKRRGHNRAAVALANKIARIAWTVWKEDRDFTLVRQAA

SEQ ID NO: 434529 - protein, 347 aa, unidentified
MTIIRIGLDTAKHVFQVHGVDDGEQPVVRRQLRRSEIETFFGKLPPTRIGLEACGASHHWARVLGGLGHDVVLLPPQYIKPYIKRGKNDAIDAWAFSPRACPVGAICEAMSRPGMRFVAIKSAEQQAGLMLLRVRDLLVKQRTMLINAIRGHAAEFGVTAAKGPVKVSELLQRARAEETGLPALARDIRGVLSGQLDGIGVRLKALESELMALHKHNQLSQCLATQPGIGPIGALNFALKVTDPQGFRSARHFSAWLGLTPKENASGGRRRPGRISRQGDEALRQLLVLGATARIRFAKPGRASAWLIDLLARRPKKLAAIALANKMARALWAMMVSGEVYRQPKAA

SEQ ID NO: 434530 - protein, 353 aa, unidentified
MKILALDLGKNKSVFVDYVIGGERIFGKISTNPRELRNLLERSAPDRLVIEAGPAAGWVCDLAESMKVPVQVANANDERWRWKAVKEKSDRKDALKLATLSEMDSLPTVHVPRASVRQWRSLIEYRHALVQRRTAIKNSIRSIYERQGVGLPSAKRAWSQAAVEELKKEASHYSSQRLWLFQVHCELQQFESIQRQIEEVEEKLEERAKADVRVEQLKTAPCVGPRLGETVVAILDDPHRFRNGRQVGCYAGLTPRALAERRKRPPGSHQSRGQRPAASNAGGDRLAGSPPQDVDGRSLRTGASRQRQTKKDRHRGGGPQTPGEAVGDAAGRHGVERAAAGGGNVKRRGQDGR

SEQ ID NO: 434531 - protein, 409 aa, unidentified
MLNLVVQLGEFAMRGAPRIATRLGSTAISACCIDSLTEIAAAPGMTTRGQCCGIDRVNKACVRPARSVVELSISRKDTGMDSLCLDLGKDEIVAFLIDAEGNPVHEKPPTFSQTPRGYRQLVKWMRHPADTRVVFEATGVYSRRLVQALHGSVASMHELNPRIIKRFAISMTQTKTDQADVRAIADVVHTLTLKRPEKLEQSRVICDPQRDNLALWLQEYDRLRRVIARLKNQIDNLTHETAEDASIILQRRRDELARLQDDQRQVRRQVDRAFKAWKSEEAALACSITGIATLTAASILTSIHHIDQFQSADAFKAYFGMYPRRRQSGSHESKSRMAKNGNRLVRHNLWNAARSAARHNPVCRELFERLVAQGKHEAAAYGAVARKLLQILYGVLKNKQPFRIQPLAP

SEQ ID NO: 434532 - protein, 344 aa, unidentified
MVIIKQCIGIDVSKEYLDCCIGSINIEQEQKLSKTKKFRNTEEGFKELLEWVNSERFAIEVIFVMEATGVYYENLAYWLNNQDEKLCVLLPNKVKHFAKSLNIKTKTDSKDAQLLSRLGLERKLDYWKIPSKIMREIKALSREYRETKAKLVLIKNQLHAKSHSYCCPKSTEKRIKRQIKLLETQLLEIEKELKAQVKVDSALSDKIAQISTIPGVGFITVVCVLAETNAFALVSNAKQLVSYSGLDIQHNQSGLREGKTKISKKGNSFIRNALYMPALCASKHNPNMKAFYSQLCERKPAKKIAVTAVARKLLILMYTLWKTDTEFDANYQTKAATEIEMNVI

SEQ ID NO: 434533 - protein, 344 aa, unidentified
MSETTTIGLDIAKHVFQVHGVAADSTVTVKRRLRRSEVIRFFDRLPRCRVGLEACGGAHFWAREITALGHDVRLIPAAYVKPYVKRGKTDAIDAEAICEAVSRPTMRFVAIKTVDCQAGVMLLNTRRLLVKQRTQAINSLRGHLGELGIIAAKGAGKVETLISIIRDKTDERLPAVARMALEMLADQIEGLTQRIAALEHEIVAEVRRDDTMRRLATIPGVGPITAATIVALVPDPKAFTSARHFAAWIGLTPKMHSTGGKDRLGRISKMGNPALRSLLVVGATAICAHARRGATASLWLTGLLARRPAKVVAIALANKMARIVWALLTKGGVYTRRPAAAPMT

SEQ ID NO: 434534 - protein, 475 aa, unidentified
MNLKGTKKKNQVITANIFEQQELLKKAEVIREKLTASTWHELETNGKFGKNEKLSFVSDDMLILGCDVGSDTHYVRAIDTRGRELSKSAFPFSNTLEGFQGLMDWATKLAASNDKEQIILGLEPTGHYWFCLATWLIGNGISVVQVNPYAVKQTKEVEDNSQLKDDRKDPKLIANLVKDGNFGMPYLPEKLYADIRRLSMLRDQINEDRIRDLNRLHREMKIYFPEYKDAFGKIDGAFCLEVLKVAPFPEDLVTLGAEGIRQIWHEAKLRGRGYVNATAIFENAKKSIGIQDGAKSSKLAVKWFVHRMIESNEQLTDIERRLHQMCMEIPYAENILAISGIGENTLCGILAEMGDISRFDDVKKIQKLSGLGLVACSSGKHKGETKISHRGRKRLRYWLFQAAKSAVAHADEFKELHTYYTTRKDNPLKKMQSLIVIACKILRVIFAILTKGTTYDPKKMLRDIVRPNEQSVQVA

SEQ ID NO: 434535 - protein, 441 aa, unidentified
MTARKREDDVVFPHAAGIDVGASSHWVAVPRRSTDEPVREFGAMTDDLNAMADWLLACRVDVVALESTGVYWIPLHEVLERRGLKVWLVDARQMKYVPGRKSDVLDCQWLQKLMSLGLLRAAWRPGDEVCVVRAVVRQREVLLIEQASWVQRMQKALVQMNIQLTEVLSDVMGMTGQAIIRDIVAGQRDPHVLARHRHGRIKASTVDVCRALTGNWREEHLFLLQQALAIYDELAKRVLECDVKIEALLAPLQRHPVKLRRTPAARCKNQPTFDIRQSMANWAGVDLTRIDGVGVGTVMKLLSEIGPDLSHFASVKHFCSWLSLCPGTKISGGKVLSAGTRRSANRARQALKMAAMSLSHSDSALGAFYRRLCMRMDKPRANTAVAHKLARMVYFMLTRGEEYVDKGQQHYEEQQRQRSIASLKRRAALFGFQISPLATTA

SEQ ID NO: 434536 - protein, 341 aa, unidentified
MDEVTIIGVDLAKSVFQVHGATVSGEPVFRKKLSRGQFLKFLSEQPTCVVAMEACASSHYWGREIMKLGHDVRLIPPIYVKPFVKRQKNDANDAEAITEAAVRPTMRFVPVKTATQQSRSMVFKTRDLLVRQRNQLINALRGHLMEYGIIAPPGRNFVKKLAEQIENPESGLPPIVVELSRVHLDQLSVCTDKIVVMERRLKDEAKSDPETIRLQTAPGIGPVSAMAIKAFAPPLEGFKRGRDFAAWLGLAPVQKSTGGRQILGRTSKMGQRDIRRLLIIGAMTRIRWAIKNGPPKGSWLEQMLERKPRMLVAIALANKTARTIWAMMTKHEDYRDPVAAA

SEQ ID NO: 434537 - protein, 342 aa, unidentified
MYYIGLDVHKKTISYCVKDASGQVHQEGKVGATRWELDDWMNTLPQPWTVAMEATIFTGWIYDHLLPHAQQVKVAHPLMLRAIAAAKKKNDRIDAGKIADCLRCDFLPECHMASTAIRDRRRTLRYRHLLVRQMVQMKNRISGLLMETGVSHNKKRLHKVGYFRELLSANEEVQESIRPLLRVSRDSIVRLQKTEYALVSSLQRDPLLAERIQRLRTVPGVGPITALTWALEMGDVSRFPSIREAISYCGLCGDEKSSADKVMRTPLSKQRNKHIQRVLVEAAKLAPRQDHNLALVYEREKQKGNANRATLAVARKMVAYLLAVDRGQRDFVPFSDSQSAAA

SEQ ID NO: 434538 - protein, 360 aa, unidentified
MTQVRTWVGLDVHAAKVVAAIADSGSGELAVRRMGGATEQVAEFCAGLPAPVRVAYEAGPTGFGLARALMARGVDCTVAAPGKIERPAQDRVKTDRRDAERLVRLLMIGGLHAVRVPTPAEEAMRDLVRAREDVRGDLMRARHRVGKLLLRHDLRFDGNNWTQRHLDWLGRVELPEPVAQSVLLDGIGAIDALLVRRADLESQMTALIEGSPWEQSVARLRCLRGIDTLSALGLCAEVGDFERFARPAQLMSYLGLVPSEDSSGERRRQGSITKSGSRHARRLLVEAAWHYRRVPGKGRELRRRQEGQPQAVCAISWKAQQRLHRSWVRLDSERGKRRTLCAVAVARELSGFCWAVTTAD

SEQ ID NO: 434539 - protein, 352 aa, unidentified
MPCLPAEVILGVDTHRDTHAVVLIDLLGRLVAAETFPTTRPGIRALIAWAQQRGTVRRAGVEGTGSYGAGLTRALRLEGVDVIEVTRTARVGGRHRGKNDTRDAEAAARNVLSGQATAIPKSRDGIVESIRVLRNTRASAVKARTQAILHLKNLVLTAPDELREALRDLSTKQLLARCARMHRSDRLDALHATRHALRTLARRHRALDDEIHELDVLLADLTAKAAPRLLREPGIGPEIAARLLLVAGDNPTRLRNDAALAALCGASPIEASSGKTTRHRLNRGGDRQGNSALWLIANNRMIHHPKTRDYVTRRTTEGKNTKEIRRCLMRHIARGIYPLLIADLHDAQANSS

SEQ ID NO: 434540 - protein, 390 aa, unidentified
MIYVGIDVAKTTHYAAVAGSDGIVLVEPFAFDNDAPGFAKFISKIASFPKEQLIIGLESTGIYSENLICFLFDSGYKLAVINPIQTATLRKTNIRKTKTDKVDTLLIIKSLMVNSYRLYTEQDARSLKLKSLCRFRQSLKKSKARLKVQLSGYVNLLFPELLSFFKSGIHISTCYTLLKRCSSPAEIAALRLDSLSKLLSNASRGRFARSTAEALKSLAKSSVGVKNPYISIQIAQTIQQIELLEQQIDEIEKVIKDTMCELDSVIMSIPGIGAIDGAMILGEIGNIGRFASPAKLLAYAGLDPTVCQSGKFKARSTKMSKRGSKMLRFALINSAWQLTLKNDTFFNYYQLKLSQGLSHYGALGHVAHKLVRVIFTLLKHNALFDATRLI

SEQ ID NO: 434541 - protein, 422 aa, unidentified
MRIVYRICCGVDVHKNVIVATIVKTDENGVSEYFQKAFTTINSDILKFRSWLIENDCYHVCMESTGKYWIPIFNYLEDVMTVCLTHPKYVKAIKGKKTDRKDSKWIADLYKFDLVRSSFIPPKDFRALREMARYRFKLVCMKSSEKNRIQNCMTVSNIGIASVLSDPFGKTATEIMSYLLENTAETMDDKAVRKLIRKRANAKSDEIIEAIKGYKIESDQAKKLELARNHLDYLEDMIIQTEVELYVRIKPYYEYVELLSELPGVTELSATIILAEIGVDMEVFEDEQHLCSWCGLTPGSNESAGKKKSSRIAKAGAYLKPLMVQCALAAVKSKKEPYFAIKYGHIKKRRQHKKAIIATARMMMVCIYHMILEKKSFDPTDYTELMDPHFTQQRVVLNDENVFAYLEAKGIDTSLLVKCNDN

SEQ ID NO: 434542 - protein, 342 aa, unidentified
MHHAAIDLGSKESQICIRQPDGAIIQERKHPTRKLTELIKTWPTSRVVMEASAEAFKIADAALAAGHQVRVVPGKLVRLLGVGDRGVKNDQRDARQLSQASWQTDVPSVHIPSAAARELKSICGARDVLVATQRNLSNNVRGWLRTQLWKPPGGTMVTLPERVRAHARAGGHELPEHIERQLTMLTQVTEQVQAANKQARRLAKEHPVCRRLMTVPGVGPLTSLRFVAAIDDPSRFPTAHRVQSYVGLTPGEHSSGGGGGKRGITKAGPSELRRCLVQAAWSVMLARRSHPMLEWVRQLAQRRSRPVAVVALARKLAGILFAIWRDGTTYEANHAARRSALT

SEQ ID NO: 434543 - protein, 389 aa, unidentified
MMTQTLTAASKPVALDYDNTLVVAIELSNVSWVLAAQVPGLPRLKAKRSVEPTAEALMAAINGYRNRAREAGRMVERVIAVYEASWSGFWLARWLERGGIEIHTIQPSSVPVDRRARRAKSDGIDAELLLRTLLAWLRGEPRVCSMVPIPDEADEDARRFIRERAELVAERVSLVNRIAAVLATLGVRDYNPLLRNRRGRLDELRTALGTALPPQARAKIVRMIDRLELVQAQVAELDQERDAVLEDRAPDKAAKMIQQLATLRGVGVQSATVLVREAFVREFPNGKALGSYAGLTATPYSSGGTEREQGISKAGNRRLRTVMVELAWLWHRYQPGSVQVSWFRERANAAGRRARKVMIVAMARKLLIALWRFATQGVIPEGAVLKPAA

SEQ ID NO: 434544 - protein, 409 aa, unidentified
MDVVYRCCCGIDVHKQMVVACVIKNGKRSLREFSTHTAALRELCDWLLEVGCEQIAMESTGVYWKPLYNLFEMTDLSAIIVNAQHMKALPGRKTDVKDAEWIADLLRHGLLKASFVPSKEQRETRDVVRYRKSLTEERARELNRFAKMLQGANIKLDSVVSSLFGKSSQKLLQLVLTGADINVKTVAPLVAKGMKADLETLVLALDGIISPVLRMLLSSILDHIDDMSCRIEKLDAFVAEQMREVSAAIDALCQIPGIGVTSAQIIVAEIGTDMSRFPSAAHLCSWAGVCPGNRESAGKRGSGKTNRGNKTLKSTLANCSKSVSRTNTFFAAQYHRISARRGKNRASVAVAHSMLIAIYHVLQGADYHELGADHYNRFNRERKINSHLRRLRELGWTPDGSPMAPGVAW

SEQ ID NO: 434545 - protein, 436 aa, unidentified
MPHSSFVPEPEWAAFVAMDWADQKHVWSLYIPGTQQREQGECVHSPEAIHAWISQLTARFAGRPIAVCLEQSRGALLFSLSKYDNLVLYPIHPATASDFRKAVYPSGSKDDPLDADVLLEFLLKHRDRLRAWRPDTVHTRELQFLVEDRRQLVDEKTRCLNRLTQRLKLYFPQALSWFGNVDSVLLWKFLQQWPDLEALRKVRRSKLQAFLERDRRCSAPDIEALWPAIQQAVPATHDAAVIGSSVLWVTTLVQHLQTLREAIRHYEKRIQELTETHPDFPIVSSFPGVGPALAPRLITALGTQRDRFQSANHLQSYSGIAPVKQASGKRCWIHMRWACPKFVRQTFQEWAQHSLARSAWARAFYDRQRLLGKQHHAIIRSLAFKWIRILYRCWHNRTPYQEPLYSATLARRAPSASPTVEFGWTTTAGFSKIAAI

SEQ ID NO: 434546 - protein, 402 aa, unidentified
MNAVGIDVSKGKSMVAIMRPFGEIVSAPFEIKHTASDINSLVELINSVEGESQIVMEHTGHYYEVLAHQLSEANLFVSAINPKLIKDFDNDSLRKVKSDKADAAKIARYALDKWQNLKQYSVMDELRNQLKTMNRQFGFYMKHKTAMKNNLIGILDQTYPGVNTYFDSPARSDGSQKWVDFASTYWHVDCIRKMSQNAFIDHYQNWCKRKKYNFSQSKAEEIYGKAKELVPVLPKDDITKLIIKQAVDQLNSASATVESLRTLMNETASKLPEYPIVMAMKGVGASLGPQLMAEIGDVSRFTHKGAITAFAGVDPGVNESGKYEQKSVPTSKRGSSDLRKTLFQIMDVLIKTHPQDDPVYQFIDKKRAQGKPYYVYMTAGANKFLRIYYGRVKEYLSSLSES

SEQ ID NO: 434547 - protein, 345 aa, unidentified
MNKIFIGIDFSKEKFDATVITAEGVDEQCDRQHGVFSNDVSGFRRFERWCRASSGGTDLERWLFCGEDTGGYSRPLASWLYGRGYSVWLENALRIKGCNALRRLKDDRTDSAMIAEYAMRHADRADLWAPLGESLSQLRELFLYRHRLVRHRCSLEVRSSEKRLTLEKSPAKKFMRHSSDRIIAQIGREIAACERMIRELVASDDELWRSYTVITSMPGIGMVNAVCLIVYTENFRRFGFNARKIATYYGVAPFGRYSGTSVNTGPHVSPFANRTIKALLSQAAMAAIRFNPVISQYYQGLIGRGKDKNLARNNVKCKLIRIITAMVRQGTCFNPEYSWKEGVCA

SEQ ID NO: 434548 - protein, 338 aa, unidentified
MKITTVGLDIAKSVFHFVGVNRAGKLVRKKMIKRTELIHFFSQVEPCLVVMEACGGANYWAREFQKMGHEVKLIAPQYVVPYRQGNKNDYNDAFAIAEAAQRPNMRFVQPKPVEQQDVQMLHRMRERLNKQSTALVNQVRGMLAEYGIVIAKGKASFRSKLPDLLENADNALTVKGRSIFYQLYEEFTDIDTRLKSCDMQVLQETKSNHVCLRLEAVPGIGPVTATAFYAAAGNGKDFTNGRHFSAWCGLVPKQHSSGGKDNLLGISKRGNAYLRTLFIHGARAVLRHSDGKVDRFSRWAVALAERRGFNRACVAVANKLARIAWVIAAREEEYQMVD

SEQ ID NO: 434549 - protein, 343 aa, unidentified
MKLSRVGVDLAKNVYQLHGVDRHGKTVWKRRLRRGQWLQALMDKAEPGCEIGMEACAGAHHWARELQSRGYTVRLIAPQFVKPYVKSNKNDANDAEAICEAMSRPHMRFVTVKSVEQQDIQAVHRVREELKAHRNAKANQIRGLVAEYGLVASKTLLALRRAIPEWLEDAENGLTDSFRSLLHGLWEDLLSLEDRFKKLNKEIEKLARNNEITRRLQQLRGVGPIVSTALVATVGNGEQYSNGREMAASLGLTPRQNSSADKRRLLGISKRGDVYMRTQLIHGARSVVSQAKHRDDPLSRWVTDIAKRKHPNVATVALANKTARMAWAMLHNETNYNPSLAVG

SEQ ID NO: 434550 - protein, 348 aa, unidentified
MDNTSDRSVIGMDIAKNVFQLHVVSAETGQIQRIKLKRAAVEDFFANTPTSLVAMEACGGAHYWGRRIKALGHEVKLLPARQVKPFVVRDKTDARDAHAISVAALQGHIKPVPVKTEDQQVCMTLHRMREQMMKMRIMQTNALRGFLYEFGVVLPVGHRALLEKIGPTLAEEEERLPKQIVQSVLEQMNRIHQLQQDIIRIEARLTAISKNDNAMQALQSIPGIGLLTATAMIAKTGDFTDFKTSRQFSAWLGLTPRQTGTGGRIRQLGISKRGDAYLRTLLMHGARAIIARRAHSAWVASLLSRRPYSVVVAALANKLARTAWAVLTKGATFNPSQWAGVDEAAQVA

SEQ ID NO: 434551 - protein, 343 aa, unidentified
MEITRVGLDIAKRVFQVHAVDAQGRVRACKKLARSEVLRWFAQRPPCLIGIEACGGAHYWARELERLGHTVKVMAAQFITPYRKSDKNDAHDAEAICEAVGRPNMRFVAVKSEEQQAVLMVHRGRALVVANRTALTNQIRGLLGEFGLVVPLGLNRLRALLPQILEDAENGLPDLARQVLAQLLEQLHQFDEHLQHYERQLQGLAAHSEPAQRLMQINGIGAITATALVATVADARVFKNGRQFAAWLGLTPRQYSSGGTTRLGRITKRGDRYLRTLLVHGARALLRYIDRKSDAESVWAKRLMARRHVNIAAVALAAKHARIIWALLAQGTKYRAPQQAIAA

SEQ ID NO: 434552 - protein, 367 aa, unidentified
MKKVSTAAVKATKNFSQPKLTIGLDLGDRSSWYCLLDEVGEVLQEQKLGTTPKAMREVFGSMPRCRIALETGTHSPWVSRLLSELGHEVIVAHARNVRLIGESRKKDDRLDARTLARLARIDPQLLCPVKHRSAKAQADLTVIRARAGLVRARTALVNTARGLAKSSGERLRGCNVRNMNPEKAEGLSPELQAALQPLLAGIESLSERIRECNEGIEKLAQESYPQVALLKQVKGVGTLIALTFLLTLEDAHRFRKSRDVGCYLGLQPGRRNSGQSEPQMHISKEGDPYLRTLLVQGAHHILGPFGADSDLRRWGLKLAERGGKNGKKRAVIATARKLAVLLHRLWVSGEVYEPLRNSHQTALPAAA

SEQ ID NO: 434553 - protein, 370 aa, unidentified
MRNKILYVGLDVHKKTIDAAVATGRSNGKVRSYGKINSTLDALDKLTANLQNPGVELRFVYEAGPCGYQIYRHLSSKDIHCSVVAPSMIPKRSGDRIKTDRRDAINLVRLFRAGELTSIYVPSVDDEAIRDLIRCRDDMRRLERKARQRLLAFLLRHGHQYSGKKHWTKGFYNWLAMIKFSHRAQQITLQEYIDTTNECSERIKRITQQMQAQVETWERSPFVKAYQALRGVSFIVAVTVVAEIGDMNRFPTPKQLMAYLGLIPSEHSSGNTVRRGPITKTGNSHVRRVLIEAAWTYKMPARVSTILLKRQQGLPKSVRDISWKAQTRLCARYRRLIARGKSRQTVITAIARELGAFMWAIDKQMQVAKA

SEQ ID NO: 434554 - protein, 347 aa, unidentified
MRFYTKQHKYYCGIDLHTKKMYICILDGTGETVSHQNIRTDPEAFLSVIAAYREDIVVAVECMFTWYWIADLCASEGIPFVLGHALYMKAIHGGKSKNDKIDSHKIAVLLRGGMLPQSYVYPARMRATRDLLRRRNHLVRKRAELLAHIQNTRHQYNLEDPLGRIAKPKNRQGVVERFDNPCVQKSIAVNLEIISAYDRILERLERDIIQTANEHDALSYNLLKTIPGVGRILALILLYEVENIDRFPRVQDFVSYARLVKCAKESNGKKYGTSGKKIGNVHLKWAFSEAAVLFLKGNEAGKRYLDRLTSKHGKGKALSILAHKLGRAAYFMLKDKKAFDEKRFLSH

SEQ ID NO: 434555 - protein, 352 aa, unidentified
MRQHYVGMDVHQASTSIAVMNDRGKLISESLIETKAQTIVDFLKGLSGEVLVTFEESNQAAWLYDLIQPHVTRLTVCNPHHNHLLKSGNKSDRVDARKLAQLLRAGMLRPVYHGEHGTRTLKELVRSYECLVEDTSRVKNRIKAIYRGRGVGTRGRAVYQTSQRELWLRKIESAGLRNRAELLFRQLDQLQVLRREAKRAMIKESRRQVATQLLQQIPELGPVRIAQIVATVGTPHRFRSKRQFWSYIGLAVITRSSADYRLVDNRMQKHRLAAQNRGLNRNYNHRLKSVFKAAALGAAHSEAYREYYERLVTAGSRAELARLTLARKLAATVLAVWKSGERFAAEKVMSTA

SEQ ID NO: 434556 - protein, 417 aa, unidentified
MTEEPGWFVGIDWASEVHQVCLVDAAGKITGERRFPHGGVGLAELCVWLLAITGAEPAAIAVAIEVPHGPIVETLLERGFLVYAVNPKQLDRFRDRFTVAGAKDDRRDAHVLGDSLRTDRHCFRHLVAENGAVIELREWSRMAEDLQQERNRLANRVREQLWRYYPQALAISNDLAADWFLELWAAVPTPAKAARVRESTIERILRTHRIRRIGAAEALQVLRQQPITVAAGTAAAASAHIRAVAARLKLVNRQIKAAHRRLDALCTEIAKGEGETPSGQQPEQRDATILRSLPGVGRIVLATLLAEACEPLRRRDYHALRTLSGVAPVTRRSGKRCIVVMRQACHMRLRSAVYHWARVAIQHDELSRRRYAELRKRGHSHGRALRSVADRLLGVACAMLTCRTLFNPQHAAKQIAA

SEQ ID NO: 434557 - protein, 352 aa, unidentified
MIVLGADMHKSSHTIAAIGATSGELLGDKTIAVGDRGFAAALDWARGLEDEWVWALEDCRHVSGAFERFLVVHGERVVRVATRLMAGERRGGRDRGKSDLIDAIAVARAALREGVDRLPVAELAGVELDVRLLVDHRERLVRMRTALYNDLLWHLHDLWPEQTFPGCALLSRKWTTRIARRLGRAEQTARVRIARDELRRLRELSTTVDALEAEIADLVAEAAPQLLAEPGFGPLTAGELIGEIAGAQRFSSDAKLARAGGIAPIPVSSGKTNRHRLDRGGNRQINTAIHRVAITRARCHPETKAYIERKRAEGKTNRDAIRCLKRHLARRVWHLLQPPTPSAQTAPPTSIS

SEQ ID NO: 434558 - protein, 427 aa, unidentified
MKYTQNEKILQVKETTLIIGADMASEIQYARAFDYRGVELGRLIKFNNDINGFTLFAQWVAEICKRCRKEQVIVGMEPTGHYWFNFAQYLKDHQIKIVLVNPFHVKRSKELDDNNPSKNDRKDPKTIAMLVKDGRYIVPYIPEGIYGELRTAMDTRGQIVKQLNSIKNRVKRWISIYFPEFNRVFGDWEGKAALIVLKEFPIPTKILEKGIDGIDARWREDKIRAVGKKRASRLIEAAKSSVGVRDGHIAAENELLTLLEDYTLRMSQYERTMVLVEKLAFQIPAFKELLKIKGVGLVTAAGFIAEVGDITRFEHPKQIQKLAGLSLKENSSGKHKGKTTISKRGRRRLRSLLFQGIMPMVANNKEFQELHQYYTTRKQNPLKKKQSLILLCCKLIRIFYVLLTKQIEYDPQKMLSDIKRPIEKKAA

SEQ ID NO: 434559 - protein, 433 aa, unidentified
MPKFLNNPTVGIDVSADFSFVAILAPNGDIHKKAFKINHDVNGFNHLLKEIKKVEEEYNMKNAIFMESTGVYHLSLFHFLNKNFDNTFVINPLVTKCNKNGDIRKVKNDKKDALSIAKIGKYQDIKLSQGVSLDIFLLRSLEREYYKLTDTCSDFKKKLSADLRVTFPGYNTIFSDITSNSSIAILSAYPTPQSILDAPKETLVNILTTKSRKGLSWAEKKYSKLIDMAKEATIIGIPLDALAFKITSSIKIIDTFETEISNLLKEIKLLINSSNFPDKIKKNIELVDSIPGIGTLTAVTLIAEIGDIDGFLKPKHLVAFFGIDCSVNESGKFKGNQNKISKRGTRIGRRALYAVALASIRSSRNGVPINKVLLEYYQTNLKGKKAKVALVAIMHKILNFIFEVLRNQTPFEQRDPKLHKQMFLENKALTNAA

SEQ ID NO: 434560 - protein, 376 aa, unidentified
MVRIPIDIAKLNHFAAAISSDGEIIIEPFKFTNDADGFQLLVSKLESFDKNSLIIGLESTAHYGDNLVRYLVTELYQVCVLNPIKTCQMRKNNVRKTKTDKVDTYVIAKTLMMQDNLRFVSFFDLDMMDLKALGRFRQKTIKQRTRLKIQLTTYVDQVFPEIQYFFKSGLHQHAVYALLKEAPSPKEIASMHMTHLANLLKVNSHGHFTKEQAKELRVLAQKSVGANDSAISIQITQTIQQIELLDSQLEKIEAEMTDIMKFNDSVIMTIPGIGYINGGMILGEIGDIHRFSNPNKLLAFAGLDPSVYQSGNFQIWRCLMSNLKGPFSCRRMYMITPALNMLATTVPIATPATLILKTMTSNRFSTVLIIPAATRQ

SEQ ID NO: 434561 - protein, 355 aa, unidentified
MTSTKYIGMDVHKESISIAVMNSVGKVVMECVIETKASTILQFIDGLRGDLRITFEEGTWAAWLYDLLKPHVTEVLVCNPRKNAVLKDGSKSDRIDARKLAEQLYMNNVKSVYHGEHGLRTLKELARSYLTITKDLTRVMNRLKALYRSWGIPCVGNEVYAPRHRAEWLGKISEAGVRRRAEHYYQQLDVLRLLRQEMRRELLVEAKKHKAWKLLRLVPGIGPIRAALLMALIQTPHRFRTKRQLWKYSGLGLETHDSAQYHVAEGQLRRSKKPATVRGLNKDHNHDLKDIFKGAATRVSSSRGPLRDFYENLLAKGRKPTIARLTLARKIAAITLIVWKKEVRFDANYLKPQAA

SEQ ID NO: 434562 - protein, 388 aa, unidentified
MIYVGIDIAKLNHFASAISSDGEELIKPFKFTNDNDGFQLLISKLDPLDKDSLIIGLESTAHYGDNLVRYLVAKNYKVCVLNPIKTSTMRKNNIRKTKTDKVDTFIICKTLMMQEPLRFVTFYDLDLMDLKALGRFRQKTIKQRTRLKIQLTSYVDEIFPELQYFFKSGLHQKSVYALLKEAPTPEAIASMHMTHLAHLLKVNSHGRFNIEMAQQLRVLAQKSVGASDSSLSIQVTHTIQQIELLDSQLERVEAEMTEIMKFNDSVIMTIPGIGYINGGMILGEIGDIHRFSNPNKLLAYAGLDPSVYQSGNFQAKKTRMSKRGSKVLRYALVNAAHNVVKNNATFKAYYEAKMAEGRTHYNALGHCAGKLVRIIWKMMTDNVEFNLD

SEQ ID NO: 434563 - protein, 352 aa, unidentified
MAKSSENLARVTRVGLDLAKNVFQVHCVDAKGEVMVARKLRRGDVLEFFGGLGSCVVAMEACGSAHHWGREIAALGHKVKLIPPAHVKPYVRRNKTDAADAAAICEAALRPEQRFVPVRTIDNQAELMRHRVRDQLSGQRTALLNALRGHLSEIGVIAPQGAQHAYRLKRFAEGEADENGEIVVGEVVRAALAPLAQQIDALDAALAAIDKQLETAAKADEKAKRLMTIPGIGPVIATAIVATVRDVEAFASGREFAAFLGLTPRQHSSGGKERSGGISKMGDRYLRKLLVVGATAALHHAAGHYDALRSWAKDMLERKAGLQIRFQADRGRARQQAGAHRLRDSAFGRDLR

SEQ ID NO: 434564 - protein, 359 aa, unidentified
MQTQRKELNFEGQSVFVGLDVHLKSWTVSIFTEKLHHKTFSQPPKAEILSEYLKFNFPNASYFSTYEAGFCGFWAHFKLEELGIQNIVVNPVDVPTTQKDQKRKSDPVDSNKLGRSLRSNELKGIYIPRPETLEDRTIIRVRFTIVKDMVRQKQRIKSLLYLYGIEYPDEFQNANTHWSKRFINWLKTVQLQYTTGTDALNLLIKEAEQQRLILLEATNKLRALSKTERYAKNIELITSVPGIGLITGMMLLAEIEDIKRFDNSDKLAGLIGIVPDCHSSGLTEKKGEMTSRGQYFMRKGIIECSWVAASKDPALSLAYYNYCKRMEPNKAITRIARKLINRIFSVLKNEKKYEIGIVK

SEQ ID NO: 434565 - protein, 414 aa, unidentified
MALKIVYPICCGIDVHKTFVVACIASTIKGVTTYKRHRFSTYTKGLNELSQWLCENNCKDVCMESTGKYWIPVFNVLEASCNITLAHPKYVKAIRGKKTDKKDAKWIADLFKHDLVAGSFMPPLEIRQLRDLMRYRFKLTNFMSSEKNRLQNSLTVSNIQLGNVVSDTFGKSSMNIIEKLLKNPLDTSFDIEPLIHGSMKSKLPELELAIDGFITPEQAEKLKVMKQHYEDLQSRKADLEKIILSLAASYTEEMNLILTVPSFKDIFSAIAVVSEIGVNMDVFPTAKHLCSWAGLTPTNNESAGKKKSVRISRAGCYIKPLLVQCATAVVKSEKHPEIRNRYLKLKKRRGHKRAIIAIARMLLTAIYNILKKKEPYNPNLYKKADVLPVNREITVEQALLLAKSQGFRIITVAT

SEQ ID NO: 434566 - protein, 412 aa, unidentified
MDVYCGIDWAEDHHDISVVDRDGQLLARRRISDDAAGLAALLGLLAEHGDNPGDLIPVAIETPRGLLTACLRATGRKVYPINPMSVARYRDRHSVAGRKSDHGDSFVLANVLRTDMHAHRPLPADTELAQAIAVLARAQQDAVWDRTTAHNKLRSCLREYFPGFLAAFADARGGITRPEARIILAAAPTPADAATLTLTQLRGLLKKAGRIRGLDTEATRLRDAFRVPQMRQLPLVEDAMGRQALALLGQLDAACAAADGLEQAATQSFNLHPDAGIITSFPGLGALTGARLLPEIGDDRYRSHDASGLQAYAGAAPLTSASGKTKSVTHRRVKNNRLNAAGYSWAFSALTASPGARAHYDRRRDDGDRHAAAQRNLFGRLLGCLHHCLTTGQRYGETIAFPAIGKELPQAA

SEQ ID NO: 434567 - protein, 397 aa, unidentified
MSAVVGIDVGAFKHAAAVCRSGEREAGRGVFRLSADRAGFDELDRWLDRQGPVERVVMESSGHYYWPLASHLHRRGYSVAVVNPLQAKYFAKSRLQRSKSDPADARTLAALGMSEEPRVKDPLLGAEAKEAARFWGGLVKEQAQVRQKLLRLVEIGFPELKECFEDPLCDTALAVLREAPTARVAARKRVSTLAETTRPGGRRRLGENKAHRPHQLAKETIAPPELDDQMSFEVGMLIQQFDLLDKQIEIAEQRVAEVLDSELARRLQTIPGVGPALAATFIAEIGDIWRFDDFDQLASYAGVHPKELSSGTKGQNPETSWRMAKTGNAYLRSAAYKMAVVGITHNPVIRAHYLRKRAQGKSGMNAVGHSMSKALAIVWGVWRSGLDFDPTLGGPRT

SEQ ID NO: 434568 - protein, 355 aa, unidentified
MSSEKYIGLDVHQATISVAVMDSQGKVIMESILETKASTILEFFAGLHGSLFVTFEEGTWAAWLYDLLKPHVTEVLVCNPRKIPLVKGGNKSDQIDARKLAERLRLHDLKPVYHGETGVRMLRELARSYLTVVKDLSRVMNRLKALYRSWAIPCAGRDVYYRRHRSQCLEKIPEAGTRRRAEQLYQQLDLLQHLRQQARRELLAESRQHAITAKLRQIPSLGPIRSALAVALIQTAHRFRSKRQLWTYSGLGLETRDSGEYHFVKGQPRRRKKQATIRGLNKDYNHDLKGLFKGAATRASVKPGPFQEFYQRSLAKGIKPTMVRLTLARKIAAITLTLWKKGEDFDIHKLNSQAA

SEQ ID NO: 434569 - protein, 373 aa, unidentified
MDQQLALPTGNIVGVDPHKRTLSATLLDDRHQILAQSHFNVSGAGHRDLEAWALAFGPVVRWGVEGANGLGRHTAVFLTDRGHDVRDVCPTRTADHARKRRQGKSDTLDSERIARETATHADLPPAFKRASGDAGVDENHDLMALWHTTRRSLAKVRAQLLNEAAALLHQLPEDVRDGLGGSRLVQPQLNALAKRLPRLRRRQWDAATALRLRLLAEHIKMIAELRRRDAEAAQELRSLLEARRSTLTELPGLAERSAAELLVEVGDARRFTSGGFARFNGTAPLPASSGEGGDQPVRHRYNPAGNRRVNAALHRMAITQLRCEPRARQLYTNARKAGHTKKEAMRILKRHLSNVVHRQMLRDLQGVVSAPPT

SEQ ID NO: 434570 - protein, 414 aa, unidentified
MEPVYRSLAGIDVHKKMLAVVIRRQSDEHIEYRKRKFGTTRTEIEHLSAWLQSERVSEVVMESTAQYWRPVWYGLEPHFGLHLTHPLKTRAPRGRKWDFRDAQRLGDRWCSGDLEESFIPGAEQRSWRWLTRTRVDLKDKITVVRNQVAGLLEQGGIKLTAVASDVFGVSGWAMLENIAAGVTDVEVLVGQARGVLRRKEAQLKEALAGRLEPVYRLLLKQYMDQVRLLRRQVEEINQALAEAMKEHLPALHRLSQIPGVDLYAAQELLSEIGPRAAAFASAERFASWVGVCPGNQESAGVCYSHRSAKGNRYLRRLLCQIAWAAVHTKETFFAGLFARLKPRIEGKGAVWAVAHRIAKVIWLVLHKQVDYQEKGPAPPNERTLVRKFKRMLKEFGRLGLDVRALLDQQLPTPA

SEQ ID NO: 434571 - protein, 316 aa, unidentified
MNVEVSRVLGVDVSKRWLDVASAVDGEVQRIANDAEGIAAVLQCAQQLDAQRITIEASGGWQTPLVAALVHAGLPVVVVNPRQVREFARATGRLAKTDRIDAQVLCAFTLTLQPPLRELKDEQAEALSALLARRQQLLGMRTAEKNRLTLAVRGPVRKNLKAHIQWLDRHLRDTDREIKQLIEASPVWQAKENLLTSAPGIGNTTARALIGQLPELGRLSHKQIAALAGLAPFNRDSGTLRGRRMLWAGRHEVRTAMYMATISAIRANPPIRGFYQRLKANGKPSKVAIAACMRKLLVMLNAMLRDQQSWSHACSA

SEQ ID NO: 434572 - protein, 339 aa, unidentified
MNQFTKKKHFIGIDISKDHLDLALVNEEDIGVFKDKKVENSFKGFNKIRNWLVKEKLRLDDCLFCMEHTGTYGLLLFAWLGQMEIDYCVEPALKIKRSLGLARGKNDQVDARRIAEYALTNRAKLSRFSLPSKLLLQIKQLLTYRDQQVKMKVSLKNSLKNHKQYQQILGSTKISNDISSQIDDCVYRIENIESEIKDLIKSDKELKKNFELATSVKGVGLVIAAFMLVTTNNFTSFENGRKYACYSGIAPFENASGKYQGKTQISHLANKRVKALLSSGANSAYKWDPEIKAYYERKIKEGKHHKLVINSIRCKLVNRVFAVVNRQTPYVNIYQQKFA

SEQ ID NO: 434573 - protein, 348 aa, unidentified
MHMLAGLVELVIGVDTHKDTHTAAVVAAATGAVITQMTVPATPAGYQQLLQVAAHQPGQRVWAVEGTGGYGAGLTRFLHAHTEQVVELDRPKRAARRHGAKSDPLDAIRAAREALSRDRLAQPRAAGHRAALSVRLTVRRSAVQATTDAQRQLHALVVAAPDALRGRLRGLTTPRLVSTCGRLRLRADLDPETAATVASLRALAHRIQLLNAEIADHTRAITTLVRAWRPELLGRCGVGPIVAATVLCAWSHPGRCGSDAAFAMLGGAAPIPASSGQTVRVRLNRSGDRHLNQALHLVVLTRLRYDPATRAYAQRRRAEGKTNREIKHCLVRYVARQLYRLLEAQPAL

SEQ ID NO: 434574 - protein, 343 aa, unidentified
MKQISAIGLDLAKHVFQVHGIDEGGDVVVRKRLRRSDVVEFFAKLAPCTVGIEASASAHYWAREIGTLGHAVKLMPPAYVKAYVKRGKNDASDAEAICEAVQRPTMRFVPVKSAAQQASGMIYKVRELLVRQRAQATNAFRSHLSELGIVAAQGRSKLAELFAMVRDTNDAPLPAAARAVLEELAGQIEALSMRIERLDETIVAQVRSSEAGRRLTSIPGVGPITAGALLAMVPDPGSFRSARHFATWLGFAPRQKSSGGKPRLGSISKQGNRYLRGLLILGAANVLRFTRKNAVSAWLAALRERRPFKVAAVALAHKMARIVWALMVKGGVYRAAPSAVATS

SEQ ID NO: 434575 - protein, 323 aa, unidentified
MAAEPVFVGIDVGKARLDVARSDQDEVLQLGNDREGIEELIGWIKEIGPQLVVLEATGGFEVPAAAALAAAGIPVVVANPRQTRDFARSVGRLAKTDTIDARGLALFAARVRPDVRALPTEEARALDALVSRRRQIIEMMTAEKNRLGFATKTVQKGIEKHIKWLERQLADVDSDLDTMIRKSPVWAAKSDLLQTVPGVGPNLARTLLAKLPELGRLSHRQIASLVGVAPHAHESGKFRGRRTIWGGRAPVRSALYLSVWSAAKWNPVIRLFHDRLRAKGKPPKVAQVACMRKLLTILNAMVRDSQIWDPSIPLEQLRTQHSC

SEQ ID NO: 434576 - protein, 311 aa, unidentified
MITIGLDPHPDSHTVAALDENGTTLASLTVSNNAEGLTQLHRFALPFSERTWAVEGAANRYILPFVSELLEQGELVHHIPPNLTSQYRARLSRKKNDVVDAQNAARALLANPGLPTFQPGKQQRELQDLSRTQRRLSAQLKANKMALNALDVNSPARSALAQVMVILEDQLNVLVKQMKALVKTLAPALLELQGVGPVVASVILGEIGNAGRFVNEGQFASYCGAAPVERGSGKNSRMQLNHGGNRRLNWALHIIALVRLRRDERSRNLIARLKARGKTQRASLRILKTYIARELFRYLRQAETLKTAIAT

SEQ ID NO: 434577 - protein, 329 aa, unidentified
MSKLSKKVIGVDVGSKFLTVSFNDDQNQDQIYNIGNNQRSILSFLKKICAEEYCFVIESTGNYSSRLLHLSLSSGFEASLINCMSVKHFSRMKNIITKTDAEDAKLIRLYGEMFRPEIYKAKSIEIEYLDQEIKLLNDLEEEKRRYGVKLKALRYNPQLNPDTEKHYERRLKQLDKEIREVELRLPQLQDEEFKEVKGLLQSVSGIGEKTSLQLMTATSGFRNFDSAGSLVKYFGLAPRIYQSGKKSYSPGKCRTSKTHIRSLLYVCSWTAMKHNTQCKALYERLLEKGKAKKLALIAVCNKLLRICFGVVKNKTAYQQNYQKNFKILT

SEQ ID NO: 434578 - protein, 386 aa, unidentified
MHHATTLPVPEETCIRGDCATLFVSLELSRSTWVATSLAPGSRKMSKHTLVGGDGRKLLDLLARLKTRAEQRIAAPVKVVTIHEVGLDGFWIHRLLEANRVESHVVDPASIAVPRRHRRAKTDAIDGETLLRTLMAWQRGEPRVCAMTVPPSPSEEDRRRVSRERATLLRERIQHTNRIRGLLFGQGITNYNPLHKNRRECLEELRTGDGRSLPAHLKAEVLREIDRLELVLRQISEVEAERDEMLRPAKASSPAALLMRLKGIGAEFAAVLYLEGLFRHFQNRRQLAAYAGLAPSSWKSGSIDHEQGISKAGNPRLRTTMVELAWMWVRYQPDSALSGWFRQRVGSERGRTRRIAIVALARKLLIALSRYVTHGEIPAGAVMKPV

SEQ ID NO: 434579 - protein, 417 aa, unidentified
MKDDSNASPIRYIALDIHKYYSVVAGVNRDGEEILPPCRVEHMNLEEWLGKHLLASDRVVIESTTNAWHVYDLLEPLVAEVLVANPIKVKQIACARVKTDNKDTLILARLLAANLVPTVWVPLQPVRELRQFVSHRRRLANMHTQVVNRMHSVAHRHHLNHPKGKDFQPKNTAWQQDASLSQLEKLQLELDMATRAHLEKQIEQMTRELGRMSHKEPWASDMLYLMQIPGCGVVTGMTIMAAIGDITRFENPKALASYSGLTPGLEQSGVKLRGKGITKEGRRELRWALVEVAWRAVRADPHWKRLFEELKKRMHPNQAIVTIAHHLLVVMWHVLTKREPYRHYSPERIAYKYLTWSWALDEEQRGGMTRPQFARYYLMRLGIGDELKRVALNPEFPYRLASVEEVLAIRPELLRSE

SEQ ID NO: 434580 - protein, 345 aa, unidentified
MDALNKTKRYVYFIGIDISKETLDIAVMVQGSILVHNTILNEPKAIKDHLLHLKASLKFTTRNAVAGMENTGIYGNHLINKLKTLKIDTVVDPPLRIKNSLGLIRGKTDKKDAERIALYLYKSRDVLRLRIPRRPIIEQLAGLATLRKRLQSFHIAMQVPLKETAGFVKKGLIEQNNRLCSRSTDALRLDIQDVEDSIEATWKADEETNRLMTLMQSVPCVGPVVALEILICTNEFKNIRTIREFASYAGIAPFPYKSGTTVYKKTRISKIANKKMKALLHNSAVLAKRFIPDIKAYYHRKMNIEGKHKMSVLNAIRLKIAARVYSCVKNNRLYEKIYEYRPLTE

SEQ ID NO: 434581 - protein, 346 aa, unidentified
MSEQGLHWVGLDVAKRTFDAAVACPGQRATAATFKRLPVQTFDRTREGVKELVAWLRHHVPAQMPLPVRAVMEATGSYSIELAALLCSECPELRPSIANPERTCAYRKSLGLRNKTDRMDACALAFYGLERQPDPYEPMSPAQAELRALSRCRDDFVETRKAHENQLAEGPKSAVVRKLLQKTVAHLNQTIETIENQMRNVIEGDETLRRDHQLLTTIPGVGFLTAAVVLAEFGDLRRFGRSRQIGAHAGMCASANESGESVSPAHLSKKGSARVRQALYMAAMSARNFNPPLRNVYQRLIAHGKEPMVALGAIMRKLLVLMRAIVISGIPFDACGKPKQKTLETA

SEQ ID NO: 434582 - protein, 352 aa, unidentified
MLIIGCDYHPSMQQIAYVDTETGEGGERRLMHRDGEAERFYRELKQRAIEVRVGMEATGYARWFERLLTELGFELWIGDPARIRARRVRKQKTDRKDAQLLLRLLLEGDGFPRIWVPSPENRDLRQLLWHRHRLVQMRTRIMNQLQAVAMNEGLRRKRALWSESGRKQLESFLLAPWATRRRQDLLELLDRLNPTIQELTAAVEKEAENKPEVQLLMSHPGVGPLTALAFVLIIATPERFQCGKQMGSYLGLIPCEDSSADQQRLGHISKQGSSLLRFLLVEAAQVAVRVNPEWRRRFLHLAMRRGRKIAKVAMARRLAVGLYWTWRKEWNYQQVVKFGSHVGQPELRHGVQ

SEQ ID NO: 434583 - protein, 404 aa, unidentified
MVNKKLYVGIDVHKRDQVSTILTMSVLKKKNNEWKKVKPILIKNNIKDYESLHKVIHRQGRNPSSVSIAVDHTGNYSLPIVHFLVSKEYKVYFLTNQSVKAAKERLLKEENKTDRLDSAILAYLLYLRDFHDLSLNISATQPDLESHASLLRSLVLQRAQYVRLEVQATNRLHQYLLVVFPEGEMNYFSQLLRIAPYYPTPKDILYNGLAGIENITEKDRESIIALAQDTVGVPGDPYRWIISDLCEQRSDAHLKVLLISRQIKKEVDAHPYGPILRSFPFVGDVIAATLIGIIKDISYWPNDKTLKKVLGVYGREYISGANPPVRRPGKSGNRAGKVALFQACIGCIKKTAPNNDFKDYYERQISHNKIWIQAMANTAGKMAEIMYHCLKTVRISVKSATCSV

SEQ ID NO: 434584 - protein, 412 aa, unidentified
MPFALPDALFFTGIDWAAETHAVCVLDAAGKIAAEFVIEHSADGIATLIRRLARYGDPSDLPVAIERPDGRLVDLLLEAGHPVVPVKPNAIKTWRDGEVLSGAKSDAGDAAVIAEYLRLRAHKLKAAAPYSDKTKALRTVVRARGDLVEMRVAATNQLAALLDAHWPGAKAIFADVESPISLEFLTCYPTPAAARHLGEKRMAAFCAKHGYSGRRTAAELLTRLRSAPAGALGEALTEAIRDAVLAAVAVLAALNASVKNLDRSTAAHLGEHPDSAIFTSLPRSGQVNAAQVLAEWGDARPAYEHPDSVAALAGVTPVTSQSGKHRAVHFRWACNKRFRVAITTFADNSRHASPWAAKIYNDARASGKDHPHAVRVLARAWIRVIWRCWLDGVPYDPAAHGAAAALAKQIAA

SEQ ID NO: 434585 - protein, 421 aa, unidentified
MSNSTLSKKLASVKPGTLFVGVDLALDRNTAVVLTERAEQLARFGFPNERDGYDHFYRRLEAVQERQQAPAVLVGMEPTNYFWKLLAADMEQHRPEYGYRLVNPYTVKKNREGDHLDRSKDDNRDAFTIGDLLRTGKYTETQLLRGAYAELRQHVTLYTRLQGDVRRQKALIRNIAGQLFPELPRVFNDLTGATALAMLRHHAAAAVVRSLSQEAFITGVRADLRGQRMQVAKLRRAHVLARRSVGLTDGVEALQLALRLHIEALEAVQQQSEAACTALVDTFLALPESEYLLSVHGLGTITAATILSEIGDPSHYTSAHQLIKLAGTQPVPNTSGRKSRSQTPMSHKGRPRLRTALFFAVMRLVRMDEVFARQYQHLQTREKNPLTKMQALGVLMNKLLRILWALMQGRTCYIPGFQGAA

SEQ ID NO: 434586 - protein, 343 aa, unidentified
MYYIGLDVHKKTISYCVKDAAGLVYREGKIGSTRRELDAWIQTLPQPRMMAMEATIFTGWIYDYLLPHAEEVKVAHPLMLRAIAASKKKNDRIDAGKIADCLRCDFLPECHMASTEIRDRRRTLRYRNLVMRQMVQMKNRVSGLLMESGVSYDKQRLHKMGYFSELFSTNEEISDSIRPLLRLGREHILRGQRLDRALISSLERDPLLSERLRRLRTIPGVGPITALTWALEIGDYTRFPSVKEAISYCGLCSAEKSSADKVMRMPISKQRNKHIQHVLVEAAKLAPRYSHELALLREKEIQRGNKNRATLAVARKLVAYMLAVDRRKQDFVPAEELAAKAVA

SEQ ID NO: 434587 - protein, 455 aa, unidentified
MSKRKPSRQPHGSPSARVLEPNAAGVDIGATEIYVAVPTDRDPQPVRHFGTFTRELEQLADWLQPCGMETVAMESTGVFWIPLFQILEDRGFRVCLVNARHVKHVPGRKTDVADCQWLQYLHAVGLLRASHRPPQTICALRSLGRHRESLVQMTAIHIQHVQKALDQMNIQLPHVISDITGTTLLAIVDAVLAGERNPKQLARLRDPRIVASEETIAEALIGDYRPEHLFVLRQSLQAYRQYQGWIADCDREIERLLGKLESRLAPSQKLLSPPKDRHKPRRNEPRFDLRAYLYRIFGVDLTEVPGVNSLTAHTLLSEVGPDLHKFPNAAAFASWLGLCPDNRISGGQILSVRTRQVVHRLAVALRLAAQSLHRRQAYLGHYFRRLRTRLGTPAAITAAAHKLARVLYHIITTRQPYDQSVFAVMEGRAHQRQFIRLKKQAAAFGFQLMPLACVP

SEQ ID NO: 434588 - protein, 383 aa, unidentified
MCSARVARLLSLQQPRGDGDEGPLLRSGKKPALENHSPQTKGATDMASLTLFVGLDYHQSSVQVCAMDASGKVLVNRRCPNCRQTIVAVVHRFGNRVQAAIEACSGAAELADELVQHEGWSVDLAHPGYVARLKRSPDKTDFGDAQLLADLERVGYLPRVWLAPEPLRELRRLVRYRQQLAQQRRNVKLRIRALLRDLRLVVPAGRSPWTRSWFAWLQTTDVFAEQTRWIMDRHLAELKRLNSEVRDVEARLAIVVKDDAMVQTLMQTPGIGLITAVTLRAEIGRFDRFRSGKQLARFCGLSPRNASSGQRQADAGLIKAGNPQLRAVLMEAAHRLMRYEDRWVRLGHSLKSQGKANSLVVVAVANRWIRWLYHQMPSLDLAA

SEQ ID NO: 434589 - protein, 326 aa, unidentified
MQGKDVPEQETKLECNAGIDVSKDWLDAHVRPAGQSLRVANTPEGIRKLKRWLMRFDLALIVVEATGKWHRLVQRSLFASGLPIAVVDPYRVRLFAKAQGILAKTDRLDARVLAHFAAVMTPAIRPPAPEALDHLKELVGARASAVAEETALKNQLSVAKDGFLVRQLKRRIERIGKNIAALERESLARIKADQALARRYAILTSIPGVGVVVAATLLTQLAELGTCTAKQIGMLAGLAPLADDSGARQGVRLIRGGRPAVRRALYLAALAAARFGADLKTFYQRLIEHGKTAKLATIAVARKLVVLANTLIAEDRTWQLHPPNHA

SEQ ID NO: 434590 - protein, 417 aa, unidentified
MQYALPLVLPDVPAGGVCAGIDWATADHVACVVDMTGRVTDRFSAAHDKAGIAALITRLRRSKVTEVAIERGDGPLVDALLAAGLTVVVITSRQGKNLRSRFGAAGAKDDRFDAFVLADTLRTDRARLRPLVPGTPATISLRMTVRARRDLVRHRVAVCNQLRAHLAVAFPAGITLFHDLDSPISLAFLARFGSQDAAAGLDEQAIGAWLATIAVRGRPAPASVLHARLQAAPPGATGTDGAAQAGITAALTAMLTALSAQIKALATQIAGQLAAHPDAHIFTSLPRPGTVRAARLLAEIGDCRSRFPDPESLAGLAGVAPVTRRSGIRIAHGFRWAVNRQLRDALCDFAADSRHASPWAAAIYDDARARGKDHPLAVRITARAWTYVIWRCWHDGTAYDPAKHNALQAVLARQQDQ

SEQ ID NO: 434591 - protein, 348 aa, unidentified
MTIVEPTRAVTGGVDTHLDVHVAAALDELGGVLGTESFATTPAGYGELLDWFESFGPLARVGVEGTGSYGAGLARSLMARGVEVVEVDCPNRKARHRAGKSDTIDAVSAARDALSGHANGQPKGGTGPVEAMRVLLIAKRSARSERVRTLNQMRHLVFVAPDDIRGRFHGLNVYHLTRQTAATRPRPGNQVDYVTLMTLRELGRRALALEDEIDRLDDLLEPIVADHAPGLLGLFGAGPFVAATLAVAAGDRPERIRNEAAWAHLCGVAPIPASSGKTTGRYRLNRGGNRQANSALHRIVLVRMGHHEPTRVYAERRRAEGRTNPEIMRSLKRYVARETFKHLPGGDT

SEQ ID NO: 434592 - protein, 464 aa, unidentified
MSKKTGRRATGSRRRRRVRVHVINPNAAGIDVGSEVHYVAVPPDRDTESVRSFTCFTADLNSLADWLTQCGIKTVAMESTGVYWIPLFQILEARGFEVLLVNARHVKHVPGRKTDVLDCQWLQQLHSYGLLRGSFRPEDRICVLRSYIRHRDTLIKSAAAHLNRIQKVLEQMNVQLHKVITDIAGRTGIRILKAILDGERDPVKLAQLKDYRVKSSTETLAKSLEGDWREEHLFALRQELELYEIYRHKIIECDQKTLTYLNTFESKPEPGEKKLPQYKHGRKKAYGNEPVVDLRTPLYRMSGVDLTALAGFDVLTVLTLISEVGLDPLKWPTEKHFSSWLGLCPNNKITGGKVYSTKSRKVVNRAANAFRMAAQAVGKSHTALGAYYRRMKTRMGPAKANTATARKLSCIFYRMLRYGKEYVDPGVQYYEQKYRNRLLKNLKRRARLLGYELIESQEPKAAVS

SEQ ID NO: 434593 - protein, 427 aa, unidentified
MNYNQNHKLSQITPSTLIVGIDIAKDKHVARAQDDRGFEFGKRLIFDNRIHGFEQLLNWISKLQKEHGKNELIIGAEPTGHYWLSLAYYLRAKGINLVLVNPMHVKKSKELDDNSPTKNDTKDARVIAQLVKDGRYSVPNLLDGIYAELREGIKLRDQLVKQLIVVDGRIQNHIQRYFPEFNDVFKDWEGKTALFTLREFPFPSDLQDMTPEEVLAQWKTVINRGVGIKRAIQLLEKARKSVGIKVGLRFARKEIHSLLDQYELYQRQLTELDKEITEVMKDIPGAQEMTNIKGLGTITVATFFSEVGDLTKYDHPQQLVNMAGLSLREHSSGKFKGQTRITKRGRKKLRKALYLAVRPLVASNPTFKALHHYYTTRPNNPLKKQQSLIALCGKLLRVLFVIGRKQCEFDGNKLLKGLPQIEALQAV

SEQ ID NO: 434594 - protein, 400 aa, unidentified
MLSIGIDVSKGKSTVCGMKPGGEIVYAPFEVQHTREGMSELVSLLRSSGEEVRAVLESTGSYHCPVVAALLENGIFVSVVNSLRMKRFCSQSIRKVKTDRIDAMQIALYGLAYWQELQPTKLPEDTYRELQLLARQYYQMTSLLIKAKVDFNAICDQVLPGMQELMNDHAGRHKLSDFVLRYRHTTHILEMGETRFRKDYCKWAEKKGYRNCERMAALIFATAQNGIPVLPNAPSTQIVITEAIRVLHTVEASRDAILTQMQALAKTLPEYSLVREMPCIGDTLAPRLIAEIGDVRRFHSKRALIAYAGIDAPPYQSGKFCANNRHISKRGNRYLRKTGYEVMQSYVMHKPANDPIFTFIEKKRGEGKSGKLAMVAGLNKFLRVYYGKVTELYRSLPAIE

SEQ ID NO: 434595 - protein, 424 aa, unidentified
MLGVGIDWAGSFHHVALGVPGKGVIEQFRVDHGPAGVQRLIARCLELEPDPAEVRVVLETRHGLLAGALVDAGFTVLPVNPDLVARRRGPAKKKDDSQDARICALMALDAYLDLRQLIPHGEIGTELRAIARDDERAARDERRIGNRLRTGLLAVCPAAIDIADGDLGAPAFLKLLERWLSAEALAAASRQEVEALARSARHGWPGRFTDRVAGAMAAPRLAPRPALARAREGSIRLAAAQLLAIRAQRRAWERRMGELLPGMPRYGRSKTPTDPDPGKAFPDGEIYLSMPGLGDRLAARVAGEIGEHYEQFATPNALQCYAGRAPVTRRSGRSEFTVARRLACNRPLGEAVQQWAFCSLTRSAWAMEFYDEKTAVGDSHHSALRKLGNRWLEVLWHCLHKGVCYDEAVHAANRKRNRPPAAAA

SEQ ID NO: 434596 - protein, 352 aa, unidentified
MQYIAFDSHKRYNLASVEDHVSGGIFDRRIEHERGALAEFLGSCEPGSPVAVETIGNWYWIIDEIETAGMKPQLVHARKAKMMMASSKKTDKLDAHGMNRLQRVGTLPTVWIPDGALRDRRELFRTRMTLTRQRVSTKNRIHATLAKYGIRIEDTSDVFNKKGRSAIEEALCLLPTHTLFAMQILLSELDELETKIVAFEERIVATFSETEEIKLLRTIPGIGAILSEVIASEIGDISRFASPARLASYAGTTPSVHASGGRYRYGRAPADTNHYLKWSYAEAANTIMRVRRRLKYHHVADLYDRIRSRKGHSIAIGAVSRHLAEATWSILTKGEPYREPARKKEAVSSTNG

SEQ ID NO: 434597 - protein, 350 aa, unidentified
MEHYAGLDVSLKETSGCIVDGAGKIIRETKVASEPEALVGYFSSLEIKVVRIGLEAGPLSQWLHAALTQAGYAVVLLETRHVKAALSAMTVKTDRRDARGIAQLLRMGWYRPVHCKTLPSQEVRAIITARKTLLGKLIDIELSMRGILRGFGLKVGAVTRKSFEIRVRELMAGQATLTTIMEGLLNARATLVAEVAKLQKELLTIARADGVCRRLMTVPGVGALTALTFRTAIDDPTRIAKSRDVGPLFGLTPGRYQSGETDIVGKITKVGDVMVRTALFEAANVMLTRSTQMSGLKAWALDLVKRRGTKRATVALARKLGVILHRIWVDGSTFRFAKEGAAMPALITAK

SEQ ID NO: 434598 - protein, 416 aa, unidentified
MKKVQDTRGYERYMALDIHREYVLVGAWDEEKDWVLMPRRVSTEKFPEWAKKNIRAGDIVVLETTTNVWTTYDIVAPLAGRTLVANAAEVKEIANARVKTDKEDIKKLLKLLIGGIVPEVWVPPMEVRELRAFISYRGRLVKTSAMIRNRLQSLLHKHNLKLSETGLLDQVWWEGQKEISPLEKMQIRQELALLQEVDKLKMAVDEELQRQSTGAQWGKPALQLMQLPGVGYIVAMTVLSAIGDISRFESAKKLVGYAGIGAGVHDSGKTHKDKKITKKGRRELRWAMVEAAWRAVGMSPFWKAEYEKYLSRLRKKNQAIVVIARKLLVAIWHVLSKEETDVHASEEDLAYKMLLLSWSLKEDTRMGLTYKQFAKYALMQLGVETDITRFVRRAVPRRLAPKEEVLARMTELGLTA

SEQ ID NO: 434599 - protein, 341 aa, unidentified
MKPELSVVGIDLAKSVFHLVGLDERGKIIVRKRLTRGEVMPFMAKLPRVLVGMEACGGAHYWARQLREQGHEVKLMAPQYVKPYVKTNKNDLRDAEAIAEAVTRPNMRFVPIKNVEQQDLQALHRVRERLMGARTALVNEMRRLLAEYGIVLPTGVNAFRNALAAKLEAEQAKLTPLSQELFGKLRAEFKKVEAEVAYYDEKLQALATTHPESQRLLTIPGIGPVTATALIAAVGDVGVFTNGRQFAAWLGLVTKQYSTGGQTRLLGISKRGDRYLRKLLIHGARATLRWARTKTDSRSQWIRGLLERRGWNRTAVAVANKNARIVWALLSRGGLYGESTH

SEQ ID NO: 434600 - protein, 426 aa, unidentified
MRLFARGTERCYGAGGEEMAPSSLREPMECPDAPAERPRPAPGQALSRSLVSLDQDSTIIAVVEMSQSSWLVAGMLPGIERQPRKKLEPSAERLLGLLHRWRDEAVKAGRQITRIALAFEAGRDGFWLARWLRARGVEAHVIHPSSVAVSREHRRAKTDRLDTELLKRGFLGWLRGERGHCTMARIPTIAEEDAKRPNRERECLVGERTRIVNRMKGTLARLGIRNFKPTLRKAAERLATLHTPEGSALPPNVSAELQRNMARLGVVVSQIKEIEGARQKRLEQEPETEPHAMVRHLARVVGIGIETADMLVNEVLSRPMRDHKAVARYAGLTGSPDESGAKRREQGLAKAGNARVRRGMIQLAWRFLQFQKESALALWYRARTADSRVGTRKTMIVALARKLLIALWRLVTTGETLEGVVLRPAG

SEQ ID NO: 434601 - protein, 326 aa, unidentified
MSKVIGIDISKQTFDVSFREETKVVHKVYDNSEKGFKALKLRMGHLKETRVVMEASGPYYVNLASYLHSHGINVSVVNPLKIKRFGQMKFYRAKTDKKDSSMIMEYGETEYGSLAVWKPEGKGVQKLKQMRTAVELLRKQLSQSKNQLEAFKSSGLLDNEVDKGLKKVIGATEESIKEIEDQMLIVCQTHYKESLELLTSIPSIGNKTAMMLIAMTDNFSKFGHYKQLIAYVGLAPRVYQSGTSVNGKGHICKMGKALIRKLLYMCSWTAKFCNKACREMYERLKAKGKPERVIKVAIANKLLKQAFAVVTSKQEYIENYQPKIWI

SEQ ID NO: 434602 - protein, 377 aa, unidentified
MLSARPAGACRPPPDQQKELAITTIAHPERPRVTVGVDTHLDVHVAHAKDQLGRRMETVSIPTTPAGYQDLLAWARGLGEVEAWGVEGTGCYGAALTRFLGDQGQVVLEVNRPDRQARRRRGKSDPVDAEAAARAVQAGEVTTLPKAGTATVEMIRSLRVARQTAIKARTQAINALKALLVTAPAQLREQLRGRSAAMLVRQAAALEPGPLVTPTAAAKLALRCLACRYQALHAEVATLDTELARLVAKAAPGLVARFGVGPDSAGALLVAAGDNPGRLRSDACFSMLCGSSPIEASSGKTRRHRLNRGGDRQANAALYRIVVVRLRWHQPTKDYMARRLTEGKTTKEIIRCLKRYVAREMFTVLNQMDQDALTPAT

SEQ ID NO: 434603 - protein, 349 aa, unidentified
MNFYTKQHQFYAGIDLHARLLAVCILDQAGQIVCQTKIPADKRILLDTLAPYRADVVVCVECLFAWYWVGDLCTEHGIPFVLGHALYMRAIHGGKTKDDDIDAEKIGRLLRGGNIPTAYVYPKGMRETRDLLRRRNHLVRKRAQLIAHIQITNAQYNLPPFAKKLIYAHNRAEMQVAPRFPEGPVRKSIEVNLALVDALDVQLADLELYLERTVKVEDPQSYHLLKTIPGVGKILALILLYEIHTIRRFPTAGDFLSYARLVRCVHKSAGKPLGHGGKKIGNAHLKWAFSEAVCLLVRCCPAVKAWQQRREKKHGKKKTLGILAARLGRAVYHVLRRGQAFDLQKFLGQ

SEQ ID NO: 434604 - protein, 402 aa, unidentified
MNAVGIDVSKGKSMVAIMRPFGEIVSTPFEIKHTASDINSLVELINSVEGESRIVMEHTGRYYEVLAHQLLEANLFVSAINPKLIKDFDNDSLRKVKSDKADAVKIARYALDKWQNLKQYNVMNELRNQLKTMNRQFGFYMKHKTAMKNNLIGILDQTYPGVNTYFDSPARSDGSQKWVDFASTYWHVDCVRKMSLNAFIDHYQNWCKRKKYNFSQSKAEEIYGKAKELVPVLPKDAITKLIIKQAVDQLNSASTTVESLRTLMNETASKLPEYPVVMAMKGVGTSLGPQLMAEIGDVSRFTHKSAITAFAGVDPGVNESGTYEQKSVPTSKRGSADLRKTLFQVMDVLIKTHPQDDPVYQFLDKKRAQGKPYYVYMTAGANKFLRIYYGRVKEYLSSLPES

SEQ ID NO: 434605 - protein, 403 aa, unidentified
MNAVGIDVSKGKSMVTILRPFGEIVSSPFEIKHTSSDIHSLIKLIHSIEGESRVVMEHTGRYYEALAHQLSAADLFVSAVNPKLVKDFNNDSLRKIKSDKADSVKIARYALDKWQSLEPYSITDELRAQLKVMNRQFHFYVKQKTAMKNNLIGLIDQTYPNANTYFNSPTRSDGSQKWVDFVSTYWHVDCIRKMSLNAFVEHYQNWCKRKKYAFNKSKAEEIYTKTKELVPVFPKNEITKHIIRQAIDQLNSTSVTVETIRTLMNETASKLPEYSIVMQFKGIGPSLGPQLMAEIGDVTRFTHKGALTAFAGVDPGVNESGSYAQKSVPTSKRGSSNLRKTLFQVMDVLIKTMPQDDPVYQFIDKKRAQGKPYYVYMTAGANKFLRIYYGRVKEYLSVLPDPS

SEQ ID NO: 434606 - protein, 346 aa, unidentified
MKILALDLGKYKTVGCAYESESGAHGFKRSYTTPAALQKMVQEVNPDRVVIEVCSIAGWVCDLMGSMGIAVQVANTSDDAWRWRKVKQKDDRRDALKAARLSAVNQLREVYIPANEVRQWRALITYRQHVIRRRTKIKNHIRDLLLREGQILGRGSSCWSEAGIKQLEEQARPFSECGPAELWRGELQLELEQLREIQRQVATVTAQLDKLGAGDVRVQLLRTVPGVGPRLAEAIVALLDQPQRFRKASQVSGYIGMVPKALDSGETERRGHITRQGSRLVRSLLVEVAWAGLRHNAWVRQTYQRLSGGKKARKKIAIVAVGRKLLVKCWAMLRDNRAWDWQPQIT

SEQ ID NO: 434607 - protein, 428 aa, unidentified
MDELDRNRLEEFRQLRQEVRHSEEYLIVGIDIAKDQHHAFFGTATGKTLLRRLVFSNDHEGFRKLLDHAEALRVRHGLKKVVYGMEPTANYHKPLGEYLIILGRTVVLVSGVTVKQNRESLDGRWDKHDVKDSANVADLISQGKCLYYDHPAARLRGLRNLLSLKRRLKKQEHGYKVRIRNNLIAQYFPEMDRDYDRLGAEGLSIMRWCFPPSQMTVLDVDPFIERVTSRRIRIEKRRRLEGIWEKAGESIGCDGVPGVEHEARVMVEGLKQIREMIKETEDKIEELCKEFPEYKYLLTIPGYGPDVSAKVLGAIGDPDRFQNGKQVLKLAGLDLSADRSGKDSAKAIPQISKRGKADLRYALYQAALIASTRNQDFMRYYTRKLQGREREKGIHTKMWVKLSAKMLLIAWTLMKRKEVFDPAYLNVE

SEQ ID NO: 434608 - protein, 342 aa, unidentified
MKISVLGIDLGKTSCSIVGCDGPGGVVLRRRVRRENLVDVVAELAPGVVAMEACCGAHHLGRVFGGAGIEVRLMSPEYVRPYVKAQKNDDRDAEAIAEAATRPTMRFVPVKSEAQSDVQALHRARERLVSERTALINHLRALLLERGIVVPKGRRKLEDDLSVFADEEGGTLSPRIRLLIEDLRAEWRQLDERIAAFDAEFAKMAREDEAARRLATIPGIGVINATALVAALGDARSFGRGRDLAAWLGLAPRQMTTGGKPRLLGISKRGNRYLRKNLIHGARAVLRRLVHQETPLGGWVRALAGRAHTNVVVVALAAKLARIVWAVLRKGRPFDPSAAAMG

SEQ ID NO: 434609 - protein, 345 aa, unidentified
MTVYIGVDFHARQQTVSYLTTEEGEIKRLQLEHGQPAEVRSFYQQFAGQQVVVGFESSGYAAWFEELLEELGHEIWIGHATAIRLFARRRQKNDRRDADLILDLLLRGDFPRIHRYSRESREVLQQLRYRQRLVKMRTMVVNSLLFMASSRGVSLRTQLKSRRGLERLRQLALPQALTEQRDELCQLLLELKTKIEKVENWLAAKAESDVRVQRLRTHYGIGPLTGLCLVHTLECVERFANPRKVTAYVGFDPVEDSSGERRRIGSISKQGSRLLRFLLVEAGQVAIRKDQDLARIYHRVLVRRGHAKAKVAVGRRLLVRAFIMLRDEIDYAEFQRRGVAARSSR

SEQ ID NO: 434610 - protein, 413 aa, unidentified
MDKIYDICCGIDVHKKLIVACLNHKRKKELREFGATTRELMELAEWLQKNNCEIVAMESTGSYWKPLYNIMESYGLHVIVVNPAHMKAVPGRKTDVKDAEWIAELLQHGLLQPSYIPSKYQRELRELVQYRKSLVGERTRELNRLQKMLEGANIKLSGTVTNINGKSARKILEYILSGNEIDEKKYDEMYEEKLIAHNLKASKEHILDDLKGFMSPLQRRMLKELLQHLDELNVHIENLNDEIDNFMKPEEKQASQVIQDVTGIGNTSAQTIIAVIGTDMERFPSDRHISSWAGLCPGDNVSAKKRKSGKIRKGNALLKSTLVLCAHAAVRHKSSYFHAQFKRISTHRGKKRAYVAVAHSILIAIYHILKDGVKYQDLGAEYYNQFNAERKIHAYLKKLKALGWEPPKEAVPA

SEQ ID NO: 434611 - protein, 318 aa, unidentified
MNEIAEHTHFVGIDVSMDWLDVHVLPGNLRCRVANGSRGIWSLIGKLSDYDEPLVVMEASGGFEARALETISSAGIAVAMINPRQVRSFARALGILAKTDRIDAFAIARYAEAVRPEPRMAAHRELGEIKALMTRRRQLSDMLTEEKDRRCRVTSGLVRRRLLVSMRNLKKEIELIDREIDRLVVADEVMREREALLRSTPGVGKIVARTLIAFVPELGALSRRQIASLVGVAPFNRDSGTMKGRRTIWGGRANARAVLYMGALVAARRNPILSAFYDQLIARGKRPKVALVACMRKLLTILNAMMRNGTPWEEPVRT

SEQ ID NO: 434612 - protein, 465 aa, unidentified
MKTKTYKSKKRQQKISLEQGWAAVNPHAAGIDIGAREHFACVPPDATAQNVRSFGTFTADLEALADWFHQCGVSTVAMEATGVYWIPVFQILEARGLEVILVNARQTKHVAGRKSDVQDCQWIQRLHTYGLLQASFRPADRYCVVRTYLRYRDELVSARSTQCQHMQKALQQMNLQLMQVLSDVTGLSGLNIIGAILQGERDPVKLSQLVDRRVRATPRALQKALRGDYRPEHLFVLQQAFALYHTYEEKIQLCEQQIVQAMAELPDQVDVRRQPVPARKTGGKPGLDQMAGLNMRACLYQKTGVDLTAIEGIGVLTALVMFTEVGPDVSRFPTEKHFCSWLGLCPDNRISGGQVLSSRTRRVVNRLADALRMAATTLERSPSALGGYYRRMKGRLGAAEAVTATAHKLARIIYRLIKYGQAYVARGLADYEKQFQHRRLRALQKTAKAMGLELVASHSIPQGVS

SEQ ID NO: 434613 - protein, 372 aa, unidentified
MGDDSVAYVSFDTAKLHHAVAIAEEGRTGEVRFLGEIENSEAAAVKLVKKLSQRYRRLMFCYEAGPTGYELHRLIGRLGHECMVVAPSLIPKKAGDRVKTNRRDALELARLLRAGELTAVWVPDVRHEAMRDLTRAREAAVADLVSKRQQVLSLLLRLGRHYEGKRHWTQMHMKWLLSQKLAHAEQRIALEEMLLAVREAQGRVARLEQAIRTALPDWSLAEVVTALMAMRGFDLVSASAFLAEIGDLSRFATARELMGYLGLVPSEQSTGETTRRAGITKAGNRRARRILVECSWSYRHPPRLGKEKLAKVEAAPRAVREIAWKAQHRLTARYRALTRNGKKPTVVVTAIARELSGFVWAIDRAARPATVR

SEQ ID NO: 434614 - protein, 336 aa, unidentified
MCTLPVIVGLDYSSGTVQVCVLNQQGEVVGNRACANDWQSIVKFAESRGTVVRAAIESCSGAADLADELVMRAGWHVDLAHPGYVARMKQSPDKTDYQDARLVADLERVGYLPRVWLAPEPIRELRRLVRYRQQLVEQRKAVKLRIRALLREQRCRPPEAVNPWTRAWLAWAEKDAELGVQSRWIMARHLQELRHVVDAIKQAEKRLTEATADDPMIATLRKQPGIGPVTSWTLRAEIGRFDRFRTGKQLARFCGTSPRNASSGERVADAGLIRAASPTLRATIIETAHRLIRTDARWGQLAARLRARGKPGSVAAAAVANRWIRKLYHQMREQAA

SEQ ID NO: 434615 - protein, 347 aa, unidentified
MGYFAGLDVSLEETAICIVDDAGRIVREARAASEPEALVAFFGACGMAMERVGLEACSLTAWLNQGLTAAGIAAICIEARQAKAAMGAMPNKTDRNDARGIAQIMRTGWYRAVHVKSPSCRSWRALLTARRMVLNKRRDVENGIRALLREVGLKVGTPSRKDFPARVRELAADDPVLASLAGSLLSVIEVMTQEADKLTKRVLDAVRVEPTCRRLMTVPGVGPLTALAFRATIDQPDRFRRSRDVGAHLGLTPRRYQSGETDVQGRISRCGDELARTALYEAAHSLLIRSTKWSALRAWGMNIAKRRGMARARVAVARKLAVILHRMWVDGSEFRWGKQAAAPVAAA

SEQ ID NO: 434616 - protein, 454 aa, unidentified
MAKHRKNKKAHGLVAAPVMEPNAAGVDIGATEIYIAVPPDRDTQPVRRFAAFTEDLKAAADWLERCRIETVAMESTGVYWIPLFQILETRGMKVCLVNARHVKNVPGRKTDVSDCQWLQYLHAVGLLRASFRPSGQVCAVRSLMRYRESLVGMAAVHLQHMQKALDQMNLQLHHVISDLSGTTGMAILDAILCGERNRLKLAQLRDPRIKASPETIAKSLVGDYRREHLFTLRQSVTAYRSYQQLLACCDVEIEQMLGEFPDGAGPDTPVLADPKDRHRPRRNEMKFDLRGHLYRIFGVDLTEVPGLNALTAHTLLTEVGPDLSAFPNVGAFASWMGLCPDNRISGGKVLSSHTRKVNNRAARALRMAAQSLFRSQSWMGQYYRRMRAKLGAPKAITASAHKLARIVFHMLTNRHAYDETVFAQQEIQNQHRLQQRLMQQAKKHGFQLIPIAQN

SEQ ID NO: 434617 - protein, 394 aa, unidentified
MKLVGIDVGKNSHHFCVMDKETGELNVTPSSFSNNKEGFDSLINSLKPYSKKSILLGMEDTGHYHVALLKFLLSKGYTVALINPKTTDLTRKMEGGITKNDKLDTITICDVLDTPERKKQYRITKVDRFDLYEQRQLTRHHHNLKEELNVYCNRLQKSIDLVFPEFNTLFSSKYGVVYMNLLKTFGSAEAIASTDIRTIRKCFEIKGRGGRISLTPEKLKECAKNSIGISSEVETIQIKHLVSQIMLIKEQIAEIDKKIEEFSIKNNSPILSIPGISHFSGTSILAELGDIGNYSKPSQIIKFAGVAPYHYESSQYNAQHTAITKKGSKYLRKTLYQIILPVINNNPVFKKYYRLKISQGKGHRCAQGHCIRKLLRIIYHLLETGQSFDPALLR

SEQ ID NO: 434618 - protein, 354 aa, unidentified
MSGEKYIGLDVHQATISVAVVDSQGKLIMESILETKASTILDFLAGLRGTLCVTFEEGTWASWLYDLLKPHVAQVLVCNPRKNTTLKRGNKSDKIDARKLAERLRLHDLKPVYHGETGVRMLRELARSYLTIVKDLSRVMNRLKALYRSWAIPCAGRDVYYTRHRSEWLDKIPEAGTRRRAEQLYQQLDMLQRLRQQARRELLAESRKHTITTKLRQIPALGPIRSALAVALIQTPHRFRTKRQLWTYSGLGLEIRDSGEYQFVKGQVRRKKQVWIRGLNRDYNHDLKGLFKAAAIRASMQPGPLQEFYQRSLAKGIKPTMVRLTLARKIAAITLTVWKKGENFDAEKLKPQAA

SEQ ID NO: 434619 - protein, 373 aa, unidentified
MSDYSAFVGLDVHKDTIAVAVADAGRTGEVRFWGEIANTPDAVASMLRKLGGRHPLMHFVYEAGPCGYGLHRQIMAKQHHCEVVSPAHTPRKPGDRIKTDRRDAIILARLSRAGELTSVWVPDTIHEAMRDLIRLRQAMVKDLRAARQRTKSFLLRHGRVFKGTSWKRSHKIWLGNQSFAHPAQQIAFQSYLNAVDQAQARRDEVDVQLHHFTADWSMAPVVEALQALRGVAFITAVTVVCEVGDIRRFAKPRQLMAFLGLVPGERSSGETRRQGGITKAGNVLARSVLIEAAWSYRTPAKIGAQMMLRQEGIPQAAKDIRWKAQVRLCGRYRRLMARGKKSALAVTAVARELVGFTWAIAHITEPTSAEGVA

SEQ ID NO: 434620 - protein, 341 aa, unidentified
MNIAILGIDLGKNSCSAVGLDVSGRVVLRRRIQRPTIVSLAAKLPSCVIAMEACCGAHHLGRLLSGQGHEVRLMSPEYVRPYVKAQKNDDRDAEAIAEAATRPTMRFVALKSEQQLDMQTLHRARDRLVKERTSLMNQLRALLLERGTVVPQGRARLKLHIKAIVIGDNCGLSDRIGMLISDMLERWDQLDQRIAAFDAEFLAEARHDEAAHRLTSIPGIGALNATALVAAVGDANTFSRGRDLAAWLGLVPRQMTTGGRPRLLGITKRGSKYLRKMLIQGARSALPTLSRSNTRLGGWLRGLLARSHSNTVVVALAAKMARIVWAILRNGTTFEHQPGAA

SEQ ID NO: 434621 - protein, 317 aa, unidentified
MSPPTFVGIDVAKDHLDVHCLPAGDAFRLANDDAGAAELTQRLRGLAVALVVLEATGGYEAPAAAALATAGLPVAVVNPAWVRDFARSKGRRAKTDPLDAALLAHYAQAMRPDPRPLPDAQQQELTDLLARRRQLVAMRTAESNRLPTVTSARVRRNLQAHLRWLDRQLRSLDGDLEQAIRASPVWRQREELLQGTPGVGPVTARTLLAELPELGRLSRQQIAALAGLAPLNRDSGRRRGYRCIGGGRATVRCALYMAALTASRCNPVIQKFHSRLRQAGKPAKVALVACAHKLLTILNAMARTGQPWDERRALQTT

SEQ ID NO: 434622 - protein, 399 aa, unidentified
MNAVGIDVSKGKSTVAIMQPFGVVAASPFEVSHNGQELKELVERVKLLPGETKVVMEYTGNYYEPIAQYLHNEGIFVSVVNAMLLHNYSGNSIRKAKTDKKDAIRIAQYALDRWLDLREYIPDDEIRRSLKLLNRQYTTLCKVKTMLNNNFISLVDQSFPGVNKLFTSPQRSSDGHIKWVDFVIKFPHCDCVRGIPRSAFKDKYYRWCNKNGYYYSDKKADTIYDYSKTLIATLTNSDYIASLIGQSATQLNCACETLSELQKQMTALSQQLPEYDVVMEMFGVGKVLAPQLIAEIGDTRRFHSRKAITAFAGLDAPPYQSGNIDVKSRSISKRGSPHLRKTLFQVVDVILKNSPADEPVYSFLDKKRAEGKPYKVYMMAAANKFLRIYYTKVNEALNT

SEQ ID NO: 434623 - protein, 366 aa, unidentified
MASLPSGPGVVHVGMDTSMREIVCGVLRPGMEVPAVERIPNDEESVRRLIGKLGSRHLLAVCCEAGPSGYELHRLITSMGVACQVIAPSLVPKGGSERVKTDRRDAVRLTLGLRAAILTPVRVPSPAEEAVRDLVRARGDLLDDRKRMQQRLNAFLLRHGRIWSGGAKWTIAHRLWIGRQQFAEDALQEALDAYRAGLEAREAELRAAEARLSAWAGREPLAPAVARLSGYRGIAELTALTLAAEVVDWHRFPTARAFMGFTGLIPSEYSSGARTRRGSITKAGPEGVRTALVESAQAYRYRPAVGARLQARQAGAGAGTLARSWKAQQRLHATWKKMTARGKPHGVTAAAVARELAGFVWAEMTS

SEQ ID NO: 434624 - protein, 407 aa, unidentified
MLFIGDDWAEDHHDVEVQDEQGRVLRRARLPEGMAGITEFGELVGRLLSEDGQAADVLVCTETDRGPWVNALIAAGYRVFSVDPKQAHRHREILSSSGAKSDKGDARGLADMVRTRRHQLREAGGDSEIAEAVKVVARAHQTMIWERTRHMLRLRAALREYFPAILAVCDTVDLSLTSRPLLVLLDKAPTPELAAKLTARQILPMLKGCRNKDAKAAQIQQILRGENLGQPPVVTRAYAASVRSSVAVLMVIVEEITHLETEVKAHFGQHPDADIILSQPGLGPILGARVLAEFGDAPGRYRSSKDRKNYAGTSPITRQSGKMRIVAARYIHNNRLVDALQGQASCAILHDPDVRGYYDQLRARGTKHNAALRQVANRLVGVLHGCLNARTRYDRNTAWAHRHTAAA

SEQ ID NO: 434625 - protein, 351 aa, unidentified
MTAKYYLGIDLHKMFAYWHLTNNEGDMLWQGKVRSNEKDTRSKLGMLSIPLNNTVAAIESVEHYGWYANILSECGVGEVKLANPHKLRLIAENPMKNDKKDAEIIAQYLRSGTLPESYLAPKEIRDLRELVRTRMYLARNRTSAKIRIRNALSKHGLSCSCRAIDGGKAREWLKTTPLLRDYALEVESLLNFISAIDSEILMFENEMKNRAKQYPEVKILKTIPGIADIRALIIMAEVGDFSRFPNPDKLAAFAGLVPRSYSSGGKERFGRITKRGSSLLRHAMVQAAQQAHPKWGDLYTFYESVKERTHTGAAKVALARKMLGICWHLVRKNESFKTRFAIEPAGSVNKV

SEQ ID NO: 434626 - protein, 482 aa, unidentified
MAQRKRSTYERLQQGQLNRAQRRELGQRLQAPDPGLTVVHPDAAGIDVGNASHFVAIPPDRAPVPIREFGAWTAALHELAAWLTTHGIRTVALQSTGVYWIALQDVLEQAGLEVYLVNARGTKTLPGRKSDVQECEWLRKLHTYGLLRNSFHPPEAIRAVRTLWRQRDRWVQEAARAIQHMQKALTTMNVQLATTISDLSGVTGQAILRAIVAGTRDPWALAKLRDCRIAASEAELAASLQGTWREDVLFTLRQALEAYDFYQGQLAACDRELAKAMAAVPSRELPPPPALPSGAAPLPAGKAARRKKSRRKHQPGVDLAAELHRALGVDLTRIESIDVSTAQVVFSEIGPDFSPFPSENHFASWLTLAPRRDISGGKVLRHVPAAGRQRVANALRMAAQSLSRSNSYLGARYRRLRAHLDGPVAIKAMARYLACLIYRLVTKGQAYVDRGAAYYEQKRQERERRALERRASTLGLKLVPAA

SEQ ID NO: 434627 - protein, 399 aa, unidentified
MDDDTFWVGLDLGLTRTSVCIMNGQGFPLNEFECDSEVATLTEALAAVAIDRIGGIAVEAGTGTYIVRKLRGAGFPVVVFEARKAHKFLALRRNKSDASDARGLADLVRIGQNSVSQVHLKTDECQRLRSFLVVRQRFVLMKLAVEGVLRCNFALHGRRLESSHTRKALLRRTETIFASLRSEEGIDLEPDLAPLVMVCDSVRAYLEKSDRDLQAIASSHPVCRLLMEVPGVGPICALSFYSAIGDPSRFRVASHVGAYLGLVPRRYQSGAVSRTLGITKNGNRLTRSHLVMAAAVFARRAPDCPLKDWYLALRGRAGPKRARIALARKLAVILLAMWKQGTHFELDRTGPSGVLAERGPTETVPVAPVGGDWRRQSGTEKVTSRSHLRQGSGDNTPGA

SEQ ID NO: 434628 - protein, 358 aa, unidentified
MAGKVTETAVVGGVDTHKDLHVAAVVDQNNKVLGTQFFSTTRQGYRQMLAWMTSFGALKRIGVECTGTYGSGLLRYLQNAGLEVLEVTAPDRMERRKRGKSDTIDAECAAHAAFSGIRTVTPKTRNGMIESLRVLKTCRKTAISARRVALQIIHSNIISAPDELREQLRNMTRMQLIRTLGAWRPDASEYRNVTNVYRISLKSLARRYLELHDEIADLDVMIAAIVDELAPELIKRNAIGYESASQLLITAGDNPQRLRSESGFAALCGVSPVPVSSGKTNRYRLNRGGDRAANSALHIIAIGRLRTDDKTKEYVARRVAEGHTKMEAIRCLKRYISREVYTLLRNQNRQINSIPITA

SEQ ID NO: 434629 - protein, 335 aa, unidentified
MYYLGIDLHKDESHVAVLDDDAEVVEEIRVKNANLDDVAEEYAGAKAALEATSNYYTVYDTLDEHLDVVVADPTQTKAIGYAEVKNDRLDAKLLAQLRRADMIAESYVPSEELRERRALVRGRKRLVEKRTDFKNEVHALLDKHGITYDWDPFSVNGRDILAGEDVSLGVVGDQLMESFLSIIDELTAQIEELESLIEETAASLEETQLLMTIPGVSFYSSLLITSEIGEIDRFDEAKQVVSYAGLDPVVRESGDSRTEGSISKRGSGDLRWILVQCVQTAVHRCNDPYLGRFYARLKQRKNHQIAIVATARKLLVSIFHMLDRTEVYDPPEVSA

SEQ ID NO: 434630 - protein, 371 aa, unidentified
MKNNNTASVVTNSSTPAATVPGGFTLGLDLGDRCHHVCVLDVTGQIVCEGALSNTRPALAKLLADFPRAIVALEAGTHSPWISRFLQEHGATVFVANPRKLHAISRNERKCDRRDAQMLARLARVDPALLHPIHHGSAQAQHDLLGLKLRDALVRTRVNLINAVRFTLKSLGHPVRNPSSESFHKRVLADIPADCLPVIQPLLTVLAQVTEQIKGMERDLVQRSQKEYPATQRLQQIAGVGPLTALCFVLKIGDPVRFGRSRDVGAYLGLCPRRDQSGGTDKQLRISKCGDGLLRRLLVSAAHYVLGPFGPPCALREHGQRLTGTGSAREKKRAVVAVARKLAVLLLSLWKHGTEYEPRTTAASAVVMTPA

SEQ ID NO: 434631 - protein, 369 aa, unidentified
MNEHITHVAMDDSKRKIIAGILRPEATEPELRSIPNEPRHLRRFFERLQREGRVVACSEAGPSGYDLYRQLTALDVPCQVIAPALTPRRPGDRIKTDRRDAAKLVRLFRAGELTPIHVPDEASEAVRDLVRCREDAQEDLRRWRHRLLKFLARHGRVYRDGRNWSQRHWAWLRTQRFTLPALDRTAQEYRWTVEQLLARVADLDREIAAFAETAPYREPVGWLRCFRGIDTLAAMTLLVEIGDFQRFRTPRELMAYLGLVPSEASSGDREQRGSITKAGNTHARRILVEACWHARHPPRLGPALARRSQGQPPAVRAQAWRAQQRLHRRYRHLVGHGKRPPVAVVACARELVGFVWAALTQPVPAQAAA

SEQ ID NO: 434632 - protein, 387 aa, unidentified
MQKPHDNSKASPAAFMQDNTLIAVIELGLSNWLVAGLIPGVSREPLKKLEPNPEDLLKLLHGWRDEAIKAGRPITRIAVAYETGRDSFWLARWLRERGIDAHVIHATSVAVSREHRRAKTDRLDTAMLKRGFLGWLRGERGHCTVAIVPTMEEEDAKRPHREREGLVHEQTRVVNRMKSALIQFGVRNFNPKLRKARVKLETVRTPEGKSLPPNTIAALRRDMERLKIIKEQIKAIEQTRLQQFEQKPEALANRMVYLLVRIYGLGWETADLLVHELLSRTLRDRKAVARYAGLTGSPDESGSKRREKGLSRSGNARVRKIMIQLAWRMVKFQPDSALVQWFKQRTENAKGSRKPMIVALARKLIIALWRYANDGVIPEGFRLHSAA

SEQ ID NO: 434633 - protein, 360 aa, unidentified
MKYIGCDFHPSFQQIAMLDTETGETLDLKLKHEGDQTRQFYESLKSQEVIVGIEASGNTYWFERLLSQLGHQLWMGDAAAIRRQDGRKQKHDRRDARLILKLMLSKDGFPKIWVPTVAERDLRQLLIHRRHLVRTRVRIKNQLQHIALNYGLQRKGKLWSKEGMEFLRNLELEPWTRLRRDKLLEQLAQCDGDLKPLEMAVQKAADENVRAVRLQTHPGVGPVISLATVLTMGEVHRFEDSRKWISYLGLNPSEESSGQRRKLGGISKQGNPFLRYLLVEGASSAARGDKDLGRTYSRLKARKHHGVAKVAVARKLAVRLYWMERTQQPYPEVVRMQGSQSHSVAAVKAERLSRPPASHQ

SEQ ID NO: 434634 - protein, 401 aa, unidentified
MKEFNTEAVRIETASALATVRPAQAFVRYPAYIGLDVHKETIVVAVARAGRDAPESREEIANKPKTVAKLVDRLNREFDGEVLLFCYEAGPCGYGLYRQLLELGHDCQVVAPSLIPKKPGERIKTDRRDARKLARTLRNGDLTAVWVPDEEQEAMRDLTRARDDMKGQERKARQQLNAYVLRHGHAWPSNKTRWTQTHYNWLESLKFPHDWQQVVLQEYIDAVKAASQRVADITAQMERVLPQWSLAPVVDSLVALRGIDKLAAMVLLAELGDISRFDSPKQLMAFLGLVPSEHTSGGRRRQGAITKTGNSHARRMLVESAWSYRFPARQTAHLKRKAANASDEAKVIAWRAQKRLCGRYRTLLQAGKNTKQTTVAIARELAGFIWDIACHEIPKVRQTSR

SEQ ID NO: 434635 - protein, 340 aa, unidentified
MTITTVGIDLAKNVFAVHCVDQHGKTVLVKPKVSRAALPELIASLPPCVIGMEACSGAHYWARMFRQYGHEPRLMAAKFVSPYRMAGKSGKNDAADAQAICEAVRRPHMRFVPVKDESQQAMQCLHRTRQGFIEEKTATYNRLRGLISEFGIIAPQSTDALRHMVSEQKNSLPLQVQQCVDDLLEHINRIDDNIAEYDRILSRMAKTDHRSQRLMELKGIGPTTACALVASIGNAHDFKNGRQLAAWLGLTPSQYSSGGKSKLGRITKAGDSYLRTLLVQGARSVLIGAEKRTDSFSRWVCTLVERRGYWRAVVAIAAKNARLCWASLHYGDDFRLYSAS

SEQ ID NO: 434636 - protein, 419 aa, unidentified
MLYSRCAAIDVHKDQVTVAVRTPGEGPGGRQTQVRKFRAFYGVLTDMARWLVTLQVTAVAMEATGIYTMPVYHALIEQGHFEQVLVCNAAHVKNVPGRKTDAVDAAWLAELLECGLLRASFIPAPKIKAVRDVARYRKKLVGARTSEIQRLGAVLQDAGIKLDSVASSIATVSGRAMIEALVDGERRGVVLAELARGRMRAKIADLTLALEGRFDAHHALMCQLHLEHIDHLEEMIARLDAQVEQMMIPFARQRELLVTIPGIGPIAAAAILSEIGASPAEFFATGAHLASWGGLCPGNHESAGKRKHGTPRKGNQHLKPVLVEAAWSAVRTNGRLRARYHRLVVRFGGYRNPAAKKKAIIAIAHTLIVIIWNVLADNTPHADLGANFYDRRTDPERETRRLIAKLNALGHTVTIEPAA

SEQ ID NO: 434637 - protein, 379 aa, unidentified
MTAETRHVESTAAVGALFMALELGSTTWKLAFATTRAMRPRVRTIPAGSLSQLRSEISVAKTRLGLAADAPVRSCYEAGRDGFWVHRALLAESIHNVVVDPASIAVDRRARRTKTDRIDATALVIQLMNAAAGDRRGWRELHIPSVQAEADRQLQREWEAVRDDRTRLRNRIQGLLATQGVRLELSSLFVEHLRHARLWDGTPLPTELVARLERDWTQLQQVEERLTMLKRLRQARVADDRTDVVATQTRQLAELRGIGVNGALTLTTELFAWRGFTNGREVGASVGLTPTPYRSDQRVVEQGISRSGNRRVRALSIQLAWSWVRWQPTSALTRWFHERFGQHGRARRIGIVAVARKLMIALWRYVETGTVPEGGVLNA

SEQ ID NO: 434638 - protein, 543 aa, unidentified
MIQRHWQRVIYHAAHTELGRLFARVFYRHAAPDMFPKVINNRGKRPCQGLRPTVVNNFAADHNGVGEQLATAETRLVAPHPSRVIRRWPTPPKAPGPSAKRTPPLEGSNIRSRPSQVPAPLRAARIMNPNWNQHSYFAALDWAKDHHDVVVVDRVGTIVADFQFAHTAEGWDEFTKKMQPFGKCPFTIETSAGLAVDQLLQRGYQLYPLNPLAAKEYRKRKAPSGTKTDRHDAWAEADALRIDGHTWRPLLPQDEATATLRLLCRDEIALIEHRTALVNQLEAALADYYPLTLESFDEWAKPFAWAFVKAFPTPAALKKAGKRKQQNFLHLHKLWRPETATQRLQAWERGQQLQASLAVINAKSLLALSLANVLEALQRQIQEYRSRITQAFAQHPDHDIFGSLPGAKQHLAPRLLGLIGMVREVFPDADSLMCQAGVSPVAYQSGKLCKARIRFVCDHFLRHTVHLWVDETRKTSHWSQAYYQAKRDQGHDHASALRCLGKRWLKILWRMWRDHTVYDESIYLKAMKEHGSFVWKALQGQPA

SEQ ID NO: 434639 - protein, 366 aa, unidentified
MKKNSTVASGRKQILKQARLTIGLDLGDRTSYYCILDAAGNVIWERSVPTTLNGIRQGFGRMPRCRIALETGTHSPWVSRQLSEMGHEVIVAHAWKVRLIGQSSRKDDQLDARTLARLARIDPGLLSPVKHRSAQAQIQLTVIRARAALVSTRTALVNAARGLTKSYGQRLKKCGTEQMNRDSSEGLSQELREALDPLLREIESLNERIAEYNRRIEKIAKEVHPEVARLKQVQGVGTLIALTYVLTLDDPHRFRRSRDVGCFLGLRPGRRNSGQSEPQLHISKEGDRYLRTLMVQGAHYILGPFGQDSDLRRWGLKLAERGGKNAKKRAVVAVARKLAVLLHKLWVSGEAYEPLRNNHKGARAVA

SEQ ID NO: 434640 - protein, 423 aa, unidentified
MMKLKYSICCGLDVHKNVIVATIVTTNKDGISEYLQKSFSTINSDIQRFHNWLIENNCYHVCMESTGKYWIPIFNYLENDIDVCLTHPKYVKAIKGKKTDKKDSKWIADLYKFDLVRCSFIPPKDFRQLRELARYRFKLVCMKSSEKNRIQNCMTISNVGIASVLSDPFGKTATEIMSYLLEHTADSMDEKAVRKLIKKGAKAKSDEIIEAIKGYNIETDQAKKLELAQGHLEYLDDMITQTEVELYVRIKPYYEFVEFVSTMPGMTELSSTIVLAETGVDMDIFDDAKHLCSWCGLSPANNESAGKKKSVRIAKAGDYLKPMMVQCALAAIKSKKQPYFAIKYGRIKKRRGHKKAIIAIARMMMVCIYHMVSEKKPFTPTDYEELMNPQNHVERVVLNENNVFAYLESLGYDSSKLVKRNDN

SEQ ID NO: 434641 - protein, 366 aa, unidentified
MKQVTTYVGIDAHKKDLFVAMLNGPGAAPVTWQLANEPAAVRRLVRKLEREASGPVHVFYEAGPCGYVLQRQMTTARVHCDVIAPALMPRKPGERVKTNRRDARKLAELGRAGLLTVVQPPTPADEAVRDLARARDDAREDLQRGRHRLGKLLLRRGLHYAGRNWRQAHRRWVDSLPWTHVAERAVVDDYLLAIDHTEARLLELDARLAEIAEQEPYREPVGWLRCFRGIDTLTAMLILAELHDFRRFGSARALMAFLGLVPGEDSSGEKHRRGRITKMGNALVRRILVEASWHYQHRPGVGRALKARRTAQPARVIAIADKAQQRLCRRFRRMMAEHKPAPKVAVAIARELAGFIWAALQPPVVA

SEQ ID NO: 434642 - protein, 346 aa, unidentified
MSTHYIGADVDCKMVELAVERGGRIVRRERVPTSVSSLREFLSSVPGRKHLALEEGPMAGWLYRNLRHDVDRLVVCDPRRNKLITGDGDKTDRVDAAKLAALLRGGYLREVYHSTDERRVALKEAVTLYHDRVREAVRQGHKLRARCRLHGIRPPGRGVRRAMDWQEWLSRVKSKELAESLRILWIGFEASARQVRLARRQMQRLTRRHPIVPLWQRWPGVGPVRAVTLLAFLDTPWRFHSPKALWKYCGVGLQRTQSGTDRRGRPLAGKLKLVWQCNRRLKDAVMGAALSAVRQGNNRFAEDYQRLVQGGRSASNALHAEARKLLSALWGQWKSLERDARDVTEA

SEQ ID NO: 434643 - protein, 345 aa, unidentified
MQITTVGLDLAKNVFQVHAIDEAGEVIVRKALRRHQVMPFFERLAPCLSGIEACGTSHFWAQQIAALGHQVKLMPPAYVKPYVKRGKTDAGDAAAICEAVTRPTMRFVAIKSAEQQSMLALHRSRDLLIRQRTQLVNMIRGQLAEFGIVLAKGIQHALKLVDRLLAGEAPEVPALLAKVVITLAEQVRDLQVRIGLLERDLKAWSRDDQVAKRLQTIPGIGVITASALAASVTDPQQFTSGRQFAAWLGLTPRARLSGGKERSGRISKMGDRCLRRLLVSGMTARLRWLRHHPEAQPWAGELLQRKPAKLVAVALANKAARIAWVVMTRGETYHPPQSSSRAVTP

SEQ ID NO: 434644 - protein, 299 aa, unidentified
MDHYCTVRDTKGHDELVSWLKGHKIGHAHICIEATGTYMEPVAECLYDAGYIVSVINPALGKAFAQSEGLRNKTDTVDARMLAEFCRQKRPAAWEAPHPLERALRALVVRHQALTDMHTQELNRTETAREVQRPSIDAHLLWLEAELKRLEKQIKDLTDDDPDMKHRRKLLESIPGIGEKTSAVLLAYIGLKDRFAHARQFAAFAGLTPRRYESGSSVRGASRLSKAGHVSLRRALYMPAMVATSKTEWGRMFRDRLAANGKKGKVILGAMMRKLAQVAYGVLKSGVPFDASRHNPVAA

SEQ ID NO: 434645 - protein, 353 aa, unidentified
MIHVGMDLHRNNSLVVAICDRTGEQFPARRIDNDRSEDLWQYLDQFGAQPIRVVLEATGNSRWMYRLLKTKHNVEPVVVVPQKIRIIAETVSKSDRVDAAALAFLSTLNALPRSWVPDEVVEELRELTRHRATLVRRRTQAKNFISGVLTRCGLRRPYADIYGVRGLAWLKAVVLPTPMRYQVDAWLSALEHTQGQIQKVERILYGRLAQSDRWKDDVELLMTMPGVGKLTALTILAELGDYGRFRRRSEVASFAGLIPKSKRSNETIRYGRLTRRGPAALRTILIEVSLHAARGSVRYGPLYEKFRLQKRCNAGKAAVARQMLEDAWTMLRKRQPFREPLVTPYSQQPARAG

SEQ ID NO: 434646 - protein, 358 aa, unidentified
MATNSLSRVEQFVEGFQSLSFWIGMDVHKRSYHIALLRADGKSLTFVSPASPQFVAQLINRLAIHVAAVAYESGPTGFLLARGLEAAGIPVMVVAPSRVPRPVTSGAKTDRLDCLKLASYAAKGLLHSIAIPAPDEEAERSLLRRRHDVAASLRQCKQHIKSLLLFLGIDEPAEVEHWKQGAEEALRALSLISSAKLTLESHLRELTFFRQELKEVESQLQQLTKQQTHRKTIACLKSVPGVGPILATTFSCELFRPERFARAEEVASYLGLAPMVRHSGEKSPSGRLVPVGQTKLRSLLIEAAWIWRGRDKYAQELYNRFFSRMGIAQKAIAAVARKLAIILWRICIEQRPYRPATI

SEQ ID NO: 434647 - protein, 341 aa, unidentified
MDTVSLVGLDLGKHCFHLHAQDASGRMVFRKKLTRSQMFALLGNFPSCTVVMEACAGAHWIARRLQTLGHEAKLISPHFVKPFRQGNKNDFADAQAICEAASRPSMRFVSPRNEAQQVVSALHRVREALVRERTGTINQIHAFLLEFGISLPRGMAVIRRLPAVLETQALPPRLVAVLERLQAHFKYLDEQIGQLEHELLTQLHEDERSERLLEIPGIGPITASVLMSELGDAHQYGSARQFAASIGLVPRQYSTGGKPTLLGISKRGDKELRRLLVQCARVIMLGIERRTDSLGTWVRSLLARRHSNVVACALANKLARIAWAILAKGTHYRSAPTALAA

SEQ ID NO: 434648 - protein, 403 aa, unidentified
MDVLIERACGLDVHKKSITACIVTPEGKEIKTFRTHTVFLLDLIDWIKQHRCTHVAMESTGVFWKPIVNLLEAEEIQFLVVNAQHIKAVPGRKTDVKDAEWICNLLRHGLLKPSYIPDRNQRELRELVRYRRSLIQERSREHNRVQKVLEGANIKLAAVVSDIMGVSSRDMMDAMIEGEEDPEKLAALARRTLKKKKEELELALRGNMSAHQRIMLRTMLTHIDFLNEQIVELDIEVAKRLDPFQQDIERLDTIPGIARRTAEQILAEVGTDVGSRFPSAAHLSSWVGLVPGQNESAGKQKSSKTRKGNKYLRSALIEVAHSVCRSLPLPISVHGLVWFQGRMKVPANENPRKLAKEINTSDRHSLKSPTPSADPTIISELSTDASQPEKADIERPWRSPTPS

SEQ ID NO: 434649 - protein, 330 aa, unidentified
MKLNHVGIDVSAKTFTTIIDHEGERTEAFDLPNDPKGFKKLIRMITKKGFSAQVVLEATGNYSLDLALALHRAKRIEVMVANPRAISQFAGAYLRRSKTDALDANVIVEFSMRMPFEAWKPPEAHCFNLRAISRRIEALTKTATQEKNRLHAATTFDEMSDVVRNDIEVNIRHLERRIERLREQAREHIAEHPELERSFLHITSVKGIAQAAGIQILAELSTLPSDMDVRQWVAHAGIDPMQFQSGTSVDKPSRISRRGNAHLRRALFLPALVAVQHEPHVTAFYEKLLERGKTKMQANVAVMRKLLHAIYGMLKHDRDFDGEKFYVLGA

SEQ ID NO: 434650 - protein, 344 aa, unidentified
MKKHTTIAMDIAKSVYEVAVSEEPGRVKERRRFTRSQMVRFFANREPARVVIEACGAAHALARQLEGYGHEPVLLPPAQVRRYVLRNKTDRTDTKGLLEADRNEEIVPVPVKTVGQQALVAVHRLRSGWMATRTARLNAIRGFLRELGVTVPVGATRVLPALAGALETGRVPGTLETLLRTTADEVRELDRRIEEAESTLKRLAREMDAAVRLQTVPGIGLLTATALIGSVGEPGRFPSGRHLAAFLGLVPRESSSGDRRRLGAITKRGDGYVRMLFTHGARSVLRAASVRKQNDRLRTWALETQKRKGHNKATVALANKLTRIAWAVWLKDRPYEGRAPEETL

SEQ ID NO: 434651 - protein, 313 aa, unidentified
MKMAQGEVFVGIDVSKAVLDVAIWPGGASFQVSQDREGRQALVRRLKALAVSVVGLEASGGYERPVMKALFDAGLTVRRVNPWRVRRFAEACGVLAKNDRADARVIARFVATLPDEPTRPNPQAEKLAEFVTLRRQLTDELTRARNQAAHAGQALIKRLAQRRIRRLKLDIIVLDKAIAAFVATDPDMARKNALLRSVPCVGPVFAHTLLALMPELGTLTNRQAAALLGVAPYDCESGQFKGQRRIFGGRRAVRDVAYMAAIVAGQANPVFKQVRTNLLAAGKKPKVVIVAIMRRLITTLNAILRNNTPWKAA

SEQ ID NO: 434652 - protein, 347 aa, unidentified
MVTIGIDTHKATLAVSAIDATGRETGARTFPNDRRGHVGILRWAQAHGSERRFGIEGSGSYGAALGRLLVAAGERVVEVPAILTDRERRHLRRAGKSDPGDALAIARVALREEASARSRCPGSPRIWKLLVDARDQRVGERTRVANRLHADLVVLAAGYKREVPNLAGACHRAAVARLLDGLAGVRAELARADLARLRELDAECSALEKQIRSLVQLSGSSLPTITGVAAITAAKLLGETGDPRRIRSTPAFAAMSGTAPIPASSGQTSRHRLNRGGNRQLNRALHTIALVQARTDPRAKAYMARRTAEGKSRLEALRCLKRHLADVVLRTLLADVERSARPVTEGA

SEQ ID NO: 434653 - protein, 345 aa, unidentified
MTIQTIGIDLGKTVFYLVGMDCRGEIVVKKRLSRPQLVRYTSNIPACLIGMESCGGAHYLGSLLTAQGHRVRLMPGQFVRPFVKSNKNDYVDAEAIAEAVQRPTMRFVPIKTTDQLDLQAVHRVRDRLISRRTSVINQLRAFLLERGITFRQGRALLRRQMPALLAQTEEILSPCMQRLLLQLWQEWRELEAQIETTTEEIERIADQDVACQRLLDVPGVGPLVATALVAAVGNGSAFARGRDFAAWLGLVPRQSSTGGKPRLLGISKRGNPYLRRLFVHGARSVICHANRDDHPLAPWITSLESRAHRNVLIVALANKLARAAWAVLATGVPYRAAPHPAAVTR

SEQ ID NO: 434654 - protein, 430 aa, unidentified
MKSNTQNAKIEAITEKTLVLGIDVGSETHYARAFDYRGIEYSKKPFKFSNTEAGFVTFKEWILDLKERHEKDKVVPGMEPTGHYWFNLGKFLQDNEMKPVLVNPHHVKKSKELDDNNPTKNDRKDPKVIAGLVREGRYMIPYLPDGVYADLRTASNIRFQLQAELTRIQNRISRWFNIYFPEYKTVYGKPDAKSGMLILKAAPLPEDILTLGIDGVNQIWRDAKLRAVGKARAKTLIEAAEHSVGSKEGAVSARMEIRMLLEDYESRNIRFQEVMTLIEGLVKQIPMAEKLLEIKGVGIKTVSGFLAEVGDISRFNTPKELQKLAGLALVESSSGKHKGETTISRRGRKRLRYLLFEVAMSLVAKNPEFRELHNYYTTRRLNPLKKMQSLMAIAAKLIRVFYAMLTKGVDYDPKKMVSDIKRPAVYLQAA

SEQ ID NO: 434655 - protein, 345 aa, unidentified
MKVTTLGLDLAKNVFQVHGIDDTGKVMVRRSLRRRQMIPFFAKLEPCLIGIEACGTSHFWAREIAALGHEVKLMPPAYVKPYVKRGKTDAADAEAICEAVTRPTMRFVAIKSAEQQSVLSLHRTRDLLVGQRTQLVNMIRAQLAELGIVLAKGIHHALRLVDQLVEGVVPDIPPLACKIVIALAEQIRELQARVAMIEGEIKTWFLGNDLAKRLATIPGIGYITASALAASVTDPHRFTSARQFAASLGLTPKADSSAGRDRMGRISKMGDRYLRRLLVIGMTSQLQSARRKPEAHPWVTGLLANGKPNKLVAVAMANKAARIAWVIMTRGEVYRASRPATEGTV

SEQ ID NO: 434656 - protein, 344 aa, unidentified
MQYIAFDVHKKYTWARVEDKSARVLRQERIDHGRGAVSAFLAECEANSPVAVETVGNWYWVVDEIEGAGCAPQLVNARLAKLMMGQVNKTDKLDARGLNLLQRNGTLPTVWIPPAAVRDARELPRLRMALVGQRTQLKNRVHATLAKYGITPPEVSDLFGKAGRKALARLMEQLPPNTTEATRAVLQQLDGLEQAITAVERRIAEVFDDTAENKLLRSLPGVGPTLSVIIATEMGDIERFGGAERFASYAGTVPRVHASGGKSYGGRVRMDTNPYLKWALVEAANAALLQGDRYGHVRRLYDRIRARRGHGKAIVAVARHLAEAAYWVLRKQQPYQEPRRSTRG

SEQ ID NO: 434657 - protein, 395 aa, unidentified
MFIVGIDVAKRSHEVCIITSDGQTVQRPFSIRNNCTGYNLMLEKIRKHTNIKSQIVFAMESTAHYWLALFTRLRKDGYHVILLNPIQTSAMRDMFIRKIKTDAKDSFIIAELIRFGRYAESNVAQDRLLALKELCRNRFYLVDMAGDLKRKLIALIDRVFPEYEAQFDTIFCKSSVAVLKKYPTPQKLSNAHLDKLTELLWNSSNGHFGEWKARELKELARNSFGVEDCDGAYSTLILLMLDQIQSLSGKADALEKEISRLFQSFDTTVTTIPGVGPIIGAVILSEVGDISRFSSADKLAAYIGVDPSVNQSGEFQAAHAHMSKRGSPYLRRCIWMASQVAVQRDPMFRAYYEKKAAEGLKYMTIIGHVTRKMTAVIFAILRDHKVYEPVLPTAA

SEQ ID NO: 434658 - protein, 391 aa, unidentified
MSMYFIGIDISKYKHDCCIISAANQKVVSKVTIKNNKAGFNELLTIIHSLANPADIRIGFESTAHYALNLELFLENSLLTFMEVNPVLISEYKKSKTLRRTKTDSVDCESIARWLMTVEYKPHSKGFYHAYSLKSLTRLRDKLIRQRSFYLIKITNVLDHTFPEFKPFFNERLSKTALYLLENYGSAEKMARMNSASYEKLRSVSRGKFSPQQFLRLKELAVNTVGVNNSIFDVELNSLLSLYKSLVKEIDTIKKEINQLIEEVHPHYMSVPGIGPLSAAVIYSEYGDISNFTNPGQMLAFAGIEPGINESGTESHGGKMVKRGSSQLRYTLINCCLPLIRFDMTFATYYAKKRGEGKPHRVAITHVAKKLIRVIYALESQDIDFNAQELR

SEQ ID NO: 434659 - protein, 374 aa, unidentified
MAKVIIGVDPHKMSATIEVVDSHEKLLGSGRFATDQAGYTAMRAYAKTWSERIWAIEGSNGAGRPLAQRLLEAGEHVVDVPAKLAARVRLFDTGHNRKTDARDAHSIAIVAVRTKTLRVLRPDGELEALRMLCDRREELTRLRVQTVNRLQRLLAELVPGKAKKDLTALQAKAILATVRPRDIAGKTRRKIAAEELADLVAVEAKMKKATAELKVLVRARGSRLMDLPGVGPVVAARTLADVGDIARFADRNRFASWTGTAPLDASSGEQNRHRLSRAGNRRMNHMIHIAAISQIRLDTEGRAYYRRKQAAGKTKLEALRCLKRRISDALYRQLLADATRTALASAPRGDVNRPGNHAVFLLAASPDGEPVVEA

SEQ ID NO: 434660 - protein, 336 aa, unidentified
MSNIKLMAIDLAKSVFQVCGLDCHNKVLFNKKLSRNKLIQFMACQQPTNVYMEACYSSHYWGRKLTEFGHTVFLIPAQHVTPFVRGNKNDRNDALAIAECSNRPNLKFVPIKSEHQQEIISLHRIRQRLIKNKTQITNQTRGLLTDFGIIFAVGQKAFTKTMKAIESEELLSPQFRQQILLMKEEFDYICERIKTVEKHLTHYNQTNKNCMIVNSIPSVGYLTATTIVAMIDKGQAFSKASDIGVWVGLTPKQFASGNKSRLGRITKRGDRYLRFLLTRCGNVAIQMAKERNDQFSLWIRQLVKRIGRSKAIVAIAHKIIRIAWVLLQKQEVYKVQ

SEQ ID NO: 434661 - protein, 347 aa, unidentified
MTQAHIYIYGIDLGKNWFHLVAMDRMGHVLTKQKLTRSQLKQFISTTPPCRVAFEACPGSQYWGRLFQQAGFEPKIIPAQFVKPYLKSNKNDFNDATAIAEAGSRGTMRCVPLKSHEQLALQSTHRVRQRFIIERTATVNQMRALLLEYGLTVPVGRKVFERSLPTILEDAENGLPDFIRALVLRLRERWQQLDIQIDDMSLMLGQASSTSSLCQKISTVPGIGPIVSTALIAAIGNGSQFKKARDLSAWLGLVPRQYSTGGKSSLGGISKRGNSYLRQMVIQGAKALKIHMKRDKSSLGEWVARLEAGHHHHVVLIALANKIMRICWKVLTSGRDYQPYPNTSSAV

SEQ ID NO: 434662 - protein, 387 aa, unidentified
MYFVGIDISKFKHDCAIMDEIGDTIQPSWSFGNDCEGFSLLKERLDGLAGEKKIGLEATGHYGQNLKLFLEANGFAFMEFNPLLVSRFVHGKSLRNTKTDPIDARNVAQYLMTVEYKPYPPSFYHLDQLKSLTRFRSSLVRQRSRQLVELTNVLDKMFPEFKPFFKGKFSATALYILDHYQSPERIASMNARSYEPLRKISRGHFSLNDFVKLKALAKNTVGCTTDFLLQEMYILLELYSQLDAKVEELDDQIEECVRGIDPPMLSIPGVGVSSTAVILSEYGDFNKFKNPSKMLAFAGLEPGYFQSGQSESTGHMVKHGSPHLRCALLNCCLPLVSNEPVFAEFYAKKRAEGKTHQVAMTHVAKKLLRVIYTLQTKDIPYDPALIR

SEQ ID NO: 434663 - protein, 352 aa, unidentified
MNSPFTIGIDLAKEVFAICVLDECGAVRERRVLRRAAFERWAVQAPAGTIAMESCSSAHHWGRWFSARGHAVRLIAPEFVTPFRKGGKNDAADAEAIAVAARQPTMRFVTIKTVEQQAILSWHRARQGWVDERTALINRLRGLLAEFGIVLGRSRSTLRSALPRLTEDAQLPVQVRALLLEAREQFTALDVRVARCDAEIAAHLVDNAPAQRLRALLGIGPLTASALVATVSNASSFKNGRQFGAWLGLTPLQHSSGGKSRLGKVTRHGDGYLRGLLVQGARSALQSALRCLPERLSRLGRWIVELFHRKGYHKTLVAIANKHARMLWAMLAHDETYDPLAWQRYRAPAATV

SEQ ID NO: 434664 - protein, 446 aa, unidentified
MGWRGASGTGDGRAMEQPTRFIGMDVHKDTIVVAVTAAGDVGKATAYGTFPNTAAALEKLVKRLRQAGSGPMRFCYEAGPCGYGVHRTLTKLGEDCMVVAPSMIPRKSGERQKNDERDAGSLAVLHRGGLLTAVWVPDAAHEAMRDLIRIRLAAVRAVRTARQQLSAFLLRHERIFPNGRQPWTKAHRGWLADQSFAQPAQQIVLEESIEAVRLGEQRRDRVDGYLRAQIPTWSLFPLVQNLSALRGLDTIASAGLAAAIGDPSRFASAPDFMAYLGLVPSEHSTGPKRRMGAITKTGDIHARTLLIEAAHSYRFPARVARHKLAAVDAVPEAVREIAWKAQTRLCQRYRHMMARGKLRHVVVTAIARELAGFVWSVACITTDPPAKSVIATMASEEVCPPGVRRRSRTPPHRQPPKGTGRDALNKPVPHRLKRADGMIEHDRPTG

SEQ ID NO: 434665 - protein, 344 aa, unidentified
MNATTVGVDLAKNVFEIALADERGHIVERQRLSRARFDRFFANRPACRIVMEACGSAHHHARRLSSQGHAVVLLPAQYARAYVRRNKTDAADAAALIEAARCPDIRPVPIKSVDQQALQQLHRLRSQWMATRTSRLNFLRGCLREFGVSVALGAHRAIQSVRDALASSECPVPALLHSSLLELLAEIDALEQRCKQIDRELARLTEHDPVVERLLKIPGIGPLTATALRASVVDVQRFPSARHFASWVGLTSREHSSGERRRLGRISKQGDPYLRTLLIHGARAVLLAARSAQRRGSSSDRLRTWALDLQERRGHNKAAVALANKLARIVWATWRFERDFCSKH

SEQ ID NO: 434666 - protein, 339 aa, unidentified
MDQISIVGIDLAKSVMQVHGVDAAGAVVVQRRLRRGQVMGFFARLPRCVIGLEACATAHYWGRELKALGHEVRLIPPAYVKAYVRRNKNDAADAAAICEAVSRPSMRFVVLKTAAQQAAGGLHKVRELLVKQRTMTINTLRGLMAEFGIVVPQGPHHVGPLKAKLADGAGLDIPAPLPAGLLALATNLESLEQQLAAVEKEIIAWGRASKTCRHLITAPGFGPILASAMAAMVADPRQFRSGRDFAASLGLVPRQEGTGGKVRLGPISKRGNGYLRRLLVNGAMAVMISQRGRRDPWLMKLVARKRPKVVAVALANKMARIAWALMMRQEDFRAAPAQP

SEQ ID NO: 434667 - protein, 351 aa, unidentified
MSQNTAAVIARTIGIDTGKNTLHLIGLDDEGAIVLREKLSRGRIRTRLANVPPCLIGIEAGMATHYVARELIALGHDVRQVPWIYAKAFRQAHKNDFRDAYAIAEAVLRPSTRCVPVKTDDQLDLQALHRVRSRLVGQRTAVINQIRSFLLERGITVRQGLRFLRQQLPEILAKRSDVLSPRMIRIIEDLSGDWRHLDERIEHVTEEIGVLARSSESCRQLMTVPGIGPLIASAMVAAIANGAAFAKGRDFAAWLGLVPKQISTGDRTILGRISKRGNRYLRMLFMQGARVILLRPANWAKHSFGPWLTAAAKRLHHNVLATALANKLARIAWTILAQRRNYETRVKTVTA

SEQ ID NO: 434668 - protein, 369 aa, unidentified
MTFYPLKAAPAAGANQIRNSNKSAKAKRILVGCDVHLRGYQAARKVDEGTIGVVDNFRSEEALLLYIEKQRQQAEQVVVVYEAGPLGFTLYRKLTATGVLCYVCAPDGSQQRKKRRKNDKIDARSLTSKLFNYLNGDRQALPLARVPSEAQEQRRLASRQHDQLVEERKRLGAKGNAMLLSQGLGSWSNWWRPKVWSQLSALAPQWLLERLQIWVDVLKILDEKISQAKAAAARSCSGPRPKGVGALSQMQLQSEVLDWSLYTNRRKIACLAGMVPSEWSTGDKESRGSITKVGVPALRRIIVEMVWRMVLFQPQYKPVQKWQEVLKGPNPALKKKAVVAIGRQLIVDLWRLQTGRVTAQQLHLIMIEN

SEQ ID NO: 434669 - protein, 361 aa, unidentified
MDKYIGFDIDSNKTSVCIVQKNKADRYATIGPDAGSMREFLVNERKNGCRAHLTFEISGQAGFLYDSLIDCLDSITVANPDKMTWIYRTAKKNDRMDARKMAVLLSIGEIPAVHMPSKEVRQWRMIICHRRKLLSEAVTAKNRIRALFRSQGISKAGNKGKWWNVRNRLWMRQFCVGGFDAENLWRMQLSNLLDELEVIEKQIASVTEHLDGYLDKQAGGKLLMSIRGVGPRTAEAVLAYTDNIGRFEGGKKYCGYFGVTPKLDESGNSRRLGHISKKGPSVVRWVLVESSWKVIRYSPAFRAFYERVRGGQKGRKKIAIVAVARKLLSIMRAMQTTGEMFNEGLVSSLDYGKIEGLRKTA

SEQ ID NO: 434670 - protein, 317 aa, unidentified
MDSRTTESFAGIDVCKASLEVALSGGKQVLSFRNDKRGARALVGHLRGEQPALIVLEASGGYERLVVTALTAAQLPVVVVNPRQVRDFARATGTLAKTDAIDARILCHFAAAVRPEPRRLATAEEQALSDLQARRQQLVEMITAEKNRLRTAGPRVAPQIARHTRWLERQLQDLEGELRDLVQSSPVWRAKGELLQSVPGIGPALSAALLANLPELGELNRREIAALVGVAPLNRDSGVFRGKRRVWGGRRNIRTMLFVGALVASRFNPLIKSLYQRLCAAGKPKKVALVACIRKLLTIVNSMLRTKTTWNPKLAEL

SEQ ID NO: 434671 - protein, 344 aa, unidentified
MSEVSMIGLDIAKHVFHAHGADERGRAILSKRISRGKLLDFFAAQPRCTVALEACGGAHHWARQLTQLGHEVRLIPPAYVRPFVKRQKSDSIDAEAICEAAQRPSMRFVAVKSEQQQAAGLVFRTRDLLVRQRTQLINAIRGHLTEYGWIAPKGPSHVAMLADLIEEDEMANSLPEAAHVMFRLMLDLLAGLNSKIADLDKEIARRAREDEVSRRLMTIPGLGPISATAIVALAPPIETFARGRDFAAWLGLTPLQRSTGGKQKLGATSKMGERTLRRLLIIGSSAVVQQASKRGAPKGSWLEQMLARKPRMLVTVALANKMARIVWALLIKRENYRAPVAAKA

SEQ ID NO: 434672 - protein, 310 aa, unidentified
MNNTVGIDISKATLDAFRMSDGRREQFSNDAAGLKALTKWLGKTPVRVIYEPTGPYHRDLEQALAATGHGLVKVNPTRARRFAQATGQTAKTDRVDAELLARMGAVLNLEASPARSNALMEIKELHVARVGLIKDRTACRNRLATARCKVIISQLNARYRQIKTQIAQIDAELVRYVKADPELARRYEILLSIPGIGQVAAIALIVEMPELGSMNAKEVASLAGLAPITRQSGMWKGKARISGGRQTIRTMLFMPALIATRFNAPLRQIHEALIGAGKPWKVSITAVMRKLVILANALVRDDRTWADARA

SEQ ID NO: 434673 - protein, 312 aa, unidentified
MTPIEHYVGIDVSKARLDVHVRPEGESFAQTNDEAGIAALCARLAHGQGPCLAVLEATGALQERAAAALCAAGIFVAVVNPRQVRDFARATGRLAKTDRLDAAVIAAFAEAVKPEPRPLPDDERKALIDRVTRRRQLVEMRAGEKIRRSQITPGLRPSLEAHIAFLDKEIAALDDEIGTSLRQSPAWHGEDDLLASVPGVGPVFRAALIAKLPELGRLTRRQIAALVGVAPISRDSGQMRGRRTIAGGRAELRTLLYMAALAAIRCNPALKAFNARLRAAGKPSKLAITACMRKLLTIINAIVRSNSPWRPA

SEQ ID NO: 434674 - protein, 349 aa, unidentified
MIWIGVDAHKLVHEAVALSEAGVLGTRTIPNTPVAWAALLEWARQWPERIWAVEGAWYLGRGLAQHLAEQGERVHEVNGRWTAARRRGMRRPGKSDRLDAHSVAQLLREEADTLPRVYAEEDEQASVQLWSRVQAELTKDMTRLVNRLHDLLLTCDTEDKSTLPALTTKRGIEAVRAYSAPGTGPLAREREAVIRATAAQLALLDEQDRELRRKLERASTARFSPLRQIEGIGALIACAIVAEVGAPRSGFGEEQLAALGGLSPLEASSAGAVRHRLNRLGNRRVNMVFHQIVLTQARIYPPAQAYLARRKAEGRTAREARRALKRLIVRRVFRAWSECFATSIEAVAA

SEQ ID NO: 434675 - protein, 367 aa, unidentified
MKKGSTAATKQSRNISQQKLTIGLDLGDRNSWYCVVDEAGQIQLEQRVRTTAKALREVFGEVPRSRIALETGTHSPWISRLLSELGHEVIVAHARKVRLIGESRKKDDRLDAQTLARLARIDPELLCPVKHRSAQAQADLAVIRARAGLVRARTALVNTARGLAKSYGERLRGCNVRNMNAEKAEGLSPELQRALEPLLSAIEELSQRICEYNEQIEALAQESYPQVALLKQIKGVGTLIALTFLLTLEDPHRFRKSRDVSCYLGLQPGRRKSGQSEPQMHISKEGDPYLRTLLVQGAQHILGPFGVDCDLRRWGLKLAERGGRNGKKRAIVATARKLSVLLHHLWGSGEVYEPLHNSRGMTVAAVA

SEQ ID NO: 434676 - protein, 355 aa, unidentified
MDSKKYMGMDVHKEAISIAVLNASGKLVMESIIATKAITIVEFMQGLRGELHVTFEEGTWSAWLYDLLKPHVQKTVVCDPRRNALLKDGSKSDRIDARKLAQLLYTNMLRPVYHGESGVRTLKELARSYLTISKDQVRVMTRLKALYRSWAIPCSGKQVYAVRHRAEWLDKIREVGVRRRAEFYYQQLDALRCLRREVRRDLLTESAKHRASKRLRQIPSIGPIRAALLIAILQTPHRFRTKRQLWTYSGFGIETHDSGEHRYVDGELRRSKKKVSVRGLNRNYNHDLKNLFKSAATNAAAKPDPLQEFYTALLVKGIRPDMARLTLARKIAAITLTIWKKGKSFDAQHLKHQTA

SEQ ID NO: 434677 - protein, 338 aa, unidentified
MNKTTTIGLDLAKNVFHLVGCDKRGKRQFKKKLKRQQLLAYFANLPVCLIGMEACGSAHYWARELQALGHEVKLIPAQHVKAYLRGNKNDYNDAQAIAEAVVRPQMRFVAVKSPEEQDIQALHRLRARRIEERTALCNQMRGLLSEYGIVIPRNISALKQHLPRLLEDAENGLSDLFRRLLTEASSQLDELEAHIGFYDEEIKRFSRQHEACQRLQTIPGFGVIVSSVFYAQVGNGEAFRRGRDVSASLGLVPRQYSSGGKEVLLGISKRGDGYLRGLLIHGARAVVRHAHGKKDRLSRWVQHLVERRGHNKAVVALANKMARMGWAILAHETTYEAV

SEQ ID NO: 434678 - protein, 330 aa, unidentified
MNVAGIDVSSKTVTLVIARDGRTRKPREFNNTPQGHQTLVNRLRKATVTRVCLEATGQYHLDLALALDDAGLAVMVINPKAAKRFAEAMQTRTKTDAVDATVLAEFALRMPFEPWQRPDDLALAIRACARRIAALNKLRTQTKNQLHAAEQTATTPDFLIVELHHSIAQLEANIEHLRQQVLALIASEEELQQIFELLVSVTGIAAASAIQLLGELLVMPEDMTAKQWVAMAGLDPRAHQSGTSVNKKPRLSKAGNRYLRIALYMPALSAAQHDPTVRAYYHHLIENRGRKKLQALCAVMRKLLHAIHAMLKNRTPFDSSRFYTPLETAA

SEQ ID NO: 434679 - protein, 348 aa, unidentified
MMIIGCDFHPSWQQVNWLDTETGETGEQKLVTASGDAERFYRQVTAPALIGMEATGNCHWLVDLLSELGHELWVGDAAQIRASVVRQQKTDKRDAAHILKLLVEGRFPRIWMPSSEVRDLRQLLVHRYKLVILRARVKNELQHLALNKGVQRKRKLWSQAGQQMLRELPLQPWASRRREDLLRLLEMFHQQIAPLDAAVKAEAERDPRARLLMTQPGVGPITSLAYVLTMGDVGRFPRGKQVASYLGLIPREHSSGGRQKLGAISKQGNRMLRMLLVEAATVAVRYDPEFRKEYQHRCHAKPKAVAKVAAARKLAIRLYWMLRTQKPYPDVVRIESSPRLPLVIRHRG

SEQ ID NO: 434680 - protein, 391 aa, unidentified
MIFVGIDVAKNKHDCFITNTDGESLFNSFTITNNLDGFNDLYRKISSVTENITKVKVGLEATGHYSYNLLGYLIDKGLPTYVINPLHTNLYRKSLSLRQTKTDKVDARTIASMLMSDVNLKSYSDTSYHNEELKSLTRYRFDKVKERAKLKSSVSRLVCILFPELEKLVPTLHMASVYALLFEFPSADAVANSHLTRLSNLLAESSKGRYGKDTAVMFREAARSSIGSHMPAKSLELKHTIKLIHELDAEIEEIENEIKSIMDEIHSPILTIPGISYRMGAMIIAEIGDFSRFDSPDKILAYAGMSPSTYQSGQLDNCYSHMEKRGSRYLRYALYNATKYVCHWDESFAVYLAKKRAEGKHYNVALSHATKKLVRTIYAMEKSGQPYQSAS

SEQ ID NO: 434681 - protein, 347 aa, unidentified
MNTTTPYQLFVGVDIAAKTFAASWGADPSALHPTRTFAQSPNGFATFREQLATTSVAPSATLVVLEATGSYWVALAVSLHQSGYRVCVLNPGQVALYARSLPRRAKTDALDAQLLLRFAIERQPPTWTPPPQVYHELRQRLLVRDGLQEMRTQARNQRHALVQWPIVIEAAIAQLDALIADLDARIATLEQEVAKVLSDGAWAASALLLDSIPGLGVITIAYLLVGTLNFSVASTPEQLSAYVGLAPMRYESGTSVRRQAKIGHSGNGRLRTALYMATLSAARHNPIIRTFYTRLRTGGKPMKVARCAAARKLLHLAWAVVAKQQPFDATYQGHESEQQMVQPVRRV

SEQ ID NO: 434682 - protein, 364 aa, unidentified
MDPPLKDGVIMRQHRISIFKKRRRSMKDIKILGVDIAKDVFQLCGIDEWGKVIYTRRVKRAQYVSTVASLKVGCVVMEACGGANHWYRTFMGMGISTQLISPQHVKPYVKSNKNDRNDAQAIAEAASRASMRFVRGKTVEQQDVQALLKIRDRLVKSRTALINEIRGLLQEYGLTMARGAKRFYEELPLILASEAVGLTPRMKRVLNCLYTELLNRDEAIGDYEEELKAVAKANEDCQRVQSIPGVGYLTALSVYASVGDIHQFHRSRQLSAFIGLVPRQHSSGNKEVLLGISKRGNVMLRTLLIHGARALLRHVKNKTDKKSLWLKALIERRGMNRACVALANKNARIIWALLTRQETYRCGA

SEQ ID NO: 434683 - protein, 435 aa, unidentified
MSSKAYRATRVNEVNWEQIARGKEGLGVTVGIDVGKFDLLVICRWADGRFERPWRGKNPWEVATLVGVLNQVKADRKLVVALEPSGTYGEALRQALGDNGIEVQRVGTKASHDYAEVFDGVPSQHDGKDAAVVAELAALGKAKPWAYQAADSWEEELAYWVEEMVAQRQMLMPWQGRLEGLLARHWPEASQVLKLSSGTLLRILKRYGSPQALAADADAATQLARWGRTLLSPAKIEELLTGARSSVGGRLGPWQQRQIQEYAERALAVRQQANRAQRQLRRLAAGHPVLQAQGKVLGVPTACVLWVSTGDPRDFDSAGAYRKAMGLNLAERSSGTYQGQLRISKRGSARTRQWLYFAVLRLVQQCGVRPWYEAKKARHEGEARRVLVAVMRKLAVALYHVGVRNEEFQPRRLFGRSGRRSGRSAKPSVSRQQRA

SEQ ID NO: 434684 - protein, 430 aa, unidentified
MGLIVPSSIHPEREDQPLPYEWFVGIDWGSQQHQVSVLDRDRRRVGERVVDHDGASLARLADWLWTLSAGQPQRVAVAIEVPRGAMVEGLLERGFHLFAINPKQRDRFRDRHTVAGAKDDRRDACVLADSVRTDQPSFRRLHLEEPQLLLLRELSRAEETLLEAFRRSANRLREQLHRFYPQMLQLCSAADEPWLWDLITLAPTPAHAMLLSEEQVQRVLKAHRIRRIKATEVLACLQAPALPVAPGTAEAAQAHCGFLLPCLRVLAEQLQACSQQVGTLLRTMADEPGEGESPSDVAIVQSLPGVGRKITAWLFAEAAQPLAERDYQVLRTHGGVAPVTKQSGKRRQVVMRHGCNPRLRHALYHMARVAMQRDAHFNSVYTTLRAKGQRHGQALRNIGDRLLRILVAMLRHRTGYDASRIRREPVVQMG

SEQ ID NO: 434685 - protein, 371 aa, unidentified
MKSIVYVGMDVHSSNYTLSCYMVENDRCFATVQIAPDYREVLKYLAKVQENIGEPCEFHCGYEAGCLGYTLYHQLADHDVDCTILAPTTMPIYKKNEIKTDKRDAMKIARCLAFNTYHAVYIPTREDSDTKEYIRMRDAHKRALKTVKQQIMSFCLRYDFRYTGGKSNWTLKHLAWLKSLKMDALMREVLDEFLQTYQQLVDKVERFDKRIEELAGGTSYADKVKKLSSFIGIRTHTALALVVESGDFTRFAKANQYAAFLGLVPGEKSSGDKVNRTGITKAGNSHLRRLLTEAAQCYGRGRIGYKSRALKARQYGNTPETIGYADKANERLRRKYYHMVLKYNKKHNVAVVAVARELACFIWGMMTEHTA

SEQ ID NO: 434686 - protein, 410 aa, unidentified
MEVLYPHCAGLDVHKETVVACARHMVNGTVTREVRTFRTTTKDLLALSEWLASQGCTHVALEATGVYWKPVWHILSDGDVTLVLANAGHVKNVPGRKTDVNDATWLADLMAHGLIRGSFVPDTQTQELRGLLRTRKQFVRERSSHVQRLQKTLEDANIKLDGVISDIVGLSGRRMIEALIAGESDPEALAGLAHRRIKAPPAALREALRGRVTNHHRFLLQLHVQHIDALDAALNAIDREVDSHVEPFREAVLLLTTIPGVSDLSAQVIRAEIGGDMSRFPTVGHLISWAGLCPRNDESAGKRRSNRMRKGAPWLKTTLIQCAWAAARKNGSYLQAQFHRLRARRGAKKAIGAVAASILTAAYHMLKDGTLYHDLGPDHFDRRAKTVQTRRLLTRLQRLGYAVQITSLAA

SEQ ID NO: 434687 - protein, 343 aa, unidentified
MQTITTIGLDIAKSVFQVHGVDADGQVVIRRQLKRRYVLAFFEKLPSCLVGIEACASSHHWSRELQALGHSVRLMPPAYVKPYVKRQKNDMADAEAICEAVTRANMRFVPTKTPEQQSGLVLHRTRHLFIRQQTSVINAIRAHLAEFGVIAPVGRKGIEELLHVIADRGDKRVSDVVRACLAALGSQLLNLKKQILDFDRMIMAWHRSNPTSKRLNCIPGVGPLLATALVANVADPKAFRSGRNFSAWIGLVPKQHSSGGRARLGSISKRGDRYLRGLFVAGAFAVIRYAKLHGTKYRPWVAALLARRPTKVAAIALANKLARMAWAMMATGERYNYPVALRV

SEQ ID NO: 434688 - protein, 367 aa, unidentified
MKKISTAAVKATKNFSQAKLTIGLDLGDRSSWYCLLDEVGEVLLEQKLGTTPKAMREVFGSMSRCRIALETGMHSPWVSRLLIELGHEVIVAHARNVRLIGESRKKDDRLDARTLARLARIDPQLLCPVRHRSARAQADLTVIRARAGLVRARTALVNTARGLAKSYGERLRGCNVRNMNPEKAEGLSRELQTALQPLLAGIESLSERIRECNERIESLAQTSYPQVALLKQVKGVGTLIALTFLLTLEDAHRFRKSRDVGCYLGLQPGRRNSGQSEPQMHLSKEGDPYLRTLLVQGAHHILGPFGADSDLRRWGLKLAERGGKNGKKRAVIATARKLAVLLHRLWVSGEVYEPLRNHNRRATLAAA

SEQ ID NO: 434689 - protein, 414 aa, unidentified
MEVLYPRCAGLDVHKSTVVACIRIAQEDGKALQEVRSFETTTSELCNLADWLTEHRCTHVVMEASGVYWKPVWHVLEESFELVLANAQHVKNVPGRKTDVNDATWLADLLAHGLVRGSFVPPSHIQEVRDLSRTRKQLTREIIQHTNRIQKVLEDANIKLSSAISNVMGKSGRSILEALIAGESDPAKLVQLCSGRLKASRQELTEALRGRVTDHHRFLLKLHLSQVDQLQQGMRDLEARMGDALKPFQEHVDNLTTIPGVNETTAYVLAGEIGLDMARFPTAGHLISWAGLCPRLDESAGKHRSRRIRKSASWLKPALVSAAWGGIRAKRTYLRAQFHRLKARRGAKKAIIAVAASMLTAAYYIIRDRVTYRELGDDYFNKRDPQHAAKRLIKRLEGLGFAVEARPTAAFVSI

SEQ ID NO: 434690 - protein, 346 aa, unidentified
MTIVEAARSVTGGIDTHGEVHVAAALDELGSLLATESFPANPDGYSALVAWLRGFGEIVKVGVEGTGSYGAGVARYLARAGIAVVEVDRQNRQARRQSGKSDPLDAVEAARAVLSGRAHGKAKSRDGSVEAIRVLVVAKRSERAARIKALIQMRQLTFSAPDQLQSRLKGLPIAQFVAAAQSLRPTRSPDPVTAATKASLSSLAHRVADLEDEITELDAMITPLLEATAPELLDVYGVGIDTAAALLVAAGDNPERLRSEAAWAHLCGVSPLEASSGKVTRHRLNRGGDRQANRALWHIVITRLASDPKTQAYMERRVKDGRSKREAIRMLKRYVAREVYRYLPRP

SEQ ID NO: 434691 - protein, 346 aa, unidentified
MMIIGCDFHPSWQQVSWLDTETGETGERKLVHAEGDAERFYRQVPAPALIGMEATGNCHWFVDLLAEIGHELWVGDAAQIRASYVRQQKTDKRDAAHIRKLLAEGRFPRIWMPSSEVRDVRQLLLHRYKLVIIRTRVKNELQHLCLNQGVQRKRKLWSQAGQKLLCELPLRPWAARRRDDLLRLMAMLDQQIDPLDAAVKAEAQRDKMALLLQTQPGVGAITSLAYVLTMGDVGRFPRGKQVASYLGLIPREHSSGGRQKLGAITKQGNRMMRMLLVEAAQIAVRYDPGFRKQYLHRCHQKPKAVAKVAAARKLAVRLYWMLRTQTGYPEIVRIESSPRVPLVGAS

SEQ ID NO: 434692 - protein, 472 aa, unidentified
MEKVKTIYVGIDVSKGYADFILLDQNKMIYETNFQLDDNHTGHDLLQKKLAMLSRQGFKVVCGLESTGGYEQNWVRCVKQLTENELSVELYKLNARGVKHQLESELRRTITDGVSAEGIAIYVINNYATKLHDWKRGIAKDEKTTGRQMLCKLIISQQKHLTAKYNQLEKVIYRQFPELLQYCKHGIPLWITRLLEKYPSLTAIKNAKLSGVDKIKCVTEAKANILKGLAKSSIGNTIKDPVMDIIMQTLCSEIIHIDNQIDSLKKQLIAHEVDEEVNLLCSIRGIAEWSAVGILVHLDDISQFADSHQIASFFGVHPTYKQSGDGKWASKMSKAGNKTMRSVLYNAANNVVLHNAYFKAIYARHRANGKKHQAAIGVIMHKLLRVVYGMLKSKRPFNEQTDIANQAKANQEIQNEAIKLSVNKTSRRYQELGTVAPLSGRNYKKRKIALEGRQASIDANTASPKSNLLMQT

SEQ ID NO: 434693 - protein, 400 aa, unidentified
MISVGVDVSKGKSTVCILKPYGEIVCSPFEVQHEERAMEAFVGLLAKLDGEIRVVMEATGIYHLPVLTFLQDKGYFVSVINPFAMKKYAKDNSIRGAKTDKLDSMMIANYGIEKWYKLQKYEGDEETYAELKLLGRRYRYYMELHVKALQELTHILDYVMPDIKKMFNSWNEANGKDKLSDFVEKFWHYDLITSMNLEEFTEEYLSWAEEKKYHRSRSKAEAVYELACNGIPTLSSNTPSTKMLVQEAVSVLRAVDSSLALILARMQSLAKSLPEYSTVREMGGVGDVLAPKLIAEIGDVRRLHSAKALIAWAGIDPPPYESGQFIGSKRKITKRGSSTLRKVGYEVMRVLKSHPAPKDDAVYNYILKKEAEGKGKKHAKIAGLNKFLRIYYARVTEVYQ

SEQ ID NO: 434694 - protein, 418 aa, unidentified
MKKHSKSSQRSEPTLKRTKARGPVQRDAKEVLAEVLRKLTGKLDGPAVSTSAKENRRGNTVGPNRDRLTVGVDLGDRWSQYCILGLEGETLAEGQLRTTQEDVREFFQALTVARVVIEVGTHSAWVQDVITEWGHEVLVANPRLMEGSKRRKRKSDRIDANKLARLGRVDPQSLYPIRHRSREVRQDLVVLRARDALVSVRTELINTTRGLVKSMGTRLPRCSSPSFADKVKDAIPVEVREALLPLVQLTETVKDCIARYDQKIEELGREKYGHTTLLRQVKGVGPITSLAYVLTLEDPQRFSSSREVGPYLGLVPKQEDSGDSQPQLGISKAGDRMLRRLLVGSSQYMLGAFGPDTDLRRYGLRLCERGGKNAKKRAVVAVARKLAVLLHHLWVTGDVYEPLHHTGAETRTAQATAA

SEQ ID NO: 434695 - protein, 346 aa, unidentified
MMIIGCDFHPSWQQVSWLETETGDCGERKLVHANGEAKVFYQQLAAPVLIGMEATGNSQWFVELVEDLGQEIWIGDAAQIRASYVRRQKTDKRDAAHILKLVVEGRFPRLWTPDREQRDLRQLVLHRHKLVEIRSRVKNELQHLSLNQGVQKKRTLWSQAGQKGLRELPLKPWAACRREDLLGLLAMLNQQIGRLDAAVQHAADENSQAKLLMTQPGVGPNTALAYVLTIGDVTRFARGKQVASYLGLIPREESSGGRQKLGAISKQGNRLLRSLLVEAAQIAVRFDPGYRKQYRHRCHQKPKAVAKVAAARKLAVRLYWMLRSQTAYPEIVRIESSPRVPLVGAS

SEQ ID NO: 434696 - protein, 313 aa, unidentified
MIAPTVFVGIDVSKDSLDIALRPSGERWQVAHDSRGIEGLLQRLGTLPAALVVLEATGGYEQALAAALASAGVAVVVANPRQVRDFARATGQVAKTDAIDAAVLALFAERVRPEPRPLPDEARQGLEALVTRRRQLIEMLIAEQNRLLHARRAVRRSLTDHIRWLERQLGGVDRDLDHAVRSSPLWRAQDDLLQSVPGIGPITSRTLLAELPELGRLSRKEIAALAGVAPLARDSGTLRGRRTIWGGRASVRAVLFMAASAATRWNPVIRIFYQRLRAAGKPAKVALTACMRKLLTIANAIMRSQSPWRVATA

SEQ ID NO: 434697 - protein, 339 aa, unidentified
MKLYTGIDLHSNNNYLAIIDDNDNRVFKRKLPNHPETILATLAPFREQVEGVVVESTFNWYWLVDLLREAGYHVHLANPAAIQKYQGLKHSDDNHDAFWLAHMLRLGILPVGYIYPKDDRPVRDLLRKRGHLVQLRTALINSLQGIISRNCGCSLNTNKIKAVKEDFITPLLAGQSDQQLSGAVSKDCIDFLTEKIKEIERSIKSSMMEKTSFQALQTIPGVGNILALTILLETGDISRFAKVGCYSSYCRKVPSQWTSNSKNKGKGNTKNGNKYLAWAFSEAAELAKRYSDSAKAFYNRKVARTNRMVAHAALAHKLARASYYIMRDGVEFDEKKLFA

SEQ ID NO: 434698 - protein, 358 aa, unidentified
MRQRQSNEISFKGQNIYVGLDVHLKSWSVTVLSENSVLKRYVQDPDPDALHKFLTRNYPEADYHSVYEAGFCGFWIHERLTALGIDNMVVNPADVPTTSDEKIRKTDAVDSAKLARSLRAKELKGIYTPDSTSLEIRSLIRLRSTITKDITRQKNRIKSHLRFLGYEIPAEMCNKYWPKRFILWLRELDMKTQSGRQSLDFMLDLLENLRKEKLQMTRALRALSRTEQYEKPLELMMSVPGIGQQVGMALLAEIVDIKRFKDAGHLAKYVGLVPMCHDSGDHQGIGDITIRKHSFLRTLIVESSWIAIRQDPAMTLAFEGYCKRMKPSEAIIKIARKLVNRIYFVMKWQTPYVNSVVS

SEQ ID NO: 434699 - protein, 348 aa, unidentified
MEKVAGLDVGVKHSTLCVVGRDGRSIKTVCRHRTTTEPLAIGEWLVAQGVGQVGLEAGAQSAWLARELEKRGLEVTVMETRRQHAFGSYSKIKTDDRDARLIGEALATGLYSRVHVRSAWSQEVRALLGARLQLKRQVQQSRQFVRGQLRAIGIELGRVSGKKWLSATEAAVAERGGILGLTLGAVLSSCKALAEQVGLLDKEIRRLVRQDAACRRMMTAPGAGLYSSLALRASLDDAERFQRSAEVGPYLGLTPARWQSGEMDRRGGITKQGDGLVRAYLYEAAVSLLERQKRDCPLRRWGLQQQARLGKRRTRVAVVRKLAVLMHKLWRSGQPFDWKRGMEETQIH

SEQ ID NO: 434700 - protein, 516 aa, unidentified
MPRAKKRRTGETDTSVITIDRDTGEIITVKKVNGKSRIIRIENEKGIEVMPAYSYGCGIDIHRSFGQLTVMVRNQGSVLEFRTAFNTDTESIVAAKEWTIDIIENHSDPKVTVDPDELRYTIESTGDYMTPVLLLWGGKPTVINPNIAKAGSRKSDIIDSRTLCLSSLMGTWPQSYVIPQEIQELRILLSERDSCNKLATRCANRIVNRLLKFGYTVARDGSVVKKKEVRKFVEDQFSETPLIKPLSEKIGIPDDVKCVFNDLYKDYDDYKKRVIDYDKRILSKVHSMEWEIQNGKVSGERIMKVLTSAPGIGPQAAFTWLAYVITPLRFETANKCAAYCGFDPSNRVSAGKVSSTSKRKGQKYVHTLLCQSAHILIRNKSEPFGHWGYQLKCQGSEKKARSALARRLCIALYYMQLKNEEFNYDMYAIAKEPDVIDISIEEMCELNSDFRRYMKPLISNEITTTKQMAHEFYIGNLNNVHGLGAKAYTLIRDFTGNQKRYQKLYREKENAKKTAK

SEQ ID NO: 434701 - protein, 431 aa, unidentified
MNAQDTTTNIDNQHQTQIPDQFVAWIGFDWGHHSHAFAIQDQSGQRQCGTIPATSEALHNWVGQLQNRFGSRPVALAIETNRSGAISALQDFYWLTIYTVNPSSSASFRKTFKPSGASDDIPDAQILLQLLLSHQDKLRPLIQQDQLTIKLDALTRTRRQLVDHTTKLTCQITSLLRGYFPQALEMFGDIDSPLAIDFLSRWPDLISLKAAKPGSLKRFYYTHNVRNNQLIQKRLESVKQALALTTNQAIVSPSVIKLKAMLGVLRELRKQITILDREIAIAFHQHPNAHLFRNLPGAGDALAPRLCALFGTVQELIPDAPTLQKKIGVAPVLEKSGKSAWTHWRWFAPVFMRQTMIEWAGQTVQYSRWARVYYRRMAAQGKDHWVILRALAFKWIRVLWKCWATNTIYDEPKYLRQLHRRKSPNAVYDQE

SEQ ID NO: 434702 - protein, 343 aa, unidentified
MSIIRIGLDTAKHVFQLHGVDEEEQPVLRRRLGRKEVERFFAKLPATWIGLEACGAAHYWARVLRGLGHAVVLLPPQYIKPYLKRGKNDALDAEAICEAMSRPSMRFVVPGLDPGIKSAEQQAALTMPRTRELLVKQRAMLINAMRGHAAEFGVIAAKGLAKVSELLQRAHAAEADVPALALEMLGLLASQLDALELKLKTIDAKLMAWHKANPVSQCLATQPGIGPIGAVSFTLKVSDPKAFRSGRHFAAWLGLTPKENSTGGRSRQGRISRQGDESLRKLLVLGAATVIQFAKPGRASAWLIDLLARRPRKLAAVALANKMARILWAMMVSGELYRRAQPV

SEQ ID NO: 434703 - protein, 358 aa, unidentified
MRIIGCDLHARQQTVAMLDTDSGELVEKTLQHDGEELRKFYSGLSRPVLVGIEATGSMQWFLELMEELGIECRVGDPAKIRAAEPRKQKNDRRDAQLLLKLLVENRFPTIWMPSTEQRDLRALLRHRHQWVRLRSRVQHTLQSMALNHGLRRGHALWNQAGQHALWTLPLAPHASERRKALMKLYPCLQESIDELDRQVSRQVDQHPPARRLMTHPGVGPVTALATEVFLGDPLRFTDGKAVASYMGMIPREHSSGGRQRLGAMSKQGNTLLRYLWCEAAMHAVERDPELKRFYRRKLVQKGMGKARVAAARKLGIRLWIMMRDQIDYQEFCRRGKARQESGSVRAGMPAINSGPAEA

SEQ ID NO: 434704 - protein, 373 aa, unidentified
MKEKVRFLGLDVHADTIAVAVAEANGEVRSLGTIPNRAESIRKLMKKLGAVEHLRACYEAGPTGYVLYWQLSELGVQCEVVAPTLVPVKAGDRVKTDRRDAEKLARSHRSGDLTAVWVPDAGSEALRDLVRAREAAKQDQLRARHRLSKFLLRTGQRPGPGVKAWTQGYLVWVRRLCYAQAAQTATLLDYLHEVEHMGERVGRLEQAITEAVKLASPQMQAVVRDLQALRGIAEISAVTIASELGRISRFESARQLMGYSGTVPGEDSSGKRMRRGPITKTGNAHLRRIVVEAAWSYRLRPAVGPGLRKRQQEVPQEIKEIAWKAQIRLSKRYARLAAAGKDKRKIVTAVGRELLGFIWAIGIKTEASGQRAA

SEQ ID NO: 434705 - protein, 369 aa, unidentified
MKKIVKYVGLDVHKDSITIAIADQGRNGEVRIYGKIPNNLNQVDKFVRKLTSKNAQLHCVYEAGPCGYILYRHLTNKGIDCAVVAPALIPKKSGDRVKNDRRDATKLATLHRAGELTAVYVPDQEDEAIRDLVRARADLRTALRKVKQQINAFLLRHGIGYPGKTKWSKAHLTWLTTIKMAHPAQQIALTEYLDAMENNEARVTRITKQLESFCQTWRLRAVVQALQSMRGISFVSAVTIIAELGDLNRFDKPAQLMAYLGLVPSEYSTGNSIKKGGITKTGNTHARKALIESAQAYRLPARKSISIRKRQQHVSEEVLAVSWDAQLRLCGRYRRLKARGKKHNVVITAIARELAGFIWSIARQVPVAV

SEQ ID NO: 434706 - protein, 471 aa, unidentified
MKETSNSAHGGSVQLPVLDPKAGGIDVGSEKMFVSIGGQEPTVFGTCQADLVQMRDYLLVQGVKSVVMEATGVYWICAYEILEEAALKVLVVNGAHVKNLPGRKSDMKDAPWLSQLHAHGLLRGGFVPPEEIRQLRDYVRLRGDWIEMGAAHVQHMQKALERLNLKIHDVISSLTGVSGLRMIRAIVGGERDREKLANMCDGQILHQKRDSLLKALEGNWKAQHLFALGQALQGWDFCQKQLVHCDQEIGKVLEQMARSRPQVAAQEGKNPESDDPAASPGSKPAKTKQKELRHNAPTILGDLHQLLERICGGQDLAALPAINDYTWLQFLSEVGPDLSAWPTEKHFTAWLGLAPGTAQSGKRRRREKRYGGRAGQILRVAARSMARGKQSWLGSFYRRLAATRGPKTANKATARKLAQLIYWTLTKGLAYVEQGIKRYEENYRKQLQKRLERQARRLGMVLLPMDLAPAH

SEQ ID NO: 434707 - protein, 328 aa, unidentified
MYLCILNQDGEILVHRNMPAGPEPFLKAVAPYREDLVVCVECIFPWDWLADLCAREGMPFVLGHALSMKAIHGGKAKNDQIDSQKMAVLLRGGMLPQADVYPAAMRATRDLLRRRMHLMRKRAELLAHVQNTNSQYNLPGMGKNIAYKANRDGIAERFPDPAVQKSIAVDLALIGHYDPLLNDVEFSIVHTAKQPDPQTLSRLQSVPGIGKILSLVLLYEIHTIDRFPRVQDFVSYCRLVKGAKESAGKRYGTSGAKIGNAYLKWAFSEAAGLLLRTNPAGQKSLARLEKKHGQGKALTVLAQKLARAVYSMLKRKTAFDMPMFLQSS

SEQ ID NO: 434708 - protein, 368 aa, unidentified
MEEIRAFVGLDVHKATISVAVADNWRSGEVRHVGTIENSPLAIGKLARKLARQHGAIEFVYEAGCCGYNVQRQLAEMGMSCRVCAPLLTPRKPGERIKNDRRDSIALARLHRAGELTYVWVPDELHEALRDLVRARHAACQDVRRDRIRIQAFLLRYDLRFEGKPWSTRHRKWIWNRQFAHPAQQVAFQAHLNALDHDEARKRELEEQIRELLAESPWAKQMRALQALKGVGPIVAATVIAEVGDFSRFAHPRQLAAYFGLAPGEHSSGSTVRPRGITKAGSSLARAVLCEAAWNYRTTPKVGQWMNERCPPVPQDIKALAWKAQLRLHKTYRRLTARGKRSVVATAAVARELLGFIWSIGQRVPLGA

SEQ ID NO: 434709 - protein, 317 aa, unidentified
MNTKNNQNEINVGVDTGKTQLDIYIRPLDIYFTVENNQSGIKHAIQILKKHPVTRVTIEATGRLEQPFMIACAEANIPFVVANPVNIKRFAGAIGQKAKTDKLDAQLIAYFGEAIKPPLSSLKPEQMRLMSDLLSRRRQLMDMQTMEKNRSQIMPKTLSSLIKPILTALKNQIEKVDLKLQKLIKECDEYEAKNNIIQSVPGVGNVVAFNLLSDMPELGYVNNKEAASLVGVAPFNRESGVYQGKRMIRGGRPKIRTAMYMAMMSAIQCNPKFKDIYQRMIAAGKPKKVAIIACIRKLVVIINSMVRDGVMWDPKMV

SEQ ID NO: 434710 - protein, 319 aa, unidentified
MTTNSVVVGVDVAKDRLDVAVRPSGETWSGANDEAGITALVTRLRPLGPALIVCEATGGFERAAIAALAAAGFPVVVANPRQVRDFARATGQLAKTDRLDAGILALFAERVRPTPRPLPDAAAQLLDAVLTRRRQLLEMLVAEKNRLGFAPHPLHRGIQAHVRWLERQLDDVTKELAGLIEASPVWRAKDDLLQSVPGVGPIVSYTLLGELPELGTLSHKQIAALVGVAPLARDSGTLRGKRLVWGGRASVRTALFMAALCGRRWNPALKRFYERLKAAGKPTKVVLIACARKLLTILNAMVRDDKRWAVPTPSAQYSC

SEQ ID NO: 434711 - protein, 386 aa, unidentified
MATQAAHTGETSVGGQVLYMALELSDATWKVLFASATGKRRERSVRARDLARLMEEIAEAKRRLGLDAGARVLSCYEAGRDGFWLDRALKAKGIENLVVDSSSIEVARRARHRKTDRLDLIKLMGLLLRWAGGEKRVWSVVRVPDAAAEDIRQLSRAIDRLKGERGQHRSRIKSLLALQGLKLASIGGDKWAKRVAELRAWDGSGLGCHLQRDLITQGERLALVESQLATLKAERERLVGQSAQPAAVKARQLAELGAIAEESSFVFATELFGWRTFANRRELAASVGLVPTPYKSGNSEHEQGLSKAGNGRMRTMLVEIAWCWLRYQPSSALSQWWQGRFGKTGGRARKAAIVALARKLLVALWRYLEQGIVPEGATLKTRRVAA

SEQ ID NO: 434712 - protein, 405 aa, unidentified
MTKFSVYIGIDWANDKHDVCVQVANSSTRKFEVIKHSPKSINEWISSLHKQYKGQIAVAIELSKGPIVYALQKFDFVTIHPVNTSMLAQYRKAFSPSGAKDDPTDAELALDLMLRYPNKIKALKMESESVRKLTYLVEKRRKLVDNKRRFSNRLIITLKEYYPHLLDWFSHRGSGIFCDFITRWPNLQKLKRARPDTLKKFFCSYPGRTAAYSVKRIQSISEAEPLTLDNAVIESHQLLVAVKVIKVFDREISELFNALPDAELYNSLPGTGPCLAPRLLVAIGENRSRFNSASEIQMYAGIAPVTVRSGQKSWIHWRYQCSKFTRQSFIEWATKSIRQSYWAEIYYQQQREKGNTHQAAVRSLAFKWIRIVFRCWKTKEPYNEAKYLKALSDRNSPLLFKEKAC

SEQ ID NO: 434713 - protein, 360 aa, unidentified
MPTGPVTGGVDTHSQIHHAAAIDQVGRPLGDREFPTTPAGYRALLAWLRRYGELGRVGVEGTGAYGAALARELRAEGVVVVEVDRPNRQTRAALGKSDPLDAYAAARAALTDARSGVPKSRDGVVEAIRALRVARRGAVKARTQTLNQLKALLLTGPAELREDLRHLSTPALVQACARLRAPGPLRDPTQATKVTLRRLARRHQHLTAEITAADAELKELVTTVAPGLLSLLGVGVEVAGQLLTSAGNNPDRMRCEAAFAHLCGVAPIPASSGKTHRHRLNRGGDRGANNALYTVALSWIRCDPRTRRYLDHRTAEGLSKPEIIRCLKRYPAREVYQVLVTASPSSSSPPPHRPQRAGQP

SEQ ID NO: 434714 - protein, 410 aa, unidentified
MDTLVQRCAGLDIGKADLKACVRIPGGRGRRHQEIRTFATTTPALLELRDWLSANEVTVVGMEATGDYWKPVCYLLEDAFDVQLLNARHMRNVPGRKTDVADSAWIARLIEHGLVRPSFVPPPRIRRLRDLTRYRTTLVQERTREIQWLEKVLEDAGIKLSTVASHTLGISGRAMIDALIAGERDPQVLAALARARMRAKIPALRDALVGRFTDHHAFICRTMLDRIDAAAATIDAFSARIEDEIRPFQTIVARLDTIPGVNARTAQVLIAEIGVDMSRFPTPGHLASWAGMCPGNHESAGKHHGGATRKGDSWLRGALGEAGAGAARSKDTYLQARYRRIASRRGKKRALVAVGHSILTAIWHMISNDTDYNDLGAAYFLTRTDPARQARRLLGQLHQLGYQAVITPIT

SEQ ID NO: 434715 - protein, 444 aa, unidentified
MKKAILILIPATVSWLVVQNQKRSIAMKFIKAEKIKTINTKTLIVALDIGKNIHYAYFRAPNGKDIRPFPFYNTSHSFDNFWEKLSRFKENHMLDEVVIGFESTGPYAEPICHYLRKKSVKLVQINPMHTKRVKELTGNSPGKTDKKDPRVIADVISLGHSLTVVIPERAAAQLRRLTHARERAIERRTAMNNQLQGLVFVIFPEFVSIIKPSTKTGMYLIKNFSDPKSIVSIGIERLYEIIKKISRGKIGADRAEKLYNAAIQSIGITEGVESILLEITHLVSSIENENRHIKNLEKQMVVFLEQIPYSHTILSIKGIKHITAAGLIGEVGDFRKFKTISKVMKLAGLDLYEISSGKHQGCRRISKRGRALLRKLLFFGALNTTRKNGVFYTPYQRHLAKGMPPMKALVAISRKLMMVIFALVRDHCKFDIDYSTQIELKKAA

SEQ ID NO: 434716 - protein, 416 aa, unidentified
MKKGQNTRGYQRYMALDIHREYLLVGGWNEEKEWVLTPRRVGLEKFPEWAKKNIHAGDIVVLETTTNVWTIYDIVAPLASRVLVANAAEVGEIANARVKTDKEDIKRLLKLLIGGIVPEVWVPPMHVRELRAFISYRGRLVTTSTMIRNRLQSLLHKHNLMLSEAGLLDQAWWEAQKNISRLEQMQIRQELVLLQEVEKLKVAVDEELQRQSTSSTWNKAALQIMQLPGMGFVVAMTVLAAIGDISRFENAKQLVGYAGLGAGVHDSGKTHKDKKITKKGRRELRWAMVEAAWRAVRMSPFWKAEYEKHLSRMRKPNQAIVVIARKLLVAIWHVLSKEETDVHASEEDLAYKMLLFSWSLSEDVRQGLTYKQFAKYALMKLGVETDITRFVRKNVPRRLAPREEVLARMTELGLTA

SEQ ID NO: 434717 - protein, 348 aa, unidentified
MVTIGVDPHKQTHTGVAVDPLGVQIAQRTVAARREGFGQLLEWARKLDSERAWVLEDVRHVSGSFERFLIDRGETVVRLPPRLMAGARQGVRERGKSDPIDGLAIARAALREGIDTLPTARLAGAELEIRLLALHRERLVGSRTRLINELRWQLHDLWPDWEIPKRVLIHPGWQTKIARRLSRTERTVQVQIARDMIARVREPTRTITELYEQLADLVRQVAPQLLAEKGLGVLIAAKLIGEIAGIDRFTSDAQLARISGCAPIPVSSGRTDRHRLDPGGNRQLNHAFHMLAFAKILHDPRTAAYLAKQRRNGKTNREAIRSLKRHLVRRVYHLLRDPNSVPITICLT

SEQ ID NO: 434718 - protein, 400 aa, unidentified
MIYVGIDVAKNKHDCCILNSSGKVVSTFVFDNNKSGYEKLIAEITRFSKSKSYVDVKIGLESTGCYSLNITNYLNQKRLSVKVFNPLLVNLRRKAESLRKTKTDKSDCKFLASMLFSEESEPYLQPVLPISELKILTRNRSRLVHMRTKLKQSIARLVDTLFPELPSLVYSLHQKSTYAMLLEYPTVRAVSLAHIVKLTNLLSANSRGKYGREKALQLRELASNSIGYDSIATGFELKQTIRLIQNLDSEIDELDTQIKTTMDELNSPILSIPGIGYTLGAIILSEIGDIRNFSNPAKLLKFAGLEPSVYESGRYKASDTPMVKRGSPYLRWALLQAARLIALHNPTFRAYQEKKRAEGKHFFVVQSHMAKKLTRIIHKLLTTDTTFDSEVVADKECVAA

SEQ ID NO: 434719 - protein, 317 aa, unidentified
MDQRSPVFVGIDVAKDRLDVHVLPSGEAFAVTRDHAGLERLVTHLRQATPALVVLEATGGFEITVAAALSGAQLPLAVVNPRQIRDFARALGRLAKTDALDARVIALFAERIRPEPRPLADAQAQRLAELVARRRQIVEMIGAESNRRRQARDPQLQRDLDTHLVWLHQPLTRIERDLDDTIRGSPAWRATEDLLASVPGVGPITARTLIAELPELGGLDRRKIAALVGVAPINRDSGTFRGRRMVAGGRSSVRKALFMATLTAIRFNPPVRALYHRLIQAGRPAKLALTACMRKLLVILNAMVRDGRRWADSGSLM

SEQ ID NO: 434720 - protein, 312 aa, unidentified
MADMVRLAGLDVSKDKLDVYVTPSGESRTVGYDRRGLAGLRRWLVGLGVALVAVEASGGYEREVSEVLEEAGLIVHRLNPLRVRRFAQLKGRLAKTDRLDARTIAEFARTWPQEHQLRRDPRRERLAEHLLVRRHTQDAILDCINQLEHLRDGRLRRLVAARKASMERTLARLDRCLVELIAEHDDLAELSQRLRSVPAVGPVLATTLIALLPELGSLTRRQVASLVGVAPFDRSSGRQIGAKSIQAGRGLVRNALYMAALVASRHNPAIAAFAERLAGKPGKVRLVACMRKLIVTLNAMVRDGSQWQSRTA

SEQ ID NO: 434721 - protein, 436 aa, unidentified
MRGCRCSMIMGFNKPIEHFNLQQKKVITTNTLYVGIDVSSKSNVIYLMLPNGDKHSNFSVANSHEGSTQLVKRILSALTSHSLDTVLIGLEATSVYGDNLVYFLREDATLAPFNRKIHILNPKQVKKFHDAYNDLPKNDYVDSFVIADCLRFGRINKEVYMGDYRYKALQNLTRARFFAVQNLIKEKQRFMNVLFKKHSTMTQEKVFSDTFSTTALAVYDEFESAEVLANMDLHELTDFIIDKVKNRFPDPDAVAKAIQKAARSSYRLPKTVNDSVNQVLSISITSMKALESQIKEFDKAIKAQMELLPNVLISIPGIGPVYSAGIMAEIGDINRFNSQAALAKYAGLAWKQHQSGGFEAEVTRLIPSGNRFLKYYLCEAAFSLVRCDKEYSDFYHLKYKEVNRCQHKRALALTARKFVCLVFRLLKDNRLYCPAK

SEQ ID NO: 434722 - protein, 461 aa, unidentified
MNRRKPADKQKRSTHRKVDWKALEIVHQDAAGIDVGGSEHWVAISPDRDSEPVRRFGCFTRDLHEMAQWLVEKRVRSVAMQSTGVYWMPVFEVLEGHGLEVYLGNAQHTKNVPGRKSDVQECQWLLKLHAFGLLNNSFQPTDEVRIARTLWRQRGNLVAEASSAIQRIQKVLTEMNIQLSNVLTDISGVSGMTIIAAILEGERDPYELAAMVQSGVKASLEDIAKSLEGNWRKELLFVLKQHLELYQIYQQKIGDCDLESRQHLEVLNSTVDLTTQPIGPRPKGKKNSRNAPSFDLRTELYRITGIDWSQINGIDVLTAQTVITEAGADLSAFPNEKQFASWLGLCPTNEQSGGKILNRRTRKVVNRATVAFRNAASTLIRSQSYLGAQYRRLRTRLGAPKAITAMARKLACLFYRLIKHGQQYVDKGVEYYEARYREQQIRSLAKRAQKLGLQVIIPTTA

SEQ ID NO: 434723 - protein, 401 aa, unidentified
MVSDFRKGRYNLMKIYVGIDIAKLNHFAAAISSDGEIIIEPFKFTNDADGFQLLVSKLESFDKNSLIIGLESTAHYGDNLVRYLVTELYQVCVLNPIKTCQMRKNNVRKTKTDKVDTYVIAKTLMMQDNLRFVSFFDLDMMDLKALGRFRQKTIKQRTRLKIQLTTYVDQVFPEIQYFFKSGLHQHAVYALLKEAPSPKEIASMHMTHLANLLKVNSHGHFTKEQAKELRVLAQKSVGANDSAISIQITQTIQQIELLDSQLEKIEVEMTDIMKFNDSVIMTIPGIGYINGGMILGEIGDIHRFSNPNKLLAFAGLDPSVYQSGNFQAKTTRMSKRGSRVLRYALVNAAWNVVRNNATFKAYYDAKRAEGRSHYNALGHCSGKLVRVIWKMLTDEVEFNLE

SEQ ID NO: 434724 - protein, 334 aa, unidentified
MQNVTLIGIDLSKHSFHVHCQDRQGNALLRKKFSRTQLINFLGSCKAATVVMESCGGAHFMARRIADLGHEAKLISPQFVRPFVKSNKNDFVDAEAICEAASRPSMRFVPPRTEDQQAMAALHRVRDSLIRQRVKTTNQMHAFLLEFGVSLPRGIAVIRRLAAVLEENDFPPYLARVLSRLHSHYVYLSGETEEVDKELKTHLAEDETAQRLLTIPGVGPVTASLLAMRLGDGKNYASSRDFAASTGLAPRQYSTGGKTTLMGISKRGDKNLRRRLVQCARVFMQRLEHNPGRLAEWVNRQLARHHSNVVACALANKLARIAWAVTAHQTVFIK

SEQ ID NO: 434725 - protein, 343 aa, unidentified
MFNLTTNFSHTVGIDIAKSVFLVHVCDTQTGEIIDRQLRREQVLEHFANRAPCLIGMESCGGSQYWARKLVELGHTVRLMDGKLVKPFVSRNKSDKADAEGIWVALTQNVRCVAVKGKMERDIQTLLTMRSRLVSHRTACVNHVRGLLMEYGQVIPKSLPRFESTVDECINALEGDAAPLVIETFRSIVKQIRESSEQIVQLTKEIRKLAKQTRHGDNLESVPGVGVVTMAYMCVLLADPGIFSSARQFAAYLGLVPMHVGSGGKTMNTHIPCRCNKALRALLIECAHSVARMRNPSPWVKGILEKKPGKVALIAIANRIARQCWAVAKNNQPWRNIPQATAA

SEQ ID NO: 434726 - protein, 410 aa, unidentified
MAYKVAGIDVHKKVLRVVVCDTEASTWEFQRKRFGTTTFDLQQLSAWLRERGVQQAVMESTAQYWKPVWYELEPQMHLALAQAFSNRAPRGRKHDFRDAERLVRRLVAGELILSFVPEPEQRAWRTMTRMRVQLTRDVSRLRSQMECLLEEMRIKLGAVLSDLLGVSGVRILRALAQGERDPQKLAALGEESLHCSEKHLIQALTGHPEPPHRQLLGLYLDRYQLLREQMQRLDEMIAQAMKPHEEAVIRLAAAVGFGVDSAQQVIAEVGTDAGMFATAANLAGWAGTCPGQEETAQENHSSRSPKGNKYLRRTLNQCAHAAVKTKGSHFQVVFRRLLPRLGYNGAIWAVAHRLCRLAWKILHDKVTYVERGDSDPATKKRRAQALARKLRNLGYQVNITLITQPTAATA

SEQ ID NO: 434727 - protein, 356 aa, unidentified
MIEMNAAEIVIGIDTHKDIHAAVAMSGIGARLGATTIPTTPAGYKTLQAWAEAFGTIRAFGVEGTGSFGAGLSRFLQARGPTVIDVNRPNRQLRHQHGKTDSLDAESAARAVLSGQADTRPKTGTGAVEMIRHLKVARDTAVKSRTQAMVTLKTLIVNAPAVLRQTLDALRGKMVLIRHLAALRPGPMISTVASAKTALRAMARRWLTLDAEIKAHDADLEALTTAQAPAMLKAPGIATGTAAEMLILVGDNPQRIRSEAAFAKLCGVCPVPASSGKSSRSRLNRGGNRQANAALYRVVIVRIRHHRPTLDYVRKRTAEGKTKREIIRCLKRFVTREIFGYLCRPQRPTNPTPEPT

SEQ ID NO: 434728 - protein, 466 aa, unidentified
MTPHKDYFLDPRPPATPTLPQSPVLADALQVHHPHAAGIDIGEAEHWVAVPPGCDPQPVRRFGTFTVDLDALADWLIDCGVTTVAMESTGVYWIPLFELLEARGVQVLLIDPRQAKRAPGRPKTDRLDCKWLQRLHAYGLLAGAFRPEDQVCVLRSYLRHRQMLLISAAHHIQHMHKALQQMHLKLTQVVSDLTGVTGMAMIKAIVAGERDPVTLAKLRNPHCQHDADEIAKALQGTWRAEHLFALRQAVELYQFSHQQVALCDQQIKAHLETFADTSAGQPLPPKARRHKKTNEPRFDARTPLSRLAGVDLTTIEGIEEGTALAILAAIGTDMHRWPSVTHFWSWLGLCPQQQISGGQVLSRRVRPGAHRVTVALRLAARSLPHSQSALGAFLRRMQARLGTPKAITATAHKLARLVSSLLQHGSAYVQQGLDAYEAPYHERKVQTMAKQAKALGYTLVPLAAQG

SEQ ID NO: 434729 - protein, 368 aa, unidentified
MSRIAERAGLVTGGVDTHADVHVAAVVDQVGRVLGTRAFAADASGYAGALVWMRAQGELAKVGVEGTGSYGAGLARYLAGCGIEVAEVIRPNRQARRQRGKSDAADAVAAAVAALSGEASGMPKSRDGAAESIRALRVARAGAVKARTQAGNQLRDLILTAPEPLRQQLAGLPSGRQVGVAARFRPGDPACPAEGAKAAMASLARRHQQLTAEITRLDAMLDELVRHAAPDGFLAKRGVATQVAATLLVTTGDNPGRVQKEASFAALCGASPVDASSGKQIRHRLNRGGDRQANSALWTIAMTRLACDPRTKAYAARRTAEGKTKKEIIRCLKRYIAREIYNALCRHQRPSKAPAPQAKQDLSATALT

SEQ ID NO: 434730 - protein, 337 aa, unidentified
MNYSGIDLHSNNSVVSVIDETDRVLAEKRLPNDLTRILAFLAPWRAALAGVVVESTFNWYWLVDGLQTAGYVVHLANTTAIKKYDGLKHSGDETDARYLAHLLRLGILPVGTILPVKLRALRDLARKRMQLVRSCTSHILAVENVTARQYGTRITSNQVKRLDEHAVDQMGLPDNVTLAVRANVAVITTLREQIAIVEKRLQKEVAPHPDYVLLTTVPGIGQTLATVIMLETGTIDRFASAGNFASYARCVDSQRMSNGKKKGEGNTRNGNPYLCWAFIEAANFAMHFSTEARQFYERKKARTNSVLARKALAHKFARACFHMLKERKPFDVARCFA

SEQ ID NO: 434731 - protein, 453 aa, unidentified
MPKPKSSSAQNLTRINPGAAAIDIGSTMHMAAVNPDNDDMPIRAFGTFTHDLHHLADWFKSCGVTSVAMESTGVYWIPAFEILEQHGFEVILVNARYAKNVPGRKTDVSDAAWLRQLHSYGLLRGSFRPTAQVATLRAYLRQRERLVEYAAAHIQHMQKALMEMNLQLHHVVSDITGVTGMKIMRAIVSGERDPDVLASMRDIRCHSSTETVRASLIGNDRDEHVFALAQSVELYDFYQQKMLECDRRLEGAIAAMTAEVETPLAPLPKIRTRTKQVNAPSFDVRAALYGLVGTDLTQIHGLGSSLALKLVGECGTDLRAWPTAKHFTSWLCLAPGNKISGGKILSSRTRRSSSRAAALLRLAATTIGRSDTALGAFYRRLAGRTGKQKAVTATARKIAVLFYNALRFGMVYQDPGADAYDEKHRGRVIANLQRRARSLGYQLEPTAAGECVS

SEQ ID NO: 434732 - protein, 351 aa, unidentified
MVIIGVDYHPSFQQIAFFVEETGEYGEQRLNHEGGEAERFYRDLQQRGIGVRVGMEATGYSRWFERLLAELDFELWIGDPAEIKARRVKKQKTDRKDAEFLLKLMREDRFPRVWVPSPENRDLRQLLWHRHRLVQMRTRIMNQLQALAMNEGRRLKSKLWSKQGRAELEKLALAPWATRRRNELLELLDRLNPSIEELTTAVEKEARKRPETLRLMTHPGVGPITALAFVLIIGTPARFARGKKIGTYVGMIPSEDSSGDKQRLGHISKQGNSLLRYLLVEAAQAAARFNSHWRRRYTHLTMRRHRSIAKVAMGRRMAIRLYWMWRNGCEYSPSFEFGSYAGQLAVRHGVQ

SEQ ID NO: 434733 - protein, 364 aa, unidentified
MKRSTKYVGLDVHQATTVSTIRDDTGRVLARTVVPTAAEALVEFFRRMRGPIHVAFEEGTQAQWLHDVLVPVVHRVVVCDRRGKRQQGNKGDQPDADELSDLLRCGRLRAVYHGSGDRAMLKELARTYANLVEDGTRVMQRVKALFRARGIRTAGRSVYQRDQRAAWLRQLPDDGVRFRATVLYKELEILQELRPKAKAAMLTEARRDPAWRVLRTIPYLGPVRVALLLAALQTPWRFRTKRHLWAYAGLAVVTHTTAEYELDGQRTVRRRRRSPMTRGLNRNHNRVVKDVFKSAATTAATRPGPLHDWYAALLARGLRQELARVTLTRKLAALTLHLWKTGERYDPAKLTTSMVHTMHAVQAR

SEQ ID NO: 434734 - protein, 390 aa, unidentified
MIYVGIDVAKDKHDCCILGPDTEELFQVFTIRNNSDGYGELFHKIESVSKDKSQIKIGLEATGHYSYNILGSLLDHGYHTFVINPLHTNLYRKGQSLRKTKTDKVDARSIAEMLVTDKTLKPYTGTSYHSEELKSLTRYRFELVKERAKLKTSVSRLVNILFPELESLVPTLHMNSVYRLLQELPGAYFIASSNLTHLKALLADASKGRYGREKAIVIRETAKSSIGSLMPAKSMELRQTIRRIDTLTSDIKEIEQSIQKIMDECGSPITTIPGIKYRMGAMILAEIGDFTRFSNADQVLAYAGLSPSTYQSGQLISSYARMEKRGSKYLRYALFNAAIYVSGWDERFRLYLSKKRAEGKHYYVAISHVIKKLVRTIFRMEITHTSYQPL

SEQ ID NO: 434735 - protein, 386 aa, unidentified
MPQLNDLSRSLVTLEQDATLIAVIEMGQSSWLVAGIVPGVARSPLKKLAVDESALLKLLNRWREEAEKAGHRIERIAIAFEAGRDGFWLARWLRARDIETHVIHASSVAVSREHRRAKTDRLDTELLKRAFLGWLRGERNHCKMVAIPTLAQEDAKRPNRERESLVGEQSRIVNRMKAALARLGIRGFNPKLKKAVERLDGLRTPEGEPIPPNTLAELKHDMERRRLVRSQIRDIEGARLERLEQAPGDGPHVMVRLLARVIGVGVETADMLVQEVLSRNLRDRRAVARYGGLTGSPDESGKKRREKGLARSGNARVRRGMIQLAWRFLMFQKDSALAHWFYARTKNAPQTRKTMIVALARKLLIALWRLVREGAIPEGIVLRPVA

SEQ ID NO: 434736 - protein, 368 aa, unidentified
MVHKSSKLYVGMDVHKESIDIAVADESGEVRHHGQIGGDMNALWRAVRKLESLGRELVFVYEAGPCGFGVYRGLIARGHVCWVVAPSNTPRRVRDRIKTDRRDSLKLAGLARAGELTPIYVPDVRDEAMRDLVRTREDAVMMQRQARQRLAALLLRNDVRYAGKTAWTVAHRRWIADLKLPQSAQRLAFEEYVQAVEEASARVQRLSQCIEQELATWRWRSVVAALQACRGIQVIHAVRIVAELGDLSRFRHPRRLMAYLGLIPSEDSSGEHRQQGAITKAGNSSARRALVEAAWAYQYTAKVSALIARRQANVPKAALDIAWKAQVRLCARFRRLAARRVNRNKIVVAIARELVGFVWAIAQQVKPI

SEQ ID NO: 434737 - protein, 429 aa, unidentified
MSQADRPSSPIDASVYQYIVGIDIGSQMCSCCALKSDKSQVIKPTEFPNAMPGFTFLQERLEALGVDPNHILIGLEATSRYGENLYRFLENRGYSLCLLHPRQTHQFAQQRGLRAKTDRLDASTIARMLLSGEARRGYVPTERIATYRELVRLHTQLSDDIARYKNEIHALLIVLFPEFTQVFADPSRPTALGLLKRYPSAQAMAAAGLQAITDTLQELAPRHFGRKTAQRLLQVAQQSISSGIAASARARSLAVLCDQLEHTQTNLEQLEEELDRLLEADDDAKKLREVPEFGRKMVAVLRAELGDITRFQRADQVVAYAGLDLQVRQSGKWKGETKLSKRGSGRLRRLLYMTAVRCTRLRDSAFGQYYQRLVARGMKKMEALMAVMRKILLVAYRLLRTQETYDPTKVCAAPAQRIPSSGKLAATRG

SEQ ID NO: 434738 - protein, 349 aa, unidentified
MKYYAGLDVSMKTTFICIVSQEKKVVFEQEVLTDPDEIYSSIRSTKLVIENSAVESGSISRWLVQEISKRGLSIVCVDARKMSKVLSININKTDKNDARLIAEALRCDFYSKIEQKPQKYVEEKILIGARQTLKHSSTQLKNTIRGHLKAFGIRLGSVTDLKFEGFVMKAIKDKAEIVVMSLKALLDTFKEINKQVDVLEKQLKNMAKEDEDIQLLTTIPGIGLITAHTFKVHLGDPKRFKTSRSVGAYFGMTPTQYSSGESHKQGRVSKCGSPVVRSLLNEAAFSILYSAKSWSRIKAWGQKIRKKKGHKKATMAIGRKLSTIMHRMLITRKPFEYGTPKEKEVKVMQ

SEQ ID NO: 434739 - protein, 374 aa, unidentified
MTSSMPAPDARRKVIVGVDTHKHVHVAVTIDVWGIRLEDRSFAADSGGYRQLIAWAVGFGPIEAFGIEGTGSYGAGLTSAVRRAGHRVIEVNRGDRRARRANGKSDTLDAELAARSVLAGQSTAVPKTADGNVEMMRQLKIARDTAVKARTSAIISLKTIIVNTPAELRESLTGLGDKTLIDRCAGFRPGLLDSPTAAAKHTLRALARRWLFLNDEIHDHDRHLDQLTADTSPTLRDGFGVGADTAAEMLIIFGDDSNRIRSEAAFAKLCGACPIPASSGMTTGRHRLYRGGHRQANAALYRSTIVRMRFHQPTIDYVARRTAEGMPKREIIRCIKRFLAREIYQRVMTDHRARHVDSLETPAPSIPPALSAAV

SEQ ID NO: 434740 - protein, 439 aa, unidentified
MTTPALPVLDPTAAAIDVGSEQLHVSIAGGPPKIFGTTTGQLHALRDWLKESGARTVAMEATGIYWLCPYEVLEQAGLQVVVVNGKYVKNLPGRKTDMKDCQWQATLHAHGLLKPGFVPPEHIRRLQDYLRLRTDHITLAASHEQHMQKALERMNLKIHDVISDLTGASGLKMVEAILAGERQADALVALCDPQIRRNKAARLREALEGNWKTEHLFALRQAHELWQFYQKKIAECDQAIEAVLQELAGPEDPQAPAPPPTKRGGINTPQIAGLHSLLYRLCGGKDPTTLPGVADYVLLQLIGEVGTDLGQHWKSEKHFTAWLGLAPGSRQSGKRRGSQKRSRNRAGRLFCVIARSVGRSVDKALGGFYRRLKGRRGGLVANLALARKLAELFWRLMVHGRAYVEAGLKTYEEKVAHTEQRLLQKLARKYNLVLQPKAA

SEQ ID NO: 434741 - protein, 391 aa, unidentified
MIFVGIDVAKDKHDCFITNSDGEVLFNAFTISNNLEGFNNLYLKIKSVMKDVSKVKVGLEATGHYSYNLLGYLIDKGLATYVINPLHTNLYRKSLSLRQTKTDKVDARTIASMLMSDVNLKSYSDTSYHNEELKSLTRYRFDKVKERSALKVSISRLVCILFPELEHLVPTLHMVSIYALLYEFPGAKQVASAHLTRLSNLLEDASKGHYRKDVAITIRDTARSSIGSNMPVKSLELKHTIRLIQELDSEIDEIENQIKIIMDNISSPILSIPGISYRMGAMIIAEIGDFSRFDSPDKILAYAGLSPTTYQSGQLDSSHSRMEKRGSRYLRYALFNAAKYVCHWDPKFALYLAKKRAEGKHYNVAMSHAAKKLVRVIYQLEKSNQQYIKAV

SEQ ID NO: 434742 - protein, 492 aa, unidentified
MAAEENRKDADGPDGSAAVPGGHGGAGAEVSEDQARVIERAASIDVAKGFGMACTRVPGSRADRRLQKVWRVEATYREVTALMDHLRCEGIQRLVLEATSDYWRMWYYLAEAAGLEVWLVNARDVKHLPGRGKSDRADCVWLCKLNERGMLRRSFVPPRAVRDLRMLTRTRSRLAQDQARHQARVEKILEDALLKISVVISDLFGTSGRRFLDALVAGERSPQALAALGDYRLKATPEQLAEALTGQFRDIHAIEISTHLAILDVINEQIGRLDEAIEAQLAVVPRTAPACASCGEIGGGHAPGCAGEHEVLLSLAERLDEITGVGIINARVMIAELGTDPSQFPTPGHAAGWARLTPRTRQSGQTAKPGRTGKGNSYLRGALGQSAMTAARTDTRLGAMYRRIARKRGKQKAIVAVSRVICEIAWILICDPGARYAELGADYYAPRSRERRTRDKIRELQRLNPGMKVLLVPADGAVPAGQAAVPDAATAA

SEQ ID NO: 434743 - protein, 420 aa, unidentified
MDKNDDSRLEGFRQLKREIRGSTEYLVAGMDISKERHHAFFGTPAGKVLLHRLVFDNSKEGFEKLCFQAEILRRQHALAHVVFGMEPTADYHKPLGEYLIEQGHTVVLVAGAAVKKNRELLDGRWDKNDTKDAANVADLITQGKCLFYDFPSLDLRELRSLLSLKRRLKKLEQGYKVRIRNHLVAQYFPEMDAYFTYAEGPDIVCRLDPRRLAGLELREFKNMVPKGNWKQEERLGEIQAKAASSVGCAAHPSVAFEASTLLDGLKGLSLTIKETDKRIAAVARRFPEYPYLLTIPGFGPDVSAKVLGALGDPYRFENQRQVLKMAGLDLSSDRSGKRTDVIPVISKKGKADLRYGLYHAAVIASAKNPPFISYFTDKLKGREKEKGITTKMRIKLAAKLLVIAWTLMKKKEVFNPDCMK

SEQ ID NO: 434744 - protein, 444 aa, unidentified
MKYVGLDWAYRQAQWCALAPGGEIAGEGRIAADRDGLARLALELGDEVKACLEMMSGALWVRDQLVACGWQVEVADARKVKTVAPLAAKTDKVDARLLAELCRRELVPGLWLPSLDERALRERLRRRMHLVRLRTSAKGRIFGLQTQWGVRVPLARLRRADGLTLLERAGVPEVWRRSVGECLALIDFLDARIAPLDAELRPFAKADPRAVLLDTIPGVAELLALTIAVEIDEINRFTRPEKLVSYGRLAPRVRQSGDGRARSGPLSKSGLAAARLGRRRGRPTGVARNESLARALPRRRSPLPQHQRRQGRGRAQGPDRRLAHALPQPALQARAQNHGGHLCPGKLPLGFGRLTALYGIEKPRQLPSTRCATQRQERDEHPTVREQQRRCDQTAENLTSGPSSERAKRAQPVATGRTGGALKTAQIGRSATGGNPRQRFWSAW

SEQ ID NO: 434745 - protein, 350 aa, unidentified
MVVVGADVHKRTHTFVAVDEAGRKLAEKTVPAVTAGHAQAVMWVREQFGSDVTWAIEDCRHLSARLERDLLAFGQKVVRVPPKLMAQTRASARTRGKSDPIDALAVARGCLREPDLPVASHDEVSRELKLLVDRREVLVAQRTATINRLLWRVHELDPERAPKPRSLDLAKHRRLLGDWLDTQSGIVAELARDELADITRLTETINALAKRIGHRVRLVAPVLLAMPGCGELTAAKLVGETAGVTRFKSEAAFARHAGVAPVPVWSGNTRGRVRMTRSGNRQLNAALHRIAVTQIRLDGLGQTYYRHRLADGDSTPEALRCLKRRLARVVFNHLTTDHNNRQTACQPAAA

SEQ ID NO: 434746 - protein, 347 aa, unidentified
MTIIGGLDVHRAQITFDYLDTETGEIFTGQIRPASRSAFREWLDGQFGGCADVRLAVEGCTGWRFIVEEMQRAGVRPHLAEPAETASRRGRKRRAKTDKADARLLRNLLLEDRLPESWIPPQLVLEARILARLYLSLSADRSAWLQRIHAQLYHQGVPAIETLLTGDGCAKLVEAALSPAGRQAVLTATATIQALDQQREPLRAQLQALARRLPGPRALTAHFGIGPLTAAVIWCEMGDCQRFRNSDQVVRLAGLDVTVWASDSKRSPGRLARQGSPALRWALFEAAKTSARPASPDYDFYEATRQRLDAKRATLSVARKLARRCYHTLRDLGAEAISDADETTQAA

SEQ ID NO: 434747 - protein, 427 aa, unidentified
MKEQSGMIVGIDWSADSHTCYDLKADKSFKIPDSVKGYERLLNDYPEAVFVIEEANNRIGDYLLTNKREVYVLPPCRSKEARKYHFSSGAKSDSLDAKAIALTFKEHPSYCLKARYSGVGAKITKLVTMYSIVSKIHSQQCNRLYSVLLRYFPEYLHIMDKQYRSNTSLRILSICPTITEFKKVSNEELRKILNKENYRMTSILRKKLDRIRSEGISWGDTSCEGNLIMFLANQILTLREEQERLREEMGETLENSPYRIILSIPGVKAVIGSYIVKAYLTHDFRSYQEMQKYAGTIPFLFQSGRKSIMLMRKKCDKDLRNMIHIAAFASLKTCGWARNYYKRKRKEGKTYGHALRALGNIILKIAFSMLSKMKEYDETLFLNAKGIKTTQQNNTIIPEAFTNPEYSQDAHPSLAATKDVVENLNVT

SEQ ID NO: 434748 - protein, 337 aa, unidentified
MSIMRIGLDLAKNVFEIYGIDTLEKPVLKKTIKRTELLTFFCQLEPCEVGMESCGGAHYWARELEKFGHKIKMMAPQFVAPYRKGSKNDQNDAQAICEAAGRPNMRFIPVKNEQQQAVLALHRVRSLLVGERTAQVNQIRGLLLEFGVAMPQGRDKVRAQLPWLLEDAENGLPLLLRELLFSQYQRLCELDKQILESDRKIDTIAKQDEKALRLMKLEGIGPITATAMIASVGDIREFQNGRQFAAWLGLVPRQWSSGGKNRLGRITKPGDVYLRTLLVHGARAVIRFAENKEDRKSLWIKDVKARRGFNKAAVALAAKHARIVWSMLINNTEYRVA

SEQ ID NO: 434749 - protein, 329 aa, unidentified
MSKISKKVIGVDVGAKFLTVSFNDFENRDQVFNIENTQRSILSFLKKLRIEDYCFVIEATGNYSSRILHLSLVQGFESSLINCMSVKHFARMKNIISKTDAEDAKLIRLYGEMFKPDIYTSKSVDIEHLDQELKLLNDLEEEKRRYGVKLKSLRYNAQINPNTEKHYERRLQQLEKEIKEVISRLPGLQDEEFKETKALLQSVSGIGEKTSLQLMTATSGFKNFNSAKSLSKYFGLAPRIYQSGKKSYSPGKCRTSKTHIRGLLYVCSWTAIKHNKQCKEFYERLLSQGKPKKLALIAVCNKLLRICFGVVKNKINYQPDYQKNFKILT

SEQ ID NO: 434750 - protein, 348 aa, unidentified
MAMTTLERARRVTGGVDTHLDVHVAAVLDDIGGLLGVEPFAASRAGYGQLLQWMNSFGIPARVGVEGTGAYGAGLARYLQAAGVEVIEVDRPNRQARRHHGKSDPADAVEAARAAHNGRVQAVAKSRNGKVEAIRTLVVAKRSARQARIKALNQIRHLSFTGPDELRARLAGLATARLAEQTAALRPRPGAEVVAYATRVALRTLGRRILALDEELAALNELLAELVAAAAPQLLAVHGVGVDTAAALLVAAGDNPERLRSEAAWAHLCGVAPLQASSGKVTRYRLDRGGDRQANQALWRIVMVRMSTDDRTRAYVERRTKEGRSKREIIRILKRYVAREVYRLLSRP

SEQ ID NO: 434751 - protein, 346 aa, unidentified
MLIIGCDFHPSWEHICWLDPETGETSEQKLVHGSGEAERFYRALKEPALIGLEATGNCHWFIDLLSELGHEVWVGDAAQIRASYVRQQKTDRRDAEHLLKLLVEGRFPRLWVPNREQRDLRQLLIHRHKLVEMRARVKNGLQHLALNQGMQKKRRLWSAAGQQALRALPLAPWAARRRQDLLGLLASLDGQIEPLDRAVAESAQQDANARLLMTQPGVGPITALAFVLTLGDVSRFRRGKQVASYLGLIPREHSSAGRQKLGAISKQGNRMLRMLLVEAAHTATRYDPEFRRQYLHHCHSKPKNVAKVAAARKLAVRLYWMLRTQNPHPEIVRNEGSPRVPLVSAS

SEQ ID NO: 434752 - protein, 482 aa, unidentified
MCANGTIFLNPKIAKPSIHNDLSIVQPLKNSKIVIAHFVRSPLEICKFDFIPNAVPNCRKYGTTGSEIVSRVQIGYTGARGSVARGHRQSRVITLRRQSRIQTKEPVVTTSITHVAMDTHKKEHTVAVGYPGQDKPEILTVDNTVLEIRRMVRRILKQAPGEVVFCYEAGCCGFTLQRRIESYGGHCQVIAPSLVPVKRGEHVKTDRRDAIKLLKLFRAGLLTVVQAPDPQQEADRDLTRLRQTARENLQRVRHQILKLLGRHGYVYTDGDHWTVRHRNWMRTLEWDSSLLREVFDEYSTEMQHCLQRLESLDRRVLALAGEDRYRETVGLLGCFYGIDTMTAIVFLTELFDLARFASPRQLMSYLGMTPSEESSGDCHYKGPITRSGNGRIRRLLVQAAWHYRHPQATTPKTLRDRRKDQPQWAVNLAERAGHRLRKRYWHLLNKGKPPCKVVVAVARELAGFLWAMLRESALRRTLRTIE

SEQ ID NO: 434753 - protein, 331 aa, unidentified
MKQIYGIDLAKEKFDVSFIGEDNKAIDRIVNNKYSSIIKFLSNLPSNACLCAENTGVYGELLVFLANILAVEICLSTGFEIKHSLGLQKGKSDKLDARRIREYGERFGDRLRPTKISSEAMTELKEMHNLRSQLVRQRKMLSCHIECKKQRPFNSIKANRIAKKQMEHLKNCIKEIEQEILQVIKLDPDIFDNYLLITSIKGIGPVTTSELIVKTENFKKIDTAKKAASFAGVCPFPNSTGKMVRKSKVSKMSDKALRSLLHLCGKSAVLSNMEFKLYFERKKSEGKPYYLIMNNVSNKLLRIVYSIIESRIPYDSNHICNDPRHAEKKVA

SEQ ID NO: 434754 - protein, 344 aa, unidentified
MLYMGVDLGKKRSRIAVLDERGEVYTEVKVPNRKQTFQKFLKHIKEPVEMVCETGNKCFWLADLMQDSGVGVHVAHAYKVKLIAEARTKTDKVDARILAELLKARFIPEVYIPEQDIRTWREIFRGRSHIVRMRTQLYNRIHAILDRYGIEYETQQVRTKGVGSWIETLELPDPIKKSMQQYVQLIQEITEQVTELEKRLKEKIKLDDRARHIVELLESIPGIGWLSALALYLEIVDISRFKSAKKLHKYIGIVPGVHQSGEVHRGGRLTKDGNSLLRWMMVEDAWRAVAKDRYYDNLYERHKRKLGKTRAILPVTRALLYAVYQVWSQEKRYEEIFTVNRKVR

SEQ ID NO: 434755 - protein, 378 aa, unidentified
MSLKRERPPSFLSHAVENLRPMEPAFTRLAREVAQDREPKPTLHRGMIMNKSEVVCVGIDVSARELVAAVGGQEAEQRFPNTGSGHEALLNWLRRQGSRTRVCVEASGNYSLDLALALSRQSSMELQVVNPRLARRFAESLGKRSKTDPVDAHMLAEFAARMPFTAWQVPSTAALQLRSLVRTIAALTRMATQEKNRKHAAAASLVLAPMIARELQRHARYLEQRIAKLRQKAQRMVIGDPQLQRRWQHLLSVPGIGEVSALQILGELAVLPATLDARQWVAQCGLDPKHYESGSSVQATPRISKAGNRYLRAALYMPALVAVRCDAAAAAFYGRLQQRGKAKLAALTAVMRKLLHGIYGMFRRDQDYNGLELFPART

SEQ ID NO: 434756 - protein, 331 aa, unidentified
MNQVGIDISNEVFDATMQHGSGVVRKQFSNTKTGHRQFIRWTLYQASSARVCLEATGIYHLQLALALDRHPGIEVMIVNPCAARRFAQAHMVRAKTDAVDADGLLQFIQRMAFQPWSAPREELLQLQSLAHRVAQLDKEVIRERSRLHAARRAGPHTRPVQQDIQAHIAQLQRRLERMRSRAYRVVNNDPQLADDARIVKTAPGFAELSATKLLAELSSLPDDMAPAQWVAHAGLDPRPCESGSSQRSPRRISKQGNVRIRRALFMPALVAIQRDVNVSAFYEKLLANGKAKLQAITAVMRKLLHALWGMLHHRQEWDGEKFYCLNQPITA

SEQ ID NO: 434757 - protein, 410 aa, unidentified
MEMIVERCAFLDVHRDTVMACARTPDGEGRREEVVQFATTTSQLLLLADWLVERRVTLVGMEATGVYWKPVHWVLEDAVDEVWVINARHMRNVPGRKTDVADSQWGAQLLEHGLVRPSFIPPKPFRQLRDLTRYRRVVIEERGRESQRLHKVLEDAGIKLSSFTSKVLTKSGREMIDALIAGQRDPDVLAEMAKGRMRQKIPQLHDALAGRFDEHHALLCAAMLGRIDQADATINELGDAIGVLLDPYEAAVTLLVTIPGVQRRTAQVILAEIGADMSRFPSAGHLASWAGMCPGNNESAGKHRSGSTRHGSKWLRIALIEAAHAAARTKNTYLAAQYARLRSKRGPAKASVAVGHSILVIAWHLLTTGETYNDLGGDYFEKRRNSTARQRRLVAQLEALGHNAPLDPAA

SEQ ID NO: 434758 - protein, 394 aa, unidentified
MATIGIDVGKRQHIAAIQYDGEREARRAVLHFGADRAGLATLSAWIARQGGISRAVLESSGHYHLNLAAALQRQGLPVAVVNPLESKYFGKRRLQRTKSDPADARTLATLAMVDEPQVRDVLAGAELREAARFAMGLVDQLGRVDQKICRLVEIGFPELEQAYDDPTCVSALAVLRTAPTAQAAARKHSATLAQVARPGGGRRIGPKKAEHISALAHDTIAAPELAAQIGFQMRLLIAQHDMLESQIAEAEAHLASLLDGELVRRLRTIPGVGPAIVATLIAEIGDIARFSEFDKLVAFVGVHPAERSSGEKGKNPETSWRMSKAGNAYLRTALYRMAIVGITHNPLIRAHYARKRAQGKSKMNAVGHCMKKALAIVWGVWRSGTDFAAPPSHP

SEQ ID NO: 434759 - protein, 363 aa, unidentified
MFTERTSVGLDVHARSVAAAAIDGDTGEFFQAKLTPSYEHVRSWLTGLPGPVAVAYEAGPTGFGLYRDLMAAGIRCEVVAPSKLQKPAGDRVKTDAKDAIHLAKLLRIDEITSVSIPSVDQEAARDLVRAREDCRGDLMRARHRLSKLLLRQGIVYYGGRAWTGKHDVWLRHDALPHLAARATRLAFDNDYETVLVVKARRDRLDALIEELATESEFTPVLRRLGCLRGIGNLTGFALAVEVGDWHRFTGKTIGSFVGLVPSEQSSGGSRSQGSITKTGNGHARRLLVEAAWHHRSRYAVGKTLRTRWDLAPAAARARGDEGNRRLHRRWVKFNERNKKTTIANVAIARELAGWCWSLAVMEE

SEQ ID NO: 434760 - protein, 375 aa, unidentified
MSNHSEAFVAFDSSKLRNAVAIADSGRTGEIRFLGEIENSTTATAKLVRKLASKYERLTFCYEAGPTGYELYRQIKSLGQECIVVAPSLIPKKPGDRVKTNRRDAVSLAKLLRAGELTAVWVPDRHHEAMRDLTRARDTAVNDLRSKRQQISAFLLRKGLHYCAGKKTWSQAHLNWLMSQRFEYPEHRLVFEEMMMAMRQAQERLERLEQAMRAAVPDWSLAHLVTALMAMRGIDLISAATFLAEIGDLSRFQSPGELMAYLGLVPSEDSTGDRIKRGPITKAGNRRARRTLVECSWSYQHPPRVGKDKQAKVAAAPQAVREIAWKAQSRLNRRYRALVRRGKLKTVAITAVAREFAGFIWAVAREATAARAAAK

SEQ ID NO: 434761 - protein, 349 aa, unidentified
MVADQVDYVVGVDTHRDEHVLAVVAAPTGAVVAQLSVRATARGYAEAVRFAAEHAPSTRVWAVEGAGHDGAGLVRHLSGRGETALEAGRGPRNERRLQGKDDQLDAIRAARAVLASETLALPRSGQQREALRLLLIARRSAVDVRREALVQLRSVIVTAPDQLRNELRVLPAGRLIQRCSLFRRSRLRSPDETATTLVLRTLARRAQAATVEAAELEAEILAHVRALAPQLLTEPGVGAIVAAQVIVTWSHRGRVHSEAACARLAGVAPIPATSGQTARHRLSRGGDRQLNRALHTVILHRRQHDPATRDYIARRIAEGKSTRDAVRLLKRYLARHLYRVLNNQVPLTA

SEQ ID NO: 434762 - protein, 375 aa, unidentified
MATNTITWVGMDAHKNSIKVAAWLPEQAEPVEWTEDTTAEAIRRLARRLRRLAPGEVRACYEAGPTGYGLQRLLGVEGVICEVVAPSLTPVKPGSRIKTDRRDARKLGELLRAGLLTEVHPPSETDEALRDLCRCRDDVRVDLLRARHRLSKFLLRRHRIYRQTKHHWGSRHMQWLAELRFDDPMSQATFDSYQLIVHQLDERLGQLDAQLAEFGTQEPYREKVAALRCFKGIDTVTAVCLVAELHDFQRFRSPRQLAAYVGLVPSEDSSGERERRGPITKSGNRHVRRLLVEASWHHRHRPALSRPLRARREGQPARVIAIADRAQERLAARFRRMSEAGKVHPKTIVAMAREMCGYLWAVLHPAALPTRSKSA

SEQ ID NO: 434763 - protein, 319 aa, unidentified
MTSDTVMEYIGVDVSKARLDVAIESTGQTWAVANDEVGIASLIVRLSKLNLGRIVVEATGGQERLLVAELWQAGLPVALVNPRWVRDFARATRRLAKTDKLDARLLAHFGLKTEPALTQLPSEAERTLEALVTRRRQIIDMLTAEKNRLGTVPPAARDRLTEHIGWLEREAADLLAEIEALIHKVPALEDKGHLLRTTPGVGPVLTATLLSELPELGRLDRRQIASLVGLAPFNCDSGKKRGHRHVAGGRAEVRSVLYMATISALKCNPVIRRFKQRLCAQGKPTKVAITACMRKFLTILNAMLRDQRPWSADFTAAPT

SEQ ID NO: 434764 - protein, 413 aa, unidentified
MNTLFVGIDVSKQTNEVLAMNQAGERVDSFRSGNDLPGADSLCQRLAKLMAAGHFDRLVIGVEATGIYAWHLTQYLRQAPVLQPFQPIVYTFNPKVVRGFKKAYPELPKTDQVDAWVIADRLRFGRLPAPGGVDERYEALRRLTRTRFHLVKDLVRAKQRFLNALFLKFSGFAQDKPVDRTFGATALAFTVETECIETLAATSIEELTERVIAYSRGRYPDPKAVASAIQKAARSSFRLPKALADPVNLELATHLSLIRSLEAQIKALAGPIEQLIATLPNTLSSVKGIGPVYAAGILAEVGDIHRFPNHHALAKYAGLAWSRHQSGQYESEDTHLIHTGNRYLRYYLVEAACSLTVHDAEFRRYYQRKKAEAKTHAHLRALALTARKLVRLVDHLLRSNRLYNPLGAPRRTR

SEQ ID NO: 434765 - protein, 523 aa, unidentified
MPVTRSRKRSSSRRPEVLQKPRGVIHPRVQKVGPEHFGIVSVDCAKARSKWMLCDFYGNVLIPPTVVEHNRPALTAATTQLRQAMARHDLRDVIVAIERTGRYHHATQRAFAAAGFEVRIVHPFATKQFRQASDPGTKTDDTDLVAIHRAACSGFALIELPRDDHWKELQLLIRYRRDLVFKTSALCAQIREHLEAALPGYATCFYNLWIRACAFPLVRAFGSAEALLQAGLRGLSEVLRQQHVRFQERTLQRVLAWAEQAAPSDQAAALHLRVALRLEDDRQQKSLEILGLERDIASRLVRTPYVLLLSFPGINVVSAADFAGEMGPIGNYANSRCITGRAGLRPARYQSDQVDRPNGPLVRCANRKLRAAILGIADNLVCCNRHFNVLALRWRAEGKDPRHTRVKIAQRFCRIAYQMVAGGQVFRHPCLQHRSYILDKLNAFHREHDTAMPQALTDLQAAIEQLPRSAYAEEARPLAQELQRIEQGRRRGPQLLGDILPIVLARLGVGALQSRESGEHDLT

SEQ ID NO: 434766 - protein, 379 aa, unidentified
MTRPAAIPTDEHTLYAALELSKNSWLLAIQFPGRDNPSLHPVKGGDADGLVAKLDAACERLTKLVGQVPTVTLCYEAGYDGFWLARLLEQRGIDCFVMEPASLQVNRRARRVKTDRIDVEALLHTLIAWCRGERHVCSMVVIPSVDEEDLRRSHRERDRLVRERTAHINRIKGLLFGQGIRGINVKRHYKILTPADLVTGDGRPLPERLSREIAREIERLALVQEQIVEIERERDQALNPCEASERKRHDLLRLKGIGPAFAAIFARELYYRRFANRRQVASYIGLAPSPYDSGEGRRSQGISKAGNGLVRYAMIQAAWLWLRHQPQSALSQWFHRRTEGQSGRMRRVMIVALARKLAIALWRYVELGLIPQGAILSAR

SEQ ID NO: 434767 - protein, 333 aa, unidentified
MRIDLAKNVFQLHGVDAEGNAVFKKRIRREGLLAALGDIPICQIGIEACTSAFYWQHQFEAFGHTVKVIAPQYVKPFLKHQKNDRNDAEAICTALMQPNMRFVPPKSEEQQDIQALHRARRRLVNHRTALACQMRGLLLDRGVTIPLTLGRARHRIPEILEDQTNGLTDTTREILADLFAFMLQLDARVKAFDRRIDQVFRANPDCQRIARICGVGSKTATAVVAAVGDGKEFKNGRHMAAWMGLVPRQHSSGDKRVLMGISKRGDKHLRTLLIHGARSVVRVSQGRTDTFSRWVNSIRERRGMNRAIVAVANRNARIIWAMLRRNEEFRAHA

SEQ ID NO: 434768 - protein, 331 aa, unidentified
MSVHQQGRETIAASRPSAGIDVSKAHLDAAWAERFEHVSNDADGWDALVAKFQADRVDVVVLEATGGYEKAAACALQAAGFAVVVLNPRQGREFAKAMGQLEKTDRVDAYSLRDFAAVIARHPKRERYIRELPDAQRAHLAGLVMRRRQLLNMRNEESNRLHTSHRAALKSVQAILKAIDKQLGAVDDDIDHHMQQHFKDIRTWLESVKGVADVTSSTLVGLLGELGRLPRRSIAKLVGVAPLARDSGPRKGTRAIWGGRAEVRAVLYMATVSAITHNPVIRQFHQQLIAKGKPNKVAMVACMRKLLTILNAMARDHATWDDSKHVKPAPD

SEQ ID NO: 434769 - protein, 347 aa, unidentified
MNFYNRQHQYYCGIDLHARKMYVCILDQKGKVMVHENIKTDPEAFIQIISPYVEDIIVGVECVFCWYWVSDLCAKHNIPFALGHALYMKSIHGGKTKNDKIDSYKIALLLKGGNFPTAYPYPAQWRATRDLLRRRMYLMRRCSELVAHVQNTRTQYNLPGFTKRLARKYNHDGVAEKFENPEVRKSVEVDLAAIASLNQILNQLEWHIEKTAEQHDYHTLYLLRSIPGVGLILALVFLYEIQDIRRFPTVQDFSSYARLIKPVKESDGKWAGKSNGKIGNHHLKWACNEASILMLRESEKAKQYVAKLERKYNKGKALGIFTHKIGRAVYYILKNKEAFNMNKFFSQ

SEQ ID NO: 434770 - protein, 507 aa, unidentified
MTTPTTRTTRRKPASSPTSGPQAQARAHRQAYNCRKTRAKAKSEALHQKEAAQVQALPVLRPHAAGIDIGSRSHWVCVGFTTEGDSSLIREFPAHTDGLKAMVSFLREHQVNTIALESTGIYWVPLYELLQAEGFEVLLVDPSYSHPLRGRPKTDRRDCQWIYRLHSVGLLAAAFRPDEKTCQLRAYLRQRANVVRQASKHVQHMQKALEQMNLKLTEILSDITGVTGRSIIRAILRGTRAAEKLAKYRDKQCKASEAEIAQALTGSYREEHLFELKQAYEAWQFSLRQVEQADAQIALQLGRMKCDRALPPLKRKARPKRRVNSPGFDVRTALYYVVGLDLTEIEGISELTALTLISELGPGVSQFATVKKFCSWLGLCPNGKKTGGRVKSSGTRRGVNRAAQALRLAAQSLHHSQGALGGFLRRMKGRLGTQAALTATAHKLARIVYLALKHGMTYVRQSQQEYLAQMREKQIKALRRKARQLGLEIVEKPSGSVSPAEAASAQG

SEQ ID NO: 434771 - protein, 374 aa, unidentified
MCKRAVLTNRPSLDLSPFVLEGRRACRGAWDRSGVFLNPNSCMGFEPGPSKEGSWMMTQNDLVVAGIDVAKDKVDVCIRSLSLRRTFASTAEGRRELASLLRRKKVGKAVMEASGGYEREWAKALRGARIEVRIVDPKRVRSFARSAGRLAKNDTIDAEMIAWFAETFDVPGQAHDAEREKLAQIVNARQGLLDLQTKLQNRGEHAGPEPVQKMHARLSKKIAVEVAKLEAVIAAMIKTTPHFAELAEIIESVPGLAETTSAGLIARMPELGQVSNKIAPALLGTAPYDDDSGRRRGERHIKGGRRKVRNLFYMACLGAATRHNPVLKAFYNRLIAKGKEPKVALVACMRKLIVILNTMIARRQKWNPNLYLLS

SEQ ID NO: 434772 - protein, 405 aa, unidentified
MLKFLIKRAFNLNILYKLANNFNLRPMRRVCGLDVHKDSVFMCILSENGEKVQEKYGVLTKELDTLRDVLVANNVGEVAMESTSIYWMPIWRVLESDFDLKLVNPYFIKQLPGKKSDVKDAEWIATCLQKELIKGSFVPDAAIQRLRQYNRRIFDLNKDISYKLTKLDMALQRCNIRISNYVSRTDSKSYKKVVDKLAGGITDPQELEKCIHGRTVNRFGKDVITASLTGVINETDIDIMSQLKSEIDLAERHKSECLMKMREICMENYPKQLENIKSMPGVKEQSATAIIAEIGVDMKMFLTAAAIVSWCGLRPRNEESAGKIKSRKIVHGNKYLRRTLIECAWAASKTQGCFYNKFSYTQVSIRKKNVLKVRVAVARKMLVTIWNILSKGEAYREILDCTLPQ

SEQ ID NO: 434773 - protein, 359 aa, unidentified
MEKPSKGERMTVGLDLGDRLSHFVVLDQEGEVLEEGRVATREVALRQRFDGCPPMRIALETGTHSPWVSRVLEDCGHEVVVANSRKLRLIYENPNKDDRVDALYLARLARLEPALLSPVQHRTANTQEDLALLRSRDALVSARTQLINHVRGLVKSVGSRLPTCSTGSFAKKVSEQTPESLKPAVSPVVEEIGSLSDRIKALDRQIQDLAQESYPQTKLLRQVTGVGPITSLAFVLTLEAPERFRKSRTVPAFLGLVPGRKQSGNKDPQMRITKRGDSCLRRLLVNAAHYILGPFGPDCDLRRFGEKIAARGGMNARKRAIVAVARKLAVLLHHLWRSAEVYEPLYQQTHRAGRRAKVA

SEQ ID NO: 434774 - protein, 393 aa, unidentified
MRQTPFSSAITTQREQLLFVGMDVHKDTHAAVGATVYGEKLFDIAIGNSREDFNALIEQSRLVANERGLGLVFGLEDTSGYGERLAKHLFLNNILVKTVSPIFVDRERKYETHPEKNDSLDAFAAAKVLIQRIDTLPTYRIAEQSELAKEIKELSLDREFLVKEQSRIKNQLHRALHKAYNGEYRKKFKDPFGLKSLKYWFAHPLPTGKAKDDIVGIPSVLKNQIKRKVKRLMYIRGEMKELELELNELVEQTGQKITTLNGCGVALGSKVLAEIKDISRFSSSAALAKYAGLAPREKSSGKTFRHVKTKSGNRQLNTTIHRIALSQISRSGNKLAKDYFQRKISEGKTKAQALCCLKRRLVDIIYMMLKHKQSYNKELHVVSHNVNVIHSGI

SEQ ID NO: 434775 - protein, 355 aa, unidentified
MSQIPNTAIAVIGIDIGKNSFHVVGHDARGAIVLRQKWSRGQVEARLANIPPCLIGMEACVGAHHLSRKLASLGHDARLMPAKYVRPYSKGQKNDFNDAEAIAEAVQRPTMKFVATKTAEQLDLQALHRVRERLVSQRTGIINQIRAFMLERGIAVRQGIGFLRTELPTILATRTDALSPRMLRVIEELAGDWRRLDQRIDGLSGEIEALARQDQACSRLMTVPGIGPIISSAMVAAIGTGDVFSKGRDFGAWLGLVPKQISTGDRTILGKISRRGNRYLRVLFVQAAWVVLVRIKNWERYGLKSWIEAAKRRLHHNVLAIALANKLARIAWAVLAKGRAFELTRTDDAGVVRPA

SEQ ID NO: 434776 - protein, 418 aa, unidentified
MQTELSQFTAIIGIDWADKKHDVCVQDMATGRRRRSQVRHRAEELDEWARSLHRRYGGPIAVALELSKGPIVSVLQKYDFFVLYPIDPSTLAYHRKTFTPSGAKDDPTDAEFALKLLLRHSEHFKPLRPQSIEMRTLMVLVEHRRKLMQERVRLTNRLRSALKQYYPQALEWFDHIDTRLFCDFIKRWPSLEQARRARRTTLETFFREHNMNRKALLERRIEAIKSAMSLTDDEAVIVPYRMQALTLVAQLTVMLESIRQYDDEIAALAPQHPDYALFDVLPGAGPSLAPRLLVGFGEQRERFANAAEVQKCTGIAPVTERSGQSTWVHWRWQCPTFLRQTFVEWAAQTINKSYWAGLYYYQQRAKGCSHRAAVRALAFKWIRILYRCWKTRTPYDEARYLKALQQRGSPLLKTAEAA

SEQ ID NO: 434777 - protein, 403 aa, unidentified
MNAVGIDVSKGYSTVVVVRPLGEIVTSPFEVMHTEPELSKLAEMLKGLSGETKVIMESTSAYHRPIANALYEADLHVTVVNPQLTHGYGNNTIRKDKNDKMDSIKLANYALSNWLKMPKYIPDEEIRRMLKAYSRQYNKYIKLKVMLKNNLISLLDQTFPGVNELFKSPPRKSDGHEKWLDFTAKFWHCECVCGLTPKAFEDRYRRWCKKEKYNFSQSKAEDIYVSACGHFSVMAKNEITKTLITQAVTQVNAISESIAAMLREMSNLASSLPEYEVVMDFYAVGEVLGSQLIAEIGDIYRYQKKSSLVRFAGLEPVERSSGKYRGKERISKQGSPHLRKTLFQVMDGLLKRAPAGDPIFQFLNRKRSERKPYRSYMCAGSAKFLRVYYSRVKAHLDNYYSEN

SEQ ID NO: 434778 - protein, 342 aa, unidentified
MKDTMIGVDLAKHAFQLHGASMTGHLKFRKKLSRTQFWKFMTEHPSAVVVMEACGSAHYWAREMVRIGHEVRLIAPQYVKPFIKRQKNDAADAEAIVIAAQRPEMRFVEQKSAKQQAKGVLFRARMRLVHQRTDLVNALRAALYEYGHILPQGIGQLKRIEAIIEEANSDLPMLVREECRDLLDQIAQQTQRIATKAELLKKLAAESDVTRRLQTMPGVGPMTALAVEAFAPDMTSFKRGRDFAAWLGLVPRQHSSGGKERLGRVSKQGQADIRGLLIIGAMSRLNWLGRKSITAGSWLAKILARKPRMLVAIALANKMARTIWAMLTRKEDYRNPAPAVAA

SEQ ID NO: 434779 - protein, 351 aa, unidentified
MKLTTIGIDVAKSVFQVHGTDERGKVVLRRQIRRSQLLLFFSNLEPCLIGMEACGGSHHWARKLAGLGHTVRQMAPQFVTPYRKNDKNDGNDAEAICEAVQRPNMRFVPVKSPQQQAELVLHRIRRRLMGERTALINQLRGLLAEFGLVLAQGANHVRSKLPSLLENSSDSVPPLALELFQSLYEELCRLEQCIAGYDRRVQQLYRGNPLCQKLGELQGIGALTATAFVATVAHAAQFKNGRQCAAWLGLTPKQDSTGGKTRLLGISKRGDVYLRTLLVHGARSIMRHTPKRDDPKSRWVEQLRKRRGENIAAVALAAKHARILWALMVQGQSSPQPPSNQSIAPHVQPGS

SEQ ID NO: 434780 - protein, 345 aa, unidentified
MNQTTTPELRASFKHVLAFEVAKATLVTRVLPSGVEATIPNTAAAVRRLIDKQVLANATLNLGPLLVVCEATGSYDRHILEATSDLAVACHRAHGSRMRSYAKYRGKRAKTDPIDVRLIGEFGRDTPDLALYRKPTPAKAELRALVARRTELDQARAAEQARLDHTQSKLVAASIRRQIKSLEKDIATIEAALEKLVAADAELDTDTHLMRSVVGIGFISAVAILAYVPELGSIGRGTVAALAGLAPYDDASGTHDGIRHIAGGRLEARHALYMAAVTAITHNPHLKDLADRIKAKGRPPKVAITAVMRKLLTMLNAIVRDGKPCKMPTAARQEKKAGPTRAILT

SEQ ID NO: 434781 - protein, 389 aa, unidentified
MLLDHPSDGPAAIRTQFGAIFVSLELSRSNWLVTSLSPGKGEKMSKHSITAGDVAGLLKLFADLKRKAMARTGQSYPIITIQEAGLDGFWLHRALQQEGIESHVVDPASIATPRRRRRAKTDRLDGETLLRALLAYKRGEPRVCAMVVAPSPEEEDRRRLCRERRTLIDERIAHVNRIKGLLFAQGISGYAPLRRDRRARLEALRTGDGRALPSYLKTQISRELDRLELLLDQIKAVEAEQDALLAAAGKGAGEQAAPDPVTMLLALKGMGANFTAVLWSEAFYRQFSNRRQLAAYAGLAPTPWRSGSIEQEQGVSKAGNPRLRSTMIQLAWLWLRHQGQSALARWFKAHSQRGRKTAIVALARKLLVALWKYVTAGVVIEGAVMKSAA

SEQ ID NO: 434782 - protein, 320 aa, unidentified
MTILTSPTVIGIDVAKAEIVAYREDSKITQAINNDRETLGRWLKALPAQSSIALEATSIYHLDTVELAHEMGHRVYVVDAYRLSHYRESIGQRAKTDPCDARLLARYLSSEQDRLRIWSPPPQAYKVLKSLLHRRAELINVRVGITLSWSSEPLLKKELAQQLKSFKQAEQVIQKLLHKVSKEAGITENIKRCKAIEGIGDLTAIGLATAFIRGQFASGDAFISFLGMDLRAKDSGKKNGPRHLSKKGDAEIRRLAHNAAMAACRSATWKPFYESYLARGLAKTQALVILARKLCRVAFALMKNQSEYQPNLRLQGSPAT

SEQ ID NO: 434783 - protein, 415 aa, unidentified
MYYVGIDWADSKYDLVILNDHGKNVCRPFEIKKTEKGFNELLAKLRGLSSNSLDFKIGIETPNNLLVDSLLVWNYPVFSIHPSSMKSFRRRYRTTNARDDVFDAFVLADVIRTDTACWRKVDRGSELTHQIRLLVFDHHRLVQKQTALNLTFKETLKQYYPEYLDFFSDISCSASLAFFQAYPNFQAAANLMHQQLKEFFKEQRLYGEKFAKNIYHILHQKSIPVTKSIVETKSMKAFVYAQQLSQASIGCQLYLKKIQKSITDHPDYPIFASFPGIGDLSSARMIALFGDNRNMYKNVSPLQSIAGTCPVTEKTGYDKANKKGYKIVYFRAGCNKTYRNFVYNIAFASLSKSDWAKAYYDHHRSQNHSHPHAIRCLANRELAILFSMWKNKSLFDENIFLAQKSRQKMKNKPYF

SEQ ID NO: 434784 - protein, 404 aa, unidentified
MYNAVGIDISKGRSTVSVLQPGGTVIRKPFHVSHTSQSLHELTEYLGSLDGSTKIVMECTGRYHEPVVKALSEAGLFGSVVNPHLIKNFGNNSLRKVKSDPADAKKIARYTLDNWTELRQYSGMDNTRTQLKTLNAQFSFFMKQKVAAKANLIALLDNTYPGVNKLFDSPVRQDGSEKWVDYAYSFWHVDCVRKIGVKAFTERYRAFCKKHHYIFQPDKPEKLFHASRELVAVFPKEKTYKLLIQQSIQQLNLTSAHVERLRQEMDELASTLPEYSTVMDIYGVGKTYGPQLIAEIGDVSRFTHREALTAFAGVDPGVDESGQHKSKSNKASKVGSARLRKTLFQIMTTLLQNAPEHDPVYRFLDKKRSQGKPYYVYMTAGANKFLRIYYGKVKECLRNLEQAE

SEQ ID NO: 434785 - protein, 343 aa, unidentified
MKLHVLGIDLGKTVFHAVGLDVTGKVVIRKKCSRRQLLAFTANLEVELIGMESCSGSHFLGRALREQGHEVRLMPAQYVKPYVQTNKSDFLDAEAIAEAVQRPRMRFVPIKSEEQLDLQALHRVRERWVMRRTAVVNQIRSLLLERGLTLPKGRRYVDQQLPRILEDAELRLSGSFRVLLAQLKLELDQLGARIEEMDRVIQKTAKENEDCQRLTEIPGVGPVTATALIAAVGNASAFQKGRNLAAWMGIVPGEYSTGGKQRLLGISKRGNKYLRTLFIQGARSVVQQRDKQAPGLSSWLAQLLARAHQNVVIVALANKLVRMAWAVLCKNERYRAPVLAVTI

SEQ ID NO: 434786 - protein, 350 aa, unidentified
MEHTTIAVDLAKSVFQIAIARRPGHVDEEHRLSRERFLSFFAQQPSATIVLEACGSAHHWARELQPLGHTVRLLPAHDVHRYVRRNKTDRTDAKALLEANRNTEIHAVPIKTTALQAVASLHRLRSTWITARTARLNTMRGLLREFGIFIPVGASRVVPRVRELLAEPTSGVPDLLRSPLRVACDEIGTLEDNIRVIERQLAGVAHQMAAVPLLQTIPGVGLLTATALVALVGDIHRFDSGRHFASFLGLTPKEHSSASRRRLGAISKQGDVYVRTLLVQAARSVLWRARVAPQPTGFQQWARRTQQRRGHNIAAVAVANKLARIAWAVWSRQQPFTAERPMPGGDHMRD

SEQ ID NO: 434787 - protein, 514 aa, unidentified
MSEGTAVPPFSRLSPRLLRKHSAWHIRHIPLTQNFHPQPLAPARKADWVHAHYARFRSPYAAQDKPFASGFTNPDPNGGDIMLKINYMSTLFVGIDVSSKTNAVYAMDFEENKYISSSFGNNQPGADKLVNMIAECMQKHKNLDTLLIVLESTSVYSVHISNFLSASEVLMPYRPYVFCVNPKATSNYRKSYIGMEKTDPTDAYLIADFGRVGRTKKLEPWRGGQFIALKRLTRHRMHLSECITREKTYMVSNLYLKFSELQLLEGDDRPFGSLYGATSSAVLTEFLSPQEIIDMPEEDLLAFLAEKSRNRISDISKTSELLRKAARDSYRLDKCMYEPLNISLASSFNCIHAYQKEIRLIEQAIGKCINGMNPNALTILRSIPGIGPVWASGILSEIGDIAAFHSSDALAKYAGLYWPKGDSGDFTSEDNQMSKAGNPYLRYYLGEAANSVRKHIPEYADFYARKYAEVTKHQHKRALALTSRKFVRLVFGLLAKNQLYTGEKLDTEYNIKTN

SEQ ID NO: 434788 - protein, 427 aa, unidentified
MSTLFVGIDVSSKTNAVYAMDFEENKYISSSFGNNQPGADQLVNMIAECMQKHKNLDTVLIVLESTSVYSVHISNFLSASEVLMPYRPYVFCVNPKAASNYRKSYIGMEKTDSTDAYLIADFGRVGRTKKLEPWRGGQFISLKRLTRHRMHLSECITREKTYMVSNLYLKFSELQLLEGDDKPFGSLYGATSSAVLTEFLSPQEIIDMPEEELLTFLAGKSRNRISDLSKTSELLRKAARDSYRLDKCMYEPLSISLASSFNCIHAYQKEIKLIEQAIEKCINGMNPNALLILQSIPGIGPIWASGILSEIGDITVFHSSDALAKYAGLYWPKGDSGDFTSEDNKMSKAGSPYLRYYLGEAANSVRKHIPEYADFYARKYAEVTKHQHKRALALTSRKLVRLVFGLLVKNQLYTGEKLDTEYNIESN

SEQ ID NO: 434789 - protein, 389 aa, unidentified
MKIYVGIDIAKLNYFAAAISSDGEIILEPFKFTNDADGFQLLVSKLESFDKNSIIIGLESTAHYGDNLVRYLVAEFYQVCVLNPIKTCQMRKNNVRKTKTDKVDTFVIAKTLMMQDDLRFITFFDLDMMDLKALGRFRQKTIKQRTRLKIQLTTYVDQVFPEIQYFFKSGLHQNAVYALLKEAPSPKEIASMHMTHLANLLKVNSHGHFTKEQAKELRVLAQKSVGANDSAISIQITQTIQQIELLDSQLEKIEAEMTDIMKFNDSVIMTIPGIGYINGGMILGEIGDIHRFSNPNKLLAFAGLDPSVYQSGNFQAKTTRMSKRGSRVLRYALVNAAWNVVRNNATFKAYYDAKRAEGRSHYNALGHCAGKLVRVIWKMLTDEVEFNLE

SEQ ID NO: 434790 - protein, 318 aa, unidentified
MVEAPIYIGADVAKDTIELAYANQMGAPLRIENRRTAISAWLKSVPRGTPLALEATGPYHELLCTLAHRRGLIVYLLNPKRTRHYLQAMSPRAKTDRVDAPLIATFLANEQPRLRPWAPLRPEERRAWALLRRRAKLVNARQRLEQSLAGLPSMRSTRAALLAELERALGVLDTQLARLLAQDPTHANLLHDLQSIVGVGPLTSSALLLALKRGTFATSDAFIAFLGLDLRVRDSGNKRGRRRLTKHGEPELRRLLYTAAMAARRTQAWRPVFEHYLARGFSSIQTLVIVARRIARVAWSLYKHGGSFNPQRLVQGLT

SEQ ID NO: 434791 - protein, 354 aa, unidentified
MQTQSTQFDFTGQKIYVGIDTHLKSWNVTVMMDPYYQKTFSQNANAQTLFNHLHENYPGGSYFSAYEAGFAGFMPHYRLMGLGIESIVVNPADIPTTGKEKVQKNDSRDSKKIARSLKNGELTPIYVPSLQTLADRSLVRLRKTIARDLAKTKTQIKSFLHCNGIDIPDDLSKENWTRKFIKWLIEIEIGPFRETLEGHLAKYHYFYAQKLAINRKVKMLSATPQYKDNMELLQSIPGVGYITAITFLTEIENIKRFKSLDRLCSFIGLVPSTNSSGENERIGEITPRGHRILRDILVEASWKAIGKDPALGATYSKLGHRMKPNKAIIRITKKILSRMRFVLNNQTRYELGYK

SEQ ID NO: 434792 - protein, 355 aa, unidentified
MESTKFVGMDVHKDAITIAVMNSAGKVIMESIIETKAVTILQFIQGLRADVFVTFEEGTWAAWLYDLLKPHVTKVVVCNPRKSALLKDGSKGDKIDARKLAELLRGGYVKPVYHGENGLRTLKELSRSYLTISKDLTRVMNRIKALYRGWAIPCGGTQVYALCHRSVWLSKIPEAGVRSRAEHFYEQLDALQGLRKQVRRDLLAESRKHNATKLLRQIPSIGPIRAAELVALIQTPHRFRTKRQLWNYSGLGLKTHDSAQYRYVDGQLQRSRKPQQLRGLNQDHNHDLKKIFKGAATMASISAGPFHGFYEALLAKGAKPTMARLTLARKIAAITLIVWKKGVNFDAKHLKQQAA

SEQ ID NO: 434793 - protein, 340 aa, unidentified
MQIAVLGIDLGKNSCSVVGLDGSGQIVLRRRMQRESVLKFASGLTPCVAAMEACCGAHHLGRALRDQGHQVRLMSPEYVRPYVKAQKNDDRDAEAIAEAATRPTMRFVELKSAGQLDTQSLHRVRDRLVGERTALMNQLRGLLLERGIAVPQGRRKLEQHLLAVLDGDDTQLSPRVRSLIADMRAEWEALDRRIEAFDAEFAAQAKADDATRRLASIPGIGVLNATALAAAVGNAATFARGRDLAAWLGLVPRQATTGGKPRLLGITKRGNKYLRKLLVHGARAALPPLSASATPLGRWLRSLLERAHKNTVVVALANKLARIVWAVLRHGGTYDASVNA

SEQ ID NO: 434794 - protein, 392 aa, unidentified
MADESARKIKELEVQQTPEEMAELGCWLDESRSNGLELWAAIEKPHGRIVDFLLDHGVVVYPVNPKALDRARDRFRMSQSKSDCFDAYVLAEFLRTDHAHLRALEPNTAEAQELKILTRDHQRLGRQKTRLLNQIGIKLKEYYPRPLEVFEDLETKIALDFLKAYPTPQALWKLTRRGWKRFAKRDHHLSEARSNELWDKLNKPQLAVPQHVVRAKAKLLLALVGQLEASVKAVNSYNEEVESFFAAMPAAEIAKTLPGAKSGTTVATIWAELGDAQNRWNSFRHLQAEAGAVPVTKSSSKSRVVQFRFACNKHLRHALYWFSFNSLKRSEWAKKYYRDQRAKGHSKHQALRALGAKWLKIIFVMWRDHKLMMKTTTWRTSPDRKCARRHKK

SEQ ID NO: 434795 - protein, 312 aa, unidentified
MDASFIGIDVSKDRLDVHVRPGAESFAVARTGIGIDELIARLLTLSPALIALEATGGFESIVAAGLAGAGLPVVVVNPAQVRAFAGALGKRAKTDPIDAAVIAHFVEATKPEIRPLPDEATQLLADLVARRRQIVEMIGAESQREKHASQKRLQKSILRLKKALEKELAEIDASIDDTMRGSPAWRAKEDLLVSVPGIGPTIARTLIAELPELGSLDRREIAALAGLAPWTRQSGQWRGKSFIGGGRTSVRTALFIGAMVASRHNPVLKAFRDRLVANGKPKMVAIIATARKLLTMLNAILRDNQPWQPKNA

SEQ ID NO: 434796 - protein, 394 aa, unidentified
MKLVGIDVGKNSHHFCVMDKETGEFNVTPTSFSNNKEGFDFLINSLKPYSKKSILLGMEDTGHYHVALLKFLLSNGYTVALINPKTTDLTRKMEGGITKNDKLDTITICDVLDTPERKKQYRITKVDRFDLYEQRQLTRHHHNLKEELNVYCNRLQKSIDLVFPEFNTLFSSKYGIVYMNLLKTFGSAEAIASTDIRTIRKCFEIKGKGNRISLTPEKLKECAKNSIGISSEVETIQIKHLVSQITLIKEQIAEIDKKIEEFSITNNSPILSIPGISHFSGTSILAELGDIGNYSKPSQIIKFAGVAPYHYESSQYNAQHTAITKKGSKYLRKTLYQIILPVINNNPVFKKYYLLKISQGKGHRCAQGHCIRKLLRIIYHLLETGQSFDPALLR

SEQ ID NO: 434797 - protein, 427 aa, unidentified
MNDSKYKPTLCVGADVHLDEIVLRAVDKALGHEVLKRFRVTNNLPGAQRAAATIAQTAMDLGYARIEIGWESTGMLWIPFHRYLSTEPLLQPFELELVCFNPKLVAKFKDGLVLRSPKNDERDAFDVAARLRFGELPVSYVPSDFWQGLRRLTRYRYRLSKALSQEKNRFQSYAYLKCSDWKRVKPFSDIFGATSIALLTEFTVAEVQEMTHDQLVDLISRRGRGRFDDPTATARALRQTFRTSYPIEPQMDEMVTATLAAGWDHIRYLKRAMKRLDRLIARYIDLVPNPIITIKGLGAVITAGILAEIVDVLRFPEEKHLAQFMGLTWRKDASGGFVSQNTRLTKVGNVYLRYYFVLGANLLRQHNLEYKAYYWRKYQEVSKYQHKRALVLTARKLVRLVHALLTKNEPYVRPRTTRQDQEDNGLQ

SEQ ID NO: 434798 - protein, 481 aa, unidentified
MSREKKHPGKPAEKKAEPGKDKRGRKRKGMCLENRPILEPNAAGIDIGAREIFVAVPPDRDEQPVRVFSTFTEDLVKMAQWLVSCGVTTVAMESTGVYWIPPHDVLEQHGVKPCLVDARGMKNVPGRRTDWHECQWLQFLHSVGLLRAAFRPDGEVCAVRSLMRHRSEQVLMANQHIQHMHKALTQMNVQIQHVISDITGLTGLAIVDALLAGERDPAALAQLRDPRIKASEETIRKSLEGNWRGEHLFALKQSRQSYRHYQEQIASCDEEIEKLLLAFEPRVDPAERPLPPDRKRKQRGRKKKNANPRTGFDARTESYKLFGVDLTQIPGLMAMVLTLFSEVGRDMSRWPTSAHFVSWLALCPDNDISGGRVLWRGLRRVHNRAGDLFRLAAYSLHHDQTPLGDYLRRMKSKLGPAAATTATAHKIAIIFYTMVKKQVEYDATIWAERDAEREKRFDAKLKRQAQQHGYKLVPIEEKPAA

SEQ ID NO: 434799 - protein, 365 aa, unidentified
MTSMTSPTGPVTVIGGVDTHSQTHHAAVIDQVGRQLGDREFPTTPAGYRALLTWLRGHGQLERVGVEGTGSYGAALARYLRSVGAGVVEVDRPDRKARRAKGKSDPLDAYAAARAALSGTATGTPKTRDGRVEAIRVLRVARSGAVKARTQGTNQLKALLLTAPAELREQLRRLSTTTLIATCARLRPSSELTDPQQATKTALRRLARRHQRLSEEIAEADTELRTLVTAAAPRLLVLPSVGIEVAGQLLTSAGDNPDRLHSEAAFAHLCGVAPVPASSGHTHRHRLNRGGDRAANNALYIVVLGRLRYDSRTRVYADRRTKEGLSKPEIIRCLKRYVAREVFAVLTAPAVEDPVAPTPTMSMAA

SEQ ID NO: 434800 - protein, 400 aa, unidentified
MINEDGLPSAAIGFAADHGVIRNGAPRKKEGSPMEQYYVGLDVHSRQSTFVIEDGAGRVTAQGEVPTTPAGLAHLRAAHRLPPDTAVALETGTVAFFVARQLAALGLAPQVVDAHEVRLKAHRPTQKSDRRDAFELCEGLRRGIYRAIVHVPRAEVLRLRETLSRRRHFVRLQSAQISTVKALLRGAGLGQLSRSLGSERGWAKVLAALADYSEVRAYIEQHRALWRCAREQIATLEAALAQQQQPFAEPLRRLQTIPGVGPIVATTALAIFSDVGRFPDAKHAASYSGLVPATYQSGERDAHGRITKRGAAELRAMLCEAAHHASRPDHPLHPYFAPLCARRGYKMAVVAVAHRLCRIIFAMLRDARDFEVAKLAVERGPFERKVVRLYRRKPAGSGRR

SEQ ID NO: 434801 - protein, 427 aa, unidentified
MADHLNNKPYGAWIAIDIAKDFNAVLSETKEGKRQHFRMANSASDHDRFLSYLRTLPSPCIIGFEATGNYHRALGHRLVAAGFEVCFISSVASARYREVMFNSWDKNDPKDAAVLLELLKQGITQRYVDPLIAGHHDLQELSKTYYQVTLSRTRLQHSILTHYLPLYFPEMGKWWNSTRSAWWINYLLHFPIPSAVTKHSQAEFCQIASPVVGRKVNKAAKLIELYETARHSIGLPVEEDSLACKTFQIQLRRYQEINDCRTQLELTAQAVLADNPDSAMQSVPGIGPINALTILAEGGDLRRFSHHRQFLKYCGFDLAKNQSGNYRGQEQISKRGNARLRLALWMSVNRAIQQPENSFQQKYLRYIKSAPQDKDLQRKARTAVAAKMARVVYGLVKSKQMYQGYYEKALPSGSIPLCRAVEAARTS

SEQ ID NO: 434802 - protein, 414 aa, unidentified
METCLFVGIDTHKDSNTAAVMDSYFNTVDIITFSNRYGGFDKFMEKLSAIAGKKSMIFGLEDSQGLGFYLADYLIQKGFRLLDVNPIYTDRARKATIHRDKSDEGDAILIAKALIRERNKLSPVKIDKASIQIREMVRYRQLLVEESTRLRNRLHNLIFSQYMGIANIFSDPFSKAALAFFLKYPDPGLLIGVSEESLANLLKVHSRGRYGIDKAKSILNLLPVSMDKSLSGTRAYIIESHIKRFISLKAEMDSVNEKIKELVEKSCYSCLTSIPGIDTVTAAKIISQVIDIGRFRSASKLAKFAGIAPREKSSGRKKKHEKSKYGKKFLRSTIFYMALFHIGRTRTGMDKNSISRAYYLKKISEGKTKKEAITCLSRRLVDLIFAVMRDRSIYNFSKSKFLSEHTNILDTVAS

SEQ ID NO: 434803 - protein, 400 aa, unidentified
MLSIGIDVSKGKSTVCGMKPGGEIVYTPFEVQHTREGMSELVSLLRSSGEEVRAVLESTGSYHCPVVAALLENGIFVSVVNSLRMKRFCSQSIRKVKTDRIDAMQIALYGLAYWQELQPARLPEDTYRELQLLARQYYQMTSILIKAKVDFNALCDQVLPGMQELMSDHAGRHKLSDFVLRYHHTTHILEMGETRFRKDYCKWAEKKGYRNCERMAALIFATAQNGIPVLPNAPSTQIVITEAIRVLHTVEASRDTILAQMQALAKTLPEYSLVREMPCIGDTLAPRLIAEIGDVRRFHSKRALIAYAGIDAPPYQSGKFCANNRHISKRGNRYLRKTGYEVMQSYAMHKPANDPIFTFIEKKRSEGKCGKLAMVAGLNKFLRIYYGKVTELYRSLSAIE

SEQ ID NO: 434804 - protein, 420 aa, unidentified
MKSTKSKKVKIINEKTMIAALDIGKTAHYAYFRAPNGKDIKPFPFCSFRKGFHEFWTKLCQFKREHKLEDVVVGFESSGPYAEPLFHYLRKKPVKLVQINPMHSKRVKELTGNSPNKTDKKDPRVIADVISLGHALTLVVPEGPAAQLRRLSQARERALKRRTAAINQLQDLIFIIFPEFLAIMKNISTKTASYLIKKYPTPESIVALGIESLAVIVKRVSRGKLKQQRAEEVFNAAQNSIGISEGKRSILLEVEYLISQIGADSRFIVNLEEQMEDYLEKIPYSYSLLSIKGMGRVTVAGLIGEVGDFKKFNTISEIMKLAGLDLYEISSGKHKGQRRISKRGRSLMRKLLFFASINAVKSNGIMHEQYQQMLSRGKPKMKALIAISRKLLRIAFALARDDTVYVENYSNIHDRFKLAA

SEQ ID NO: 434805 - protein, 341 aa, unidentified
MERYYVGLDVSKEKTAICVRRSDGSMDKACETRTDPDAIFAALAPFRDGLERVILETGRMANWLYDELTRRGLPAVCVDARQAHAVLGQMHNKTDTNDAAMLADLARTGFYRKVEVKSRQAQERRALLAARDAAISIRTNAENTIRGLLASFGLRVPTQPRTYEGRICAVLEGHDALAPIILPLLAVRTEALRQAAALTKELVRQVKGSDACLRLMTVPGVGTVTAATFVATIDAPERFAKSRSVGAYAGLTSRRYQSGAIDYGGRISKRGDRLLRTILYEAANSLLCRVKPGRGMALKNWATALKQRTSHKKAVVALARKLAVIMHAIWTSGGVFEEREA

SEQ ID NO: 434806 - protein, 474 aa, unidentified
MSCRRLVGIDLGIASAHAVRVLDGEGTTLAKRKAVPTVESLSVIESSALEGTPAGTRLEVVIEPTGPAWLPIAVFFMNRGHVVYRVSSTESADLRRYLSRHAKTNGIDADTLARIPLFHPGGVQPLELPGADTASLDRRVRAAHRLTRQVALHKTRIKALVRQVMPMSPLPGKITQADLAVLERWADPNMLVRAGRKRMAAVIVKASNNHNGIERADEWLAAANAAIELYADNPAVAFADVAAEIATEVRLLRAIEHELATHTTERETAYGKVDPGGLARSLPGVSEVGGPALVAKLGDAARFTHAKQVRSFAGLAPKASETGDTDRKGQSLSKAGPSLLRTTLVIAADTARKQDPQLARIYYVQMVERGKNHIGALCVVAATLAERAWTVMRRQTPYVIRDIDGTPVSHEQAAAIIAEHWTVPAEVRARRRNKKGGKAPQAITTGSRARGDLPQTASSTRQTSQVNTRTRRIA

SEQ ID NO: 434807 - protein, 274 aa, unidentified
MDQSSTLFVGLDVHKDSIDIAVADAPRDAEIRYVGRTKGDLASLGRAVRKLVSRGQPLHIVYEAGPCGFVIQRHLARQGLHCEVVAPSSIARPPGERVKTDRRDATLLTRLARSGDLVAVREQRNGRYRLKALLLRNGIPYTGKTSWTPAHLRWLAELKLSHTAQQIAFHEYLHAITQASERIVRLEQALRDALTHWRLRPVVQALQALRGVQLIAAMTLAAQLQDFLRFESPRQLMAYLGLVPSESSSGAKRHRGAITNAGNSAARRMLVEVA

SEQ ID NO: 434808 - protein, 407 aa, unidentified
MNAVGIDISKGKSMVAALRPMGEVAMPPQEYLHTAVGLERMVEAISALGEDTRVIMEATGRYHEPVASTLHERGIYVSVLNPLLIRQSGGGSIRKVKSDKADALKIAKYGLDNWTELREYTPIDMIRQQLKLCSRQYNLAMKTAVSLENNLISLTDKAFPGVNELFSSPDRADGHRKWVDFVMSFWHCDCVSQTSGKAFAERYRKWCKRKGYQFSEAKAQEIYGKSRDQVTTLPKDDITKLLITTAARQLLAGKAALATLLSEMTRLAEQLPEYDTVRAMYGVGEKTAPQLMAEIGDVRRFPRRSSIVGFAGVDPAIDESGKHISKSNPTTKRGSPHLRKTLYQIVCAYLKKSPADEPVYQFLDKKRSEGKPYYVYMTAAENKFLRIYYARVKECLDAFDRRDASQT

SEQ ID NO: 434809 - protein, 358 aa, unidentified
MQRNELNFSGQKIYVGIDVHLKSWSVTILTEHLHHKTFTQPSSVSALVHYLTHHFPGGNYQSAYEAGFSGLWAHYELIKNGVNNIVVNPADVPSTQKEQLQKTDLMDSRKIARSLRCGELTGIYIPAMSTLEARSLLRSRRAIVKDLSRMKQRIKSLLMFYGIPYPAVFEKSATHWSKRFMKWLSEEITFSTVQGQEALSLLVSSAIGQRKLLLEATRKIRELSQREDYEQSLKLIRTVPGVGFITGMTFLTEIEDISRFTNSDKLAGYIGLIPTSHSSGEKQSKGEMTFRGQAQMKSMLIESSWFAARMDPALAACFGQLVQRMEPNKAITRIARKVLNRIYFVLKYKQEYVCSVVK

SEQ ID NO: 434810 - protein, 413 aa, unidentified
MENTLSTIFIGIDVSSKKLDIAYQIERQWISKSCSNDWASVEALASSLVVEFPTGHCVVEHTGTYSSKIIYALCERHFKVSVISPNQSQAFARMKHRTTKNDRADARMLAEFGLFNASDLRLYTLPQTSHLQFRQLLGTIEQLEKMLVQFRNQRHAYEQLPPPDQQSLIMETYRASEAHLQSQIDTLYAKIKELDSHNDQDEAQSRKLITSVKGIGEKTANTILAKLGSLNKFSSAKQIAKFAGIAPTERSSGSSVRGSRSINRSGNASLRKALYCATWSAVRSNHACKALYQRLRAKGKSAKVALIAVANLLIRQIFAVVTSQKLFDNDFFSKKVPKNTTTLIQFLPSSLPSLMPCSLPSSMPCSLPSSIPCSLPFLISISYVLIANCFTGDGVFSTKSSQSSPVNSVVNKI

SEQ ID NO: 434811 - protein, 426 aa, unidentified
MNFTQNEKLNQVTTETLVIGVDIGSETHYARAFNWRGIELGKVFRFSNSGEGFGQFHTWIESLTGKTAKSNIMVGAEPTGHYWFSLASYLKDHDIRLVLVNPYHVKQCKELDDNHPSKTDSKDPKTIAKLVIDGRYNVPYIPEGIYAELRITMNCRERIVRELVGIQNRIERWFKIYFPEYHEVFKDFEGQSSLLILSNMPLPEDIVNAGADGINQLWRKNKLRAVGMRRAQTLYKAAKHSMGCTEGSGAARMEIRLLLEDYHTKKAQYDSVMAAVEELCMQIPAVQKLLAIKGIGILTVAGFFAEVGDLGRFQSPKQIQKLAGLAIRENSSGKHRGQSGISKRGRRRLRALLFRAVLPLVATNREFADIHNYYTNRKDNPLKKKQSLIALCCKLIRVFFALATKGEDYDPVRLLGDIHHPVAAAA

SEQ ID NO: 434812 - protein, 350 aa, unidentified
MIIIGCDYHPGFQQIACVNTETGELEERRLNHREEAEQFYRDMQARGLAVRVGMEASGHGHWFERLLGELQFELWIGDAAAIKTKRVRKQKTDRQDAQLLLTLMMEDRFPRIWVPGAENRDLRQLLWHRHRLVQMRTRIMNQLHVVALNEGVRRKKALWRPAGRSELESLVLAPWASRRRQDLLDLLDQLTPKIQELSRALEEEVEKREVARRLMTHPGVGPLTALAFELVIGNPARFHCGKQVASYLGLVPAEDSSGDRRRLGHISKQGNSLARFLLVEAAQVTVRTQPQWRSKFFHLAMRRGRKIAKVAMARKLAVHLYWMWRQGWEYERLQQFGSHAGELGNRQGVQ

SEQ ID NO: 434813 - protein, 418 aa, unidentified
MTRKDNITILSIKHPVCCGLDVHKKIISAYLISLDKKGKEQSEIKEFGTFTDELIDLRNWLIKNECPIVAMESTGVYWRPVHNIIEEFTEVILVNARHIKNVPGRKTDISDSEWLAGLLRHGLLRGSFIPKKEVRQWRELTRLRKSYTQSLGDYKRRVHKLFECANIKIDSVVSDLFGKTGRNLINLLCDKGAELNQENIQKSAEGSLTKKVEELYRSIQGFFEDHHRFELNSLMRIILATEIEISKITKRLEELMKPNQELLDNLDKIPGINKLASQSVVSEIGITLKDFQTMTKFVSWAGLCPGNNESAGKRKSGRSPVRKHPFKTIMVEIAWAAIKKKNSYYRDKYYRLKSRRGAKKAIVAIAHRIAKAIYNIIKYGVEFEDLGDDYLININKTKRLNNLKKQAQLLGFDLVPAI

SEQ ID NO: 434814 - protein, 394 aa, unidentified
MEAVTSQPHTPAAIRTDLAAIFVSLELSRSTWLITSLSPGNGEKMSKHSVAGGDVAALLHRFAQLQEKVRSRTGNHVPIVSIQEAGLDGFWIDRVLKAHGIESYVVDPASIAISRRRRRAKTDKLDGEALVRALLAFKRGEPRVCAMVNPPSPEEEDRRRICRERKVLIAERVKHVNRIKGLLFGQGISGYEPLRKNRRKQLDELHTGDGRPLPTHLKTQISRELDRLELLLEQITAVENERDTLLAAQKDSVAATATLIPAWAMLCDVKGIGLELAAVLWTEGLFRHFDNRRQVAAYAGLAPTPWQSGTIDHEQGVSKAGNPRLRTTMIQLSWLWLRHQPQSALSLWFTARVQSSGGRTKKSAIVALARKLLVALWKYVTAGVVIEGAVLKTA

SEQ ID NO: 434815 - protein, 351 aa, unidentified
MKTKDTTDSKLFIGIDVHKRSWKIRTATDLFDGSSLTIPPDAFSLKKYVDRHFKGYRVYCCYESGCCGFSHHRHFISFGWHAKVVNPADVHRPAKAQFQKTDKIDARLLCKELKDSRLKGIHVPSIEREQLRCLFRRRNELVKEHRKIKTQIKMQLLYLGIEIPKVFDNSHWSHNFRDWLRSLTFEYPTMDYCFETRLRTYEYIDRQKRDVSTKLRAYCRKYYKKDYYLLRSVPGVGGIVACGLLCELGDLRRFKNFKQLASYVGLIPWVHQSGDNLKTSGLTPRANRLMRSYLVEATWQALRFDPVMQAYYRSHSGKDVKRILIKVARKLLSRIHAVIRTEIPYEIGVVS

SEQ ID NO: 434816 - protein, 365 aa, unidentified
MDDVTHLGLDVHKETIAVAILRPGDRDPDERVIPNTPQELKSLIRTRRSSGPLVACYEAGPTGYETYRLMTDLGVPCDVIAPTLIPRRAGRRVKTDRLDARNLARLHRAGELTSIRVPTLAEDALRDLVRVREDLKDDRRDTMRRVKSFLLRQGRRYPGQARGWTTKYDKWVHAQHFEEPAAEAAFRHYVATLDARGVELRAIDAEIEAACERPPMDAAIGRLRCFRGIDSVSAVTIAAEVCDFHRFATATQFMAFTGLIPTEHSSGGTERRGSITKTGNAHLRRVLVEAAWSYRHRPGIGIEHRRRSEGQPPDVRAYAWAAQLRLCARFRSLALRRQHNVAVVAVARELGGFVWGMMTDRLAVA

SEQ ID NO: 434817 - protein, 343 aa, unidentified
MQIHSVGIDLGKTTFHLVALGDHGKVLLKKKFTQRQLITFTANLQTSLVGMEACSGAHFLGRTLRAQGHEVKLIPAQFVKPFVKSNKNDFIDAEAIAEAVTRENMRFVPIKTDDQLDLQALHRVRERLMARRTSVINQIRAFLLERGIVFAKSPIRLREAIPDVLENANENLTPRMRNLVAMLWSEWKDLELQIVEMNDEVERIASSDDACRRLRQIPGIGPLVATAIVASIGNGAAFHKGREFAAWMGLLPKQHSTGGKARLSGISKRGNRYLRKILIHGARAVVLRSKRDRIAMGAWITSLERRAPRNVLIVAMANKLARIAWAVLSTGQDYRAVPDTVAA

SEQ ID NO: 434818 - protein, 381 aa, unidentified
MTTAVTHHEQRNPNEATLFVAFELSEKTWKLGFTTGHGQKPRERTVTARHHEHVLNEIAQAKRRLGLPETAPVVSCYEAGREGFWLHRFLQGQGITNPVVDSSAIEVNRRRRRAKSDGLDVRKLLSMLMRYAQGERQVWQVVKAPSVEAEDQRHLHRDLETLKQERASTTTRIQGLLSSQGLRVTSLTKLPEQLEALRLWDGSPIPPGLRRRVLRVYAHHTFLSEQIAAVEAERRAQLQASTDARIDKVRQLMLLKGIGINGAWLLVMEFFGWRAFKNRREVGGLAGFTPTPYQSGESTREQGITKSGNRHVRWMTTELAWSWLRFQPESALSVWFRERFGSGGKRLRRIGIVAVARKLLIALWRFLETGVVPEGAVLKEG

SEQ ID NO: 434819 - protein, 352 aa, unidentified
MKFYKTKTEYNCGIDLHSRQMYMCVMDSKGNKLVHTNIEGNDFGYFLKKIAPYRNSLTVCCECTFNWYWLADACQAEGIEFVLAHALYVKAIHGGKNKNDRIDSEKLAHLLRSNLIPPAYVYPAEKRPVRDLLRRRTSFVWRRATLLGQLTCSMYVLGQQPIKKTQHKVRDKWFDQLRAHYEHPLTKMAAEANMYMVKEYDRIIERLEVAILKHTKREHARDFNILQTIPGVGDVLALTILYEIDDISRFPSVQNFSSYCRLVKGSVASAGKFKGLRGGKLGNPYLRWAFAEAAILCKRANPDLKAYAGKLEAKHIKPVANAILANKLARAVYFMLKQGKGFDPKMFAKSSN

SEQ ID NO: 434820 - protein, 288 aa, unidentified
MKRKVYVGMDVHKETISIAYLTSNSKELVKEQQIKHNEVQIKKFVTKLKSEWNEIHCCYEAGVTGYPLYRYLNSLGVNCTLIAPGKIPRQSSDKIKTDKRDAIKLARLLRSGDLESIHIPSEEEEAVRDYLRSRDSLRLDLGRNRQRLMKFLLRKGNVYSATKYWTVSHYKWLNNLHFENEILQETFNDYYSRVKVQEENLKAMDQKIRGVAESEPFRERVGILRCFRGVDYLTAMFLLCEVCDFKRFKTAGSFMSFLGLVPGEYSSGSTRGNKRGLQKREVPDLEGF

SEQ ID NO: 434821 - protein, 347 aa, unidentified
MDHYAGIDVSLEASSVCVVDGAGKIVREAKVASEPKALILWFASLGLDLTRIGLEAGPLSQWLFRAMKEAGLAVELLETRHVQIALKTMPVKTDRNDARGIAQLMRLGWFRPVHCKSMAAQETRALLTARKLVQSKLHDVEMSLRGILRGFGLKVGATTPKRFARRIEELVAGHATLELIAKALLAAHAVLLRELGMFEKRVRAMAREDKRARLMMSAPGVGAIVALTYVSAIDDPSRFSSSKRVGPHFGLTPKKYQSGEKDVTGGITKIGDAGVRTALYEAANVILTRAVKGGGLKSWAMKLARRAGMKKAKVALAHKLAVILHRMWVDGTAFDARKTAFAVVAAA

SEQ ID NO: 434822 - protein, 430 aa, unidentified
MKPELKHNTEPNPAEEFAAFLAIDWADEEHAFHLQVVGQSKIETGTLEQKPHVLGPWVAKLRERFGGRPIAVGLEQSRGALIHGLMAYDFLVLYPIHPTTVAKYREAFKSSGAKSDPLDAGQILEILTKHQDRLHRFNPDTVETRLLGRLVEDRRKAVNLRTTHVQALGANLKEYFPQALELTSGNLSSRLACNLLLKWPTFADFQQAEPSTLKSFYYGHNVRSPEVLERVLALAEKSQALTTDEALVESGSRLTQRYVGLIQALNPVIVKYDERIQQAFDAHPEVKLFTGLPGAGPALAPRLLAFFGTDRSRYAAALNVQSFTGVAPVTKSSGKSRVVYARAACPKFDRQTFHEFSRLSVTHCQWARNYVQYYTDKGKKYHTIIRALAYKWIRILHKCWKERTPYNEDLYMEILKKRGSIFATLHLQTK

SEQ ID NO: 434823 - protein, 341 aa, unidentified
MEEDIIIGVDLAKNVFQLHGARRDGQVVFRKKLSRPQFAKFCAEHPRSLFAMEACATAHYWARELMSLGHEVRLIPPIYVKPFVKRHKNDAADAEAITEAALRPNMSFVVPKSAETQALTMMMRTRDQLLEQRTATVNALRGHLAEFGLIAPVGLKNVERLRELVDVHPDLPELVVTMAKLHFNRIDQLSEEIDTITGRIKSHCADSPEALRLQTMPGIGPIAAMVIEAFAPDMKCFEKGRDFAAWLGLVPKQHSTGGKTRLGQTSKMGQKDIRRALIIGAMSCIAAAARRGKRCHPWLQDKLERKPKMVAAVALANRMARQIWAMITKEQGYLPNQEVAA

SEQ ID NO: 434824 - protein, 352 aa, unidentified
MAEKLNSVIAVIGIDIGKNSFHVVGLDERGAIVLRQKWSRGQVETRFANMPPCLIGMEACVGAHHLSRRLRALGHDARLMPAKYVRPYSKGQKNDFRDAEAIAEAVQRPTMKFVATKTADQLDLQALHRVRERLVRQRTGISNQIRAFLLERGVAVRRGLRFLRAELPDILATRCEVLSARMARLIEDLAGDWRRLDERIEGLSGEINALARQDTGCERLMSVPGIGPIISSAVVAAIGAGDAFDQGRDFAAWLGLVPKQLSTGDRTILGKISKRGNRYLRVLFVQAAWVVLIRPKSWERYGLKPWIEAARKRLHHNVLAIALANKLARIAWSVLARGRGFEARSIATAQPA

SEQ ID NO: 434825 - protein, 354 aa, unidentified
MNKRTPVVEANELAIDLAKNVFEVVGADRHGHELWHRCIATRQAFEHFLDRLNPPMCVGMETGPGAQAWGRRLQARGISVKILPAHSVKAHGHRMKNDLNDARAILRAMHDGDIRPVPVKSEAQLTLQFQHRVRAGCVSRRTAVSNQLRAMLLEYGLVTGRGDAALKKLVDKVLRGECPVPATLITLVEESMVEWHRLDERIETITARLILLAREDETARRLCTIPGIGPVIATAVVGKGIEPARFKNSRLCSAYLGVIPEQFGTGGHVHLGKMSRRGDAYLRSLFLQGAHSVVRHLRPEATDALSCRIRRWQDRHGEKGAAVRVVNHTIRVVWAMLSQGTHYRADRPEAAMTD

SEQ ID NO: 434826 - protein, 437 aa, unidentified
MKTLSVINPHAGSLDVGSEKLFLSIAGDEPVVFGTVTDEVYRLRDYVKQHGVTSVAMEATGVYWLYVYSVLEAAGLEVIAVNGRYVKNLPGRKTDMADCQWLATLHAHGLLKPGFVPPEHIRRLQDYLRVRTDHITMAGAHEQHMQKALERMNLKIHDVISDLTGTSGLKMVEAIVAGERNPAALLALCDPQIQKNKAGRLRAALEGTWKDEHLFALRQAYELWQFYQKKIAECDQAIGAVLQVVAGPEDPKNPTPPATKRGGVNAPHISGLHGMLWRLCGGKDPTQLPGVADYVLLQLLGEVGTDLGKNWKTEKHFTAWLGLAPGSRHSGKRRGNQRRGRNRAGRLFCVIARSVGRSVDKALGGFYRRLKGRRGGLVANLALARKLAELFWRLMVHGINYVERGLKKYEEKVAQTEQALLQKLARKYNLVLQPKVA

SEQ ID NO: 434827 - protein, 349 aa, unidentified
MAMTIVETRAVTGGVDTHADVHVAAALDSIGGLLGTESFPTNPGGYSRLLSWLEGFGTLRLVGIEGTGSYGAGLARHMANAGVRVVEVDRSDRQDRHRAGKSDVLDAVSAARAALSGRARGAPRGRDGNVEAVRALMVAKRSARSERTQSVNQARALVITGPDELRTCFSKHRTATLVADLGALRPRPGDVVGYATRVALRELGRRAQFLDDQIDRLDELIVPLVRSHAAGLLSVYGCGPDTAAVLLVAAGDHPERLRSEAAWAHLCGVAPIPASSGKSSGRYRLNPGGDRQANHALWRIVITRMGSHPPTQAYVERRLKEGLSKVEIIRCLKRYVAREIYRHLRLAAD

SEQ ID NO: 434828 - protein, 343 aa, unidentified
MKLHVLGIDLGKTVFHLVGLDSTGRAVIRKRCSRRQLLAFTANLEVQLIGMEACSGAHFLGRTLREQGHEVRMMPAQYVKPYVQTNKSDYLDAEAIAEAVQRPRMRFVPIKTEEQLDLQALHRVRERWVMRRTAVVNQIRSLLLERGLTLPKGRGHLDEQLPRILEDAELNLSGSFRVLLAQLQLELQQLAARIEEMDRVIQKIAKENEACQRLTEIPGVGPVTATALISAVGNGSTFQKGRNLAAWMGIVPGEYSTGGKQKLLGISKRGNKYLRRLFVQGARSVLQQRHKQAPRLSSWLAQLLGRTHQNVVVVALANKLVRMAWAVLCKNERYRTPVLAMSV

SEQ ID NO: 434829 - protein, 431 aa, unidentified
MSGPLVLVPVCNAIVGIDLADNKQMVVVTDHDSKVLARRTFRCRAWDLGLALDWAGHQASKAGFAGVTVACEPTGHRWRVLGQLAADRGMAFVCVQTLLTSWARRSEDLTFDKTDEKDAVLIARLTAQLRCYVPEPLDERWGRLRHLGARRERLLAETVGQVQQIRDLLECVWPASLDTAKQPFRSRTWLAGMSVILARTDGDPARLRRLGPARFEAAVRREVVARQGKRPCLRIVRLLFVAAADPRGVTIHRPGALERAQLLLDDFRDTQRRLGEAEARMVAVLDELQLSELVCSIVGLSALGGATILAETGDLTRFASARAVVKHSGLAPREKSSGTFTGRTKLTGQGRPGLRAAAWRAVWGAQKANPVYAAKFTHLTSRTENKLNRGQAHAAIAAALLRQLYAVVSTGQRWDAAIAAGGRCEVIRPAA

SEQ ID NO: 434830 - protein, 324 aa, unidentified
MLPTLGIDISKDSFHLELSINDKLRHRKFANRKEGFGELCVWLVKHKATQVHACLEATGPYSEALAIYLHQQGHTVSIVNPVQIKAFGQSELRRNKDDRPDAGLIRRFCEKQRPAPWTPPPVHLRELQALTRHLENLIETRQQQINRLEATNTKNVAKSLRKLVAHLDAEIKRTEQQIDDQVDRHPDLKQQSELLESIPGVGKRTAAKLLAELTDISQYKSARQVAAYAGLTPRNNRSGTIRGKTRLSKTGNARVRKALFFPAIVAKRHNPIVRAFCERLSSHGKNKMQVIGAAMRKLIHIVFGVLKSGKYFDPTHELLLNSVS

SEQ ID NO: 434831 - protein, 346 aa, unidentified
MKQISAIGLDLAKNVFQIHGADAEGAPVLNRKLRRAEVLRYFEKLPPCLVGLEACGGSHYWAREIAAFGHDVRLIPPIYVKPFVKRGKTDAADAEAISEAVTRKTMRFVPIKSADQQAASMVLKTRALLVRQQTQAINALRGHLSELGVIAAIGTAKVAALIEIVRDDEEFRLPKAAHFALAEIADQIEALTRQIDKLERAIVAEAKRDEDMRRLTTIPGVGAITAANIKALVPDPDGFKSGRHFAAWLGLTPKPHSSGGKERLGSISKMGNPTLRSLLVCGATSVLRHVKGNDKAPQWLIGLLARRPFKVVAVALANKMARIIWALLTKGGTYRNTGAASNAASA

SEQ ID NO: 434832 - protein, 406 aa, unidentified
MKQIVSVGIDVSKGKSTVCAMIHPNTIIKESFEVLHTVEEMSMLADYIGSLDGEIRIVMESTGHYHLPVAQFLYQKGFFICVENAYIIRQFSRIMLHGAKTDPLDAKKLAKYGLAYWSELKPYKFHPSCYTKLSLLSKQYQTYIKLLIAAKQNVIHLMDEMLPGFKEALDTASSVQFSKVKYVDFAKEFYHVDMIKSMGKEIFRENYKQWCKEKGYRFQSEKADELFHLAEDGIPTLPTEFPSTRLCMEVATEQVSQLGYALEQILSQMQNLAKTLPEYQTIRQMGGMGEKLCVRFIADIGDVRRFHNGKALVAYAGIDAPPYQSGQYTGTKRRISKRGNSALRKTGYEVMKSLKSHPPKTDTRVYDFIIKKENEGKSKKQAKIAGLNKFLQIYYARVMEIYKNIV

SEQ ID NO: 434833 - protein, 431 aa, unidentified
MDVVVERCAGLDVHRDNVVATVRFPSEDRRRWLHKTRTFKATLAGLSELADWLAGFAVTLVGMEATGVYWKPVFQALEDRFECWLLNAQHLRNVPGRKTDVKDSEWICDLVAHGLVRPSFVPPPEIRRLRDFTRLRKAQSNERTRAIQRLEKVLQDAGIKLTSVASQSYSKSARAMLDALLSGVTNPEELAELAKARLRSKIPQLREALANRFKVDHHGILVAQLLAHIDTLDQAIATLDEKVDALLAPHKQVVELLCTIPGVALRTAQVLIAECGLDMSRFPSAGHLVSWAGICPGHNESAGRRRSGRTRPGPRWLTEALTEAAKAAARTKGTHLAAHHAQLRGRRGEPKAIGATRHDILVAYYYIVRDRVPFRELGPDWHRKRFSPERRAHRLQLQLEALGYKVTLEANPEQPAGTKETDTAEEAPATT

SEQ ID NO: 434834 - protein, 342 aa, unidentified
MKIIRIGVDLAKNVFQVHGVDHNEKPVWQRKLKRDEWIKVLLEKIEPGCEIGMEACGGAHHWARRLQAQGYTVKLIAPQFVKPYVKSNKNDANDAEAICEAMSRPNMRFVSVKTVEQQDAQAVHRIRAELMEQRNAKVNQIRGLVSEYGLVAPQQVSHLRAAIPEWLEDAGNGLTGRFRRLLNGLWTDLQLLDQRLKELDQEITELAADPVAQRLQQLRGVGPMIATALLATVGDASQFANGRQMAASLGLTPKQNSSGGKEKLLGISKRGDSYVRCLLVHGARSMINASKGKDDRLSQWVMRIATTRHPNVAAVAMANKTARIAWAMIRKQTDYQPDLAAA

SEQ ID NO: 434835 - protein, 340 aa, unidentified
MTITTVGIDLAKNVFAVHGVDQNGKTVLINPKVSRAALPELIASLPPCVIGMEACSGAHYWARLFRQYGHEPRLMAAKFVSPYRMAGKSGKNDAADAQAICEAVRRPHMRFVPVKDESQQAMQCLHRTRQGFIEEKTATYNRLRGLVSEFGIIAPQSTDALRHVVSEQKHSLPLQVQQCVTDLLEHIDRIEENIAEYDQILSKAAKTDHRSQRLMALKGIGPTTACALVASIGNAHDFKNGRQLAAWLGLTPSQYSSGGKSKLGRITKAGDSYLRTLLVQGARSVLIGADKRTDSFSRWVCMLVERRGYWRAVVAIAAKNARLCWASLRYGDDFRLYSAS

SEQ ID NO: 434836 - protein, 384 aa, unidentified
MNKHSMIFIGLDTHKEFHEVGYCEEQRGASPVHYGRIPSSKVSVKKLIRQFESKYPGATIHVVYEAGPCGYWIYRLITSLGHCCYVVAPSLIPKKPGERIKTDRRDALKLVRSLKSEDLTPIYVPEPEDEAVRDLSRAREAAMKDLKEAKYQLKALLLRNNIRYEGTANWSKKHLRWLTELILPHPTQQIVLQEQLQTIEERIRRLERLDNELTHHVHQWRYYPVVKAIQAMRGVRLLVAVGVVAELGDLHRFDHPRKLMAYLGLVPSEQSSGGKRHLGAITKAGNGRARRLLIEGAHSYRYPANVSTELQLRQEGLPKDIVDIAWKAQLRLCKRYQRMSNKGKHYNLIITAIAREMAAYIWAIAKEVVLTPVNPKLRLSRVPA

SEQ ID NO: 434837 - protein, 386 aa, unidentified
MIYVGIDIAKLNHFASTISSDGEILIEPFKFTNDGDGFQLLVSKLNSLNAEPDSIIIGLESTAHYGDNLIRYLVAKSFQVCVLSPIKTSTMRKNNIRKTKTDKVDTYIIAKTLMMQDSYRFYTFYDLDLMDLKTMGRFYQKTVKQRTRLKIQLTAYVDEVFPEIQYFFKSGLHQKSVYALLKEAPTPEAIASMHMTHLANLLVKTSHGHFNRDNAKELRVLARKSVGASDSALSIQITHSIAQIELLDSQLQKIEDEMTEIMKFNDSVIMTIPGIGCINGGMILGEIGDIHRFSNPCKLLAFAGLDPTVYQSGNFQARRTRMSKRGSKVLRYALINAAHNVVKNNSTFKAYYDAKMAEGRTHYNALGHCAGKLVVCANLNIGQMVH

SEQ ID NO: 434838 - protein, 343 aa, unidentified
MKITRVGVDLAKKVFQVHGVDVAGRQVWKRQLKRCSWLSVLTEAVEPGCEIGMEACGGAHHWARELKSRGFEVKLISPQFVKPYLKSLKNDVNDAEAICEAMTRHHMRFVAVKTVEQQDIQAMHRVREGLMNYRKAKANQIRGLVAEYGLVAPRQMGPLRKAIPCWLEDAENGLRSAFRILLHGLWEDLQSVDLRLKVLDKEIFALSETHADAKRLKQLRGIGPLTATAMVAQFGDGRHFKRGRQASASVGITPRHTGTGGKNYLFGITKKGNPYLRSILIHGARSVVSKAKHKDDRLSRWVTELANRKHPNVAAVALANKTVRIAWAMLRNGTDYDPELAMA

SEQ ID NO: 434839 - protein, 355 aa, unidentified
MTRLTGTVDGVIGVDTHRDSLAAAATDPVGGVLAQISVGADAAGYQRLLAFARVQVPGRRCWAVEGAGSYGAGLAGFLQAQGERVVEVGRPKRPARRGGAKSDALDAVRAARQALIEDHPLSPRRRGDREALRVLLATRHGACAAKVSATNQLKALIVGAPEELRAELRGLATKQQVRRCALLRERPARSLEHRMTVRVLRCTAQRIQRLAAEAAELGADLERLVAAVAPWLLELPGVGPISAAQVLVSWSHAGRLRSDAAFAALAGANPIPASSGQVIRHRLNRGGDRQLNRALHTIVVARLRDDPTTRTYAARRRAEGKSTRDIRRCLKRAVARQLFKLLECHDRPAVEVLRP

SEQ ID NO: 434840 - protein, 354 aa, unidentified
MREKKLSLIKYFIGIDVSKATFNYCIRYGGGSIINGKVSNNIESIKEFVSSLKEISGFKMGSAVFGMEVTGVYGLVLMNTLIKLRGKVVVEPAMRIKNSLGIIRGKNDKLDAARIARYLIKNLPELKLWLPRRKIIDELSSLSTLRERMVRISGMMTTPLNEDDGFIDEKISLTNIRLCNQSIKDVNELVKNIEQKIKALWTEDDSCNRLMKVMLSVMGIGDVIALQMLIHTNEFKSITTARTFASYCGVAPFTYDSGTSVKKTARVSPVANKKIKSLLHNAVRTCIGFDPEIRAYYKRRVEVDKKNKMSIINAIKFKLICRVFACVRHDRYYEKGYVSKAPELVNKISSSNHL

SEQ ID NO: 434841 - protein, 343 aa, unidentified
MYFIGLDVHKKTISHCVKDAAGLVYQEGKIGATRRELDEWIRTMPQPRTIAMEATIFTGWIYDHLLPHAEKVKVAHPLMLRAIAAAKKKNDRIDAGKIADCLRCDFLPECHMASTEIRDRRRTLRYRSLVIRQMVQMKNRVSGLLMETGVSYNKQRLHKVGYFAELMTANEDVHESIRPLLKLSRDMIRRAQKLDYALVSSLERDPLLKDRLRRLRTVPGVGPITALTWALEIGDFTRFSSIKQAISYCGLCGDEKSSAEKVMRMPISKQRNKHIQRVLIEAAKLAPRQSPELAIIHARELERGNPNRATLAVARKMISYMLAVERRKQDFVPAEEFSRTAAA

SEQ ID NO: 434842 - protein, 323 aa, unidentified
MITDQEDQQLFQRRLPNQLPVVLESLEPYRPRLKVVVVESTYNWYWLVDGLLDRKYPVVLANPGAIDQYDGIKEADDLTDAAFLARLARLGILPTGYLYPKEDRPVRDLLRRRSLVVRQRTSMILSLQNMALRQTGQNFGWRALRRLSDQERAEVLGDHDCLAFVTTEQLDLIELLSEKIKRFEAKVLEHAQLRPAYECLLTLPGVGVILALTIMLETGDIGRFATVGDYTSYRRCVRATHTSNGKSKGKNNGKNGNASLAWAFVEAVHPALRTCPPARSFYDTKVAKRNGALATKALAAKWSKAAYYMIKRQEPFDLARVFG

SEQ ID NO: 434843 - protein, 355 aa, unidentified
MNAIKYIGMDVHLATISIAVLDAAGKLIMEVTIATQAATLLDFIRGLSGTLYVTFEEGTCAHWLYTLLEPQVAKVVVCDPRQNPRRLGEKKSDRLDARKLAELLRLGTLKPVYHGNPLGPALKEAARSYRTLVGDTARVMNRLKALYRARGIRCAGVRVYSPRFRAQWLEQLREPGVRGRAERLYKQLDLLLPLRQEARTALLMESRKHPAHQVLRSIPTLGPLRVALLLALLQTPYRFRGKRQLWTYAGLGLVTRTTADYQVRDGQVTRARKPALVLGLNANHNHTLKELFKDAAVTALTRPGPFKDFYAKRVAQGMKPELACVTLARKIATLVLTLWKKGEGFNAEHLKTQAA

SEQ ID NO: 434844 - protein, 342 aa, unidentified
MEHYAGIDVSLECSSVCVVEGSGKIVREAIVASEPEALIGWFNSLGIGLARIGLEAGPLSQWLYAAMKQAGLAVELLETRHVRAAFKTMPVKSDRNDARGIAQLMRLGWFRPVHCKSLSAQEVRAVLTARKLVQTKLLDVENSLRGILRGFGLKVGKTTARSFAGRIQELVDGHPNLEAIGAALLSVRSALLREFNAFEKRVRAMSRCDARTRLLMSTPAVGPIVALTYAAAVDDPARFKSSKQTGPHFGLTPRRYQSGETDRSGRISKIGDASVREALYQAAHVMLTKPVKGCTQLKSWAMRIARRAGMNKAKVALARKLAVILHRMLANATPFNAAAAAA

SEQ ID NO: 434845 - protein, 359 aa, unidentified
MTDQRISYCGRIVYVGIDVHKETYTVTCVCNKQIVKTATVQADPAALAASLPRWFPGATLYSVYEAGFSAFVLHRVLTKAAITNIIVNPASVAVAANDKVKTDRRDSKRLAIDLADGRLRGLYVPTEAEELARLLPRTRAQIVKHRATIARQIKAKLHPFGLIAPSSRRLISSRYLREIAAWSLPPELSVSLTLLAEQWRFATRQLIEMRRLLRDQAKAQEEIEKVYRSVPGIGAVVARTLATELGDMTRFANERALFSYTGLTPSEYSSGASVRRGHISRQGASRVRHLLVETAWRAMPRDGVLKEMFDRIAATRGKKRAIVAIARRLTGRMRACFRQGTTYAVGTYASAPAHPWQYA

SEQ ID NO: 434846 - protein, 416 aa, unidentified
MFVGIDWANESHDICVVDPAGKIRGRATIAHSQEGFDELTKHLGRWAEQGEILVGIERPEGRLVDRILEAGHPIVLIPTFAMKDLRRRYAVGGAKSDRGDAYVIADVTRTDGHRLRRLEPLSEETRALRSVVRARGDLVDQRVALGNQLRACLQAYWPGAAVIFADVCSEIALAFLERYPTPDAAARLGEVRLASFLKKAGYSGRRSATQLLERLRSAPEGIGGVEAEARADSVRAMLRVMRSLNRSIKDLDRAVVAHLGEHPDAEVFTSLPRSGRINAAQMLAEWGDCREAYRCPDAVSMLGGLCPVTHASGKHRDVSFRWACNKRLREAITTFADNSRHASPWAAGIYRRAIARGCDHPHAVRILARAWVRVIWRCWADWTWRRTGRRVRRTSGSSSSRRGGSWRRWRGGARCA

SEQ ID NO: 434847 - protein, 379 aa, unidentified
MRYFGLDVHKSYCEGAELLPDNTIRRFRFPNERKEWKRFAKELDGNCKVALEATGNAAMIYDILTRRGAQVAVVNPIRTRAIAEARIKTDKVDAEILVRLLAADFVCTCWIGSREERELRTLLRHRAALKKQVVGVKNRIHAVLARHAITVPVSDLFGVRGRQFLQELTELPEAEKIVLASNLKVLEALEAEIAAVEKELSSRAISLPGVEILLGIPGIDVLAALTILAEIGDIKRFASAKKLASFSGLVPSVHQSGKTRYTGHITKAGRSMLRWILIQVAQKAVGQPGALRDFYLRLKKRKGHKIAIVAAARKLLTIIWAMLTKNTEYRYLREDLRQKKIRRMHKRALPYVVSSDLPRKIASVVEEEVGAAQTPQPAA

SEQ ID NO: 434848 - protein, 400 aa, unidentified
MKTVLSVDVAKNKSMIMLMNNDGEILIDTKEIKHNLGEFEKVKEEIEEINPENLTVFMESTGTYHLPVERYFKENGFNTLVINSLTTKNNFDTIRKTKTDKKDCYRLAKLFFVNEVEYHEISKKDLYANLKAMTRQYFYLTQVNIRCKNRYKRLINICFPEFEGFFARNRIYEDTALNFIKAFPHAYIVREKRIDALYNNLRKVDARHDYYYKRLARQLKDTAMDSFPGVDKDHADVKNLSDMASILQENNRLIDEIRKNMIELAKQSPYFEIVNSFYGIGEVLAAELLGELGDITRFDNHKQLIAFCGLDPAIVQSGKSINVHGAISKRGDKYARWILFNISQMVVKLGHQYPSHPVYNYYLIKKAEGKHYYESLTACSTKILRMLYSMCKNNKRFLEE

SEQ ID NO: 434849 - protein, 485 aa, unidentified
MKNKSIFTRQNQTLINLFHDAQHPEKVLCIPLDYAKATHVALCCNGSGTVLKKAFPVENNPEGMAFLIEVAEGLCRKHHMGREHVFFGGEDCGTFSLNFIYGLRERGFLVVGVNATDAKGQRDNMQASSDELDLLGIAKLLINRRGSTAGGEPGAERALRSLTRHRKSQVRLRTATSNRIHQIVDQLLPGFLDEKLSGIPPFSEASLYVMEDRFSPAQVASRQDKALLRQLKAKGLQNAETAVGKLKAHARQVLAHPPELTGLLQTSLASEIQLYRCLGANIDQVGREIAQQLARTPGAMLATVRGIGITLAAGVAAEIGPPDSQPSVRRLGSYAGIVPRTKQTGGPGKGAKTGKVSRRCNHILKDYIVQCGNHLGQHGPADLKEGHRRRGANKQHADFGMARRFLRMGMRLMKNGEAYVPPGLREGATLGELQAYYLGMWPKLLAKWVKAGAVHAAFDKENPLGQWRERIEAIYGIELPLPRKK

SEQ ID NO: 434850 - protein, 333 aa, unidentified
MSTVIPAGIEISAQILNVGLRLDGHVEKREFPNTAAGHRQIRTFLRRRGAVVRVCMEATGVYGLDLALALEGTPGLELMVANPRSVHDFARARMQRSKDDDLDLDLLIDYAARMPFRPWLRPSATALQLRSLMRTVRGLIDDRTAAKNRLHAVTACTALSPVCQRELQRLIEAQGRTIARLEAEAQRLVAADPALAQRATLLITIRGIGTRTALALLGELAGLPDDLDRRQLVAHAGLDPRHVRSGSSVELKPRISKLGNRRLREALFLPALVAIQREPRTRAFYDALLQRGKAPRQAQVAVMRKLLHAVWGVLHYLTPFDPARLFPDRQPAS

SEQ ID NO: 434851 - protein, 354 aa, unidentified
MTDLSMADPDRLVTLGVDTHLDVHVAAALDERGRLLDTISLPTTAAGYRALLDWAAGLGTIERVGVEGTGSYGAGLTRWLTARGIVVLEVDRPDRRTRRSRGKSDPLDAEAAARAVQAGRASGLPKAGGGAVEAIRALRIARDSAMEARSRIANQLHALRVTAPDRLRDELRGYALDALVRRAARLRVPGVVDEPCAATRLAMRSLARRHAALSAEIATLDVHLRRLVTHTAPQLVARQGIGIETAGQLLVTAGGNPARLRSDAAFGMLTGTSPVPASSGKTVRHRLNRGGDRQANRALHMVVLTRMAHDSRTRAYVQRRTAEGKSTSEIMRCLKRYVAREVYGLLLQSPGLTT

SEQ ID NO: 434852 - protein, 357 aa, unidentified
MPSITSEAAAAGEVTGGVDTHQDTHTAAVIDQVGRVLGTREFAATPAGYIAMLAWMRGHGRLARAGVEGTGAYGAGLVRMLRSNGVEVIEVDRPNRRTRRLQGKSDPIDAVQAAKTALAGGRTSTPKHRDGRVEAVRNLRVARRSAIDQRADTQRQIKSLIITAPDTLRTILRGLSITKLIVVCANLRPDRADTGTPATAATIALRSLARRHEQLSAEITDLDELLGPLVAAINPALVAANGIGTDTAGQLLVTAGENHDRLTSEAAFAMLCGVAPLPASSGRTNRHRLNRGGDRQANAALYRTVLSRLRWDPRTRAYAERRTTEGLTKKDIIRCLKRYIAREIYQIITTNHTPPTT

SEQ ID NO: 434853 - protein, 343 aa, unidentified
MKHYIGLDVAMKRTFICILDENGKIVHEGSEKTDPKLLVDYLQKTGLEAALIGFESGSLSHYLLNGFKDRALPAVCIDARKMSAILSLKINKTDKNDARGIAEALRSGMFTRVHHKDQESVDRGVVLVARKTMVNQRTQLKNCVRGLLKSYGVRLGSVGSSRFSATVKSHLNGLDKAVQLSFEGLLNSFDHLTLEIEKLDKKLLEMASQDKDVKLLLTIPGIGVITALTYKAEIFDPHRFSDSRSVGAYLGMTPKQYSSGDTQIQGRVSKCGSNELRSLLVEAGLVVITRTKKWSKLKAWGLKLMRKKGAKKAALAVGRKLAVIMHRMLIEQKEFVYGEQKAA

SEQ ID NO: 434854 - protein, 352 aa, unidentified
MAVTIVETRAEIRAITGGVDTHADVHVAAALDPIGGLLGVREFPATAAGYGGLMSWLGGFGTVCLVGIEGTGSYGAGLARHITTAGVRVVEAGRSDRQDRRRQGKSDSLDAVSAARAAQSGRARGAPKGGDGAVEAIRALMVAKRSAASERTQTINQARALILTGPDDLRARFTGHTAAALVAELASLRPRPGSTVGYATRIALRELGRRAEFLDAQIERLDELIGPLATARAPSLLALYGIGPHTAALLLIAAGDHPERLRSEAAWAHLCGAAPIPASSGKTVRRRLNPGGDRQANHALWRIVFTRLGSDPATRAYAERRTAEGKSKKEIIRCLKRYVAREVYPHLRATVG

SEQ ID NO: 434855 - protein, 348 aa, unidentified
MTIVEGTRSITGGVDTHLDVHVAAALDDIGGLLGVESFEASSAGNDKLLGWLASFGQVAKVGVEGTGSYGASLARSLRAADVCVVEVDRPNRQARRRSGKSDPADAVEAARAALSGRAQGAGKTRDGNVEAIRALVVAKRSAKSTRIKSMNQIRHLGFTAPDELRERLRGVSRDHLGTVAASLRPRADGDLVLTATKTAIRILGRRVLTLDQELATIDNLLRPLVTATAPSLLGVHGVGVDCAAAVLVAAGDNPERLRSEAAWAHLCGVAPIPASSGKVTRWRLNRGGDRHANGALWVIVITRMNSDPRTRAYVERRLAEGKSKPEIIRILKRYVAREIYRHLPRHDG

SEQ ID NO: 434856 - protein, 357 aa, unidentified
MKIIGVDLHARQQTIAMLDDQTGELVEKQLSHEGEQVREFYAGLPKPVLVGLEATGSMHWFLRLLEELEIDFRVGHPAKIRAAEPRKQKNDRRDARLLLTLLAENRFPAIWMPSREQHDLQILLRHRDQFVRLRTRVQLSLQALALSHGLRRGHSLWTRGGHHTMRALPLAAPASEQRDTLLALYPQLQSPINDLDRQVEREAQQRSQSRRLMTHPGVGPITALATEVFLGDPQRFADGKAVASYIGMIPREHSSGGRQRFGKISKQGNSLLRFLWGEAVIHAVRRDPELRRFYRRKLVQKGMGKARVAAARKLGIRLWIMLRDEIDYTEFCRRGHQRRQCSGAACAGMLHGDSGLN

SEQ ID NO: 434857 - protein, 394 aa, unidentified
MRFVGIDIASETHVVAVVDETDAVLVRPTKFTEDAPGYDRLFGLLGTPADTLVALEATGHYWKNLFAVLVTRGFAVALLNPLRTRRFADEELARTKTDAIDARGIARFAAQKRPAPTRLPDRATEELRELVRLRDRLVQDVGDRLRQLHRLVDLGFPEFTRHVKSLDSELATAILHDYPTAAAFRNVSARRLAGLRYDGRHKVGDDLARALLAAATRSVGQHHGAAYRLQVRYACEDLDLLRRRLRTLERDIERTLDDHEIGTLLTTIEGIGPQTAARLIAELGNPAEFRSAAALASYVGVIPAIRQSGTWTSSRAGLHPLGHAALRAALWMPVLTAVRKNPWLRAYYQRLTARGKLPKVALIAAMRKLLIAVYPVAKTRRPFVSQRAPQEARA

SEQ ID NO: 434858 - protein, 356 aa, unidentified
MLHAGMDMHKLFSVVTVVDDSGNEVVKGKKLLNRDLEIVEFFKSLQDKLRVVIEAGSNWMWMTDLLDDYGIENVLCHPLKTKAIASARIKTDKLDSLTLSQLLRANFIPEAYKPDQKARSLRELLRYRASLVGKRTGIRNAIHALLARGNISLPSSDIFGKKGMEYLLKLELPPLRRFTLDGYLEILKALTHEVKKAEEKIKEEYKSSPEAKLLSTVPGVGLILSLTILSEIGEISRFKRARQLSSYCGLCPSTAQSGNTLRHGRITRQGSKWLRWAFVEAAIQASGKPGPLRDFYLKLKKRKGGKDSQSGGGQENLHLRIPHAQGGESFRGVDFLKFERSRVSSHVTLGAYNPSF

SEQ ID NO: 434859 - protein, 365 aa, unidentified
MLLYGGIDLHSNSNQSAILNQDRKRVMRRKMDNDPAAILRFWEPYQPDLAGIVVESTFNWYWLVDLLQDHGYRVHLANPAAIQKYSGLKCSDDNHDAFWLAELLLLGILPEGYIFPKELRALRDVLRKRAHLVRVRTSLILSLQNIITRNSGTKVSSNHLKALRQDRAQIYLQENEDLQLAGSASKAAIDVLTRQIRRIEGAVVKKLKLQAPYTQLLTLPGVGQIVASTVMLETGPIERFSKVGCYASYCRKVNSQWTSNEKVKGHGNKKNGNKYLAWAFGEAAERARIFHKASREFYQRKLRQKKSPALAHGALAHKLARAAFHLLRDNVPFDPQKMFGTPEEALDKCLGRDGDPEAKLAKPGD

SEQ ID NO: 434860 - protein, 348 aa, unidentified
MSQILNTVAVIGIDIGKNSFHVVGMDGDGALVLRQKWSRGQVEARLANMSPCLIGMEACVGAHHLSRQLEALGHDARLMPAKYVRPYSKGQKNDFRDAEAIAEAVQRPTMRFVATKTADQLDLQALHRVRERLVSQRTGIINQIRAFLLERGVAVRQGLRFLRAELPRILAAPAEVLSPRMVHVIEGLAEDWRRLDERIECLSGEITALARQDAGCERLVSVPGIGPIISSAMVAAIGTGDAFSKGRDFAAWLGLVPKQISTGDRTILGKISKRGNRYLRVLFVQAAWVVLIKPQSWERHGLRRWIEAAKKRLHPNVLAIALANKLARIAWSVLAHSRTFEARKLQAA

SEQ ID NO: 434861 - protein, 319 aa, unidentified
MAQNDSVVVGIDVAKDKVDACIRALALRQTFTSTVQGHRKLVRWLRKHRVNKAVMEASGGYERVWARVLREADIEVRIVDPKRVRNFALSAGRLAKNDAIDAEMIAWFAEIFSEAPNQRHDAAREELQALVKARLSLIDSRMRLVSQSEHVAPGLVQKAHGRILKSLASEIARLEAAISIKIKSTPDFAERAEIIESVPGFAKTSSANLVAGMPELGQVSDEIAAALIGVAPYDDDSGKRRGERHIKGGRRWVRNAVYMPCVGAATQNNPVLQAYYQRLIAKGKEPKVAIIACMRKLIVILNTMIARRQKWDPSRYSLT

SEQ ID NO: 434862 - protein, 374 aa, unidentified
MNIIYIGVDFHARQQTICYLKIETGELVTCELKHQDKEQVRAFYKQFQGHVIIGLEASGYSPWFEAMLEQLGCEIWLGHATEIRRRARWRQKNDRRDAELILDLMLHNEFPRLHRPTVQSREVLRMLRYRQKLIKVRTMSKNSLQAIALQAGLAKGSQLFNTAGQQELRTAEMSPVLQWQRDHWFELIKPLNQQLLETMVWFKAQSKGDAVITRLRTHPGIGLLTALCLLHTLQPVSRFRNARKVAAYAGFDPVERSSAERQHFLGISKAGSRLLRYLLVEATHTAVRHDEDLKRFYKRLAERRGRPKAKVAAARKLLIRAYIMLRDEIDYAEFRRRAVAARLARRGQRPEVPEVLIGQPASAGCQEQTHASEK

SEQ ID NO: 434863 - protein, 310 aa, unidentified
MHPCVGVDVSKHHLDWTFGEDGPVEQLPNTPAGIRQLLVRARRHEPPLIAIESTGGYERKLVVALQDAELPVVLVNPWRVRRFGEGLGKLAKTDPIDARLLALYAERAQPPRRPLPGPRARRMADLVARRRQLLAIVVAEKSRLENAPAWLRKDIASLVAVVERRIAKLDVKVDAAIALDPEQHETSEILQSTPSVGPGVARTLIVDLPELGTLSRRQITSLVGLAPYARDSGRKSGMRRIRGGRPAPRTALYLAAMNAARFNPVLKDFYQRLRAAGKPAKLAFVAVARKLLTLLNAMVRDRTMWRETIT

SEQ ID NO: 434864 - protein, 314 aa, unidentified
MAKQRERIIVGIDTAKAELEFYRKDTEQGGVFANEPGEVDRFLESLPEEAEIAIESTGRLHELLVLRALELGVLVYIISGFQLSRYRDAVGQRAKTDRSDARLLARFLEREGENLRPVTPRSPEEKRLWQLLRRRASIVHHRTALQQSLRETDAGFPSPDALLDAFKHYIAVLEREALRLAKTLGWREDLARLQSTPGVGPISALGLLLAFRHAPFRNADAYIAFMGLDVRVRDSGKFKGKRRLTKKGEPELRRLAFLAGRAGRRAHAPFKEYFDRMLERGYSKIAADVAVGRKIARIAFALLRDGRPFGPSEA

SEQ ID NO: 434865 - protein, 343 aa, unidentified
MQTVTTIGLDIAKSVFQIHGVDAAGNVIVRRQLKRRYVLPFFQKLPPCLIGIEACASSHHWSRELKALGHTVRLMPPAYVKPYVKRQKNDAADAEAICEAVTRANMRFVATKTPEQQSCLMLHRTRHLFIRQRTAVINAIRAHLAEFGIVAPVGRNGVEQLLDVVANASDKRLPEIARACVLALGAQLRTLKVQILNFDRQIVAWHRSSEASKRLDEIPGVGPALATALVASVADPKAFRSGRNFSAWIGLVPKQRSSGGKDKLGSISKQGDRYLRSLFTAGALAVIRYAKIHGTKHRPWLTALLARRPTKVAAIALANKIARMAWAMMAKGERYKEPVALAV

SEQ ID NO: 434866 - protein, 373 aa, unidentified
MPYKPIVFAGREIVSALVLNTVGELDPRPAFLVLKPEQSLGAFGTPHFARMGVMTNNTAQSFIGIDVSKDKFDYFIRPSGDAGSLSYTPSDVAKFLARLSSLEVALVVMEATGGYEKQLAAQLSAAGLLVAIVNPRQIRDFAKSTGQLAKSDALDASITAHFAESIRPKVRPLPDADTQALQELVTRRDQLIQIRTAESNRLQLAAVPKVKKSIQRHLKALQQNIDDIEDDIDDTISNSPIWKEKDDLLQSTPSVGENTSHKLLAAIPELGRLNRAEVAALVGLAPYDDDSGKFRGVRHIRGGRAQARSALYMAAVSAIRCNPAIKKFYTRLRSKGKAFKVAITACMRKLLTILNYILKTKQPWRDDYAAGNS

SEQ ID NO: 434867 - protein, 346 aa, unidentified
MKITTVGIDLAKVVFQIHGVDERDKVVVRKQLKRAEMSKYFANLEPCLIGMEACGSAHHWARKLESYGHRVKLMAPQFVKPYVKTNKNDMADAEAICEAVRRPNMRFVAIKTEEQQAILSVHRARQGFVKARTAQGNQIRGLLSEFGIVIPPGIRSIVKQVPEILEDGENGLPGTMRNLIERLTENLQAMDRQAKELEAQIQLWHRENEASHTLAEIPGLGPITASAIVATIGDAREFKNGRQLAAWMGLVPKQNSSGGKQTLLGISKRGDTYLRTLMIHGARAVIRLAEQKAEPESWLRKLMARRNTNVAAVALANKNARIVWALLAHDRTFRPGYTPAAVVAGM

SEQ ID NO: 434868 - protein, 411 aa, unidentified
MDKIYDKCCGIDVHKKLIVACFRCGKKQEVREFGATTRELLELADWLKDGGCEMVAMESTASYWKPLYNILESSDLNAIVVNARHMKAVPGRKTDVKDAEWIADLLQHGLLQPSYIPDKDQRELRELVRYRKSLVGERTRELNRLQKMLEGANIKLSGTVSDINGKSARSILEYLLTGKSIDGSKYDEMYEQKIIAHNLKATKEQIVDDLNGVMSPLQRRMMKELLVHLDELNIHIKNLDDEIDNFMKPEEKQASQAIQDVTGIGNTSAQAIISVIGSDMGRFPTDRHISSWAGLCPSDNESAKKRKSGKTRKGNALLRTTLITCAHAAVKNKKSYFYAQYVRISAHRGPKRAYVAVAHSMLISIYHILKDGVVFKDLGADYYNQFNKERKINAYLKKLKALGWEAPAVAA

SEQ ID NO: 434869 - protein, 338 aa, unidentified
MEKHFYFIGLDIAKETFVASIYHTPDRPVLTKENFSNNPQGYKELIVWLQDNQINTTNCHICLEATGVYSDGVAYYLSAQGYRVTVEPPLRVKRAFHPAGHKTDPVDSRQIAEYAYRFSDRLIPWHPKEELLEKIRQLLSVREQFTKQKVALKNARDAYQRQKVQVELIQKAHQETLAQLEKQITRIDQELDRLMKENPDLSQKFHHLKSIPGFGLLLSAHLLVMTENFTSINDYQRLAAFVGIVPYQHQSGTSILKKARIRHYGPRACRKLLRLAAQSVATHNMTFRKYYLRKLAEGKAKALVLNNIANKLLKLACALIRDNSRYIKDYHSLHPMYV

SEQ ID NO: 434870 - protein, 406 aa, unidentified
MNAVGIDVSKEKSTVVILRPFGEVVAAPYDVSHTDSELDRLAKVIKKLPGETRVVMEATGVYYEPVARRLHEHGIFVSVVNPVLISDYGDNTLRKAKTDRKDAIKIASYALSAWLDLVEYKPEEDRRRTLKSLNRQVKKVIKVNTMLKNNLISLTDTAFPGINKLFTSQERPSDGHLKWVDFVAKFSHRDTVARLSLNAFKKKYKSWCEKNKYHYQDSKAEEIHAHARKCVAGVSAEETFCLMVTKAAEFVNAACENENALKNEMDRLSSTLPEYEVVMGMYGVGKSTGPQLMAEIGDTRRFRNRRAITAFFGYDTEPDDSGQHISKSRPITKKGSPSLRRTLFIIMKTLVTKKPVDNPVYAFLDKKRSEGKHYYSYMTAASAKFLRIYYAKVNEVLNKKETSMCT

SEQ ID NO: 434871 - protein, 338 aa, unidentified
MQITTLGIDVAKNVFQLHGVDARGRAVLSRRVKRQQLLDMVANLPPCVIGMEACGSAQHWGRAFEQLGHTVMLMHPKYVKPYVKTNKNDGRDAEAICEAVSRPTMRFVSIKTVEQADLQAVHRTRSLFVKHRTAVINQIRGLLAEYGLVIGQSPGKVRPALIRFLDDPASGLTAFARDTFAELYAQLTELDARIERVTQRVERVYRAHPVCQKLAAVPGIGPLTATALVATVGRPRAFHNGRHLAAWLGLVPRQYSSGGKERLGGISKRGSRYVRTLLIHGARAVVQRAARRTDTQGRWLCALTHRKGTNVAAVALANKNARVIWALLAHDAAYRPPA

SEQ ID NO: 434872 - protein, 350 aa, unidentified
MIIGVDYHPSFQTIAFLMEETGECGEQELKHSDGQAEKFYRDLKQRGISVRVGMEATGYSRWFERLLAELGFEVWMGDPAEIKAKRVKKQKFDREDARLLLRLMRENNFPQIWVPGPENRDLRQLLWHRHRLVQMRTRIMNQLQALAMNEGYRWKKKLFSEQGRVQLEKLALAPWASRRRQELLELLDRMNPTIAELTAAVEREARKRPEAVRLMTHPGVGPLTALAYVLIIGTPTRFQRGKQIGTYVGMIPSEDSSAHKQRLGHISKQGNSLLRFLLVEAAQAAARIHPDWRRRYIHLAMRRHKSIAKVAMGRRLTIRLYWMWRNGCEYSKSVEFGSYAGQLGTGHGGK

SEQ ID NO: 434873 - protein, 352 aa, unidentified
MSTNHIRERPHASTTIGLDIAKNVFQVHAIDAAEKVVVRKQLRRSQVLEFFKALPACLVGMEACATAHYWARELTKLGHQVRLMPAKDVKAYVKRNKNDAADAEAICEAVRRPTMRFVQVKSAEQQGRLMQHRTRDLLMRQRTQLINALRAHLAELGIVAAQGNAGLKELLKIIAGERDARLPVDAHASLVVLAAGLHAVQTMIGSIDKRIVIEHRSNEASKRLRSIPGIGIVGASAIVATVADPMAFRSGRDFAAWIGLVPRQDSTGGKQKLGPISKQGDRYVRRILVVGAHAVLRYAKQNPEKYPWLTQLLARRPFKVVAVALANKMARMAWALLAKGGTYRALALAAAA

SEQ ID NO: 434874 - protein, 463 aa, unidentified
MARKDKRKKRKMPVRSLKTIQPDAAGIDLGSREHWVAGPPLEDDTPNVERFGTTTPELLRLADWLKGQQVKTVAMESTGVYWIPLFEILDSRGFEVILANARQVSHVPGRKTDMLDCQWLQLLHACGLLRGSFRPPDDICRLRALIRERNTMVEQRSDWVRRMQKSLDQMNVCVHHAVSDITGVTGMKIIRAIVDGQRDPVSLAKMRDRRCKKNEQQIADELTGNWRPEHLFNLRQALKMYDHLCALVAEYDEEILSYIKSLQPAVDDDESAPPPASKTKARNIAKQGQEPMRQALYQLSGVDLTSIDGIGVDTASVILSELGPNFSAFPDENHFVSYLRLAPNLSISAGKKVPNKFKGTTSTRVADALRLSAITLRNSKTALGAFYRRISRRKGASVAVFATARKLGHIVYRLLCHGQSYVDIGAKVYESRFMDRRLKFYKKFLNDMGYKVSPLTAAQTVAA

SEQ ID NO: 434875 - protein, 458 aa, unidentified
MPRRQRRTTRAVTTPVLHPHAAGIDIGATELYVCVPLDRDPQPIRRFGTFTEDLHALADWLQACGVTTVAMESTGVYWIPLYQILETRGLEVCLVNARHVKNVPGRKTDVQDCQWLQYLHAVGLLRASFRPPETVCAVRSLLRHRDALVQLAATHTQHLQKALSQMHLQLHHVLSDLTGVTGLAILDALLAGERDPQVLARHRDHRVKASAETITKALVGDYRSEHLFTLRQSLDAYRQYQRLIGECDREVARLLGAFASTVDPAQHPLPAAPASRRKSRGIPAIPGFDLRLELYRVLGTDLTQVPGLQTPTVHTLFAELGADLSPFPSGAHFASWLGLCPDNRISGGQILSVKTRHVKHRVATALRLAAQSLFRSQSVLGGFFRRMRAKLGAPKAITATAHKLARIIYHLVTTRQPYDESRLAAAEAAHRRHSESRLRAQARALGFQLVPVIEQSVS

SEQ ID NO: 434876 - protein, 388 aa, unidentified
MVNGINAEALSQRGIFRKGAPSNHDAGSGPAHTYSKETMMRFYQQPHRFYCGVDLHARTMYLCILDQAGQTLLHANYPADPRAFLDAVAPFRDGLVVAVECMFAWYWLADLCAEHGIPFVLGHALYMKAIHQGKSKNDRLDAAKIAGLLRGGLLPQGYVYPKAMRATRDLLRRRSFLVRRRADLLAHLVNTNSQYNLPPLNKKLVYPGNRGELNLPERFTEPSARKMVECDLALIDALDAQIHELERHLVRTAKVHDAQAYARLQSIPGIGKVLGLVLLYEIHDIGRFPEVGHFLSYARLVRPGHESAGKAAGFGNQKIGNAHLRWALGEAACLYLRASARAKRWQARMQAQHGPGKTLGILAAKLGRTVYHLLRTKQVFDEARFFAS

SEQ ID NO: 434877 - protein, 353 aa, unidentified
MAQTITYRVGFDVAKSVFQVHGVKNEPGEAVAITRRLRRAQVEPFFAKLPPSLIGIEACGSAHYWGRLARKHGHEVRLMPPAYVKAYVKRNKTDAHDAAAICEAVARPTMRFVAVKSEADQATLMLHRLRASFVEKRTAAANQLRAAFAEFGITAAVGAGGFKELLGLIESKVERFTLLPQALRLVLCELAWQWQGCEAAVRRMDVEIAAGVKRSERAKRLTEVPTIGPVGASAIDALLPDPQLFRSGRDFAAWVGLTPREDSTGKTIKRGPITKKGDGYLRRLLVLGATSYLARVRRGQTKGASAWVLKMAAHPKRKLAAVALANKTARVAWAMLAKGEDYRAPAAAALQAA

SEQ ID NO: 434878 - protein, 426 aa, unidentified
MPFAALDLHKKIVEAVVLDDTGNVLHRDRFATTREALTDFARNHLPPGTHIAVEATTNTWAVVRLLQPFAAEVVVSNPLRTRAIAEAKVKTDKVDALVLANLLRCDFLPRVWIPDQETIALRHQSTERANLVADRTRIKNRIHSVLHQRLIQAPSDDLFSPRSLAWLRQLEIDALGRQALDRHLRQLDHLEAEIFDLSGELAQQANDDPRIKLLMTLPGADFPVAQTLSAAFGDVSRFPTADKAAAYLGLVPSTRQSAHHCYHGPITKQGNSHARWMLVQAAQSLDSHPGPLGVFFRKLAKRKNRNVAVVATARKLVTIAWHMLKNNEPYRYAQPSTLKAKFDRLRIRATGKKKPNGSKKGAPRPANYGSGVRTRAVPSVDDVMAEAGLPPLQPLAPGEQKMIGERGSAAFARSIRQAKRIPRRSK

SEQ ID NO: 434879 - protein, 331 aa, unidentified
MDVHDRYCQVAILDDDSNEPEEQRIPTERDELEEFAREHSGAQVAIEATRNYWFVYDSLEPELDVSVANPHETGLIGDQKVKSDRLDAKRLAVLLRVDALATSYIPPDEFREARKLVRRRKALVEDRTSAKNRVRSALADRGVSYDGDLFGQEGREFLADEELPLSEADRRIIEADLAVIETLDEEIGQLQTEIDEIATSWDETQLLMTIPGVGPVLAVTIVAEIGEIERFSSKKQVVSYAGLDPRVRQSGEKETTAAITKEGPPVLRWALGQAVLNVVKYDTALGNFYTRMKSRKQNQKAMVAAMRKLLVWMYAMLSNQEEYDPPKVAAP

SEQ ID NO: 434880 - protein, 415 aa, unidentified
MDVLYPRCAGLDVHKDTVVAGVRIVGDGPVKTDVRTFDTTTPGLLALSTWLAENGCTHVAMEATGVYWKPVWHILADGDLTLILANAAHVKNVPGRKTDVADAVWLADLLAHGLVRASFVPEAPTQEMRALLRTRKQLVREQASHIQRIQKTLEDANLKLSSVLTNIMGVSGRAILQALIDGERDPDKLLTFVRRGVKAPQEKLRAALQGRITDRHRFLLRLHLRQVDALDAATAEIDAEVAREIEPFRQAVRQLETIPGVSELTAQVIISEIGIDMGRFPTAGHLISWAGLCPRNDESAGKRRSTRLRHGATWLKTTLVQCAWAGSRKKDSYLQAQFQRLRQRRGAKKAICAVAASILTAAYHMLKDGTFYHDLGAKHFYRASPSEQANRLASLIAKLGYTCTLAPAKAQEVSI

SEQ ID NO: 434881 - protein, 360 aa, unidentified
MSQDGEYEFHPNEVGGSEMNVTTIGLDIAKSVFHVVGAEARGKQVLKKRLRRTKVLAYFGNLSPCVIGIEACGGAQYWARELRGLGHDARLINPKYVKRFLCGNKNDYNDAAALCEAVVHPEARLVPVKTPQQQDVQALHRVRRGVRKERNAWVNRARGLLGEHGIVMPQGIGAFRRRVPELLEDAENGLSGLFRELLAQLYEQVRALDERLAGYDKRLAQLARTDEACQRLDELPGFGAVISTAMLASVGDGQGYRNGRHLSASLGVVPRQHTTGGKVRLLGISKRGDKYLRALVIHGARSVVRHAERKDDALSRWINRIRAESGTNVAAVALANKLIRIAWVILRRGERYCPQLAARA

SEQ ID NO: 434882 - protein, 394 aa, unidentified
MSAQALGWDIHRKFSKVSLVEETAEGEYRIVERARLEHIDQDAMRRWLSRLPQQTPVGLEAAFGWPWVADLLLELNLDPHLGHPPALKVLAQHEAKTDRCDGDRLGKFQLQGIFPESYMAPPEVRQIRERTRYRMALSSIRGAMKNRIQALLHRFGILHNFSDLFGKQGRRFLEQLDLPPASRAVLDSSLEVLDEVVRQIQDMEKWMEKNLDEDEIVRLLETIPGIGLILAYVIRAEIGEISRFPTARHLRSYAGAAPVSDDSADRHGRRHCSPACNHTLRWALIEAVTGALNTQGTRGQRLRNLHGRLTHGGKSNKNQAKVALAGQLAELVFIVWTKRTPYEETPPARPGSIRKTPARGPQNQVNQVSANMRPDQSRHPIARRGTARAGQAQL

SEQ ID NO: 434883 - protein, 386 aa, unidentified
MQACTVSTPTADRTSTIFVAIELSQKSWLITMHSPDRDRISRHKVAAGDHAGLLRLIAGVRERAARVLGAVPAVVSCYEAGYDGFWLHRLLTAAGITNHVFDPASIAVEQRARRSKSDRIDGAQLLRTVMAYCRGEPRVVRIVRVPSVEQEDARRGSRERDRLVEEQTAHTNRIKALLRLLGVAVGNPRRRDWLSWLARQRDWQGEAVPPRIMSELEREHARLILVRQQLAALTQPSAREEPTAAAAQMAQRADHLRRLKGLGPVLATTLVNEAFYKDFRNRREVAGYFGLAPSPWQSGGTDREQGISKAGNPRARHKSIELAWLWVLHQPDSALSQWFRQRTANASKRIKRIAIVALARKLMVALWRFLTTGLVPDGVVLKAIEA

SEQ ID NO: 434884 - protein, 373 aa, unidentified
MEVLLERCAGMDVHQETIVVCVITTDAAGETHSDVRTFGTMTKHLFELLKFLETHGVTHIAMESTGIYWKPVYNILEGYFTVVLANAQRIKNVPGRKTDVCDAEWIAKLLRVGLIEPSFVPSEDLRELRDLCRLRKKRMGSLTAEKNRIQKYLEAGNVKLGSVISDIFGVSGRNLLQRLIAQGYVDAEDVEASVKGSIKNKQAEVTDSLFGTMTPHQIRLIKDCWEHIEYLEKSIARLEGEIHEHLEPYRTEYELLQTIPGVSERTASALLAEIGVNMEQFPTADHLASWAGVAPGNHESAGKKKYKKRKRQSSCESDIMRSVLGNRSLTKHDIGNEVLEDCFTTREEKSLHRHLAQDTCHCIPHVEKQTSLH

SEQ ID NO: 434885 - protein, 470 aa, unidentified
MAAVMIGIDPHKASHTAVVISAAEETLGELRVRASAAQAEQLLAWAAAWPERTWAVEGAAGLGHLLAQQLVSAGERVLDVQPKLGARVRLLAAGDTNKNDPNDARSVAVAALRSPGVREVVPDDHAAVLKVWSKRYRDLGRTRTQVVCRLHAVLCELVPGGVAKAITAAAAARLLDSIVPAGAVAAARCELAAAFLEDLRRIDAQLRETRTTLTTAVQAAGTSLTTLFGVGPVIAAAVIGDVKDVSRFPSRDRFAAYNGTAPIEVSSGRRKVYRLSRRGNRRLNHAIHMAAVTQVRHRHSEGRAYYEKKLAEGKTPKEALRSLKRQVSNAIYARLQADARRAAARAQGPGGQPGNDSGSSAAGLHPAGRLFGQATPGPGHHTTAPAGDLPPGAARARGRAGHSSIAAILPPAKPRVQVERPQRSEDERPGGTARRRPQSATRKAPGQDSLARTQRPKGTSHPAKRANGNP

SEQ ID NO: 434886 - protein, 380 aa, unidentified
MSRQPAAPAAVLSALMNKTTKVSIDQEQTERKGNWVLKLGLDVHYRQVTVAMQEGDGRIKAVGKMGHDAFGNWVEKKLKAGFELYSCYEAGASGYWLHRDLAELGVKNLVIAPKAMGQDKRQKTDRRDSSQLCDALDRYLRGNRTALSPVAVPTAEQEEKRALIRYHRQIMADRSRYEARGKGLLCAQGIEVGGKWWQPKTWKELKTHPRFKSWMEQALQAWRTKLLAAEVEQQDLRRKVEALAPALLPKGVGAYSAVALEYEMKGLARFKNAGQISSYTGLCPGIHSSDGRAKEGSINRCGNAAVRWNLVEMVWRLLKWQPDYQPMRQLAAELVKSKRAKKRLVVKAARHLAIDLWRLQTGRSTPEALGLIMQPTAKAK

SEQ ID NO: 434887 - protein, 310 aa, unidentified
MDAIVVGIDVSKDRLDVHVHPSGENFVVTRDAEGLQVLNARLVPLGAHAVAVEATGGFESVVAASLGGAGLPVIVVNPAQVRAFAKALGKRAKTDPIDAGVIARFVEATKPEIRPLPDADTRLLAELVARRRQIIQMIVAERQRERQMPSRHLKKSVARLIKALEKELNVLDADIDDAVRGSPAWREKEDLLKSVPGVGPVVARTLIAEMPELGSLGRREVASLAGLAPWTRQSGKWRGKSFTGGGRSSVRTVLFMAAMVAKRCNPLLKAFHQRLIDAGKPKMVAIIAVARKLLTILNAILRDKSPWQTA

SEQ ID NO: 434888 - protein, 357 aa, unidentified
MLGMGDSAPRKGADAMTFVGCDLHTRMQQVAVLDTGTGAVSERRLDHDGMAVEEFYAALPRPVTVGIESTGYAVWFHALMQRLGHTLLVGDAAKMRAMVVRKTKTDRRDARHSLDLLRHDRFPTIWVPDPATRDLRALLTHRMRLVRIRTMVKNGLQAMALNSRLAWGSKLLRQAGLVQLQALALPPHTARRRDQSLELLAGLNTQIRELDDAITTAALAHPDAPRLITHPGVGALTALTTIVVLGPVTRFHDSKQVVSYVGLAPALNASADKYHLGHITKQGSPLLRFALGQAAAHAARMDPDLKRTYGALVHRRGRPKAKVAVTRKLLVRLFIMLRDQIDYDEFCRRGRSAPASA

SEQ ID NO: 434889 - protein, 356 aa, unidentified
MDKYIGFDIDSKKTVACMVEKGKKERYATIGSDVQSQRDYLKGQKSDGSRIHLTFEVSGQAGFIYDSLIDCADTITVSNPSKMTWIYRTAKKNDRIDSRKQAILLSIGEIPKVHMPGAEIRQWRNVILHRRNLVNKTTEVKNRIRAVLRSQGFSEPYQKGSWWKRSNRLWMRGLSEQQVSSIELWRMNLCHLMEQLDLLDGQVKRVTEYLDLYLGRGAGGKLLMSIPGVGPRTTEAILAYTDDVSRFGRTKQYCSYFGLTPRLDESGTSRRLGHISKLGPSVVRWLLCESSWKVIRKSSAMRAFYERVKAGQTGRKKIAIVAVCRKLLSIMRAMLETGELFNEELVCRECEVKRAC

SEQ ID NO: 434890 - protein, 454 aa, unidentified
MAKARGRQGTLDGFAEINHEAAGIDVGNAQHWVAVPCGRDVESIRMFGCFTADLHALANWLERCGIKTVAMESTGVYWIALYEVLESRGFRVCVVNARQAKNLPGRKTDVKDCQWLQQLHTYGLLTASFRPQGEIIILRRYLRHLETLVQEAATCIQRIQKALTEMNLQLANVISDISGTTGLRILHAIVEGERDPQCLAAMRDWRIKATPDEVAKSLHGNWRDELIFVLGENLVLFEVYQQKIERCDHRIEQHLKSMSAQVGNNTNPLPKPRKGKRPHGNSPSFDLRSELYRVTGTDLTQIDGINVVTAQAILADTGTDMSAWKTEKHFVSWLGLCPDHRISGGKVLQRTTRKVTSRAATAFRLAASSLRRSQSALGAKYRRLQSRLGAPKAITAMAHHLARLFYRMIKYGSAYVDHGVAAYETRFREQQLTWLSRKAAELHLCLAPLPNSAG

SEQ ID NO: 434891 - protein, 357 aa, unidentified
MDSENKILNFNNQQFYVGIDVHKKNWKVTIRTGGMPLKTYSMDASAQQLSRYMQEKYPGGQYNSVYEAGFSGYWTHRQLIELGFKNIIVSPNEVPTNGKEKSHKTDSIDSRKLARELENGSIHGIYIPSQLNQELRSLVRMRYQLMKSSARLKNQIKSYLNFYGHIIPENYQTKHWSGIFINHLRSLSFQYEMGKEQLDIYLSDLMENRKLILKTITRIRHYCQVHGFEKDIQILMTVPGIGFITAVTIYAELMDIKRFKRLDTLANYVGLTPAVHSSGEKEHTLGLKMQHNKYLRSLLIEASWIAVRNDPAMTASYNEYIKRMSKQKAIIRIAKKLLNRIKTVWTENKAYVCSVVK

SEQ ID NO: 434892 - protein, 377 aa, unidentified
MSKIRFVGMDVHAETIAVAVAEEGGEVRSLGVIPNRGESIRKLIGKLGSVKSLKCCYEAGPTGYVLYWQLAEMGVACEVIAPSLIPVKQGDRVKTDRRDAEKLARCHRAGELTAVWVPDAAHEALRDLVRAREAAKKDQLRHRHRLGKFLLRHGKRPNGAGEPWTRKYLNWIRIHVRFDQAALEATLSHYLGEVEHAAERIAKLEQAIDEAVAKAPAKIRAVIEALQALRGVAQTTAATVVCELGSLSRFESPRQLMGYSGLAPREYSSGGRTQRGAITKSGNAHLRRVLVESVWAYRHRPNVQGRVLRRQKALALSEETRQIAWKAQQRLYKRFTGLTARGKTSGQAMTALAREMLGFIWAIAVNTETRFGLPQRA

SEQ ID NO: 434893 - protein, 373 aa, unidentified
MEEVTKTFVGLDVHKESIAIGLAEPGRGAGRVLGKITHDISKLLKMLAKVGQPGQLHIVYEAGPTGYGLQRALQAKGHECEVIAPSQMPRRPGDRVKTDARDCVQLAECSRAGQLHKVWVPNVEDEAIRDLARGREDAVNSRTKARQQLKAFLLRHGVRYAGKTSWTQAYWRWLAGLSFEAQASQTAFTEYWLAVQAAEERVQRLTQALKSSIASWRFEPVVAALQALRGIDVVSAIGLVAEIGDLNRFDHPRKLMGYLGLVPSEYSSGERISRGSITKTGNTHARRLLTEAAWNYRFRARIGRQAQRRQESLPEPIRAMGWKAQLRLTQRFAALLARGVQPNKACVAVARELAGFVWAIGRAATDTPAAQHS

SEQ ID NO: 434894 - protein, 415 aa, unidentified
MALKIVYQICCGIDVHKTFVVACIASTNKQGVTTYKRHRFSTFTQGLKELLQWLLDNHCKDVCMESTGKYWIPIYNVLEKDCNIVLAHPKYVKAIRGKKTDKKDAKWIADLFKHDLVAGSFMPPADIRQLRDLMRYRFKLTCFMSSEKNRLQNCLTVSNIQLASVVSDTFGKSSQRILDKILENPDDTSFDIEPLIHGSMKKKLPELELAIDGFITPEQAGKLKVIKKHFEDLESRKAELEKLILALASPYQQELGLILTAPSFKNKFTAIGIISEIGVNMEAFPSAKHLCSWAGLTPTNNESAGKKKSVRVSKAGCYIKPLLVQCANAVVKSNKHPEIRNRYLRIKKRRGHKKAIIAIARMLLTALYHMLKNGENYNAELYRKSDLPPVDREITVEQALMIARNQGYKIKSATA

SEQ ID NO: 434895 - protein, 406 aa, unidentified
MISVGIDVSKEKSTVCAIKPYGEVLMTPRDFKHTKDDLDSLVKQISRFKEEIHIIMEATGSYHLPIYRYLKSKGYQISVINPLEMKRYRCQGIRNPKTDKIDSTIIAQYGIDYWYRFKPNDDMEEERQELRLLGIQYTQFMKTRVIRCQALCEILDRTMPGVYGFLDDFNRDNGRDKLCDFAEKYWHGDNITKYSEKVFIERYNSWLKKKGYRPNEKEARQLYSIAKNAIPTLDSKLPSTKLLVQEAVNVLREVDSSLYDILNQLKALSKDMPEYNTVLSMKGIGATLAPRFIAEIGDPRRFHSAKALIAYAGIDAPPYQSGQFTGTKRHISKRGSSNLRKLGYELMDSVNKHKSSYTGDPVCEYFMKKRNEGKPYRVAMIAAFNKFLRIYHSKVSAVLNEHENRK

SEQ ID NO: 434896 - protein, 415 aa, unidentified
MYFVGIDIAKSFHVTSVIDENEKKVINKPFRINNTSIGFEKLITILDSISLEPKEFTIGLEATGIYGKNLLEFLISKGYSVKLLNPFQTSRYREQITLKKVKNDEIDSLVIALLLKNGKFSSGYVTDDEYQSLRTLYRNRASIQADMKDVKKRILTQITVTFPEFEGFIKPFTVSGLALLDKYPTAYHYKHSSVDRVMKLFRHIQGNNFTQEKALKLLELSKESIYSGKAKDARAIAIKSTIRLLRMYLSELDIIEAEILSLLNGSSSTATLNEAEQEVKKTDNLIANLKTIPGVADKTIAALISECGDLTRFPTIPKFIGYLGLFPTENSSGNSKSIGHLSKRGSSLAKHALYMSAVSCLIHNTQLKQLYDTKRSQGKSKKESLVAVSRKIAVIIYSIVKYNVPYNPDRVFAKS

SEQ ID NO: 434897 - protein, 346 aa, unidentified
MRKSIINLSSVTTVGLDLAKHVFQVHCIDASGRVVFAKAIRRNKLLEFFASLPRCLVGLEASGSAHHWARELIKLGHDARMMPPAYVKPYIRRQKNDAADAAAICEAVTRPSMRFVGVRSLENQAALMRHKAREMLVSQRTQLLNGLRGHLTEVGVIAAQGPRHARELAELIEACDETVPFEVCEALAPLVVQLRNLDEAIARLDRTIVKMAQKDETARRLMSIPGFGPITASAMAATVQDTSGFAGPREFAAFLGLTPKQNSSGGKPKLGRISKMGNRNLRKLLVVGAHAVLFHRKPHTDPLRMWAKKLIEKKPFKLVAVALANKMARIAFAILRSKTVYREIPA

SEQ ID NO: 434898 - protein, 346 aa, unidentified
MIIVGCDFHPTWQQVVWVDTETGETAERKLEHSSGEARGFYASLAAPALIGVEATGNCQWFLDLMVELGHQVWVGDAAQIRASYVRKQKTDKRDAAHVLKLLLEDRFPRIWVPNRDERDLRQLLLHRSKLVEMRTRVKNELQHLALNQGVQRKRKLWSGAGQQLLRSLPLQPWASRRREDLFSLLALLDRHIGELDEAVEKASQLDKMAQLLKTQPGVGPITSLAFVLTIGDVSRFHNGKQIASYLGLIPREHSSAGKQRLGGITKQGNRMMRMLLVEAAQIAVRCDPGFRKQYLHRCHSKPKAVAKVAAARKLAVRLYWMLRTQTPYPEIVRIESSPRVPLVGAS

SEQ ID NO: 434899 - protein, 308 aa, unidentified
MGLYCGIDLHSNNHVVTVIDEEDRRLYERRLPNDLAITKAALEPFRAQLVAVAVESTFNWYWLVDGLMEAGYQVRLVHTGAVVQYDGLKHTDDEHDAFWLAHLMRLGILPTGYIYPKSGRGLRDLARQRMRLVQHRTSHITSVQSQVWRSTAVRLRSETIKGKGKQPWPELLDPDVALSVETGRAAIDALTAQIERLEELLLKRVGLSPQFQVLKTVTGIGPILALTIALEVGDIKRFPGVGEFASYCRCVDSRRLSNTKKKGEANRKNGNPYLAWAFMEAAHFAIRNLPAAQRFYERKRRQRMRCSP

SEQ ID NO: 434900 - protein, 343 aa, unidentified
MDQYIGLDVSLKDTAISIREDGKRIWRGKRASDPKLLAQVIRKHAPNAKRVVFETGPLSTWFYHALMAEGVPAICIEARHAQKILHETLNKTDANDADGLAQMAEAGFYKAVRVKAFDSMLTRTLVAARNQLLSISTQLSNQIRGLMKTFGLIVSNGKGRVFDGKVRELLAGNDDLAAIILPLLDAWRDIRKRAADLDRQLLAVARQSQPTKLLMTIPGIGAVTAVSYVAAIEDPENFKTSRSVGAWLGLTTRRYQSGEVDYDGHISRGGDSHLRGLQYEAATVLLTRTRPGNESSLRSWGLKLRERLGFKRTAVAVARKLAVIMHSMLRTGEVFNASADAAA

SEQ ID NO: 434901 - protein, 451 aa, unidentified
MEDEVIKMEVVNPQAAGIDVGSRSHWVAVGQREEDVREYGVFNDDLFSLCDWLNECKVRTIAMESTGTYWQNLYAVLISRGFHVILCNGKFTKNIKGKKTDIKDCQWIQRLHSLGLLSSSFLPDGKTEELRTYCRHRQNLLHESASTSKKMQKYLRLLNLRLDVVVKDTCGLSGLRIIRAICNGEKNPENLAELRHHNCHTSKEDIARALQSNGREDYLFALKHELDMYDYLHKKIEECDQKIEEKLNSIINDDDNKKQHHIEPKPYKKVNKNTPKNIDLNLKSYQMFEGTDLLAIEGMSYSTVLALMSEIGVEGIRKFPTAKHFASWLRLAPNNKVSGGKVLSSKVPKGSSNLKISLRNAANAIGNLKDSTPLRDFFMRINFRKGRVSAISATARKLAVIIWNMVVKGVPYENPEGYLFRDQKKKLGLLKRIQKQITKFELESTDFQFAN

SEQ ID NO: 434902 - protein, 339 aa, unidentified
MSKLIQPIQAMVFCGIDVSAASLAVAVQLQDRRFEERIFDNSASGHKALIRWLHKLKARARVSLEATGVYSLDLALALDGADGIEVAVLNPKLIHRFAQTLRRSKTDSADAQVLAEYSARMPFAPWRAPGRNGLELRAISRHIQSLVVEQARQNNRLHAAESSTSTPRCVVNDIKRSMASLKLRIVRLRGEALELVRRDEAMQKRFELLIGIPGIAAISALALLGELVLLSPEMSVRQWVAHSGLDPAHQESGTSVHKPSRISRAGNRHLRRALYMPALVAVRRDPHLKAFYETLLSRHKAKLQALIAVTRKLLHAIYGIFKSQMPYDGSKLFPQLQIA

SEQ ID NO: 434903 - protein, 312 aa, unidentified
MIIGIDPHPGHYTSAALELFGKLAEWRTFPNTPAALEEFLSWLESWAEVQVAVEGPTQTFFTQWCTHLLAEGYPVVPVATQRVVERRLRAAGGKTDGRDAILVAQALLAEPDLPPLTQPDWVRALQELTRTRKALAATLKGQRMRLQDTREPTVRHALENVIDTLEAQVQALGQEIEQRVKELAPRLLQLVGVGGIIAATLLSEVADITRFASPDRFAAYCGAAPQPWQSSASQRVRVNPRGNRRLNWVLHLITRTRLRVDPTSQALVARKRQEGKTHREALRVLKTAIARQLYRVLRTLAPLFVKPDTIPH

SEQ ID NO: 434904 - protein, 332 aa, unidentified
MNLVSTLGIDLAKSTFSLHGVNSNGAVVLRRTLSRAKLSELVAQLPPCLIGMEACSGAHEWARRFAASGHVVRLMAAKFVTPYRKSGKNDGNDAEAICEAVARPNMRFVPVKSLEQQSDLTLHRVRQGFVEERTATLNRLRGLLAEFGHVLPLRAVEVQRRVPQLLGKLPARVASCARDLLEHAARLQAKALEYEHEIRVHVRSNELARRTQTRLGIGPITASALVATVGNGHDFKNGRQLAAWLGLVPRQYSTGGKTRLGHITKRGDPYLRTLLVMGARAVLQRAASLTDPLSQWALAVRERRGYHRACIAIAAKNARVAWALLAREPVAA

SEQ ID NO: 434905 - protein, 482 aa, unidentified
MKAKQKEPAPKTISQPTQPNWRQMNRKQRRDMERKIQSADLSLQLVHPDAAGIDIGNASHYVAVPPDRDSQPVRRFGCTTAELRTMADWLKQCGIRTVAMQSTGVYWIAVYDILEQAGLEVYLVNARETKNLPGRKSDVQESQWLMKLHTYGLLRNSFRPSQEIRTMRTYWRQRKDLVGSAGRHIQRMQKTLTQMNIQMANVLSDVSGVTGQAIIHAILAGERDPQKLAAFRDPRVKASEKEIARSLEGNWQEDLLFVLKQEQVSYEFCQKQVAECDRQLQQHLQEMADRSQGASLPEEKRKDRLQKKKGNKPQFDLRQQLFRMTGTDLTQIDGIDVMTAATILSEAGWDMIKWKDEDHFVSWLRLSPDNRISGDRIIGKGRLPTTSRITVALKLAASNLRTSQSYLGAQFRRLRARLDTPVAIKAMAAKLARLIYRMLRYGIEYVDRGAQFYEVQQRTRQIRRLKQNAAKLGFQLVQAPAL

SEQ ID NO: 434906 - protein, 351 aa, unidentified
MIIIGCDFHTRFQQIAMLDPTTGEVIERRLEHETGEARSFYASLSEPARVGIEATVNAQWFEKVLREDQHELWVGDAAEIRAMRVRKQKTDSRDALHILDLLLSDRFPRIWIPSPAERDVRQLVRHRHKLVRMRTSVMNQLHALAIGQGLCRKQKLWSKVGRMELQALVLDPWAHRRRHELLQLLDQLNPWIAELDRAVMQEVQSRPEAVRLMNEPGVGPVTALAFVLTIGPVDRFQRSKQVVSYLGLNPTEDSSGGRQRLGSISKQGNSMVRHLLVEAGQAASKFDRELRRDYERLKFRRGHSGVAKVAIARKLAVRLYWKLREASQPNTAARMQGSPANPVVDESLSPK

SEQ ID NO: 434907 - protein, 348 aa, unidentified
MRGAVHMQISRIGLDIAKNVFQVHGIDTSEKVVVRKQLRRRQVLAFFEALPPCLVGIEACATAHYWARELTKLGHQVRLMPAKDVKAYVKRNKNDAADAEAICEAVRRPTMRFVQVKSAEQQGQLMLHRTRDLLMRQRTQVINALRAHMAELGIVAAQGRDGIKELLKIIAREEDMRLPTDAHTSLVVLAAQLQALQTMIRSIEKRIVVQHRSNEASKRLETIPGIGVIGATAIAATVPDPKVFRSGRDLAAWIGLVPREDSTGGKQKLGPISKQGDQYLRRILVVGAHAVLKRARQHPEKYPWLTQLLARKPFRVVAVALANKMARIAWALLARGGTYRAPALTAAT

SEQ ID NO: 434908 - protein, 415 aa, unidentified
MALKIVYKICCGIDVHKTFVVACIASTDKHGVTSYERHRFSTYTKGLKNLLQWLLEHNCKDVCMESTGKYWIPVYNILEKDCSIVLAHPKYVKAIRGKKTDKKDAKWIADLFKHDLVSGSFMPPADIRQLRDLMRYRFKLTCFMSSEKNRLQNCLTVSNIQLGNVVSDTFGKSAQAILDKILENPEDTSFDLEPLVFKSLKKKLPELRDAIDGYITPEQAGKLKIIKAHYESLESRKAELEELILALAAPYQQEFAILQTAPGISSDFTAIGIISEIGTNMEAFPSAKHLCSWAGLTPTNNESAGKKKSVRVSKAGCYIKPLLVQCANAVVKSSKHPEMRNRYLRLKKRRGHKKAIIAIARMLLTALYHMLKNGENYNAELYRKSDLPPVDREITVEQAILIARNQGYKIKSATA

SEQ ID NO: 434909 - protein, 315 aa, unidentified
MTQTNMTTAGIDTSKLKLDIAVHGRTERWQVANALPGWRALAANLAQTGVTRVGIEATGGYERGVVKHLRAAGLTVLVLQPMQVKAFGRVHLRRAKNDVLDAVLIAACAATLNQPGIIPDPRLAELARYLTFLEQIEEDIARFKTRLEHIDEPDLRRIVSSDIRRLKARRTAQIRTIATHLRGHDDLARRLELVLSIPGIGERTALALVIRMPELGQISREEAAALAGLAPFDDDSGKYKGQRHIAGGRGRLRRSLFAAALPAAFRWNKALVALYARLTACGKTHKVALIACARKLLIYANTVVQRGTPWTENAA

SEQ ID NO: 434910 - protein, 448 aa, unidentified
MGARSAVAALTETRGDTVSAGHRLYVGVDVGRREHIVAAISEEQMLRGSWERAPVHRVPTNGHGFRELTEWLRASGYALDEIEVGCEPTGGWYAQTVAAWLERHGYVVSWLQNAALHERRQLLIGKQTKTDALDARLIARLLFERACFGQRAGFLHRPPRGTDALRMLVRNRHKLVEERIRYRQQLTAVEDVLFPELKDFFRHSITGRAARHFLEAYPTPDAVFNAAPAEVYRVVVVEARGGTLASRLADLQLAAYDSAGLVDGIEPILHAQRWLLEQLHRVDDQVERTEAAITGALEVWPASERAVLASLPGMSPMRQAVLLSAIGDLATFSSDRQLRKFLGWYPELRESGSSVAKHHLGLSGRRLARREIWLWSLALCSPRHPATPFRAYYQRLRERGVTGHVALGHLAGKLISVLFYCVQRNESYDADRHFRDLGLSDACPVHEP

SEQ ID NO: 434911 - protein, 313 aa, unidentified
MSQNNTSILYVGLDVAKLSLQLHLAGRFHSLANDLKGHAQLLKLLRGHRAAHVICEATGGYEQPVVRALQAADIPVTIVEAGRVRYFARAQGQRAKSDPIDSAVLTEYGLTFKPAPTPAASARQQRLADVSQRRRQLIQARTAERNRAEHYTDPLCLRQDRQFQKLLEKQIDECDQAILTLIAGDADLARKAKRLQAIPGVGPVVAATVLAEMPELGKLNPQTAAALAGVAPYDRDSGKLRGIRHISGGRRPVRCALYMAALSAVRHDRILKEFYTRLRAAGKKPLVALTASMRKLVVLMNHLLKNHEFQLAN

SEQ ID NO: 434912 - protein, 346 aa, unidentified
MKIVGCDFHPGHQQVALLDTVTGEVKEMKLSHAGGDAERFYRELEAPALVGMEAVGNTLWFERLMEQLGHELWIGDAAQIRASYVRRQKTDRRDAGHILRLLVDKRFPRIWTPSSGQRDQRQLLLHRHKLVRMRTQVKTELQHLAMNQGMQQKRHLWSVRGRVDFKKLPLEGWTERRRGDLLELLALLEAKLAELDRAVELAAAQDAQAQLLMTQPGVGPVTALAFLLTIGDVARFPRGKKVASYLGLIPREHSSGTKRRLGAISKQGNVFLRTMLVEAAQSAVRHDDGFRKEYAHRCHQKPTGVAKVAAARKLAIRLYWMLRTQTPYPQVVHNEGSPSHSLVGES

SEQ ID NO: 434913 - protein, 343 aa, unidentified
MQTVTTIGLDIAKSVFQVHGVDAAGQVVIRRQLKRRQVLAFFQRLPACLVGIEACASSHHWGRELQVLGHIVRLMPPAYVKPYVKRHKNDATDAEAICEAVARANMRFVTIKTPEQQSCLILHRTRHLLIRQQTSVINAIRAHLAEFGIVAAVGRNGVEQLLGVVADANDERLPEVARACLAALGVQLRVLKAQILEFDRMINAWHRSNETSRRLDKAPGIGPVLATALVATVADPKTFRSGRNFSAWIGLVPKQHSSGGKDRLGHISKQGDRYLRNLFVAGALAVIRYAKIHGTQHRPWLAALLARRPTKIAAIALANKIARMAWAMMVKGEHYKEPVALAR

SEQ ID NO: 434914 - protein, 407 aa, unidentified
MDVIIERACGMDVHKDNITACITTPEGKEIQTFSTKTVFLLKLVDWIKQHGCTHVAMESTSVYWKPIVNLIEAEDIEFLVVNAQHMKAVPGRKTDVKDSEWICQLLRHGLIKASFIPDRAQRELRELVRYRRSIIEERARQHNRIQKVLEGANIKLGSVVSDIMGVSAKNMLHAIAEGTDDPQELANLAQRTLKRKKDDLELALQGYVSPHQRLMLKTILSHIDFLTEQIDMLDQEVARRVSSYQEDIERLDSIPGISTRMAEQILAEIGTDIKNQFPSAAHMCSWAGLVPGHNESAGKRKSSKTKKGNKYLRSGLTESALSVRGSKNYLGALYRRISARKGKKRAGIVVAHAMLRIAYYLLTRKEMYVDLGEDYFDKQRQQSIVRHALRRLEGLGYQVTITQPDAS

SEQ ID NO: 434915 - protein, 482 aa, unidentified
MVLPHDEPEQPRRPRKPKGPIEPKPSARAADRSVHLPVPASTAPLRVVNPDAAGIDVHSDMHMVCVPADRDAEPVRRFGGDTADLRAIAAWLKACGLTTVAMESTGVYWIPLFELLESEGLEVKLVEPGQLSRCGARPKTDVLDAQWIQRLHSYGLLRGSFRPPDEVLALRAYWRQRQMLVRSAAGHVQHMQKALEQMNVKLTEVVSCITGVTGMLIIAAILAGERDPVKLARLRDRRCHRREGEIASALEGSWRPEHLFALRQAYDLYQFHHRQIDECDRQVEAELAKLPDRSGEKQRQKATRRRGRKSNDVRFEAKGPLFEALGVDLTAIEGIDAGTALVVLAEVGPDVGRFPTERHFASWLRLCPPQDRSNKTDRRRRGPKGASRLSQALRMAAQALGRTQTPLGVFYRRIRSRLGGVGAVKATAHKLACLIYRMLKHGQEYVVRSMEEYEAKVKANLLRSLERKAKSLGFGLSPLPSE

SEQ ID NO: 434916 - protein, 395 aa, unidentified
MPLKNETAAPADAESNTLYVAIEISGKSWVVGIKSLASEKIGLHSLEPADVEGLKVLIEHQRAKAERALRRDVRVLCCYEAGYEGFWLERRLDREMSIETVVLDPASLLVNRKAKQRKTDRIDAKKMVRALLAHDRGDAAVLSRVWVPSVEEEDRKRLLRERRRLVKERTSLTNSIKGLLKLHGVFDLDPRAKGFEETFADVVTAYGSPFPPRARQEILRLVERLSLVQRQIAEVEAERDAVVRQGEVIPVPVVPEGSDEQVAAKIATLTQLTGIGANDATLLEHEVFYRNFRNRRELASWVGLTPTPWASGDTQRDQGIGRDGPAWIRAQLIQMAWRWLRYQPDSALSKWFEERTAGARGRIRRVMIVALARKLLIALWRFSETGLVPTGAKLA

SEQ ID NO: 434917 - protein, 338 aa, unidentified
MKTSVISIDLAKSVFQLCALSPDNKVITNVKVVRKDLLHKLRQFEPTIVAMEACYSSHPWGRAIQQLGHTVKLIPPIKVKPFVQGNKNDSNDALAIAEASQRPNIHFVPVKSLKNQDIQCLQRIRERLMKHRTAVINQIRGLLAEYHIVCATGANTLYKQLPRIIEDAEQPLTLAARTFFQEMYLELIKLDSRIQKATTQSHELLKLDKDYKRIQQIPGIGPIIAAETIAAINTGQQFKKGRQFAAWLGLTPKHYASGEKCYMGKISKHGNKRLRTLLIHGARTVINWVDNKDDKLSCWIKSLITHKSPKTVIVALANKLARILWSVLARGNNYQPNY

SEQ ID NO: 434918 - protein, 339 aa, unidentified
MAIVFVGIDLAKNVFAVHGVNDAGRAELVRPSVRRDALLPLLAGLPPCVIGMEACSGAHEWARQLQALGHTVRLMAPKFVAPYRLSGRRGKNDAADAQAICEAVQRPNMRFVPVKSVHDQARLCVHRVRQGFVEQRTGIINRIRGLLAEFGIVLPQKAQVVRRSAHEHLEELPGWANTAVGDCLSELHRLDERVAEYDRHITAMAQADERARRLMSVPGIGPTTATALLASVGNGHDFKNGRQLAAWLGLVPGQYSSGGKARLGRITKAGDSYLRTLLIMGARAVLASAAGKTDRLSRWALALAERRGWGRAVVAIAAKNARIAWALLRRAEPFVVQPA

SEQ ID NO: 434919 - protein, 428 aa, unidentified
MNFNTQNAKIAAITEKTLIIGIDVGSETHYARAFDWRNYEYSPKPLAFNNDEEGFETFLTWANELKTKHGKTEIIPGMEPTGHYWFNLGRFLQDNGMKPVHVNPHHVKKSKELDDNNPSKNDRKDPKVIAGLVNEGRYTHPYIPAGIYAEIRSFTEMRRQTQSEITRLKNRIARWFSIYFPNYKDVYGNTWAVSGLMILKQAPLPEDIAALGIEGVNKIWRDAKMRAVGVKRAKTLVEAAKHSVGCHEAKEAARIEIRLLLSDYEMYVERETELMELIEATMNEIPYVENVLAIKGIGMKTLTGFIAEVGDIGRFDNPRQIQKLAGFAIVKNESGKHKGESHISYRGRKHLRYILYEAAVSVVAHNSEFKLIHHYYTTREQNPLKKMQSLIAIACKLVRLFYMLLTTGREYNPSKMMGDIKHPELKAA

SEQ ID NO: 434920 - protein, 359 aa, unidentified
MEYIAFDAHKHYTLASVAHADGRLLREERIEHERGALQAFLARCEPGSPVALETVGNWYWIVDAIEAAGCQPKLVHARKAKLMMGQINKTDKLDARGLNLLQRTGTLPTVWIPPGELRDQRELPRTRMVLVRQRTRLKNRIHATLAKYALRCDEVSDLFGVRGRVLLRRHLEALPSHTAFATRLLLEQVEHLDRQVRALEERMRSVFQPTPRIQWLMTLPGVGFILAVVIALELGDVRRFPDAERFAAYAGTTPRVHASAGKIRHGPLRPDVNRYLKGAFIEAANVTNMHRAYYPRRHLTRLYARLARRKGHSKAIGAVARHLAEATYWMVTKQEAYREPIASRPTRLGPSRGASAVSP

SEQ ID NO: 434921 - protein, 353 aa, unidentified
MEQFCVGIDVSAKKLDVAWRGSKGRVEGQTFENESAGHRELVRELKKRAAGKVIRVVLESTGVYGIDLALALDRARFEVMVANPRATANFAKAMMQRSKTDRLDSVMLLQFAEQMTFKRWQAPSSAHLQIRSISRRVYALMMTIREEKNRLHAANQVDGTEVVKKSIGATIKALEKQVRELRAAALALIQADPVLARRNELLLSVKGIGQISAIAILAELAILPADMTDRQWVAHAGLDPREVESGTSLRLPPRISKRGNKYLRAALYLPARVACRFEPGVADYAARLRERGKKPLQIHVAVMRKLLHSIHAIFNSNEDFDGRRFYLRAAADAVGTSGIAPFAISDVPTAFPA

SEQ ID NO: 434922 - protein, 344 aa, unidentified
MEHFAGLDVSVKETSVCIVDDVGKIVREVKVASEPEALLAVLKHPAYHFSRIGLEAGPLSQWLFSALAEAEVPVVCVETRHMQAVLKAQINKTDRNDARGIAQMMRVGLYRPVHVKTLRSQKLRMLLTHRKLLQSKAIAIENDLRGTLRNFGLKVGIVGRVKFEARIKELVENLPDLAELVEPLLIVRRVLREQVVILHRRLLAIVRDDEVCRRLMTTPGVGPVVALTYRATVDVPARFRKSKAVGAVFGLTCAKYQSGEIDRSGRISRCGDEMMRVMLYEAAQSMLRSKKWSWLKAWAMQIARRRGMKKAIVALARRLAVIMHRIWVDGTEFRWTREQAAAAA

SEQ ID NO: 434923 - protein, 348 aa, unidentified
MILLGVDPHKSTHTATAVDPVSNQQAGSLRIDASLADYRRLLTWGRRWPLRKWVVENANGLGRHLAQWLVARGESVVDVPASATSRVRQLTRGGGRKNDRIDAAAAATAHIHGDGREVNADDHTTALALLDERRVNLAQARVRTINQLHAVLRDLLPGGAPPQLSADQAAALLRTVRPAGNVEKIRKDLARDLVTEIRALDKRLAENAVRMEELVASSGSTLMNTPGVGPVLAARLVGRVGRASRFATAAAFANYTGVAPVEIASADKARHRLSRSGDRQLNSVLHTIAVTQIRMPKAPGHAYYQRKLSEGKTPREAKRCLKRRLADHVWRVMITDERRSKHPLPQTT

SEQ ID NO: 434924 - protein, 379 aa, unidentified
MTRPAAIPTDEHTLYAALELSKNSWLLAIQFPGRDNPSLHPIKGGDADSLVAKLDAARERLAKLVGQLPTVTLCYEAGYDGFWLARLLEQRGIDCLVMEPASLQVNRRARRVKTDRIDVEKLLHTLIAWRRGERHVCSMVIIPSVDEEDLRRSHRERDRLVRERTAHINRIKGLLFGQGIRGINVKRHYKTLTPADLVTGDGRPLPERLSREITREIERLALVQEQIAVIEHERDRALNPCEATERKRRDLLRLKGIGPAFSAIFARELYYRRFANRRQVASYIGLAPSPYDSGEGRRSQGISKAGNGFVRYAMIQAAWLWLKHQPQSALSKWFRRRTEGHTGRMRRVMIVALARKLAIALWRYLELGLIPEGAILSAR

SEQ ID NO: 434925 - protein, 336 aa, unidentified
MGKITTLAIDLAKTVFELYGVDGRGVCVLRRQVRRGQLLRVVAQLAPEQVAMEACASAHYWGRQIRVLGPEAKLIPPQYVKPYVRGNKNDRNDAQAICEAALRPGMPEVAVKSVEQQAVLSLHRMRELLEKQRKQLANQLRGILGEFGIVIPKGVAALRRELPEAIEQVPELLRPVLQESRETLLELERRCREHERRLGQLARHSPLCRRLMSEAGVGPLTASAYVATLGTPTHYRNGRQVAASLGLVPRQHSSGGKTVLLGISKRGDKYLRMLMVHGGRAVLRHAAGKSDPLSLWVLQVARRRGPNRAAVALANKNARRLWAIWRAEGPDLVAAA

SEQ ID NO: 434926 - protein, 358 aa, unidentified
MGKGTRCASESKSPVVMARDVVYVGLDVHKKSVHAAVRLNGRELATFVMPADVATVVRSLSRFEVALKQVVYEAGPTGYGLARALRKAGLPTDVVAPGKTPQPANRDSKSDRLDCRKLAELAEKGLLKPVSVPTEEEEADRQAVRLREQLTKKRRRGMQQIKSLLLQYGIPEPPGLKSWTKAGIAALSELELRPPIRLSLDCLVEELGHLTTLLERAKRAMAKLSRQARHRQQQRRLRTHPAVGPTLAMAWVTAVYQPERFRSAKALTKYVGLAPRVSQTGETRREGPLMKTGQGALRALLVQAAWRWVAEDEGAAAVFERLVRNTGKKQKAIVAMARRMAVTLWSMQVRGEDYRHAA

SEQ ID NO: 434927 - protein, 500 aa, unidentified
MKTKRSKAKIGVGQKRWSVICSEPEQKLEVLRPDAAGIDCGAEEHYIAVPPDRVRAGEPTVRCFSAFTEGLDAAVDWLKACRISTVAMESTGVYWIALHQKLEAAGIEVYLVNARHVRHVPGRKTDVRDSQWLRQLHRFGLLNASFRPQDIICRLRSLHRHRDNLVSSSASEIQHMQKALQQMNLHLHHVVSDITGLTGLRIIDAILDGQRDPEQLVKLRDKRVYKSTPRQMQAALVGDYRAEHLFVLSQSLQAYRFYQARIEECDRETEPLLEKLAQQVEAASAKLKFDALKPSSPKDGVTTPEPLTESEPGCGLKAKRKRKPRANEPKIDLAGLLERVCGIDLTKIVGLHVLNVLLIVSEIGVDMSKWRSAKAFCSWLGLCPGNKISGGKVLDSRTRQVVNRVADALRLAAQSVGRTQTCLGIFYRRKQAHLGAPKATTATARKLACLIYHLLKYKQPYQEPDPAIYQLRLQKSALTKLQRHALALGYTLQPTTPSPA

SEQ ID NO: 434928 - protein, 347 aa, unidentified
MIIIGCDFHTRSQQIAMLDTETGEVVEKKVEHENGEVKRFYEGLKEPALVGIETTGYTRWFAEMLAELGHQLTVGDAGKIRASETRKQKHDRRDAWHIMELMAQGKFPRIWLPSAEERDVRVLVEHRHQLVELRTRAKNGLQAMALSYGMRRRSRLWSQRGQEELQKIPLREGMARRREDLVQLVQQLDTWVKELDERIEQEVARREDAQRLMTHPGVGPLTALGTVLVLGPVERFPNYRHLTSYLGLIPKEDSSGGRQRFGHLTKQGNRLMRFLLVEAAQTASRYDPRLRRAYRRLAFRKGAALAKVAMARKLAIRLYIMLKDKIDYAEFCRRGPHAGMLGDVALV

SEQ ID NO: 434929 - protein, 365 aa, unidentified
MRKIANVGVDYHLNSLSIAVLAEGEKEFHQSIHLKNDDRLIAKYLKKLSKSFDLRICYEACSSGYAFQRKLNAWGYHCDVIAPSLIPRKPGDRRKNDFRDARNLAQHYANGMLSVVHPPTEEEESVRSLIRCRLAFKEDARRTKHRINSFLLTLGYSWKKSTWTKQHRWWLSKLEMPYEYLHKVLDEHLGQLEYLESRLKHLDQQIEEVARSEIYAPSVNKLRAFKGIGTLTAMLLIAEITDFRRFPTPRALMAFLGLIPSEDSSGDKTKGGSITKAGNIRCRTSIVEAVQHYVKKPYISAQMKANLAEVDGKSANVALHCMYRLHKRFWALSMKGKIRPVAITAIAREFVGFIWAMMRPELVEA

SEQ ID NO: 434930 - protein, 402 aa, unidentified
MNCVGIDVSKGKSMIAVMRPFGEVVISPFEVQHTASELSELAKLLKSLDGETRVVMESTGNYHTPVAWLLHDAGLYVSVVNAMLVHDYGNNSLRRAKTDKKDAVKLANYGLDHWLTLPRYVPEEDTRLLLKNCYRQYQQYSKVQTMLKNNLISLLDAVFPEVNRLFNSSPRADGSEKWVDFVATFWHCQCVSTLPLKSFSARYLKWCRKHGYYFSQEKAFEIHSKAQSCISVMPRNETTKLLVQQAIAQLKATSAALSALKQEMQSLAASLPEYPVVMEMFGVGSTLGPQLMAEIGDVRRFHSKKALVAFAGIDAPPCQSGQMDIHSRSISKRGSAALRRTLFLVMGIYLHSAPLDEPVYQFMDKKRSEGKSYNVYMMASANKFLRIYYASVTAYLNTLARI

SEQ ID NO: 434931 - protein, 387 aa, unidentified
MTVRTVNNLPAATHGETVRCLFAIELSKQSWVIAFNTPLSEKISRRTLTGCKWKRLLELIEDVRARVSRETGRAVEVMSCYEAGYDDFWLHRQLEAHGVRNYVIDPASLQVDRRARRVKTDRIDTERLLRSLMAYLRGEPKVWSVVRVPSVAEEDARRLHRERDRLVSERVQHVNRIKGLCALHGIYDYNPLRPQAMARLEQLRTAQGGALPPRLKSEIKRELQRLELVVEMIATLEAERAAIVEDEASTHVNAKKIQNLHRLKAIGPEFATVLVGEIFHRDFNNRRQLASYVGFAPSPFQSGNVAHDQGISKAGNRKGRTTGIELAWLWLRYQPDSDLSVWFRTRVGTMKGRIRRIAIVAMARKLLVALWRYLETGLVPRGAVLKG

SEQ ID NO: 434932 - protein, 371 aa, unidentified
MSQSTTVLFVGLDVHKDSIAVATCGPERTDEPIFVGPIGTRECDIDKMVRRLQSRASRVVFAYEAGPCGYVLYRHLTSKGLECLVVAPSLIPRKPGDRLKTDRRDAVQLARLLRSGDLTTAYVPQVEDEAIRDLSRAREDAVIDLKGARQRLKSFLLRLGLHYVGRANWNDAHRRFLARIVCPTPAQQVVFQEYLRAIDDHAERLQRIEEHLAEFLPGWRLNPVVEALQALRGVQQITAVTAVAEIGDLTRFDTPRQLAAFLGLIPSEYSSGEGRRQGGITKGGNAHARRALVEGAWAYRHPAKVSEHIRKRLEKLPKPVQDIAWKAQVRLCKRFRRLTARGKNPNVVVTAIARELAAFMWAIAGQVNGKA

SEQ ID NO: 434933 - protein, 378 aa, unidentified
MRFYNQQHGFYCGVDLHARTMYLCILDQAGQIVVHKEIAAEPAAFLEAVAPFRNNLVVACECLFCWYWLADVCAAEKIAFVLGHALYMRAIHGGKSKDDKIDAEKIARLLRGGNLPMAYAYPKGLRETRDLLRRRMYLVHKRAEVIAHLVNTNSQYNLAPFGKKLIYAKNRKSLDLPGRFADPSVRLSAQVDLQLIDAYDEIITDVELYLERTVKLDDGDTYYRLRSIPGVGKILGLVLLYEIHDIGRFAAAGQFLSYARLVRPKKTSAGKVTGGGGSKIGNAHLKWAFSEAACLLARESDQAKRFLARKEKKHGKAKALGILAARLGRAVYHMLKQKKAFDAKRFWNGAADGQADQKSKSAAKTRRRAKGAGCVLEA

SEQ ID NO: 434934 - protein, 422 aa, unidentified
MLEETQETEELIQRVAALDIGKAELTCCVRVPGQGGSGRRLQEVRTYQTMTRWLLVMADRLRELGVTRVVMEATSDYWKGVYYLLEAAGFEVWLVNARDVKHLPGRPKTDTLDAVWLCKVAERQMLRPSFVPPRPIRQLRHLTRYRADLVAARTAEKQRVEKLLEDAQIKLSVVASDIFGVSGRAMLAALVAGERDPKVLAQLARTRLRAKLGPLAEAFTGFFTDQHAFLLAKMLARVDGLDADLADLDAKLAELIAPFAGAVDRLDEIPGIGQTAARLLLAELGTDMTRFPTAGHLVSWAKFAPGVSESAGKRKGRGSTGHGNPYLARVLGEAAVAASKTNTFLGERYRRIARRRGAKRAIVAVGRSILVIIWHLLSDPTLRFHDLGAGFYDTRIGPERAKRNHIRQLEALGYKVTLEPAA

SEQ ID NO: 434935 - protein, 344 aa, unidentified
MECYVGLDVSLKQTSICVVNEKGLVVREGVVDSVPEAIAGFVRSKAPGAVRVGLETGPTATWLWTELARLDLPVICIDARHAKAVLKMQVNKNDRNDAAGIARIMQTGWFKEVHVKDLDSHAVKALLASRALLVKIKRDLENQVRGLLKNLGLVVGHGTFNVFAVRAKELIADRPELTSAVSPLLTARTAIEQQIGKLDRQVLKLSRQDAQTRRFMTVPGIGPITALCFKATIDDPARFRRSRSVGAYIGLTTRRHASGELDWSGRISKCGDAMLRMYLFEAAGVLLTRVPKWSALKAWGTRLTKRNGLRKAKVAVARKLAVILHRMWVDGTEFNWSNNKEVAA

SEQ ID NO: 434936 - protein, 321 aa, unidentified
MMAQNDRVVVGIDVAKDKVDALIRRFALRQAFPNTAQGRHQLVAWLRKHKVDKAAMEASGGYERDWAKELRQAGIVVRIVDPKRVRSFALSAGRLAKNDKIDAEMIAWFAETFDEAPGQTHDAAHEELVALVKARKGLVDVKTRLQSQNEHAAPRPAQKARARILKSLAVEIVKLEAAISAKIKATPHLAERAEIIESVPGFAETASANLVAGMPELGQVSDEIAAALIGLAPYDDDSGKRRGERHIKGGRRWVRNAIYMPCLGAATQHNPVLKAFHDRLIAKGKAPKVALTACMRKLIIILNTMIARRQKWDPTRHVLVP

SEQ ID NO: 434937 - protein, 372 aa, unidentified
MGHHSEAFIGIDTSKSRNAVAISEGGRGGEVRYFGEFPTTEAATRKLVGKLAAKYGRLTFCYEAGPTGYGLYRLITSLGHECEVTAPSLTPKKPGDHVKTNRRDAVSLARLSRAGELTAVWVPDERHEAMRDLSRARQAVKKDLQGKRQQISSLMLRLGRYYPGKKTWGPAHMKWLRSQKLEHREQRIALEELLEGVRQESERVERLEQAIREAVPEWSLAELVTAMQAMRGFDLIAAVTIAAEIGDLSRFQNPRELMGYLGLVPSESSTGDKVKRGGITKAGNGRARRILVEAAWSYRYPPRVGRDKQPKVAAAPRRVREIAWNAQTRLCARFRSLVRKGKRPTIAATAIARELSAFIWAINREIMGNRQV

SEQ ID NO: 434938 - protein, 329 aa, unidentified
MTNAKVRESTSSLEFVGVDMAPQAFEWALHGVRGTHSAGNDDSGFEALREALKGRNVGLIVLEATGGLERALAGFLLRHGLPVAVVNPRAAREFARSMGHLAKTDAIDAVALAHLAQTLAAKADQAGVRLTPPSAEVELLQAMVARRVQLLSMRTAEKNRLGGVVRVLHKSIEAVIKTLDKEIAKLDRDIDAHLEQHFTDQAQRFDAIKGLGMTTCAAVLAFMPELGTISGGRAAKLAGLAPLNNDSGKERGKHHIWGGRSIVRSALHMATLSAVRFNPVIKTFYDRLLAAGKPKKVALTACSHKLLRILNAMARTGQPWNEKLHAVTP

SEQ ID NO: 434939 - protein, 364 aa, unidentified
MSKLVLRRMAMQGSQPQPPPAGTEVTIGCDLSRTKWVHSCRWDGQEQRRLSTPAELRHLQALVTEYQQLGCPIQVAYEACGFGYEIAWWLEEQRVAVLVVAPSTVEKARGLQVKTDGLDASDLALKAERGLLKGIFIPRRELHEYRQLSRTYAQVLSDRRRQQARVRLLLQEHGYTAPARQQGWGALERWVVEQRLPIPIRACINELCLQRQAAHHGATRLGSALRTLARLPQYAELVRALAQQPGVGPFTAMRFILEIGDIHRFARAESLSNYLGMTPSEYSSGAIVHRGQTRKCGPGSLRAWLIQCAWAAVRSGEDQALSECFERLAARAGRKRAIVAVARRLALRLRARWLKAEMESANAA

SEQ ID NO: 434940 - protein, 341 aa, unidentified
MTLYIGVDIHARQQTVSFLDTEDGTTGQVELVHERDDVKGFYRQFQGEVIVGIEACGYTNWFEELMEQLGHKLLVGDAAEIRRLARRRQKNDRRDADLLLDLLVHNEFPALFRYSRESREMLRQLRYRHKLVKLRTMVVNTLHALAINAGLSLQAKLLTKGGRTQLSALQLSAISQQQRDELLSLADELTKRIQTVEQWLQTQAKSDARVQRLQTHPGVGLLTSLCLVHTLGDLSRFSSTRKVAAYVGFDPMEDSSAERKAYGGISKAGSRLLRYLLVEAGQTAAKDDEHLKQFYRRLLPRRGKARAKVAVARKLLIRCFLMGRNEIDYAEFLRRGQPASE

SEQ ID NO: 434941 - protein, 368 aa, unidentified
MDETITAFVGLDAHAESTAIGVAEAGRAAPRFVGTVGPKFAELSRTLTKLGTASELLIVYEAGPCGYALARELKRAGYRCEVVAPSKVPRRPGDRVKTDRRDALTLAGLARAAELTFVVVPDERDEAIRDLSRGRIDAVRARLKARQQLKALLLRHGRRYTGKTSWTAAHERCLATVSFEHRAQNIAFVEYRQAVSEAHSRVVRMTEALARELEHWRMRPLVHALMTLRGVDQLVAMTLVAELGELKRFGHPRELMGYLGLVPSEHTSGEKRRLGAITKTGNSHARRVLIEAAWNYRFPPRITKPLQKRQEQQPAAVRTIAWRAQLRLHHRYRQLTTRRLQHNKICVATARELAGFVWSIGQQITVAT

SEQ ID NO: 434942 - protein, 414 aa, unidentified
MKSARNTLPTEPVNGITCGIDWARDDHALSIVDAKGREVTRKTITHDAAGLRDLLSTLDSAGAREVAIERPDGPVVDTLLDAGVTVVVISPNQVKNLRGRYGSAGNKDDRFDAFVLADTLRTDRARLHPLLPDTPATIALRQTCRARKDLVAHRVAVANQLRAHLKIVFPGAVGLFAAIDSPISLTFLTRFDSQDRADWLSLTRLTAWLANASYSGRTHPRELHRRLTSAPRATNEVTGAHITGAFVATLTALNTQITALDDSIADQLAAHADAHIFTSLPRAGSFRAARLLSEIGDCRARYPTPEALACLAGVAPSTRQSGKITHVGFRWAADKQLRDAVCDFAGDSRRANPWAADLYNRARARGHDHPHAVRILARAWLYVIWHCWQDHTTYDPTKHRALQALLERPQPGAA

SEQ ID NO: 434943 - protein, 386 aa, unidentified
MQKLNDLSRSLTPLKPDRTLIAVIEMSLSSWLVAGIVPGIERQPLKKLEVDESTLLKLLIRWREEAKKSGHSIERIAVAFEAGRDGFWLARWLRARDIEAHIIHASSVAVSREHRRAKTDRLDTELLKRAFLGWLRGERDHCKMVAIPTIKDEDAKRPNRERESLVGEQSRIVNRMKAALVRLGIRGFNPKLKKAVERLDGLRTPEGEPIPPNTLAELRRDMARRRLVNDQIRQIEDTRLERLEQAPSDGPHAMVRLLARVIGVGIETADMLVQEVLSRNMRDRRAIARYAGLTGSPDESGRKRREKGLARSGNARVRRGMIQLAWRFLMFQKDSTLAQWFRARTENARSARKTMIVALARKLLIGLWRLVREGVVPDGVVLRPVS

SEQ ID NO: 434944 - protein, 344 aa, unidentified
MGIDTHADVHMVGVIDRVGREIAHQGFPTTEAGYQQLETWIASWGSVVRIGMEGTGTYGAELCRQLNAHGFCVVEVDRADRKTRRFQGKSDPIDAYAAARAAMSGRASAIPKARDGNVETIRVLRVARNSAIKARVAAIVQLKATIVSAPAGLREGLAGLDKTALIDRCARFRVARTGDGHLDSTTGATKAALKTLARRVRSLDDEISGLDSDLGYLVEATAPTLVSLFGVGTDVAGQLLVTAGDNPERLKSSAAFAHLCGVAPVPASSGRTTRHRLNRGGDRHANAALYRITLCRLRHDDTTRAYRARRAAEQKSTQDIIRCLKRYIAREVYQAIRADFQISP

SEQ ID NO: 434945 - protein, 437 aa, unidentified
MTYVGVDWSDNFHVVYVTDETGDSLAAFKVDHTPEGIESLFLKVKEHAQNPAEVLFALETPKGLLSSAILEAGFTLYPINPKAVDRYRDRYKVSGKKDDYFDAMVLANILRTDRQNHRALVPDSLLTRELRAYTDGYQALVKTQTRLTNQITSCLKNYYPVALGIFGKIDQSITLSFLSRFPTPDSFRRGSKAKIENLLKKNHYPGAREKMLEIYALSKKPQFEIEEPIARANSLLLLSLARQTKETLSSLKEFELKIAELLEQHPDTDVFSSLPGAGKITTAKLISNFGDNRERYGKVSCVQADAGTCPVTIGSGKSLRVSFRYSCRKPFRAAITQFAFTSLQKSEWAKQRYDKYRHNNSKDHNLALRCLGNAWLEVIFLMWRDRKPYDVEKHLIGVFKEQGIFSKDVKMPVFASEPMIARNYRGSSPQVSTIGLT

SEQ ID NO: 434946 - protein, 428 aa, unidentified
MNITYKIDKIKKNNWLNITFDVSKDDLYMYSEMGNGTITCIEDSFTNKPEIILVKLEDMYQTALHAGYEGIHIICEPSGGYECKLMLLAAQQGHATSYVSGEASSKFRMVEGNSNDKSDQRDPKVIFKLAQYGKLLRHRILESSYEQLRHLNRMHEQEQELKTYIRNQLHHELKVLFCERDWKEAFWYGVSGRAVLKLYQGSPYKIIKAGRSRFAQRMKKAVKGIRSSTIERIWTNAAQSVKLDYNESIIELLSKRIKQLLQDFELHERRLQEIKEQMAAIYQNLLDQGEQLPPVVKGFVSIENLARIVGETGPFSDFKSAKQIKRYAGMNICIRESGQFKGLRKLSKKGRPRLRLILGQSIFHLIKKDRILGAYYHSLKERHAMNGTKAMSMVSRKLVDVLFALSKPGSVFDEKRLFVCKGQYKKAA

SEQ ID NO: 434947 - protein, 311 aa, unidentified
MKLYTHFIGIDIGKKQFVVHVIGKKETQFYENTFEGISTFLKDNRVSLQDGLCVLESTGGHETRLLLNLHQAGVATHRAAGRQVKSFIRSYGKQAKTDAIDAHMLALYAQERHASLTLFTPPSPQACQLYELAQRRKDLKQMLVMEKCRLQAPNIDWIKESIEVIITTLKSALEKIDEQIHTIVANHDVLKEKRDILLTVPGIGKTIADELLILLPELGTLNRREIASLVGLAPIARDSGQLQGYRRTGHGRMGIKPSLFLAAMAAARSKSSLKDYYESLLKRGKKKMVALTALMRKIIVIANARMKEIPC

SEQ ID NO: 434948 - protein, 345 aa, unidentified
MKVTTVGVDLAKNVFQVHGADDRGRTVVQKPLKRAQVLPFFARLEPCLVGMEACGSAHYWARKLTALGHTVKLMAPQFVKPYVKSNKNDAADAEAICEAVRRPNMRFVPVKNAEQQAILSLHRARQGFVKARTAQANQIRGLLSEFGLVIPQGIGFIAQHLPDILEDGENGLPGRFRLLLQRLGEHLKELDRQVAELEKEIVIWHRENEVSRRLAQMPGVGPITASALCASVGNARCFKNGREMAAWLGLVPRHHASGGKTVLLGISKRGDSYLRTLLIHGARSMIRHAEGKLDQTTAWIGRLLARRNKNIAAVAIANKNARIAWALLAHDREYRTDYAPVGAAV

SEQ ID NO: 434949 - protein, 436 aa, unidentified
MRGCRCSMIMGFTKPIEHFNLQRKKVITMNTLYVGIDVSSKSNVVYLMLPNGDKHSNFSVANSHEGSTQLVKRILSALTSHSLDTVLIGLEATSVYGDNLVYFLREDATLAPFNRKIHVLNPKQVKKFHDAYNDLPKNDYVDSFVIADCLRFGRINKEVYMGDYRYKALQNLTRARFFAVQNLVKEKQRFMNVLFKKYSTMTQEKVFSDTFSTTALAVYDEFESAEALANMDLHELTDFIMEKGKNRFPDPDAVAKAIQKAARSSYRLPKTMNDSVNQVLSISITSMKALESQIKEFDKAIKAQMELLPNVLISIPGIGPVYSAGIMAEIGDINRFNSQAALAKYAGLAWKQHQSGGFESEVTRLIPSGNRFLKYYLCEAAFSLVRCDKEYSDFYRLKYKEVNRCQHKRALALTARKFVRLVFRLLKDNRLYCPAK

SEQ ID NO: 434950 - protein, 349 aa, unidentified
MIETTKYFVGIDLHKSILQVCVLDKDGEIIKERRFKGGSLIDGLAVVNWLLQWRQSGRFCVEAVGMNRWFVNACLDHGLQIVVVDPTKMNLRMLGKKTDRRDAYELARRLRLGDVDRNAATYFADEAEFAGRKLVRIRHRLTQVRQQILNPIRALFASYRVDAPPGRLYAKGSLEKLRKMALSNEDQTLCLQALVSSLDALQRSIESLSERIATRARDEQSAEALALLPSVGPLTAMTLAVELGDLSRFRNSKAVASYAGLVPRVANSADKSNHGRITKRGNRELRWILSQWSVRLLSFNSIAKEWAKPLLLRMHRNKVRMALARRLLIGIYIMLTRGEVFSLERCLAR

SEQ ID NO: 434951 - protein, 376 aa, unidentified
MENDSTLYVGLDVHKDSITVAYAIGMSDVELFGKVGVMHIDIDRLCKKLQTKARHICFVYEAGPCGYGLYRRLVDKGFDCMVCAPSLIPRKPGDRVKTDRRDAIKLVRSLRAGDLSAVHVPSIEDESFRDLARAWSAAREDLKAARCRLKSFLLAHGIHYFGRPNWGPTHRRWISTFSFDSAWQQLAFNEHRRTIEDRLAQCERLELALRESVISWQFYPVVLALQAMRGINFTSAVGLVSELGDLSRFEHPRQLMAWLGVTPSEHSSGGKRRQGSITKTGNSYARKLLVESAWSYRHPARVSIDIQRRHEGLPKPIVDRAWDAQLRLCRRYRKLVARGKSAHVAIIAIARELAGFIWDVGRLGMTLALPPSAQSA

SEQ ID NO: 434952 - protein, 352 aa, unidentified
MATTAQIAIAVIGIDIGKNSFHVVGLDGRGAIVLRQKWSRGQVEARFANMSPCLIGMEACVGAHHLSRKLKALGHDARLMPARYVRPYSKGQKNDFRDAEAIAEAVQRPTMKFVVTKTADQLDLQALHRVRERLVSQRTGIINQIRAFLLERGIAVRQGQRFLRVELPRILATPPDVLSPRMVRVIEGLASDWHRLDERIEVLSSEIEELAKRDAGCERLMSIPGIGPIISSAMVAAIGTGDSFSKGRDFAAWLGLVPRQISTGDRTILGKISKRGNRYLRVLFVQAAWVVLVKVKPTRWQGHGLRPWIEAAKKRLHHNVLAIALANKLARIAWSVLVHGRAFETNKRQAAA

SEQ ID NO: 434953 - protein, 350 aa, unidentified
MIIIGADYHPGFQQIAFVDTDTGELQELRLQHREQAEKFYRDLAAQGIKVRVGMEASGHARWLERLLAELNFELWIGDAAEIRTKRVRKQKTDRQDAQLILRLLLEDRFPRIWVPSWENRDLRQLLWHRHRMVQARTRIMNQLQAVALNEGLRCKKRLWREGGREQLESFRLASWASRRRRDLLELLDRLNPTIAELTAAIEQEIEKCPEAQRLMTHPGVGPLTALAFALIIGEADRFRCGKQIASYLGLVPLEESSGNRRRLGHITKQGNSMLRFLLVEAAQVTVRSIPEWRSKYFHLMMRRGRKIAKVAMARRLAVRLYWMLRKQWDYQQVLKFGSYAGQPGHRHGVQ

SEQ ID NO: 434954 - protein, 366 aa, unidentified
MPIYCGVDFHARQQLVKWCHTADGEIHERQLGHQSVAGVRGFYSQFQGEVIVGFETSGYSSWFEAMLEELGHQVWIGHATEIRRRARARQKTDRRDAELILDLLLQNEFPRIHRVSAQSREVLRQLRYRHRLVQQRTRSYNSLQAIALSAGVSLKAKLRTRKGKERLLGLSVTEAHGRQRQEWLDLIAQLNGYIERVETELELIAAADQRVQLVRTHPGVGLLTGLALVHTLSPVSRFANSRKVAAYVGLEPREYSSGERQHFGGISKAGSRLLRLLLVEAGHKAINKDAQLKQLYHRVLHRREKAKAKVAVARHLLVRTYIMLREEIDYAEFVRRGVAVRSARVSYRPQVPGKLIERLASEQQLS

SEQ ID NO: 434955 - protein, 373 aa, unidentified
MKKVRFLGLDVHAETIAVAIAEPDGEVRSLGIIPNREESVRKLVKKLGPAEQLQVCYEAGPTGYVLYWQLTALGVKCEVVAPSLVPVKSGDRVKTDRRDATKLARSYRAGDLTAVWVPNEEHEALRDLVRAREAAKQDQLRARHRLSKFLLRHGRRVPAGIKVWTQRYQDWVKEQVHFEQPAQEYTLLDYLHEVEHMGDRIRRLEKAIEEAVKLAPQRMREVIQGLQALRGIAQISAVTVVAELGEISRFQGARQLMGYSGAVSSEHSSGKRIQRGQITKTGNAHLRRIAMEAAWAYRHRPTIGAALRKRQEGLSEEVKEIAWKAQHRLHKRYRNLLAAGKEKKKVVTAVGRELLGFIWAIGVQVERNSKPVA

SEQ ID NO: 434956 - protein, 355 aa, unidentified
MSQEKYIGMDVHQATISVAVMDAAGKLIMECLLETEAATIVEFIQGLHGTLSLTFEEGTAAAWLHDLLKPHVSRLVVCDPRKAALLKEGNKSDRIDARKLAEMLRTNQLHSVYHGEHGMRTLKELGRSYLTVTKDVTRVMNRLKALYRSWAIPCSGTTVYARRHRAEWLAQLVEPGVRVRAEHLYQQLDSLQPLRREARRELLGESHKHPAVKLLRQIPSIGPIRAALLVALLQTPHRFRTKRQLWAYSGFAVETHDSGEYRYVRGKPQRNRERITVRGLNDNYNKDLKNLFKGAAISASTRPGPLHDFYVALVAKGMRPTMARLTVARKIAAVSLTIWKKGVSFDPKRLQQQAV

SEQ ID NO: 434957 - protein, 467 aa, unidentified
MNCCSYQLFVGVDISKGKADAAILKVSDLRSVKPQFLRKKLSFKFVKSELTSFLDKVRSYSDENCTSVTFGLEVTGIYANNFYNFIKENLQHDESIHYLDTDFVNQWRQAHNIAKSDPIDAQTISTIIGTDDKVKYVSDFVFENEKGYQGFKCIVHRLEQRKKTLTQEYSRLIAHCDIYFPELQYVFDPKSAVFSAILSRYPTTHDIINTSKEEVFKAAYEASKHRVKMEKIDVLFELCADTIVPDMILEPARQITFNLVESIRSIKADIKRIENDIKELLPSYELYPLLLTLTGCGPSTATVILAEVGDISRFKNADHFVSYCGCAPKNKRSGSSVESMGKISKKGSHYLRHAVYMIAEFARRHNPVLKALFERVKHGNKKRHRLAVVAVANKVARYIYSIMKYQTVFVIEHSHLMRLPEETRKSFFNSISTEFSKRTRKQIYHYSDENGEIFSFVFTGSEVEIQP

SEQ ID NO: 434958 - protein, 340 aa, unidentified
MEIATIGLDISKHVFHIHAVDGQGQVAGRQRLRRGEIVSFFSSLAPCLVGIEACATAHHWAREIRQFGHDVRLIPPAYVKPYLRRGAKNDAADAAAICEAVTRPNMRFVPIKSVENQGFLMLHRARGLLVRQRTMTACAIRAHFAEFGIIVGQGRQRVDGLVDLLDDEELTLPAHARIALAILVNQLKELDRQVEAIERELTQIQRVNPMAKLLSSIPGIGPITATALAATVPDATMFRSGREFAAWLGLTPKQNSTGGKDRLGRITKQGDSYLRHLLVIGARNVVRYPKARSRVGGGWIEALLERRRPMVVAIAVANKLARIVWAMMTTGEFYRPKLAA

SEQ ID NO: 434959 - protein, 422 aa, unidentified
MNAQETVVYSVYVGIDWADTKHDVCIQSRNSDVRVFDVIRHRAEAIDTWVKDLHQQYGGHIAVAVELSKGPIVSALQQYDFIDIFPVNPSTLAKYREAFQPSKAKDDPTDAELALDILLRHPEHFKALKPQSAEMRTLATMVEQRRCLVGERVRITNRLRCALKQYYPQVLEWFDHIDTPLFCAFIKRWPTLTQAKRARANTLNRFFHEHHMYREGVLDHRRQAINSARPLTLDDAVIVPYRLQTLVLVEQLELIFRAINQFDDEIEKLATEHPDYDLFQSLPGAGPALAPRLLVAFGEQRERFKSAADLQKYSGVAPVTERSGQKHWVHWRLQCPTFMRQTFVEWAGQTINKSYWAGAYYRQQRDKGSTYQAAVRSLAFKWIRILYRCWQSGVAYDESRYLKALERRGSPLVKRQKMLESA

SEQ ID NO: 434960 - protein, 320 aa, unidentified
MMAQNDLVVVGIDVSKDKVDACIRTLALRQSCSTSAQGHRQLVAWLRKHQVNKAVMEASGGYERDWAKALRQAGIEVRIVDPKRVRSFALSAGRLAKNDAIDAQMIAWFAETFSEAPGQTHDAAHEELLALAKARISLVDLKARLESQSEHAGPRLVQSARGRLLKNLVSEIAKLEAIIAATIKATPHLAERAEIIESIPGFAKTTSANLVAGMPELGQVSNKIAAALLGAAPYDDDSGNRRGERHIKGGRRWVRKAIYMPCVGAATLNNPVLKAYYDRLIAKGKKPKVALVACMRKLIAILNTMIARRQKWDPSRYALT

SEQ ID NO: 434961 - protein, 335 aa, unidentified
MKTYVGVDYHKAFSYATVMNDEGQVLKQGRVANSPQAVAAFLDGYGGADCAAVLEATRCWELMHEWLDEQCGRVVLAHPLKLRAIAEASVKTDKIDATTLATLLRADLIPAAHVGTPEARLLRRVLRHRLFLVRVRTMVKNRLHDLIDRYATRVPRRPVAELFSKAGLAWLRALTLDEHDQVILESELELLEHLGEQIGRIEGVLMQLGRRDERLARLLTIPGVGRTVGLVLLAEIDQIERFKTPAKLHAYAGLVPRVHASGGRVWHGRLVGACNKWLCWALIEAVWPAVRADAPLRAFYERVARRKGANTAKVATARRLLTIAYRVLTQRREYR

SEQ ID NO: 434962 - protein, 368 aa, unidentified
MDKFSKYVGMDVHQETIAVAVAQAGGEVRYMGEFVNTPEVVKKLVTQLKRDGARLSFCYEAGPGGYVLYRQLQGLKQDCQVVAPSLIPRKPGERVKTDRRDSLTLARLHRAGELTAVWIPGEAQEALRDLTRAREDMKHLQRQAKQRLLSFLSRHGHRYTGKSRWTQAHWRWLEGVTFAHPVQQIVLHEYIDTIRACNQHVASLEQEIERAVQDSPVWPVMEALMALRGISLIAAVTVVAELGDLRRFDDAPQLMAYLGLVPSEHSSGKRERRGGITKTGNSHVRRVLIEAAWTYRHPARKSAILQRRAERTTAQIQEVAWSAQKRLCQRFRHLTARGKLPVQVCTAITRELTGFIWAIGQQARFSTT

SEQ ID NO: 434963 - protein, 406 aa, unidentified
MELVPLHKRVIGLDIHQAQVTACAILEEADGETRIEQRQFGAFKKDRQALAVWAAALNPDEVVMESTGIYWKSPYAALESVGIRATVVNARHAKQVPGRKTDVGDAQWLATLARAGLLRGSFVPPAKLRELRVISRQRQKLVSLLTAEKNRMHKVLTDAGIRLGVVVSDIHGQSARAMIKGILDGQAPHEVLNLASRRLKASREELYDALQGELTASHVFVLNELLRHIEELEARIARFDARLLAELASEHNALALLQTLPGVDVIGAAMLLVEIGSDMSVFGTPDRLASWVGMCPGNNESAGKRQSGRIRKGNPYVRRLLCEFAHAASHTRSAFQSKFQLLIVRRGYKRAIVALAHKMLRTLFFMLKRGEYYRDSATNYEQLSVQRNASRWIKALTRFGFIPAAA

SEQ ID NO: 434964 - protein, 345 aa, unidentified
MLYLGVDYHKSFSYCTLMDEQGKVVKQGRMENSADGVKDFVRDADGEVIGVMEATRNWTLMYDWLEEEIDGVKLAHPLKVKAIAEAKVKTDKIDSKILAHLLRCDLLPESYVPSQSARLVRQVLRQRIFYVRVQTMLKNRIRTIIDKHPEVGSPPVELLFGVKGMEWLRKVTLPEIDKKIMENDLELLKEVQERISQSDSLIAELGKDDERVKYLMSIPGIGKFLAVLLCYEIDDINRFRDDRKLHAYAGLVPSTYASGNRVIHGHITKQGNKWIRWAMVEAVWPAIRKDRELRSLYERLKIKKGANCAKVATAKRLLTIVYCILKERRYYQVHGCPDINLAVSR

SEQ ID NO: 434965 - protein, 317 aa, unidentified
MTEPLVFVGIDVAKATLDVAVRPTGATFQVANDPDGIAVLIDRLRPLTPALVVLEATGGYEAPAVAALQVAGLPVTAVNPRQARDFAKATGRLAKTDRIDAQALAHFAEAIRPEPRPAVPAAQQALDALLTRRRQLVGMRVMEANRLPTATDPAVRAGIERHLAWLDDEVAAADQQLSEAVAASPAWRAKDDLLRGLPGVGPVVSRTLLAALPELGSGDGGKLAALVGLAPYAHDSGTLRGGRHIRGGRAEVRRALYLAALSAARRAGPLKDFADRLRARGKKAKVVLIAVARKLLVIANAVLRTGQPWQPALAASR

SEQ ID NO: 434966 - protein, 387 aa, unidentified
MLFVGDDWAEDHHDVEIQDETGRRLAKARLPEGISGMARLHGLVGRFLPEDGDAAGVKIGIETDRGPWVAALVASGYQVYAINALQSARARQSQGVSGAKSDAGDAHVLADLVRTHSHQLPTVAGDSEHAGAVKVLTRMHQTLIWDRTRQVLRLRSSLREFFPAALEAYEDLAFPDVLELLTKAPEPNSAARLTRAQITAALTRAHRRDREAKTTAIMAALAAEHLTQPPLIAAAYGATVRALAALIGTSNEQITALQGQVEACFGQHPDAEIYLSQPGLGLVLGARVLAEFGDDPTRYDGARARKNYAGTSPITRASGKKKVVLARYVRNNRLADALHQQAFSALSGSPGARAYYDALRQRDISYNAALRQLGNRLAGILHHACLF

SEQ ID NO: 434967 - protein, 418 aa, unidentified
MDKIRTKKGRVVNEKTLLVTVDIGKVMNMGYCRCPDKTEVKPFTFQNNYEGFNKFFSVIVKTKTTKELEYVVVGFESTGAYAEPLMHFLRANGVKLVQVNPLHTKKLKDLQGNSPNKTDRKDPKVIADIIELGHALTVIIPEGVPADLRRLTHARERTLKRKTALLNQLQDAVFVSFPEFLDIMKDVKTKTAHFLLKHYPMPSNILECGLKPLAIHLKKISRGKLGHERAQSLYEAAKRSIGIPEGRISLALEIRAFLSALEQCNGFIEQVEQEISRLLKEVSYSRFLLSMKGIGSVTVAGLIGEVGDFNAFSTISEMLKCAGLNLYEISSGKRQGARHISKRGRALMRKLLFYAALCTVRKGGIMHEHYQRYLQNGMKKVKALVAISRKLLGVMFALVRDHKPYFKNHEEAKYLNAA

SEQ ID NO: 434968 - protein, 399 aa, unidentified
MLAVGIDVSKSKSAAAILNPDGTVHTKPFEFRHSQPEMDALIRYIKDQNQPVTILMENTGHYHYPVLKALEAAGLPVCLINAYQMKKYGDMELRKAKTDKKDALRIARYALEKGYSLVPHTSMDQKYEDLRFLARQYDQRMGTLTTNKVFLINLLDETMPGITKLLSLTTRDPETSLTMLFIKRFKSYDRIKKMGRTRFLDSYNKLARKSRNRRAYGYGLAIYELAVNSITTRGENEFTLAAQDQCVDLVSESQKAADAIILNMQTLAETLPEYAVLRSMAGVGDRLGPLILAEIGDIRRFHSGKALNAYAGNDAPPYQSGTFESHNRHISKRGNAALRKYCFEVMQALKLTRPQDDPVYLFLIKKEQEGKPYNVAKMAGVNKFLRIYYARAMEALRLQ

SEQ ID NO: 434969 - protein, 355 aa, unidentified
MDSTKYIGMDVHKETVSIAVMNSAGKLVVESIIETKAATILQFIQGLRGNLHVTFEEGTWATWLYDLLKPHVTKIVVCDPRRNALLKEGNKGDKVDARKLAELLRAGLLRPVYHGENGLRTLKELSRSYLTISKDLTRVMNRLKALYRGWGISCEGATVYAPRHRSEWLGKITEAGVRRRAEFFYQQLDALQALRQQVRRDLLAESRKHSERKLLRQIPSIGPIRAALLMALIQTPHRFRTKRQLWAYSGLAIETHDSAQYRYVAGQLQRSKKPQQLRGLNRNHNHDLKAIFKGAATKASTGAGPFHDFYEALLTKGMRPSMARLTLARKIAAITLIVWKKGAHFDAEQLKLQAA

SEQ ID NO: 434970 - protein, 411 aa, unidentified
MGQASRVWHLRRFPRQPTRCSMSQPNDSNKSVIPLEQDNTMIAVIEMGQASWLVAGIVPGLERQPLKKLGSDEQALFQLLQRWRNEAVQTGRTIKRLVVAYEAGRDGFWLARWLRARDIEAYVIHPNSVAVSREHRRAKTDRLDTELLKRAFLGWLRGEAGHCSMAAIPTIEEEDARRPNRERENLVGERTRIVNRMKATLARFGIRSFKFTLRHADERLNDLRTAEAASLPANTHAELRRDIARLRVVRDQIKEIEQQRLQRIEQAAPSEKSPHAMIRLLARVIGIGVETADMLVNEILSRQLRDRKAVARYAGLTGSPDESGKRRREKGLSRAGNARVRRGMIQLAWRFLMFQKDSALAQWYRARTAHARGGTRKTMIVALARKLLIALWRMVTTGEIPEGISLHRAVA

SEQ ID NO: 434971 - protein, 318 aa, unidentified
MDQPIIGIDVAKATLDAYVHPSGARFPVTNDDEGIKTLLERLKAFPQAAVILEATGGLEFGVAAALTSAGFRVAIVNPRQVRDFARALGRLAKTDPIDAEILARFGDRLRPEPRPIPDSALRSLEAHVARRRQIVDMITAESNRLGQTTDADIKKQIKRHITWLQHELKSVDTDLGDAIRHSPIWRAKDQLIHSAPGVGRVTSFTLLAQFPQLGTLGGKQAASLVGLAPFNVDSGTLRGRRHIWGGRASIRSVLYMATLSAVRYNPVLAEFYQRLLRAGKSKKLAVVACARKLLVILNAMLRDNRPWTPAHLDPQHGC

SEQ ID NO: 434972 - protein, 427 aa, unidentified
MSYRIAGIDVHKKRLAVAVADVEVDADFQFDRQKVGTTPIELRRLADWLVEHEVDEVVMESTAQYWRPVWEALEQHWRPQRRALKSAPPLAGTLHLAQAQSNRGPGGRKRDFPDAERLVKRLVAQELTLSFVPDAEQRLWRTVMRRKYQVTRNRVQLQNRLESLLEEAHIKVSSLVSDLLGISARRMLQALADGETDPAALATLATARLRATPEQLRDAFHAGPTLHPVYRRLLTLTLEELRLIEDHLSQLDQQMADLLTAHHDAVQRLAEVPGLGVDSAHQIIAEVGATAATFPSSKQLASWMGACPGNEESAGVNYSHRCPKGNQHMRRVLNQAANAAVKAKGSIFAIVYRRLVPRLGHAQAIGAIAHRLCRLIWKILHEGIRYEERGPAVSVEAKKVRTRKMIRELRTLGYRVELLPAPSSNPA

SEQ ID NO: 434973 - protein, 415 aa, unidentified
MDSNLITAVGIDVSKGKSTVAIRRPGGEIVRKPFTVKHDQLGLQQLIQLLHEVGGEIRIVMEHTGMYWRPIASVLQQKGFFISVVNAILTHQFSDNSLRKVKTDKADSLKLANYALTYWSELKRYDQEDETRQQLKFQSRLYQRTIQTSVTLRNGLISILDQTFPNANQFFSSSMPTKDGHHKWIDFVERFWHKDCVAAVSLHSFAVTLEKWCKRYGYRYSHADAEYIHAQARNAVATLPKNDSTKLLIMQAVHTLNTIYESLQVIRSEMQRLASQLPEYPVVMAMKGAGQVTGPQLMAEIGDVRRFTHKGALVAFAGVDAPPFQSGDFEAKSRHVSKRGSSTLRRTLFQICSMSLCRADPEDPIFCFMDKKRSEGKHFYVYTVAGAAKFLRIYYARVKQYLNQMDTALASVSTN

SEQ ID NO: 434974 - protein, 370 aa, unidentified
MSQSSTLFVGMDVHKDTIAVAYVAQDHGAEVTYVGTIGTRQCDIDTLIRKMQSKAQHLIFIYEAGPCGYWLYRYLQKKGYDCWVVAPSLIPKKAGERVKTDRRDAVQLARLARSGDLTLVYVPKVDDEAIRDLTRAREDVISDLKDAKFRLKAFLLRQDIRYAGRANWGPAHLRWLAEVVCPTPAQQIVFQEYVRTVTEHTERLGRLENELREQVTTWRLHPVVDALQALRGVQFTVAVTMVAEMGDLTRFDHPSELMKFLGLVPSEYSSGQRRQQGGITKTGNTHARRVLVEGAWAYRYPAKVSRHLQLRLENQPKVIQDISWKAQVRLCKRYQRLVAKGKHANVVTVAIARELVGFVWAIAKEVPLTL

SEQ ID NO: 434975 - protein, 399 aa, unidentified
MLAVGIDISKSKSVAAILNQDGSMHTSPFEFHHTQPELDAFIKYILNSNQSATILMENTGHYHYPVLKAFQEAGLPVCIVNAYQIKKFGDMDLRKAKTDKKDAVRIARYALEKSYSLVPYTSMEQKYEDLRFLARQYNQRMLTLKTNKVFLLNLLDETMPGITNILPLTSRTPETSLSVLFINRFKSYDRIKKMGKNRFLDAFEKIARKSRNRQTKTYGLAIYEAALRNITTRGENEYILAAQDQCLELVCESQKAADSIILKMQTLAETLPEYAVLRSMAGVGDRLGPLILAEIGDIRRFHSGKALNAYAGNDPPPYQSGTFESYNRHISKRGNAALRKYCFEVMQALKLTQPQDDPVYLFLLKKEQEGKPYNVAKMAGVNKFLRIYYARAMETLKQQ

SEQ ID NO: 434976 - protein, 421 aa, unidentified
MKVLYRRCAGLDVHQKSVSVCARIGQGRQVEILEATFATFTEDLQALKAWLQQHRIRRVAMESTGVYWRPVWNVLEAPPGKLELLLLNPQHVRALPGHKTDRVDAARIAELLQYGLLRASFVPPVEIRELRDLLRRRVHLVQDRNRISNRIHRLLETANIKVSGVLGKVTSQTFRSILEGLATLREVRPEALALLARHKRVRARQPELVKALRGSRLSDHFRFLLSELLEELDRLSGKIQLLEQRISERMVPYGELIERLCQIPGVARITAWTLIAEIGIDMSRFPSPAHVASWCGLCPGNAESAGKRQSGRIGKGNQYLRRALVEAAWQAARITRRRTFLTTLFFRVSRRAGMKKAAVAVAHRILLIAYCMVRDGTPYREQGADYFDRLHPDRTRNRLISRLNALGFDVQLSTRASPSSS

SEQ ID NO: 434977 - protein, 344 aa, unidentified
MSIAMIGLDTAKSVFQVHAVDEAGTTVVRRKLRRSELIMFFEKQEACTVVMEACGAAHHWARVLIGLGHEVKLVAPEAIKPFVKKGKKNDAADAAAICQAACRPDIRFVPVKSLEQQGILAVHSARSLLVKQQTMLANAMRGLATEFGVTVPRGIGRLEELVVLADALPGRARRVIRELLEHCRALAGSIEALDAEIVAHARQDEAARHLATIPGVGPITASLMSATVTDIRLFKSARQFAAWLGLVPRQYSTGGKTRLGRITKTGNRELRKSLVLGATSMVYRAAAWSSAAGVWTRAVLERRPVRLVTVALANKMARIAWALMTRKEIYRPKAPVTAAAQALA

SEQ ID NO: 434978 - protein, 358 aa, unidentified
MDAKGGVRRRAVLPTDQERIAAFIAAEAPQTERVVHESGILSTWLTRELERRGVSILCIDARLANKVLSARLNKSDKVDAESLAQLARTGWLTRVHIHSEASNHIRAPVGARERLIRMRKELEAHLRGMLKTYGIRMTQVHQAKARRGFRDQLSETGAGDPVLRLLAETMSPIHGMLCAATAALDGELLAIARRSELEGRLMSVPGIGTITALGFVATLDDPARFRRVSDVGAFLGLTPRRYLSSEVDRPGCISKCGDADMRRLLVSAVATLITQVARFSPLKAWTVRLSARKGFKKAVVARARKLAVILYAIWRDGSVFRWTKEATAYSKYPACGEVRARRPWDGGRSISANRSRWS

SEQ ID NO: 434979 - protein, 413 aa, unidentified
MEMEVIVERCAFLDVHRDTVMACARIPDGHGGRREDVVEFGSTTSQLLALADWLTERRVSLVGMEATGVYWKPVHWVLEAHVAEVWVINARHMRNLPGRKTDVADAIWGASLLEHGLVRPSFIPPPPFRALRDLTRYRKSVIEERARESQRLHKVLEDAGVKLSSVASKVLSKSGREMIEALIAGERDSEVLAEMAKGRLRSKIPALQDAMAGRFNEHHALLCRAMLARVDQADSTIEVLTGRIEELLDPYEAAVSLLVTIPGVSYRTAQVILAEIGADMSRFPTAGHLASWAGMCPGNNESAGKHRSGRTRHGSKWLRKALIEAGQAAGRTKDTYLAAQYAQIRTRRGPQRAAVAVGHSILVIAWHLLSTGEPYQDLGGDYFDKRRNSAARQRRLVAALEAMGHQVTLEPAA

SEQ ID NO: 434980 - protein, 344 aa, unidentified
MTELTRVAVDTSKSVFTLHGVDAQDRPVLRRNLKRGEFVAFFEKLAPVEVAMEACGGSHHWGRMLTKYGHRVRLIPAQYVKPFVKRGKNDRADALAISEAAGRPDMHFVPVKTVEMQAQAVQLRLREMLVAQRTALINALRGHAAEFGVIAPKGTPNLAALLAAIADEARGVPLLARQNLALLGDTIRQHDAQIAELDKNLAKQHKKDAQSRRLAAIPGVGPIIALTMSLTVDAKQFESGRHFAAWLGLTPKDKSTGGRQTLGRISKAGNERLRSLLVSGAMSVVKVAQPGRKCASAWLLKLLERKPRKVAAVALANKMARIIWAMMATGSTYRSVLADALKAA

SEQ ID NO: 434981 - protein, 368 aa, unidentified
MKKVSTAVAKQSRNISQQKLTIGLDLGDRNSWYCVLDEAGQVQLEQRVRTTAKALQEVFGEMPHSRIALEIGTHSPWISRLLSELGHEVIVANARKVRLIGESRKKDDRLDAQTLARLARIDPELLYPVKHRSAQAQADLMMIRGRAGLVRARTGLVNTARGLAKSYGERLRGCNVRNMNPEKAESLSPELQAALEPLLNAIESLSERIVEYNERIEQLAQQSYPKVALLKQIKGVGTLIALTYMLTLEDPHRFGRSRDVGCYLGLQPGRRNSGQSEPQMHISKEGDPYLRTLLVQGAQHILGPFGVDCDLRRWGLKLAERGGRNGKKRAIVATARKLAVLLHHLWVSGEVYEPLHNSSRRAIVTAAA

SEQ ID NO: 434982 - protein, 421 aa, unidentified
MQVLYERCAGIDVHKDQVTVAVRLPGRGPGGRDTRVRKFAAFYGVLREMARWLASQGVTHVAMEATGIYTMPVYHALLEPGCFDQVLVCNAAHVKNVPGRKTDAVDASWLAELLECGLLKGSFIPPAQIKAVRDVVRYRRKIVQERAAETQRLGGVLQDAGIKLDSVASSIDTVSGLAMIWALIDGERRGQVLAELARGVMRAKIGDLSQALEGRFGDHHALMCQLHLDHIAHLNEMIAKLDTQVEAMMVPFARQRDLLATIPGIGLQAAAAVISEIGTSPGEFFTTGAHLASWAGLCPGNHESAGKRKHGKPRKGSQHLQPLLVECAWSAVRTSGRLKARYHRLVLRFGGYRNPAAKKRAIVAIAHTLAVVIWHVLATGKPYTDLGPDFYANRADPAKETQRLIAKLEALGHKVILAPAA

SEQ ID NO: 434983 - protein, 421 aa, unidentified
MHVLYQRCAAVDIGKDVIAVAVRLPGDGPEHRQTIKRTFKTFYGVLKHAARWLTEQQVTHVAMEATGIYSMPVYHALIEHGGFEQVLVCNAGHVRNVPGRKTDLSDAEWLVHLLECGLLRGSFIPPAQIKAARDVIRYRTKLTESRTSELQRLGNILQDAAIKVDSVASTITARSVRAMVEALIDGERRPLVLAELAKGRMRAKIPDLQRALEGRFDDHHALMCRLHLDHLDYLEEMIVRLDTQIQDMMQPFRAQRELLTTIPGIGPFVAAAVISEAGADIAETFPSADQFASWIGVCPGNHESAGKRHSGKPRKGNQHLQHVLVECAWAASRTPGYLQSHYRWHVRKFGGSRNPTAKNKAIVAVAHKLAIIIWHVLATGKPYADLGADYLDRRIDPAKETRRLIARLQALGHTVTIEPAA

SEQ ID NO: 434984 - protein, 308 aa, unidentified
MNQPKHTYIAIDIAQADLEVLAAGKRVKAANTPAGFRQILGIARDLEAPLVVFEASGGYERALMEHLSGQNVPVAMISPARLRAFARSEGVKAKTDPIDARMILRFAQEKKLAPTRILEGKRRELADLMDRRSHLSEQLTREKTRLQKAPELLHASIRRMIHHVEKEISLIEKQIEELIAADEAMSEEAERIQSIKGMGKVNAWSLMGYLGEIQDLKRNQLVALAGLAPFNRDTGKSSKNRFISGGRAKVRKTLYMAATCAAVHNPVIKAYVQKLRQRGKPYKCAIVAAMRKLLLHVQSLLKNQPLPA

SEQ ID NO: 434985 - protein, 424 aa, unidentified
MKYTQNKRIMQVEETTLVVGIDIASEEHYARAFNWRGIEHGKVISFSNSREGFEKLKTWMENLKKENKKEKIICGAEPTGHYWFGIGQYLKEEEIKLVLVNPYHVKRSKELDDNSPTKTDVKDPKTIAKLVIDGRYSEPYIAEKVYSEIRILNEIRMSLTKEKIIIKNKVERWLKIYFPEYKEVFSDWSKQGSLLILKQLPLPEDIRIKSKEELNEIWRERKLRAVGMKRAEMLKEAAEKSIGSKEGLRSARKELEILIKEYEMKEEHYAEIMEEIEKMIKEIKNTEKLLEIKGIGILTVSGIIAEIGDISRFESAKQIQKLAGLSLMETSSGKHKGSTSITRRGRKRLRQILFQAVMPLVAKNEEFKELHNHYITREKNALKKKQSIVAISCKLIRVVYAILKNGTKYDSGKVKEAIELKKAV

SEQ ID NO: 434986 - protein, 461 aa, unidentified
MSRARQKSLPTHLATAEVDELTRIHANAAGIDIGLAESWVSVPANRDPQPLRRFDMNTPDLIALAEWLKACGVTTVAMESTGVYWIPLYEILEARGFNVYLVNARHAKNLPGRKKDEADAQWLRRLHAFGLLNNSFRPEGEMCAIRAYLRHRAALIEHRAAHIQHMQKAMQQMNVRLSPTVTDITGVTGMAIIRAILAGERDPVKLAEWRNPCCAQPESEFIKALTGNYRDEHIFALKQAVALYDCYTEQIRECDQELERKFSALKPVHDDEGLPPLDTTDKRNTHSKNAPAYDGRRLLYQLLGIDLVAVHGLNEATAQTIIAEIGTDMSRWANDKHFCSWLSLAPHTDISGGKVLRSRILKTHNRAGQAFRLAAQAVAKTETAYGAYFRRMRAMHGPKKAMVATAHKIARAVYFMLRDHKPFDGASAATYLKRECEREIARLEKKATKLGYTLAPVPVPA

SEQ ID NO: 434987 - protein, 392 aa, unidentified
MVTILRPVGEIVSSPHEVKHTSDQIDDLIREIRSLEGESRIVMEYTGRYHEPMARWLSDAGLFVSLVNPKLIKDFDNDSLRKVKTDKADSVKIARYALDKWHKLKQYGVMDELRNQLKTMNRQFGYYTKLKTTMKNNLISLLDQTFPGANTFFDSPARSDGSQKWVDFVDTYWHVDRIRSMSLAAFTEHYQKWCKRKGYNFQPDKPAEIYESVRNIIPVLPKDEVTKFIVRQAVNQVNTASAAVEELRTRMNDIASQLPEYPAVLAMKGVGMSLGPQLMAEIGDVTRFTHKGALTAFAGVDPGKNESGSYAQKSVHTSKRGSAPLRKTLFLVMDSLIKTMPQGDPVYEFMNKKRSQGKPYYVYMTAGANKFLRIYYGRVKEYLSEHPETAVN

SEQ ID NO: 434988 - protein, 412 aa, unidentified
MQDILTCAMGLDVHRDIIVACLVKGAVDAEPEAETRTFSTLIPEMQKLRDWVIESECRNIAMESTGIYWQPIYEMLESCFDGEISILVVNARHMKNVPGRKTDMKDAQWIATLLRAGLLKGNFIPDKAFRELRHLTRYRKSVVHDITAQKNRIDKFLQSSGFRFTAFLSDTFGASGRNIIRHLIEHGSIDREALDKCLKTKTRNRIDEILVALNGSLSEHQRRFLNMVFRHLEDLEAHKHTVEDEITEEVLKHTDTLNLLCSIPGIDVTAAAAIIAEIGTDMSSFPDSQHICSWAGLSPGNNESAGKRKSVHINKGNPYLKSMLCEVAWIMASHRKLYLSGWYWKVKQRKGAKRATIALARKILSIIYTMLKTGTPYNEECFEQRRLRCERKRANRLVNELQKLGYVVVAPD

SEQ ID NO: 434989 - protein, 440 aa, unidentified
MRRGWIWARRKFGGPADRDAEPVRAFGTFTPELQARVDWLVQCGVDTVAMESTGVYWIPIDELLEARGLKPYLVDARQVKNVPGRKTDVLRAACQGLQKLHRLGLLSASCRPEAEMVTWRAYLRHRAELIERRAPHILPMHKALLQMNLQLTQVLTDITGPTGLAIIRAIITGERDPLKLAQLRNPACQSSTEEIGKALTGTWKPEYLFVLKQSVEGYDFYTQQLAACDAEVERLYAVLNPRWEMPADLPKLPPRKFHSHRKNQPAGEVRQAMYRIVGVDLTAVDGLKEASVQEILSEIGTDMSPGPTVKHFASWLRLAPHNDISGGVVLRSRGLKSNNRARQAFRQAAESVARSDNAFGEFYRRKRAQYGPKVANMATAHKIARVVYFMLKKHVPYEAGKAEEYVAKQRERELTRLKRQAAYLGYNLTPHPTATESPVA

SEQ ID NO: 434990 - protein, 431 aa, unidentified
MEIVHPQAAGVDVHKKVVWVAVRLPGERPGERTVTVKRFKTFWRSLRTMAAWLCELGVSDAAMESTGVYWWPVYHALAQAGIEVCVCNAAHMRNVPGRKTDLADCQWIAELHECGLLRPSFIPTGAVAELRARTRYRKKLIEQRTSEGQRLSKVLEDAGIKIDSVASRLLLKSGRAMIEALIAGERNPGRLADLALGRLRRKTDELQLACDGRFTTAHGQMCRLHLDAYDHLTAKIAQLDALVAEAVAPFAALIARLETIPGIGRRTAEVIVAETGGDMARFATAARLAAWAGLAPGDNESAGKRKHAAARKGNRHLRVAMVESAWATARTRTRPGARFRRLARRFGKGNEKKAAIAVAHTLICIAWAVLSRGQDYAEAGEDYYEQRDRRDREHLIRHHHQALARLGYQVTLIPPGDGSPPPSATSKQPAA

SEQ ID NO: 434991 - protein, 322 aa, unidentified
MSVSNQRCAGIDVSKGTLDIAISNIASQFTVPNGTDGFTQVLRELKRNETRLILMEATGGLESCVACYLQSEGFDVVVINPRQARDFARAMGYLAKTDRIDARVLLQMSEVINQHPERERYIRPLPDAHRQILAAMVVRRRQLTIMLTAERNRLHPSHPLSHASIRSIISALKGELARIEGEMAIHIKEHFSELSELLNAVKGVGSATVAVLLAEVPELGSLSRRKISALIGVAPVNRDSGTMRGRRTVFGGRTSVRTALYMSALVGTRHNPVIKEFYTRLVAAGKPKKVALTACIRKLLTILNAMLKKNEAWDPMYHQHAS

SEQ ID NO: 434992 - protein, 321 aa, unidentified
MQTPSPALDIGADVGKDEIVIACAEGALSRRKLRNRRIELSALLKSLPAGSRIGMESTGSYHELLAETAHKLGFVIFVLNPKDVRHYAKGVGLRGKTDRVDAELIARMVAREHEKLHPWIPPTPEQRQIDRLLKRRAKVSRIRVALNQSLKGLSGFGADLKTVNERLERFVKRIDAKVKTLIEANKDRKQQYARLRKIAGLGGVVVRSSVLNTLERVPLHSADAFVAFTGLDPRPEDSGHHVGRRRLSKRGPSELRRLLYIAAMAAVKTKLWKPIYEHYRAKGLSTTAALVVIARRIARTAWSLYTHKTDFDPKRVALALT

SEQ ID NO: 434993 - protein, 319 aa, unidentified
MAQNDGVVVGIDVAKDKGDACIRKLSLRQTFPSPEQGHRKLIAWLRKHKVTKAVMEASGGYERAWARALRDAAIDVRIVDPKRVRAFALSAGRLAKNDTIDAEMIAWFAETFDEIPGQPRDAAREELQALVKARKALQDQQMRLQSQREHDAPAVVQKAYARVLKSLASEMARLEAAIAAKVKATPDFAERAEIIESVPGLAGTTSANLIAGMPELGQVCNKIAPALLGVAPYDDDSGRRRGERHIKGGRRWVRNAFYMPCLSAATQHNPVLKAFYQRLIAKGKKPKVALVACMRKLIVILNTMLARRQKWDPSGYPLS

SEQ ID NO: 434994 - protein, 407 aa, unidentified
MGRAARYSTIVVCTRMMEHAMPKPNDLSRSLTALDQDSTLIAVIEMSLSRWLVSALVPGLKRDPLKQQGPDAEALLRLLHRWRDEAVKGGRVITRICVAFEAGRDGFWLARWLRARGIEAHVIHAASIPVQREHRRAKTDRLDVGLLKRAFLGWLRGEAKHCSMAAIPTLAQEDAKRPSRERENLVGERSRIVNRMKATLVRLGIRGFNVKLRQAPKRLEGLRTPEGELVPPNTAAELRREMARLDFLKAQIKVIERARLERLEAAPAERKHAMIQLLAKIRGIGIETADMLVHEVLARNLRDRRAVARYGGITGSPDESGSKRREKGLARAGNARVRRGMIQLAWRWLMFQKDSALAQWYRQRTADARGDTRKTMIVALARKLLIALWRLVTSGQLPSGVVLQPAP

SEQ ID NO: 434995 - protein, 366 aa, unidentified
MGWTPLDGIECANMVVLTATTEETSEMNVSIMGLDLAKNVFQVHGADTAGAVVFRKQLRRDKVLAFFAGHSACIVAMEACSSAHYWAREIGKLGHTVRLIAPAYVKPFVKRQKNDAADAEAICEAAQRPTMRFVTVKSEEQQASAAVFRARDLLVRQRTQTINALRGHLPEYGLIVAQGPSHVTRLVWHVEDSKSNLPDAARMALAILVDTLRSLDQRIQKLDVEIARRAREDEEARRLVTIPGVGPITATALIALAPEAAGFKRGRDFAAWLGLTPLQRSTGGKQKLGETSKMGERTLRRLLIIGASAVVMQARRRGTPEGSWLGRMLARKPPMLVTVALANKMARIVWALMAKGGVYKAPAVAA

SEQ ID NO: 434996 - protein, 413 aa, unidentified
MKQISHDFAAHIGLDWSDQKHDICLKTPDFDKLEYGVIEHTPESIDEWALTLQKRFNNKPVAICLELKAGPVVYALLKYEFIVLFPIPPNALAKYREAFTQSGAKDDPSDAYLQVDYLLKHPSALKPLTPDNEETRILQRLVEDRRVLVSDKVRVTNRITAALKSYFPQALQWFNDIDTHIFCDFMQQWSSLSKAQHARKTTLTKFFKSHRCVRSTVIEKRLKAIKQAVPLTEDEGVIVPFERLTRALSEQLNHILGVIHEYDLEIARRFRSHTEYDIFDALPGAGPVFGPRLLVAFGTNRDRFESSDEVSRLSGVSPVLKRSGKKSWVHWRYSCPKFLRQSFVEWANQSIRYSFWAREFYDKKRASGKSHQATIRALAFKWIRIIYRCWINKTPYDESVYLFALKRRTANIN

SEQ ID NO: 434997 - protein, 329 aa, unidentified
MKDLLERCMGLDVHKESVVACLMTGPVDCKAEKELRTFGTLSANLQELRRWVEETDCRTIAMESTGIYWQPVYETLEDCFGGDIEMLVVNARHMKNVPGKKTDMRDAEWIATLLRAGLLNGSYIPAKVIRELRHLTRYRKSIISDITSQKNRIEKFLQSSGFRLSSFMSDIFGASGRNVMRYLCQHGNITMEALDGCLKTQTRNRMKEIMSSVNGTLSDHQKQFLSMMLFHLETLECHRTEVENAISAETEKHSEALSLLCSIPGINITAAASIIAEIGIDMSKFPSAQHLCSWAGLAPGNNESSGKKNERPSGKAILTSKVCCVRWRG

SEQ ID NO: 434998 - protein, 281 aa, unidentified
MIKELDLGLDVHQEWILTAVAEEGRGPVRDTGAISGDLHAVEKWIGGLRKAYGREVKMRACYEAGSCGFGIARRLKQLGVECEVVAPSLTPTRAGERVKTDKRDARKLARLLRAGELTPVYIPEPTDEAIRDLCRARTDAVDDRRRSRHRLKGFLLRHGYRYQGKSAWSGAHMRYLRELVLPHPAMKVILEEYLMAIQAAGEQVQRCEVAMRDLLEQWRLAPAVRALMAMKGFQSVAAMILGSELGAINRFTHPRQVMAYLGLIPSENTSSDKRRQGAITK

SEQ ID NO: 434999 - protein, 356 aa, unidentified
MRSIVDRPAVVTGGVDTHLDVHVGVVVDEVGRVLGTGDFAADAKGYRALLRWMRGFGELAKVGVEGTGAYGAGLARYLARQGVMVVEVNRPNRQARRRRGKSDPADAEAAARAALNGEASGQPKAGTGVVESIRALRVARRGAVKAATQALNQLKDLVVTAPDELRARLKGLSNSERVEVAAKFRPGPFDEPAEATKLAMRAVARRYQALQAEIARLDAAITDLVPEAAPEAFLAKQGVGPQVAAIILTTVGGNPDRLMSEASFAALCGASPVDASSGKQVRHRLNLGGDRQANSALWRIAFTRMTFDPRTKAYVERRTKEGKTEKEIMRCLKRYIAREIYKSLVAPTSSIASRAA

SEQ ID NO: 435000 - protein, 407 aa, unidentified
MPHFVGLDWAHDDHAICVVDEQGQVQLRCTVAHSATGLTSLIQQLRRVADPADLPVAVERPSGLLIDTLVDAGFPVVPIHPNALKASRPRYSAAQGKSDPGDAFILADLLRTDGHRFRRLQPLSDEIRALRALVRTRDDLVAERVALANQLRALLESFWPGAAAIFADIDSPIALAFLARYPAPQSATHLGAKRLASFLARHAYCGRRPIAELLDRLRAAPTGLAAPLECEAKGELVRAFVAVLEPLVTQLHQLSAALEHAVTQHPDGPILMSFPRAGRVNAAQILAELGDDRGRFAHPDQLAAEAGVAPVTYESGKHRGVGYRWACNKRLRRALTCFADNSRHASPWAAHVYRHARERGCDHPHAIRILARAWLRVVWRCWQDRKPYDPAAHRRARPLLNLTEDAA

SEQ ID NO: 435001 - protein, 410 aa, unidentified
MNNQACIKHERFCQFRREIRGSKEHLIVGIDIAKDKHYAFFGTSTGKTLFKRLIFDNNLEGYKKLLARVDAIKVQHCLSKVVFGLEPTGNYHKPLGAYLDRCDFTVVIVSGVAVKRNRELLDGRWDKHDTKCAANIADLISQGKCLFYDSPSKEITDLRNLLSLRKRLKKEEHSLRMRIRNNLLAKYFPELDKFYGQCESENLAIVRWCLDPRIIADMEFDQFFKMVTRRERGIAQKKRLRAIWDSAPDSVGCIPGESSEFEAGILVEKLRQVRQVIEKTEDLIKNVGKQFPAYSLLLTIPGVGPYIASVILGAIGNPSRFKNRKQVLKLAGYDLSANRSGKTSKDAVPVISKKGNSVLRYALYQAALVARPLQNAPFCPITASGKNFNPRNTQCIPVVEIFVFLVLEQN

SEQ ID NO: 435002 - protein, 340 aa, unidentified
MTHATIIGIDLAKNVFHLHGTHDDGTVVFRKKLSRGQVLPFLSEQPNCLVAMEACATAHDWAREIGKLGHGTRLFPPQYVKPYVKRQKNDTADAEAITEAVSRRNMRFVEVKSEEQQVSAMAYRTRQMFIGQRTQTVNALRSHLSEHGIIAPKSKAGIKKLMAMIEDDTALISEKVRDIARVYVDHIEQLTAKISDATEAMKAAAKVSETAKRLQTMPGIGVQTAMAIEAFAPDMTCFKRGRDFSAWLGLVPKQHSTGGKSRLSRVSKMGQADIRSQLIRGAMSVITAATRFGIKTGAWLERLLGRKPKLVGAVTLANRMARAVWAMLTRNEGYRNPEAA

SEQ ID NO: 435003 - protein, 378 aa, unidentified
MIATTRPEMSVSEPTLYVAFEVGKKEWQLAMTSGFGVDPWVRTVVSGDLPAVAGALRQGRMRFALPAQARVVSGYEAGRDGFWIHRALTQLGLDNRVVDSASIEVNRRARRAKTDRLDALNLVRMLVRVCAGERKVWSEVRVPTVAVEAARHVSRERTALRQEQTRLSNQLRGWLATWGCRLPRYRKPGWWTAVRDWAGAPLPLEVQTRLARAEARWAVLERQLTELEAQQQAAVPAAAPASALRQLVQLKGVATTSASVLLDEGLVWRGFRNRRQIGGLLGFAPTPFDSGESEREQGISRAGNGHLQSISIQLAWNWVRWQPLSALTQWYRARFGTGKRARRRGIVAVARKLLIALWRYVTTGVVPAGATLKVAAIA

SEQ ID NO: 435004 - protein, 412 aa, unidentified
MRIIRKRCLGLDLHKKQITAHLRVHRGSGQEPEGVDKRFGTMPGELLELRAWVIEHQVTDVVMESTSVYWMHVYELLEAVTKPAVVNASHVKKVPGRKTDVSDAQWLAELHAHGLLRLSYVPPREIREMRAVARYRTKLVAERTSARNRTIKLVEMAGIKLSSVVCDSFGKTGRAVLDDLAKGPVNAASVTAAAKGSLRAKVDAIEAALQAPLTDLQRELLKMHLRAYDAADARVAEAERKLMELSKPYQSYIDKLDAVPGINPLAAVTLIAETGVEMSVYRDAHHLSSLAGLAPGNAISDGKRRRIGARKGNRQLKRICVQIAWAASRKRDSFFRARFSRLAFRIGRNKAIVATARHVLVVVYHLLAGEQTYRDLGASYYQRKNKEQLVRRAVRNLERLGFTVGLTPTPSA

SEQ ID NO: 435005 - protein, 351 aa, unidentified
METRTILALDLGKYKTVACLYDPATASARLETVTTGRPELARLIQRRRPARVAIEACALAGWVHDLCGELGVPCRVANTASEAWKFKHAKRKTDKDDALRLAQLRALGQLPTVTVPPVQTRQWRALIAGRQDLLGRRVAVQNRVRALFVGQGLPAPRGHRAWTATGLEGIGRHARPLAECGPDELWRGLLDLALAEYRHLRALLAQAEAKLEELARRDEGVRLLETVPGVGTRTAEVVAAYLGDAKRFDNGKQVSAYAGLVPRQFQSGQSDRRGRITRRGPAVLRKALVECAWMALRYNGWARAVYARLSRGRARKKQAIVALARKLLVRCWAMLRDRAPWREGVAAAAPT

SEQ ID NO: 435006 - protein, 391 aa, unidentified
MIYVGIDVAKDKHDCFITNSDGEVLFKAFSISNNLDGFTELYQKIESVMDDVTKIKVGLEATGHYSYNLLGYLIDKGLPAYVINPLHTNLYRKSLSLRQTKTDKVDARTIASMLMSDVNLKSYSDTSYHNEELKSLTRYRFDKVKERAKLKTSISRLVCILFPELEKLVPQLHMASVYAMLSEFPSAKQVASAHLTRLTNLLSESSKGHYGMETAITFRDAARASIGSYMPAKSLELKHTIKLIQELDSEIDEIENEIKIIMDKINSPILSIPGISYRMGAMIIAEIGDFSRFDSPDKILAYAGFSPSTYQSGQLNGAYAHMEKRGSRYLRYALYNATKYVCHWDPTFTAYLAKKRAEGKHYNVAISHAAKKLVRVIYHLEKTKQQYITAA

SEQ ID NO: 435007 - protein, 335 aa, unidentified
MLGIDISKDDFHVCAKEKGVDSKVKIRGSRSFSNDAKGFTEFALWVSKREKEDFAVRYIMEATGTYYENLAYYLYEAGNNVSVVLANKIKHFAKSLNVKTKTDKVDSAIIAEIGIERELAAWKPMSLKYKELRDLCREMLSLKREKTRAMCQHHAMNYSHEKTASVLMIKSAQIEFYRQTILQIESEIERIVDADIELKQRIEKIKKVKGLGLITIIIVLCETNGFLLFSNIRQVVSYAGLDIEMKESGKYKGKTKISKKGNARIRQSLYMPALCAATYNEKIKELNERINERNPQIKKKGVVAGMRKLLILIFVLWKKNEEYDPHHEWQKNDIG

SEQ ID NO: 435008 - protein, 354 aa, unidentified
MLAELVDAVVGVDTHRDTHQVEIALPNGAPIACTTISNDTSGYAELLAWIVDHAPGPRLAVSIEGTRSYGIGLARAAAAAGLMVLECEQPDRKARRGKGKSDPIDAHLAVLAALRLDADRLPTPRADGDREALRILLSARQELTTASTAQTNRLRALLLGGDDTDRTLARGALTEARLASLARRRPPREASREQAVRHAEIRRLALALREAARALKANRAQLQTIVNDVVPRLIERPGIGPVSAAQAIVSFSHPGRCRNDAAFAALGGVSPLPASSGRTVRHRLNRGGDRALNRALHTIAATRMRSCPTTQAYVARRTAEGKNPREIRRCLKRYIARQLYRTLATAMTPAAETS

SEQ ID NO: 435009 - protein, 388 aa, unidentified
MKKNTTAKKSRKKTLAKGQKTVVQIHRLAARQRLTVGIDLGDQSSRYCILDEAGEVVSENQLPTTQAGLDSLFAKMTKSRVAVEVGTHSAWVSRHLESLGHEVIVANAHKVKLITQSLRKNDRIDARQLARLARVDPQLLSPIKHRGEQAHLDLAVIRARAELMEARTQLINSARGLVKPLGERLKKCDADQVGVGLGERLSEGARAVVEPMLQAVEKISELIGKYDEQIEGIAKRYEEVKLLRQVYGVGLLIALTFVLTLDDAQRFAHSRDVGPYLGLVPKQRESGESQPELGISKAGDGLLRSLLVQGAHCILRKGAPESDLRTWGLEKAKGGKRAKKRAIVAVARKLAVLLHHLWVTGDVYDPNYNRKAAEAKAAKAKGKAKVAA

SEQ ID NO: 435010 - protein, 321 aa, unidentified
MKTAIGIDVSKAKLDVALRLSNGKFRSKVVKNDASGFKQLSTWIARQKCEPLPHVCMEATGVYWEDLADYLHQKGHSVSVMNPLQIKSYATSMLIRTKTDAVDSRIIAEFCTNQNPALWTPPPLSVKKMRALIARREALISMISQENNRLHVANDAVKSSIESVILHLKTELKEIEKKIKQTIDDDPDLRTKKDLLESIPGLGKITVPILLSVLAGAHNFKTARQVAAFVGLDPRHHESGSSVKMKQRISKVGHKSIRKALYMPAMVVVYKTEWGGHFKERLLTSGKAPKVIITAMMRKLIHVAFGVLKNQMPFDHSLHNA

SEQ ID NO: 435011 - protein, 378 aa, unidentified
MRPMTTRESASSVSTPLYLSFELGERDWKLAFSIGLGQRPRHRTMRASRLPVLDDEIARARQRFGLAADCPVRSCYEAGRDGFWLHRALLARGIDNVVVDASSIEVNRRARRAKSDRLDAEKLNEMLLRHHAGGRRVWHVVRVPSEADEDRRHLERERQTLIQDRTRLRNRIQGLLATHGVTLRLAGGGAAALGTARRWDGTSLPTGLVARLRREWARLEAVGAAVAALEAERTTAMTRPNATAQCSRRLARLRAIGPTFAWTLASEVFGWRAFRNRREVGGLLGLTPTPSQSGAERRELGIAKSGDPHLRALAVELAWLWLRYQPRSALSRWYQARYARGGPRLRRIGIVALARKLVIALWRYVAFDQLPEGAVLKA

SEQ ID NO: 435012 - protein, 372 aa, unidentified
MQSTTKFVGLDVSKEKISVAIADVSGEAPRYYGTIPHTPAALRKLIKELGAAETLSFCYEAGPTGYETYRWITSMGAHCAVIAPSLIPKRSGDHVKTDRRDAEQLARLYRAGELTPVYVPEREDEALRELVRAREAAKEDAHRARQRILKFLLRHQIEPPATIKRRWTKKYRVWLGQLTFPYESMHVAFSEMLHALDEIEQRMGRLEKALVEQAATGSKASLIQVLQSLRGIGLLTAITLAAEIGTFARFRSPAQLMAYLGLVPREYSTGLSTRRGSMTKAGNGRLRRTLVESAWSYRHRPAVKGDLAKRLDGMPADVQLLSWKAQERLHYKYRHLVFGKNKHKNVAVGAVARELIGFIWAVARTVEQPAAS

SEQ ID NO: 435013 - protein, 404 aa, unidentified
MKGPIVSIDVSKGKSDYQAFKNLNVKYTGSRSIKHTKEGFDEIVNLVREMEKKLETEVCVVYEATGVYHRVLKKVLEDNNIKQFIINPLLSAKTRKNDSLRCPKTDKLDPKSIAKTYYSHSLHNSHKQETIYHELRELSRYYEDILVHIRKDKVAFRAQLDIVFPGYDTLFDDLYGPVALAVIEKYPHPEMLQKKKINTVSKVIQNKTCHRQAVSDTMADKAIEYSKTIYSGCDKDDIEVLILQRFIKKLNEDMAEAERTIGEMIKLAQELPDFSIIKSIPGIGDNLAARIIAELGDMTRFKKKNELVAFAGLDPRISESGKNDGDHMHITKKGNKRLRCLLYLAVTCSIRLKRDDNSIKDFYIKKKQQSNPMCSKAAKTACASKLVRIIYSMCKTGELYQYNK

SEQ ID NO: 435014 - protein, 396 aa, unidentified
MNTYLLRNVSKVQPQASLLPPSPTGPTLCIGLDVHSDSIAVSLAPSDTTEVRRYGLIGGAHDDVLRLAKKLQTAHPQSQLRFCYEAGPHGYPLCRFLSRHGYHCILVSPSKMPRRPGERVKTNRRDADQLARLYRAGELTGIYVPDPQDEAIRDLVRARYQVQKQQHRARQQLKMFLLRHNLRYAGTTSWTPKHLRYLASVKLPFPEQQFVFQEMINVISDATQRLERYDGQVPRVVAGWRWEPVVKALMSLRGLALLNAVTLVAELGDLRRFTTARQLMGYLGLVPSEDSTGDERRQGGITKMGNGIARRALIEAAWNYRVPARVSRELQRRQEGLNKPITDLAWRAQTRLHHRYQHLTTLKHKKAPVAAAALGRELSGFVWAIGQIVSPHPAKP

SEQ ID NO: 435015 - protein, 365 aa, unidentified
MKKISTVRVNGNMIFKGHKLTIGVDLGDRWSCYCVLDEAGEILLEQKVATTPEAMKQIFEKIPRGLIAMETGTHSPWVSRLLKELGHAVLVAHAQKVQLITKSNRKDDRHDARTLARLARIDPELLGPVRHRSAKAQIHLTVIRARAELVSARTGLVNAARGLAKSYGERLRKCGTQQVSRELAAELSVELREVLEPLLKEIESLNERIKEYDVRMEQIARESYPQVELLKQVKGVGTQIALTYVLTLDDPQRFPKSREVGCFLGLRPGRRDSGESHPQMHISKEGDPYLRTMLVQGAHYILGPFGEDSDLRRWGLKLAARGGKSAKKRAVVAVARKLAVLHRLWVSGEVYEPLRNSQKAMRAAA

SEQ ID NO: 435016 - protein, 360 aa, unidentified
MTIVAHAHPFVIGVDTHARTHTLAVLVAATGEPVATEQFPATAAGMDRAVAWAARRTDGEMATLWVIEGVATYGAHLASVAKRAGFEVVEAARMDARAHRGAGKSDPFDARRIAAAVLSLEPEQLRRPRSDDGIRAALRVLVTAREHMTTERTATVNALTALLRVAALGIDARKPLTAGQIGEVARWRTRAEDVATSTARAEAVRMAKRVVALNEQLAANQAQIIDLIHTSKAAALLDKTGIGPVTVAVVYTAWSHAGRVRSEAAFAALAGVSPIPASSGNTIRHRLNRGGDRRLNRALHMADITRMTHDPETRAYVERRRAEGRTTKEIRRCLKRYLARQLYRNLESLHAEPNTKPQAA

SEQ ID NO: 435017 - protein, 380 aa, unidentified
MTDAITTRTSTNTTEASNPTHATERLTFGIDLGDRHSHLCVLAPDGSIVEESRLQTKPEAFRQRFTGCSPARIAIEAGSHSPWANSLLAELGHEVLVANPRKVRAIYSNDKKSDRVDGEQLARFARLDPKLLSPITQRGMPTRAVLAILRSRGALVDARTQLVNHVRGCVKPFGMRLAACSTRAFATRAAWEIPRELRRALVPVLRTIAELSERIVKFERHIEAIGRERYPETARLRQLDGVGPITALTFVLTLEDPKRFRKSRSVGAYLGLRPGRGQSGKSDPEMRITKAGDGDLRCLLVQSGQYILGPFGKDSDLRRFGLELAGRGGRKAKKRAVVAVARKLAVLLHRLWVTGADYEPLRHAEGRNPSPRARKVKPVR

SEQ ID NO: 435018 - protein, 329 aa, unidentified
MNKAIDAVGIDVAKATLSICVHYTNDSERVLTIRNTDTDINTKLLPLLDNCESKIVMESTGHYHWLVALLLSKEGYNVYVVNPILASQYTTKNIRKVKSDPADASGLARMARVADNLPKPFKSNENDLEMRKKLGLVASLTKQIQALKASVNSIKEANEIIGIRNSETIIELEDNIKSLVKVKDKLEKECINTSKQTNEKEMKLLTSIPGISEFVATSSLHWFDRNNGNAKSWIAYCGCDISVKESGTWRGKCKLTKRGNAYLRARLFGSAWGAYMHDPNFKKYYDKLRKDNRSHIESLLIIMRKLIRIMYQVLETGQPYDAKKCFLHE

SEQ ID NO: 435019 - protein, 342 aa, unidentified
MKKTDQIQDCYVGIDVSKLTLDVSVITATGYQDYHQFENNNSGFKTLFKWLKDKNFFTVERCLFCLEHTGLYTRQLISELLQKQCKVWMESALHLKRSMGMTRGKTDKVDSYRIARYAMTNNDRAVLVKLSGTTLQKLKDLLSNRERLSKAYQSIRISIQELKLVDLSMGKELEKLNSTALKGLLTCKKKVEGRMEELINQDEELKRLYSLISSVKCVGKVLATELLIYTNAFTRMENVRQLACYCGVAPFEHSSGTSVRGRTGTSNFANMHLKSTLHMAAISALRYVPDIKQYYERKVTEGKHKMTVINSIRNKLIKRVMAVVKRGTPYQENYSKINLELS

SEQ ID NO: 435020 - protein, 410 aa, unidentified
MQVLYSRCCALDVHKATVVACVRLVVDGKVVKAVRTYETTTASLTTLSDWLAENKCTHVAMEATGVYWKPVWHILADAKFELVLANAAHVKNVPGRKTDISDAEWLADLLAHGLIRASFVPETQTQELRALLRTRKQLVREQSSHVLRVQKTLEDANIKLDSVISDVMGKSGRAMIKALIAGERDPAKLARLADGRLKASPAQLCEALRGRVTKNHRFLLRLHLRQIDALDAAIAAIDRQVEAEIAPFRAAVKQLITTPGVKTLAAQVILSEIGLDMSRFPSAAHLISWACICPRNDESAGKRRSTRMRKGSPWLKTTLVQAAWAAVNRKDSYLRAQFYRLKTRRGSKKAIMAVAASILTAIYHMLKNRTTYQDLGSHHFDRRSTAQHAQRLVKRLTDLGYTVALEPRPT

SEQ ID NO: 435021 - protein, 333 aa, unidentified
MKKNWFIGIDVSKKTLDVVIYDSAKKHADTENYKQLSNSKEGYDTLLSWLKKKKAALDQIVVGLEHTGTYSFDLRLYLEKHQIDYCTFNPLHLKRSLGLVRGKNDKVDAERIAYFTYLHREELTYSKLSGSTVLRLQDLSAERKRFVTQQAEYKALLTDNKERPRTSTLLRAQNMVDVLEGEIKTVEEEMIALVGKDPAIAKNYELLTGIKGIGSVNAISTLIHTNNFEAFETARQYACYLGIAPFEHTSGTSVKGATRVSHIGAKLLKADLSQAAKSAIVWDKELKEYYIRKTMQGKAFGVVLNAVKFKLICRMFAVVKRGTPFVELNTYKS

SEQ ID NO: 435022 - protein, 503 aa, unidentified
MGPLAYVRGVEASVSLRSELRGRLWSNHFGWQSLFDVGHAPVGEHWTKSRPADQSLTGHPMSFDRLKRTQRRKRLPGHKLKPSRATLFVQNSKPHLSMKPTYFLGIDAAKHKMRATLSNRSEHVLFEKDLSVEATGLRQLLAAIKRQVKDPEQLLVLIEATGLLHLNWSAALTKAGYAVAVINPLIARRLYTLQNSIRDNKSDPIDARGLCTIGLLHGEKLLVHYRFSLRPEQFTLQRAQSVRKALRSALTNLKKTYQSLMDLSFPELGGLLQLDGVGIRQLLIQAPTPAAIAGKRLSTLENNWMVRPKAAALKALAADSMADPDLAAASGPALVALLQSVAAMEGRLHALDQQIAKLACTSVDPQTKALIETIPGFGPVNAAKTLAWLPTEILHSGSNRKVAARLQAFMGNDPRLRQSGQWKGHTKMSKRGVEMLRTAFFQSAFSAAHNDPELRAYYQCKRAQGKTHQVALSHLMRILTRRLVAVLRSGKPYQSHYNLKNAA

SEQ ID NO: 435023 - protein, 355 aa, unidentified
MSTITIGVDLAKDVFSVCSVNGPGRVLDRKDLRREAFSAYLVLLPAGSVVAMEACSGAHYWGRRCVELGLQPRLMAAQFVKPFRKSARNKNDRNDAEAIATAARQGNMRFVPLKSIDQQVRLSWHRVREGYKVEGLAIGNRIRGLLAEFGVVIAPSDAALRRWLADLDGVSLPVELIELIRGLSEHRDAVRKRMDDCDRRIEAHSWLDERCVRVRSLIGIGPLTADAVVATIGAAREFKNGRQLSAWLGLVPTQYSSGGHIRLGGISCRGDAYLRTLLIQGARSSLQRAKAVSVEKATPEQLWIRSLVARLPFGKLIVAIASKHARQLWVMLAHEVDYDAHAKYRHPLRRTETAA

SEQ ID NO: 435024 - protein, 367 aa, unidentified
MTVTIVDAAHPVTGSGNTHPDLHAAPCLVTGGVDTHLDLNVAAALDPVGGLLAVAEFPATSAGHRDLLGWLSGFGPVARVGVEGTGSYGAGLARFLRAAGVEVVEVDRPNRQARRRSGKSDPLDAIEAARAALSGRARGAAKSRDGNVEAIRALVVAKRSARSAKIQTLNQIRHLGYTAPEQLRQRLAGISRHHLAARAAGLRPATGEGADPVIAATKTALRILGRRVLALDEEKAHIDALLAGLVTQTAPQLLSLHGVGIDTAAALLVTAGDNPGRLRSEAAWAHLCGTAPIPASSGKVTRYRLNRGGDRQANRALWGIVITRLRNDPRTQAYMTRRLGEGRSKPEVIRILKRYVAREVYHRLPRP

SEQ ID NO: 435025 - protein, 403 aa, unidentified
MAAVMIGVDPHKGSHTAVVISPAEEPLGELRVRASAGQAGKLIGWAAAWPERTWAAGGAAGLGRLLAQQLVAAGERVLDVQPKLASRVRLLQAGDTNKNDPSDALSVAVAALRSTVCREVIADDYRVVLKVWSKRHRDLARTRNQVACRLHAVLCDLVPGGHQKEISAAHAARILAQATPSGAVALARAELAAEFLADLRHLDGQLRDTRKKLAAAVRASGTTLTQVFGVGPVIAGTVIGDVGDVARFPGRDHFASYNGTAPVEVSSGNRKIHRLSLRGNRRINHAIHMAAITQLRHKHSEGRAYYDKKAAEGKTHKEALRSLKRKVSDAIFARLQADARQARESGPGGQPGNGSDSSAASSHPERQLFGPATPGPDTTIRPGTTAGTPSPSKPALKKTRPAT

SEQ ID NO: 435026 - protein, 337 aa, unidentified
MTLYCGIDLHSNNSVVAVLDEQDRTVYEERLPNDLETITEVLCIYQSELAACVVESTYNWYWLVDGLMAAGFPVRLAHTSALPEYSGLKYSNDFSDARQLAHLLRLGLLPTGYIYPKEERALRDLLRRRLLLVRQRSLHHVSLQSLIARHSGQRLNTLQIKQLTKGHLADYLQGHALLGGEITHQARCWLEAAVKRVERELQRHIKPRKDYQLLQSIPGVGSVLGTTIALETGTIERFASPGNYASYARCVKSEKISNNKYKGQGNKKNGNKYLAWAFMEAGHYGAIWDPRIKRFYQRKKAKAHILVAKKAVANKLARACYHMLKHGEVFDVTRAFS

SEQ ID NO: 435027 - protein, 346 aa, unidentified
MEKISRIGMDTSKRIFQLHGVDGAEQPVVRKKLPRDRMIAFFKALPPTVVVLEACGASHHWARVLGAMGHTAKLIAPQLAKPYLKRGKNDAADAEALCEAAGRPTMRYVAVKTVDQQADLMLAAMRERLVRQRVQLANAIRGHAAEFGLIAAKGASHVAELLAMVQADAALPRLARQVFAGLAADYAHVETQLAAADAELRAWYKQNAVAQRLTQIPGVGPVVAATLVMKTPDPKAFASGRDYAAWLGLTPKDHSTAGRTRLGRITRAGDETLRSLLVVGATAVIWQTRRGATRRVMPWLASLLARKPPKLAAVALANKIARVAWKLMASGEAYDINHAAPKPATA

SEQ ID NO: 435028 - protein, 320 aa, unidentified
MSPTPKQEVHVGIDVSKRTLDVCLLPQGESFVLTNDQEGVDQLLSHLEGVSPELVVLEATGRFERLAATSIASAGIAVAVVNPRQARDFAKAIGQLAKTDKIDAFVLARLARAVEPSPSVLPDAEARLLQAILARRRQLLSMLTAENNRLQMACEGALAKRIRAHMKWLEKEISRTDSDLEEAIEASASFKENESLLRSVPGVGPVLARTLLAELPELGKLTHKRLCALVGVAPFNRDSGQRRGKQEVWGGRASVRAALYMGALVATRHNPTIKGFYKRLVAAGKPKKVALVACMRKLLSILNALMRDRAVWRCPHTLTP

SEQ ID NO: 435029 - protein, 385 aa, unidentified
MKIYVGIDIAKLNHFAAAISSDGEIIIEPFKFTNDADGFQLLVSKLESFDKNSLIIGLESTAHYGDNLVRYLVTELYQVCVLNPIKTCQMRKNNVRKTKTDKVDTYVIAKTLMIQDNLRFVSFFDLDMMDLKALGRFRQKTIKQRTRLKIQLTTYVDQVFPEIQYFFKSGLHQHAVYALLKEAPSPKEIASMHMTHLANLLKVNSHGHFTKELIVLAQKSVGANDSAISIQITQTIQQIELLDSQLEKIEAEMTDIMKFNDSVIMTIPGIGYINGGMILGEIGDIHRFSNPNKLLAFAGLDPSVYQSGNFQAKTTRMSKRGSRVLRYALVNAAWNVVRNNATFKAYYDAKRAEGRSHYNALGHCSGKLVRVIWKMLTDNVEFNLK

SEQ ID NO: 435030 - protein, 408 aa, unidentified
MNIRVEKACGIDVHKSFLVATILTCDAAKETKEFNTGLEDLINLRDWLMEKHCQRVAIESTGIYWIPIYTCLEGKVETIVANARQIKNMPGRKTDYLDSEWLAEICLNQIKPSFIPSKEIRELRDLTRTRTKTTQTMTAFKNRVHKVLEKANIRISGVLSELFGIAGLQILNALLDKKNIDEVLKKVKRIGKKKAAIKEAVRGELSQTDIWLIRECLETIDFLKRKINLLDSMINQRIENTKKQDQMQILMSIPGISFTSASAILAEIGDINVFPNPKSLVGWSGLAPSLNESAGKSSNGHITKKGSKYLRRMLVQCAHVIAGHKPNRLRFFLQRILMKKGKKIAIVALARKLLSIIHHLLKNNEKYSEDSLKPKQMKRLKFQSISEFSLDEMIEIISRAGYTVDKGS

SEQ ID NO: 435031 - protein, 414 aa, unidentified
MGLSKWVGRAIGLDVHRDFCVVAICDEGEVRSGARVPSTPEGLALFAESLLATDRVALEVTGSCWEVARILEPHVDRVIVVSPDDTGIAQARAKTDRLDARTLARLLWSGELESVWMPDERCRVLRRRLARREQLVHSRTRAKNEIHAVLQRRLQGKPPCADLFGIKGRGWLAGLELPLEERESVHAGIRHIDFLDAEVTEVERLIAQQALEWPEICRLMTVPGVNLICAASFIAAIGDPYRFFTSRKLVAYLGLDPKVRQSGDAPARSGRISKRGSASARWALVEAAWSVVLQPGPLHAFYARTRARRGHGKAIVATARKLAVLFWCMLTRREDYAHQQPSLTKKKLRRLEITAGAPKYAKSARGVWSANDAVREAERELARQAETSYKRMVQDQRAGVPARKAGASATPERA

SEQ ID NO: 435032 - protein, 350 aa, unidentified
MRHFIGCDAHKKYSLFVAVDEAGETKPAVRVNHDRESYRTFLRGLPACSPIAVETVGNWYWIVDEMQQAGHQPRLAHARKAKLMMGQLDKTDKLDARGLATLLRNGTLPEVWIPSREIRDQRELLRLRMTLVGMETRLKNRVHAILAKYALRLEVTDIFSQKGRRLVLEHLENLPEETRQVVRQHLELLESTERQKKVTEQRLQKIVQQRDDVDLLRTLPGVGWILATVLALEIGDIQRFNQAPELASYAGTVPRVHSSGGKTRYGRVHPDVNRYLKWALVEAGNLIVMQQQRLGDIHAVRLYRRLRARKGHAKAVTAVARHLAEAAFWVLKRKQPYKEPQGCRVSSTHR

SEQ ID NO: 435033 - protein, 464 aa, unidentified
MKLPPNQGHNQPVPTEKVSSTLEEINQNAAGIDLGGGEHWVCVPADRTDKNVRRFGCFTPDLIAMADWLMECRVDTVAMEATGVYWIPVFQILEAKGFDVKLVNAHHVKTVPGRKTDVLDCQWLQKLHTYGLLSGSFRPEDQVCVLRSYIRQRDSLIKSASTHVQRMQKALIQMNLHLHKVISDVTGLTGMKIIKAIVAGEQDPQVLATLKDPRIKSSTADIAASLTGDYRREHLFVLQQELTLYEVYQQQISAVDAEIEKCLASFQPQTLDEPPTTPRKRRKKPTANHPNFDLHKYLYRMAGVDFTLINGLDALTVQTILSEVGLDPKRFPTVKHFTSWLGLCPGQKVTGGKVKSSKTRNVVNRAANAFRMAAFSLTHSRSALGAFYRRLRSRLGAPKAITATAHKLARLFYQMWITAGQYSDPGMDYYEQKYQELMLKNLQQQAQALGLELIPLSHPTECVS

SEQ ID NO: 435034 - protein, 467 aa, unidentified
MVCFNPSTKLTRVRPAELIVARSKELSTRRKFVSYFAPLVGRGSDEERLLREVGTGMQVVHERCCGLDVHKKTVVTCILITLANGEVQRHIRTFSTMTAGLLALSDWLESLAVTVIAMESTGIYWRPVFNLLEEGRSVILVNAQHMKAIPGRKTDIKDSEWLADLLRHGLLKASFIPPAPIRELRDLTRSRKSLVQERAREVNRVHKVLETANVKLSSVATDVLGKSGRDMLSALIEGTTDAQILADLARGKLRKQLPQLQQALDGRVQAHHRLLLKHILAHIIFLEETLEQLQQEIEQHLGPLEEAMTLLMSIPGIAALAAAAILAEVGDDMTRFPSAKHLASWAGVCPGNKQSGGKRLSGKTTQGNATLRAMLAEVVWVISHMKDNYLSAQYHRLARRLGKKKAVVAVSHSLLVIIYHVLSTKQPYSDLGADYFEQRDSTRLTQRSVRQLEALGYTVTLVPKEVA

SEQ ID NO: 435035 - protein, 351 aa, unidentified
MRKIAYLGMDVHSNHCVLGDMDAKGNFRGAQTFCTSEQSIIKALQDVKATEKYLTLEEGNLAYWVAQVAAPYVTEVIPCDPKENALIYKGSNKNDKVDTKKLCRLLRLGELKRVYHPETDERAIFKAAAQHYIDLRDQQISLKQKIKAMYRHWGVIDVAGEAVYSPKKRDNYLCQIKHLAIRNEISRLYYLMDQTESMQERALKAMKQLGRKYPEIKQFQKMPGIGEVLAHIFDAFIQTPHRFPDKHKLWRYSRLGVTDRSSDGKPLGFKRLDRSGISELKSLTYQAWMSALRSDNEVKRFYKNSLERTFSRVHARLNTQRKIIATMYGMWKRGEPYNPKVFLDSPQSDAV

SEQ ID NO: 435036 - protein, 366 aa, unidentified
MKIIHWIGIDDHADKWTIAQYKGNDEKPAKEFELVPDETGYRKLIKFLKELDGEVRIVYEAGPCGYELYRRLKKAKLQCDVAAPSLTPRKPGERVKTNRRDAAKLGKYLRSGMLTLIAVPDERRESLRDLVRARHAVQKDVVSIRNQIVKFLLRYGHRYRQGKTGWTERFWAWVGQIKLEGEHGQFVLDEMIRTHTQRLERRKRYDEAIEAASKQPEYAPYVTALSVLRGIDRLSAMTILSELGDLRRFPTAPQLMGAIGLVPSESSTGDTTSRFSITKTGNAHVRHIAVEAAWQYQRRITTGPTIKRRRKDQPKALVDIAEKCDLRLNRKFHRMTSRGKRSTVAAVAVARELMGFIWAIGQIIHP

SEQ ID NO: 435037 - protein, 354 aa, unidentified
MKHLQLKEGDRLRRQCIGVDISKKKFTFCLCQSTEQDLHFYTKPKEFENSESGFKHLLEWSGKEVESSVPYSFLMETTGCYHESLAIFLARKGQTVFVVHANKAKNFARLNGQRTKTDLVDSRMLAMMGCDTTNLKAWPLPDEKYLHLREMSRLSEQLEKTRTQVLCRMEAVTHSGFVDKTVLNRHKALLKSIERLQTANEKEMDELVDGDLVMHPGVQNMESIKCVGRKTAVMVVAETLGFHQMTSAKQVASYAGLDVKKEQSGDTDKKGHMTKRGNAHLRAGLYFPAMVASWSNPQLMDDYNRICASHPQSKTIALVALERKLLCLMYSLWKSGKRWDPEYGQNKRQEEAMS

SEQ ID NO: 435038 - protein, 352 aa, unidentified
MQDESHEGAVHIQITTIGLDIAKNVFQVHGIDGDEKVVVRKQLRRNQVLQFFDELPPCLVGLEACATSHYWARELARLGHEVRLMPAKDVKAYIKRNKNDAADAEAICEAVRRPTMRFVQIKSADQQAQLMQHRARDLLMQQRTQLINAMRSHLAELGIIAPQGREGVKELLAIIAHDDNRHLPVDARASLVVLAAQLQALQTMIGAIEKRIVKQHRASKESKRIQTVPGIGEIGASAIAATVTNPRIFRSGRDFAAWIGLVPRQMSTGGKPKLGPISKQGDRYLRRLLVVGAISVLRQAKLHPGKFPWVTQMLARRPFKVVAVALANKMARTAWALMMSGKTCRAARYAAA

SEQ ID NO: 435039 - protein, 343 aa, unidentified
MTNYVGLDVSQKTTTLCIVDGEGHRQWRGECVTSPEHIAQAVLQHAGAKASIGIETGPMTPWLVHELRSRGLDVICLDARHARAALRMQLNKTDRNDAEGLAQIMRTGWYRAVHVKSFDAHRARALLGARLQLVGMVTRLSNHIRGVLKTFGMLPGSVRGRSFAERVELLVADRPDVAPIVRPMLAAWSKLREQVTAFDKAVRTEVKQNRECRLLMSVPGIGPITVLAYVSAIENPDRFRRSRLVGAHLGLTPRQYQSGDVDRSGHISKCGDTLARLCLYEAATVIMTRIKRPLDLKVWATKIAKRSGTNKARVALARKLAVILHSIWRTGEPFRWSPRETVA

SEQ ID NO: 435040 - protein, 413 aa, unidentified
MDVLHPRCCGLDVHKSSISVCILLYVSGRVQKHQRRFTAMTQDLQELAAWLRQFEVTHVAMESSGVYWKPVWNILEGQFTLLLVNAQHIKNVPGRKTDQKDAEWIAQLLQHGLLRPSYVPEEIIRDLRDLTRMRASLSQEISRISSRIQKVLEDANVKLASVATNVLGKSGRAMLEAIIAGQDDPEQLTALALGHLRAKAPQLRLALAGKIREHHRFLLKRLLHQIDCFEHEIELLDERLEEIGKQGPELANAVARWDTIPGVDRIGAWALVAEVGNNIAQFPSAEQLASWAGLCPGNHESAGKRLGGKTRKGSPWLRRMACQCAWAAARTKNTYLSAQFRRLASKRGNKRAIIAVAHSLLIIGYYLQEKQSSYDDLGGDYFDRIHADGLKRYLVRRLEQLGHKVTLAAAEVA

SEQ ID NO: 435041 - protein, 372 aa, unidentified
MNYNTVYVGMDVHKESFTLCSMTIEDEKASHYQKTEADYKKVLKYLEFLRTIYGGNAKFICGYEAGCLGFTLYHQLTSQHVECIILAPTTMLEQRSKKRIKTDKRDAEIIAKCLAQHNYSPVHIPTATDEQIKEFLRMRDDHKLALKKIKQQILAFCLRHNYRYDGNSHWTAAHLCWLKSLQPEALYKETLDEYLLTYTTLNDKIERFDKRIEELASKDEYKESVQKLRCFIGVRTHTALSVLVEVGDFNRFASAKNFASYLGLVPGENTSSDDRNLLGITKAGNRHVRLLLTEAAQSYARGQIGYKSKDLKSRQSGNSVQVIGYADKANERLRRRYYKMVLGQSKKHNVAKVAVARELACFMWGMMTEHIS

SEQ ID NO: 435042 - protein, 389 aa, unidentified
MEARTVNNLPPAGIDDDAVRCLIAIELSKKSWIVAVNTPLSDKISRHTLKACDGKELLDLCERIRTRAARETKKRVEIVSCYEAGYDGFWLHRLLEAHGIRNYVIDPASLQVDRRARRAKSDGIDVEKLLRSLMAYLRGEPKVWSVVRVPSVAEEDDRRLHRERGRLINERIQHVNRIKGLLAIHGIYNYQPLRRDRMQQLERLRTADGRTLSPRLKAEIRRELQRLELVIGMIKTIEAERDAIASTKTETEHTSAKKIQDLVKIKSIGPEFATTLVGEVFYRSFDNCKQLASYVGLTPAHFQSGAMCRDQGISKAGNAKARTVMVELAWLWLRHQPDSPLSVWFRERVGKLKGRIRRITIVAVARKLLIALWRYLETGLVPTGAALKV

SEQ ID NO: 435043 - protein, 427 aa, unidentified
MKKADLLSTLFVGIDISSRENVVAFLDFESIKPLCSFAVANNQPGAFELAQKLAFFLRSHPDLSRLMVALESTSFYGIHIANYLSSCQLLVPFHTTVFCLNPKLVANYKKSFLDLGKNDYIDAFVIADFARVGRITSKPWRGSQFLALQRLTRHRLHLANALTREKAYMLSNIFLKFSEFSLLDDAQQPFSNTFGATASSVLTDFLSTEEIVAMPMETLVNYLCQKSRHRFADPAKTALLLKQAARNSYRLDQCLYEPLTISIASSFTLISTYTAEINAVNKAIEKTLRGIDPNAYQSLLSIPGIGPVMAGGILAEIGDIDAFKSQDALAKYAGLVWCENQSGNFRADDTRLSKAGNAYLRYYLIEAVSHVKNHCSEFAAFYQKKYDEVKTHQHKRALALTARKFVRLIFGLLAKHQLYSQSGVNRS

SEQ ID NO: 435044 - protein, 396 aa, unidentified
MTKFNAESTSIHTVGAAVESKQSSFHTAYVGLDVHKETIAISVADSGRQEPVYEGEITNTPKRVERKIQQLSERYGGGLLQFVYEAGPCGYGLYRQLLASGHDVQVVAPSRIPKAPGERIKTDRRDAIKLARLARSGDLTPVWVPDTEQEAMRDLTRARDDMKAQERKARQQLNAFVLRHGHHWPKGRSRWTQTHFNWLESLRFEHDWQQVVLQEYIDAVRAATRRVADMMAQMERALPQWSLAPVVEALVALRGIDKLAAMVLMAELGDISRFDSPRQLMGFLGLVPSEHSSGSRRRQGAITLTGNSHARRMLVESAWSYRFPARQTGHLKRKAANAPEEARAVAWKAQKRLCGRYRDLTRAGKNTKLVCVAVARELAGFIWDIVCRVMPAPQTA

SEQ ID NO: 435045 - protein, 391 aa, unidentified
MTYVGIDVAKDKHDCYIVNSDGEILADVFTIPNDQIGFNLLFQKLQSVAPDLSKVKVGLEATGHYSYNILGFLLDKGLATFVINPLHTNLFRKSTSLRRTKTDKVDARTIAAMLASDVVLTSYTATSYHNEELKSLTRYRFDKVRERAKLKSSVARLVNILFPELEKHVSTLHMNTVYMLLSEFPGAELIASCHLTHLTHLLSVSSKGRYNRDKAIEIREAARNSIGSVMPAKSLELKHTIHLIEILSEEIDEIEIAIKEILDADPSPILTIPGISYRMGAMILAEIGDFSRFSNADQILAYAGLSPSTYQSGKLDNAYPHMEKRGSHYLRFALFNATRFVCNWDPTFAAYLAKKRSEGKHYYVAVSHAAKKLVRLIFALVRTGQSYSPAT

SEQ ID NO: 435046 - protein, 415 aa, unidentified
MEIVYPRVAAIDVGKKIVAVAVRTPGDQPGQRHQQLRKFKTFYPVLREMVGWLVAQGVTQVAMEATGVYWRPVFHALCEAEQLEVLLVNARHVKNVPGRKTDAKDAEWLAELCEVGLLRGSFIPPAEIAAVRELTRYRKQLTQARTSELQRLCKVLEDGGVKLDSVASSITTVSARAMVEALIAGERDARVLADLARGVMRKKIPDLAMALQGRFGAHHALLARMHLEHVDQLSGMIQRLDGEIDQVVAPFSEQVGLLRTIPGIGERTAQVLIGEIGVDMSRFPTADHLASWAGLCPGNNESAGKHQRARTRKGNREVREALVEAAWAAGRTGTYLGARFRRLHRRFGKQGGSKAAVAIAHNLLVIVWFVLHDGAGYRDLGADWFTRHDNPDAKKRRLIRELQVLGYTVDLTPAA

SEQ ID NO: 435047 - protein, 357 aa, unidentified
MEYGAIDLHKTQSQIRIIGKTGEVIDQRIPTTRDRLTTVFWGRPRMRILIEASTESEWVAQHLEELGHEVVVADPNDSAMYGHRSRRIKTDRRDVAALTEACQQGTYRLAHRRSARQHEVQCRLNVRTEMTQARTRAISVARAIPRSGGLRIPSGNAETFAARLFGLELSPAMTATLSPLRNIIEVCDDELAAANEQCETLVAGDPMVKRLTTLPGIGPITATAFVAGLDTVSRFERVGQVTSYLGLVPHEYSSGEKQRRGRIVRSAHPHLQSLLVQAAWRMSRSKDPRTESFRTWAQAVARRRGKKVAVVALARRLARTLFAMWRDEADYQPRRIRARSAQPVADATAKTGASAPM

SEQ ID NO: 435048 - protein, 414 aa, unidentified
MALKIVYPICCGIDVHKTFVVACIASTIKGVTTYKRHRFSTYTKGLNELSQWLCENNCKDVCMESTGKYWIPVFNVLEASCNITLAHPKYVKAIRGKKTDKKDAKWIADLFKHDLVAGSFMPPLAIRQLRDLMRYRFKLTNFMSSEKNRLQNSLTVSNIQLGNVVSDTFGKSSMNIIEKLLKNPLDTSFDIEPLIHGSMKSKLPELELAIDGFITPEQAEKLKVMKQHYEDLQSRKADLEKIILSLAASYTEEMNLILTVPSFKNIFSAIAVVSEIGVNMDVFPTAKHLCSWAGLTPTNNESAGKKKSVRISRAGCYIKPLLVQCATAVVKSEKHPEIRNRYLKLKKRRGHKRAIIAIARMLLTAIYNILKKKEPYNPNLYKKADVLPVNREITVEQALLLAKSQGFRIITVAT

SEQ ID NO: 435049 - protein, 438 aa, unidentified
MSNKVIFNLDELFISVGIDVGADFSWMSIALPNQQFVGKPYKILHNSIDSLTTAVSKIKEAEELYSLESRIFLESTGIYHYPLFCYLRDKGFNCSVINPIITKNSTNINIRKVHNDRFDSKKAALVGLKPDLKVSLMPSDLALNCRNLCREYYDLMDNRSAYVNKLQGELRIAFPQYLGIFSKVTINTSLTLLETYTSPSAFLKVDKQEIIDIIKSTARFGLTYAQNKYNAIIQAATDANQFGYIIDSNIKRIRLYISFIRKYDEEINSILESLHELVDANEDSDFVKQIHLIETFKGAGFLSAVSIMGEIGDFSAFSKPKQLFAYFGLDPAVKQSGKFEGTKVQMSKRGSAIARRVIHTLTLQSISISRNREAKNPVLREYYLKKCDSKPKLVAMGAVSHKVCNMIFAILRDNKPFKIIAPQEHIKQYNSAKCDIAA

SEQ ID NO: 435050 - protein, 354 aa, unidentified
MSQTPNTAIAVIGIDIGKNSFHVVGHDSRGAIVLRQKWSRGQVEARLANIPPCLIGMEACVGAHHLSRKLASLGHDARLMPAKYVRPYSKGQKNDFNDAEAIAEAVQRPTMKFVATKTAEQLDLQALHRVRERLVSQRTGIINQIRAFMLERGIAVRQGIGFLRTELPTILATRTDALSPRMLRVIEELAGDWRRLDQRIDGLSGEIEALARQDQACSRLMTVPGIGPIISSAMVAAIGTGDVFSKGRDFGAWLGLVPKQISTGDRTILGKISRRGNRYLRVLFVQAAWVVLVRIKNWERYGLKSWIEAAKRRLHHNVLAIALANKLARIAWAVLAKGRAFELTRTDDAGVRPA

SEQ ID NO: 435051 - protein, 465 aa, unidentified
MNTINRSTGTANAKEQTGRGTSGLDVINPHAAGLDLHKEIITACAPVIVGDTRHPVRTFGTYTHALRDLATWLKKQGTTTVAMEATGVFWFPVIEILRAEGLEVLLVNAREVRSVKGRPKTDKLDCEWIRRLHACGLLRGSFIPDTETGALKSLWRHRMNMEQEDARAIQRMQKAFQIMNIRLDMAVTDIVGETGIRIIEAILAGERDPHELAKLRDPRVAKSEREIATALEGNFKAEQLFIIRENLAHHRFLQGRIAETDNLMATRMATMEKKASASELPAATKPDRSNHGEALTREHLYELLGVDLTQIDGVGVLTASSFLVNAGRDMSPWATEKHFAAWLGLSPNVKQSAGKTRSGPTRQTASALAHALRMSALTISRVDSWLGAYCRRLKGRIGAPKAITATAHKLAIIFYRAVKEGGVVKRLDAEAYEQAHRERTLKNLRHRAAHFGFDLMPKDIVPVMA

SEQ ID NO: 435052 - protein, 340 aa, unidentified
MRVLYTGCDLHGNNNLIGIIDGEGKRVFKKKLSNDLRLVRDTLKPFEGELVGIAVESTYNWYWLIDGLMEEGDQVHLANPSAIQRYSGLKHVDDRHDAFWLAEMFRLGILPEGYIYPRQDRAVRDLLRKRGHLVRLRTSLVISLQNILSRNLGTSVNVNALKVLKEDRISVLLEMNEDLALAGRVSKEAIDHLTRQIRKIEGVVEQKVKLREEYRYLLTLHGVGKILSLIIILETGPISRFETVGEYVSYCRKVPSHWTSNEKHKGSGNRKNGNKYLAWAYAEASELARGYYPEPQAYYQRKMQKINSAVAHSALAHQLARAAYYVMRDQVPFRPEKLFG

SEQ ID NO: 435053 - protein, 340 aa, unidentified
MNRIGLDAHSASFTMAVVNEAGKVTRCLSRPTSASNLIELVSAVAGPKELVVEESTVAQWVKETLDPYVDRLVVCDPRRNRWIAKEEFNDDRTSAIKLAQLWRGGYIKPITHPSAEEAPLRQSFGHYADLNEQVRRFKNKLKATYRQAGVAVTGHRIWEEDSHAEWLARLDGSPALRRQAQHLFVLIDEIEQMKQECLKSMMRTARKDQGYRRLLQMPGIGPVVACGYIALIGTPHRFSRKNKLWRYAGLANTLHVSDEKVYQDRPSPSGNRLLKWVVMQHFMGAVERTKKPNVFKGRYERLCQRGLADKVARRHVCRSLLSVVRAVWMKGEPYRETPLT

SEQ ID NO: 435054 - protein, 451 aa, unidentified
MAKTFKSISAQDITPTHHNAAAIDIGAKFQVAAVDPQRAAEPVRSFGTFTEDLGRLADWFAECGVRTIAMESNGVYWIPVFEILDQRGFDVVLVNARDAKHVPGRKTDISDAQWLQRLHAYGLLRASFRPKGEIATLRAYLRQRERLLDYTAAHIQHMQKALMQMNLQLHHVVSDITGLTGIAIIRSMLDGERNPETLATLHDRRCQASVDTIRQALIGNYRDEHVFALRQAVDFHDFYQTKVAECDSEIQGVMRRLRDAAAAPAAKLPPARSRKKQPNFCGFDVRGLLHGILGCDLTQIDGLGPYLALKLVGECGTDLSAWPTAKHFTSWLSLAPSNKISGGKILSSRTRKSKSRAAALLRLAATTVGRTETALGALYRRLSARVGKSKAITATARKIAVLFYNTLLHGMVYADPGASAYEERYRKRVLANLQRRAKSLGYVLHEAPAPG

SEQ ID NO: 435055 - protein, 341 aa, unidentified
MSDYSYFCGIDLAKNHFSLHAVDQNGKVILHKSVTRSKLLTTIANMPLMRIGVEACGGAHYWARTLNKLGHDVRIMAVKYVVPYRTKGKNDLNDAVAICEAVQRPSTRFVPVKSPEQQAILSVHRMREHWVRERTALMNRMRALLSEFGLIIPVGRSSLMKQIPLMLEDAENELPHLARTVIADAYHHLGELNQRIADTEQVFDSFAKVSANVQRVMKVRGIGPQTATAILASIGNGSQFDKSRDFSAWLGLVPKQYSTGGKPRLGRITKHGDKYLRTLLVHGARTVIANLGDKQDKLSQWCRGVLERRGMNRAIVALAAKNARIIWSLLHNQTEYENYAA

SEQ ID NO: 435056 - protein, 347 aa, unidentified
MTIVEAPPGITGGVDTHLDKHVAAALDPLGRLVGTESFDADAAGYKALLVWLEDFGEVTKVGVEGTGSYGVGLSRFLRRKGIEVVEVNRPNRQSRRNQGKTDSLDAVEAARAAISGRASGVGKTKDGPVEAIRVLVVAKRSARQARVKAIVQMRHLGFTAPDQLHSRLKGLSVTALVAEGAKLRATKSADTVTAATKASLSSLAHRIQGLDQEIAELDEKIKSLLLATAPDLMARFGVGPDTAASLLVAAGDNPERLHSEAAWAHLCGVSPVPADSGKNAGHLRRHTGGDRQANSALWRIAMVRIAHDPETTHYFERRVKEGRTKRDVIRILQRYIAREVYRYLPRG

SEQ ID NO: 435057 - protein, 274 aa, unidentified
MDRTTYGLDIAKNVMQLHWVEAESGEIGRKKLARAKLAAYFAQLQPVRIVMEACGSAHHWARVLGGLGHQVELLPAVQVRPFVRSHKDDAADARAIWLAAQQSDIRRVPQKSVEQQAVLALHRTRQHWVSVRTATVNSLRGLLYEFGVVLRGGRQAGLKALAEQRAAIDAQLPPTMRTLVDAQLQTLAQIGQRIDALEHEIAALHKQLKGARALIGVPGIGVLGSTALAATLGDAKAWRSGREFSASLGLVPAHAGTGGKVRVGHLSKRGDPYP

SEQ ID NO: 435058 - protein, 376 aa, unidentified
MGIDVGKSSHWACLVTREGEVALNRRVRNSEGDLDGLFSQVACDTIVVVDQCRNIGLLAISRARLAGLDVAYLPGLAAHQAARLFAGDAKTDERDALVIAKTALGIPDALLPVPEPDEALEAARSLAAQRSHMVTCATRDKNRLRSILLESCPAFEALADLGDRHWLNMLEKLGGPWGCIDAGKPAFGAVTKGANRARMDAAWNAAMASTRPSKRRVDAENPQVRMLARRIREALEEADGIDREIAALPAGDGTYECLVTIPGIGPRTASELVIGVNIEDFPDHDHLASYCGIAPRNRQSGTSISSVSASRQGNRRLKNLLIFSCNSLVRSENRFGEYYRACRGRGMCHGEALKAVARKRLKVIYAIMRDKVPYSA

SEQ ID NO: 435059 - protein, 607 aa, unidentified
MSTIASLDRIGVGIDTARYGHRVSFLRPDRKPAAKPLTVMENRAGYQALQDRLNQLHEQHPTAYFHVRIDAAGQYAVNLELFLRGLKLPMTISVGEPKRNKDYQKAHFPKRTTDDTESQAMARFAVIELPNATPAPSTPMILLREVAGRLQSKVKQTTQAINRLHNLLARVFPELATLTEDMSVGWVLKLLDKYPTAERIAQAQIASLEKIPYLSVEQAHAVHQAAKQSVASLRGELAEALVRDLVNQLRLCQKAEQHLHQLLLEAFADLPASPHVQVLTITGIGEATAAALVAKIVDINRFATPNHLVSYFGVFPEESSSGVDKHGKPLPPGTLIMSPKGNDLVRFYLWNAARTAIQHNPAIRALYRRLRAKGKRGDVAFGHCMRKLLHLVYAVWKTDRPFDKEHFPWEGSSDTQPSATTPPSADAGTTPSANEEAVGHKRDLPAEEVVTTADSTLEPASPAVKPASQSAAPRPKVDFACVREHVTMEQVLQHLGYFASLRGRGRQRRGPCPVHSQPTAPERTFSVHLGKNAFQCFHAECAVKGNVLDLWAAIHRLPLYEAALDLAETFQVPRNREEEPVKGTSSPRTATAKTSAPAAATATDGAK

SEQ ID NO: 435060 - protein, 333 aa, unidentified
MEVVYQCCCGIDVHKKSIVACLLKGGERELRDFGTTSVEIRRLAKWLSEAGCEMIAMESTGVYWKPLYNLFEILDLDAMVVNASHMKALPGRKTDVKDAEWIADLLKHGLLKASYIPDRAQREQREIARYRKSLIEERARELNRLQKVLEGANIKLASVVGDINGKSSRRLLNLVAGGETPEIDEVAQLIHHSLRPKLDQLMAALDGIVTPLQRKLIARIMDHIDDMTRRIADMDGLIKEYMAECEAAIAAIDELPGISRHSAEMIIAEIGRDMSRFPSADHLSSWAGVSPGNHMSAGKQKHGKTTKGNKALRTILIQCAKAAVKNKDTYLNP

SEQ ID NO: 435061 - protein, 373 aa, unidentified
MSKVRFLGLDVHADTIAIAVAEPNGEIHSLGTIPNRIESIRKFIGKLGDVAQLRACYEAGVTGYALYWQLTQLGVACEVIAPTLIPTQAGDRVKTDRRDAEKLARHYRSGNLTAVWVPDAAHEALRDLVRAREDAKQDQLRAKHRLSKFLLRHGVRPPETVKKAWTQKYMVWMKDHVRFDQPALQATLADYMHEVDRGAERIQRLEKAIDEAVDAAPGSIRAVIAGLQALRGVAQMTAVSIVSELGTLSRFKNPRQLMSYSGLVSREYSSGNRIQRGSITKTGNAHLRRVIVEAAWAYRHKPWVGGALLKRQQGLNQSVKDIAWKAQWRLTTRYRKLSARGKNKPQVITALGRELLGFVWAIAICTETQATTC

SEQ ID NO: 435062 - protein, 375 aa, unidentified
MVVYDEMVSPRYPNRRLCAMMESKQLTINVVREETEMNITTVGLDLAKNVFHVVCFDERNKEVKKRMMRRNQVRHFFTQLSPCRVGMEACATAHYWGRELRALGHDVKLVPPQYVKPLVQGNKNDYNDARAIAESLDRPKVSFVAIKTIEEHDMQAIHRMRSQCLRDRTALSNSTRGLLGEYGVSFSKGLAVLRRKIPELLEDADNELSLRFRNLLARRYEQLVEIDEHIAFYTKELELLSKQDDACQRLQTIPGFGPIVASAFRSTIGDGRAYVRGRHAAASLGLVPRQYSTGGKNVLLGISKRGDKYLRKLLVHGARTVVLHAANRDDPLSRWINRIRERRGYNRAAVAMANKMARMGWAVLMYNTSYEPTLA

SEQ ID NO: 435063 - protein, 418 aa, unidentified
MSKTLYVGIDPHQKENFCCLLDQEGNKIINTFSVANNLEGAKELEDRIDLVMKEHCFTELKAATEAVSFLDLHIVDYLASSKLLSKYSPSIYQFNPKITSGFKKAYPDKDKTDAIDAFVVADRLRFGRLPEPYEDSQPYFPLKRLTRYRYHLVSNISKEKNYFLTHLFLKYSSFSDVKPFSNVFGKAGIAVITEFFSSDELASMDIEELVEFLIKEGKNRFSNPEAVAQKVKQVARESYRIRPALANSVNLILSSTIENIRALTSSLKEVNEAIANELKAFPNTLESVKGLGPVYSAGIFSEIGNIKRFSSHAKLAKFAGLTWRKTASGNFEAEETYMTKTGNEYLRYYFVEAANSLRMHNEEYRLYYESKYKEVPKHQHKRALALTARKLVRLVFALLTKNRLYQENEAFSKNGVNF

SEQ ID NO: 435064 - protein, 402 aa, unidentified
MKKSSRMSVIHPHAAGVDIGAEFHVVAVPPDADAAPVRTFQRFTGDLHRMSGWLKTCHITTIAMESTGVYWLPAFEIPEAAGFNVILVNARDAKNVPGRKTDVNDAQWLQKLHSFGLLRASFRPEHDISVLRSYLRQRERLTEYRAAHIQHMQKALMQMNVQLHHAVSDITGVTGLSIVRAIVSGERDPSVLIQYRDVRCKKTPEVLQQALTGNWQPEHLFAPEQSVAFFDFYQEKIRECDDQIETSLLQLSTGTEEPEGVLPSARHRTKQPNQLSFDVRPLLWKITGADLTQIHGFGPYLALKFVAECGTDMNRWPDASHFTSWLCLSPGNKISGGKVLSPKTRRSSSRIAAALRLAATTIGRSDTALGAFYRRLSSRIGKAKAVTATARELAILFYNALK

SEQ ID NO: 435065 - protein, 370 aa, unidentified
MLDTTTFVGLDVHARSIKAVSLDVMTGEVRAATFGYDAGAVAEWVRSVDPRARCVYESGVTGFDLQKRLSGLGVDCVVGAVSKMIKPSADRRRKNDRNDAEFLARMLSVGNVVEVWVPDDECEAARDLTRALEDARDDLSRAKQRLSKFLLRHGLAFDERTPTGRRKGNWTRAHWSWIESIRFAEGADNEALAYYVDAVRRAAEEKARLEGLVEAEARKPRWRRRVDSLRCLKGVDTASAADLVFEAGEFSRFRNARSFAAWVGLTPSEHSSGESDRRGAITKAGNKHLRKTLVEAAWHYLTCSGRPKGLAKGQAPDRGARRHAAKGVRRLVERREALLARGVHGNKANVATARELACWVWAVGLMAEEA

SEQ ID NO: 435066 - protein, 405 aa, unidentified
MHEGRFAGVDWASEEHAVCVNDAEGRILEGRRYRHDERGIRALCARLLELGVELVAIERPDGLLIERLLDAGLSVIAIHPNQVAAMRPRFSNAGGKSDSFDAFVLAELARTDSHRFRILVPDSDATKTLRALTRAREDLVAHRVALANELRAQLECFWPATAGVFADIDSPIALAFIKRYPAPADARGLGEQRLARFLARHGYCGRRTPAELLTRLRGAADGRADTLEAEARRQIVLSLVAALEPVVARIAELTSEIRGALHDHADGETFRSLFRDPKSAITAATMLAEIGDCRARYPTIAALAADAGQAPVAVESGKSKRARFRWACDHRLRNAIGTLADSSRHHNPWAADIYQRARARGCTHPHAIRILGRAWCQVIWRLWQDQTAYDQAQHTALQHLLTARG

SEQ ID NO: 435067 - protein, 369 aa, unidentified
MKKNNKNRKEDARRNALQAKSRKTKLTVGIDLGDEWSQCCFLDEEGEIVEGCRVKTTREAMKTRFGELKPALIAIEVGAHSRWVSQLLSELGHEVIVANARELRAITGSDRKSDKVDAEKLARYARVDRRILRPLRHRGEEAQLDLLVIRGRAVLVKTRTQMVNSVRGIVKSFGYRMPKCSAEKFAQLKNLVPAGVKESLAPMMEALEQVQKKIEEYDERVKKLATEKYPETKVLRQVWGVGEITTVSFVLTIEDKNRFGKSRDVGPYLGLRPRRSQSSESDPELRITKAGDCFLRSLLVECAQKILSEKAPDTALKQFGKRIEARGKKKAKKRAIVAVARKLAVLLHKLWVTGEVYEPFPGARERKAA

SEQ ID NO: 435068 - protein, 377 aa, unidentified
MKKVRFIGLDVHADTIAVAVAEPAGEVRSLGMIPNRPESIRKLMKKLGPPASLRVCYEAGPTGYVIYWQLTALGVPCEVVAPTLVPTKAGDRVKTDRRDAAKLARSFRAGDLTAVWVPDAAHEALRDLVRAREAAKKDQLRARHRLGKFLLRHGRRPSTGMTAWTQRHLAWVRQVQFEHPAQEATRLDYLHEVDHAVGRIERLERAIDAAVKTAPAGMRAVIEGLQALRGIALVSAVTIVAEVGELSRFTRAPQLMGYSGMGACEDSSGPRTRRGGITKTGNAHLRRIAIEAAWAYRHRPAIGGTLRKRQATLSEEVKAIGWKAQLRLHARYRKLLGRGKCQQHVVTAVGRELLGFIWAIGVTVERQHRKTSSSIAA

SEQ ID NO: 435069 - protein, 345 aa, unidentified
MKITTIGIDLAKSLFQVHGVDERGKAVLRKQLKRKDVVKFFANLEPCLIGMEACGSAHYWARKLSELGHTVRLMAPQFVKPYVKTNKSDRNDAEAICEAVARQNMHFVPVKTGEQQAVLALHRARQGFVKARTAQANQIRGLLAEFGIVIPQGIGHIAKRLPEILEDGENALPGMMRELLVRLGENLKEMDKQVGELERQIKLWHRENEPSRKLEAIAGIGPITASAFVATVGDAKSFKNARQVPAWLGMVPRQHGTGGKANLGKISKRGDVYLRTMLIHGARAVIAQSERKPDQADGWLKKLLARRNKNVAAVALAAKNARIAWALLAHERGYQRDYVAKRTSA

SEQ ID NO: 435070 - protein, 358 aa, unidentified
MNRNTGMCAGQVIGTMNGQQVVGLDIAKKVFQLHTVNMGTGEIVNVQIKRTKVQEHFANCKPCLIAIEACGSGHYWARELQALGHTVRLLHAKIVRPFVSGNKTDATDARAIWLAVQQPRVKFVGVKTVAQQATLTLHRQRESLMKMRIMQTNALRGLLYEFGAVFAKGKKALFSEIESTLEALADTLPKVVVDSLREQVLRIKTIEADMLTIEKRLKLQLRQDPQMQRIAKIPGVGLLTATAAIATMGDAQAFRSGREFCAWLGLVPKQTGTGGKVTLQGISKRGDTYLRTLLVHGARSVLAHAKTPGAWLEGLQGRRPANVVCVAQAAKVARTIWAITAKEQDYHSGHKSVRPQAA

SEQ ID NO: 435071 - protein, 418 aa, unidentified
MIEDVQWFVGIDWATQSHRVGLLDIEGRHVSERDFAHGGAGLTELRDWLLEKTKAAPGQIAVAIETPHGPVVETLLDHAFQVFAINPKQLDRFRDRFTVAGAKDDSRDARVLGSALRTDRQAFRRLVVDDPLVIELREWSRMADELQQERTRLANRVRQQLWRYYPQAVELTDDVADDWFLALWQQVPTPATAAAASEEAITRILKDHRIRRLDATTVLQTLRKTPLFVAPGTTEAACAHIRAVAAQLSLVNQQIKQTHRALDGLCAKLEAATESPSGQNREQHDVMILRSWPGIGRIVLATLLTEATEPLRRRDYHALRALAGTAPVTRRSGKQCFVIRRLACNKRLQNAVHHWSRVAIQHDTAARRRYDALRRRGHGHARALRTVGDRLLYALCTTLERQMPYNPNCQTAQVTVGL

SEQ ID NO: 435072 - protein, 310 aa, unidentified
MDTVTFPSVISRGCGIDIHKKVVVATIDGSGIRKETREFNTFTSSLTALKDWLLANGITHVAMESTGVYWKPVYNVLEPAGLRVWIVNARHIKYVPGHKTDKADSAWICKLLLAGLLKPSYIPAREQRELRDLTRYRTKLIQHVASEKNRIMRILEDCNIKLSSVLSDTSGVTATKLIDMICQGKPVTMSVIESIYHGKLSASREELYEACDGLVEEHHIYMLGIIRRDIAGTEQIIEDLNERIKTMLSVYDNVLELLKQVPGLSTKTVEDLVAEIGLDMSTFPTEKHLASWAGMCPGNNESAGKKKADA

SEQ ID NO: 435073 - protein, 325 aa, unidentified
MQNQTIVGIDVSSATLDICIMDDMGCNSFVISNDVQSIGMFFANYKQALIIGMENTGRYNWALYQVLKGMAHSVFVIPPLHLKKSMGLIRGKNDKIDAVRIAIFTKKNHAELLQWKSPGNAVQKISVLLTERNSRIKSKKQLLTQRYDYARMEHLDIDKELEMLNRQQLELLEKQIAIIEERIEAVINSDEQMQTQAKLMRSVPGVGKVLCWLMLTKTENFTAITEPRKMACYSGVVPFANQSGTSIRGKDRVSSYADKAIKTTLHMAAMSAIRLKNDLRVYYLRKVAEGKNKMSVLNAVRNKIIHRIFAVIKSQKLYENHLLLS

SEQ ID NO: 435074 - protein, 355 aa, unidentified
MSQEKYIGMDVHQATISVAVMDAQGKLIMECLLETRAVTIVEFIRGLHGTLSLTFEEGTSAAWLHDLLKPHVSRLVVCDPRKNALLKDGNKSDRIDARKLAELLRGNQLHPVYHGEHGVRTLRELGRSYLTITQDVTRVMNRIKALYRSWAIPCAGTTVYSPRHRAEWLAKIAEPGVRVRAERLYQQLDLLQPVRLEARRELLAESHKHSAVKLLRQIPSIGPIRSALLVALLQTPHRFRTKRQLWAYSGFAVETHDSGEYRSVRGKLQRNRERMTVRGLNDNHNRDLKNLFKSAAISASTRPGPLRDFYVARVEKGMRPTMARLTLARKMAAISLTVWKKGVEFDPQQLQRHAA

SEQ ID NO: 435075 - protein, 365 aa, unidentified
MQKAELSCEADSENDLGGSSETMYSIGLDVHKRTISYCVKDAAGRVHMEGKIGSTRRELDSWIKTLPQPRTIAMEATIFTGWIYDHLLPHAEKVKVAHPLMLRAIAAAKRKNDKIDASKIADCLRCDFLPECYMTSTEIRDRRRTLRYRGLLVKQMVQMKNRISGLLMEKGVTHTKRRLHKVGYFAELMGGNEEIDQSIRPLLKLSREHIVRAQKLDYALVSSLERDPLLVERLKRLRTVPGVGPITALTWALEIGDVARFRSIKQAISYCGLCGAEKSSADKMLRTPISKQRNKHIQHVLVEAAKLAPRQCHELALIYEKEMQRGNRNRATLAVARKIVAYLLAVERRQQDFVPTEEFGGTAAA

SEQ ID NO: 435076 - protein, 345 aa, unidentified
METMYYIGLDVHKKTISYCVKDGSGRIYAEGSLPATRLHLDIWMKTLPQPWTAAMEATIFTSWIYDHLQPHAAAVKVAHPLMLRAIAVAKKKNDRIDASKIADCLRCDFLPECYMASTEIRERRRTLRYRNLLVRQTVQMKNKIAVLLMEAGVSYNKQKLHKVGYFRELLATNQDIDEGLKPLLRLCREMVVRLGKTESALVRSLQRDSLLVERVERLMTIPAVGPITALTWALEVGDVQRFSSIKKAISYCGLCGAEKSSANITQRTPLSKQRNKHLQTVLIEAAKMAPRNSPELAMVYEQEKQKGNANRATLAVARKMVAYLVAVDRRQKGFLVVENKNRTAA

SEQ ID NO: 435077 - protein, 416 aa, unidentified
MFKIFRKNCCGLDVHKTWIYACIGITDTNGRTEYEQARFSSFSKGLRELSEWLAKYSCTEVCMESSGKYWIPVFNILEKNCFVTLAHPKYTKPRKGNKTDRKDAKWICDLFMCDMVKPSFIPSPEIRHLRDLMRYRFKLTNMLTGEKNRAQNCLTVSNLKMDDVFSDVFGKSSTSIIHHILEHPGEAFDVSPFVDSRCKTPIPEIQAAVDGAISPEQAVKLRECLDHIKELEAHKGNIEQEILILVEPFSDVLALLRTTPGLGSSPMTAIAVLSEIGGDMSVFPTAKNLVSWAGCCPRNDRSGGKVKSTRISRAGCYLKPLLVQVANALINSKQHPEFKERYRRIKTRRGHKKAIIAVCNMLLTAIWNILSKLEPYTPDGFLQEYPADGSKTLTKSQALALFKKRGYTIIDDPVVS

SEQ ID NO: 435078 - protein, 480 aa, unidentified
MIPGTYYTEKGGFKMKPFYMGIDVSKGYADFMILNSKKQPVAQNFQLDDTFEGHQSLYKILGRFLTDHPESALFAGVESTGGYENNWYNSLIEFQGSLNIQTARLNPLGVMHNSKADLKKNTTDKISAQNIAEYLIAHSEKVVYQKDDQLAGLRKQWGFIKMLTKQSTQFLNQLNTLLYTANPELLSYCQDGVPGWMLKLLVQYPSAARLKNAHAKTVATIPYVSRMRAQQLIANAKRSVASATDTTTEHLIVATTRQILHLKNTIAEQMKRMIKECPISEIELLKTFPGISDASAIGLIIEIQTVKRFAGVKKLTSFFGVHPVYKVSGDGVGGFKMSKQGRKVPRQILYMVALSAIRCNPLIKETYEKHQQQGKHNMAAIGICMHKILRILYGMLKHNKPFDPQIDIRNRQRKVRIKSDTPAKDTNRRFQDYDQNAPVSRRQRKKRLERERPHNVGDIKSGVTAPVPLADIIADILPQL

SEQ ID NO: 435079 - protein, 403 aa, unidentified
MEHVIIGVDPHKLSATIEVVDDHEQRLGSGRFPTDQAGYAAMRTYAKAWPQRVWAVEGANGAGRPLAQRLLEAGERVLDVPAKLAARVRLFDTGHNRKTDARDAHSIAIVAVRTQGLRVLKVDGELEALQMLTDRREALTRRRVQTVNRLQALLAELLPGQAKRDITTGQAKAMLVSVRLRDIAGKTRRRIAAEELSKLVAVDAKIKKATAELKTMVLARGSHLMDLHGVGPVVAARVLADVGDVTRFPDRNRFASWTGTAPLDASSGEQNRHRLSRAGNRRVNHMIHVAAISQIRLDTDGRAYYRRKRAEGKKPLEAIRCLKRRISDALYRQQLADQQPATEVELDAGPEGHCGATLHSSAVDLHPHIDTSDQPLPGPAKPTLRPMPRPRKTNHPKSLTRTG

SEQ ID NO: 435080 - protein, 412 aa, unidentified
MDVLVERCAGLDVHRDSVMATVRVPAERRRQREQHTRGFRTTIAELEALGDWLAGFGVSRLGMEATGVYWRPVFQVLEGRFDCWLLNAQHLHNVPGRKTDVIDSAWICRLVEHGLVRPSFVPPPEIRRLRDLTRLRTAQVEERTRAIARLEKVLQDAGIKLTSVASKSYSVSARRMLEALLAGTTDAEALAELARGRLRAKIPQLREALRNRFRLEHHGVLVTSLLAHLDALDRAISDLDERIAQETEPMAELIELLSTIPGVRRRTAEVLIAECGIDTSVFPSVRHFVSWAGICPGNNQSGGKRRPSKTRHGSRWLRKALTESAKAAARSKGSYLASHHAQIRGRRGEAKAIGATRHDILVAYYHIVRDRVPFRELGPDWLARRHSPEHRAHRLTRQLEALGLKVTVEAAA

SEQ ID NO: 435081 - protein, 353 aa, unidentified
MRKMQEYRLKGKGIFIGLEDSKRSWKLCVRSEGMIIHETSMPARFEVLHSYLRGSYPECKIKVMYEAGFGGFWLCDLLRQEGIDCIVTPAHKVTQEKVNKVKTDRVDARRLALNLEKGDYVCCWVPDRERREDRQISRTLSQMQDTIKTMLNRIRKFLDYHGLNGEMAPGAWKRWQYRNLRTMKLGESLQICMEAYLDALEKLEEIESGLLVWMKELSKKERYREAVKSKESCPGIGRLTATRLTLEWGDLSRFSGGKQLASYTGLTSSEYSTGEMVHRGRITGQGSGRIRSWLIQSAWRAVALDPVMTAKFQRVWKNSGSKKKGIVAVARKLAVRIRAVELSGRPYAVAVIE

SEQ ID NO: 435082 - protein, 305 aa, unidentified
MNVLAFDVSKDTLDGFDGSSMLSISNEPKAIGKLLKRYSTDWVLILEPTSIYHMELAEKAHKKGMTVYLVNPRVIGHFRETRSRIKSDEVDAECLHAFCMRNWEDLRPWSPLAPAAETLRKAIKRYHHVTKLKVALAQSMAGCKLAECEACLASFRVLQDELERQAIEAAEQLDADLYKRLKGITGFGPYSACAFTYMLRSRKFESADAVRAFIGLDLVFRDSGKKKGTRAISKCGDSTLRHAACCAGRGLLNSNLGRAVNQSLKAKGRKPTECLVIAAKKLTRIAFGISQNGQTFNPENFCWGT

SEQ ID NO: 435083 - protein, 385 aa, unidentified
MIAVGIDISKGKSTVAILDGDGSIRAHPYEMNHSKAELDALIKYIKAVDDHPIILMEPTSHYHYPVLKAFLDAGLSPSLVNPYLLKKYGDAELRKAKTDKKDAMRIARYALEKWYSLAPYSPMDQKYEDLRFLSSQYRQRISMVVKSKNQLINLLDESMPGITRILALKSRNPEKCMLLQFIKRFHSFDYINSIGKTRFMNSYTTLARKVGERNAAAKGLAIYELSKASITTRSNSDYMDIALDQCVDILSDSQRAADEIMLQMQNIAETIPEYKVLLSMNGVGDRLGPVILAEIGDIRRFHSGKALNAYAGNDAPPYQSGQFESRSRHISKRGNPALRKACFEVMQALKLHDEKRTGRETVQRCQNGCCKQVSQDLLRSCDGAV

SEQ ID NO: 435084 - protein, 316 aa, unidentified
MSDPQVFVGIDVSKAQLDVALRPTDACWHVNNDEAGIIGLVERLQAVQPTLIVLEATGGLEVPAAGALAEAGLPVVVVNPRHARDFAKATGRLAKTDRLDARGLAHFAEAVRPTPRPLPEAQAQALSALLTRRRQLVQMITAERRRLQTAPQPIRADIQAHITWLTRRLARTDADVAAAIHASPLWRAKDEMLQSTPGVGPILSRTLVAEVPELGVLNRQEIAALIGVAPLNRDSGTVRGKRAVWGGRAHVRAVLYMSTLAAVRHNPVLKAFYERLRAVGKAPKVALTACMRKLLTILNAMLKHWTPWHENYATHS

SEQ ID NO: 435085 - protein, 349 aa, unidentified
MIIGCDLHTRYQQIAMLDTETGEEVERRLEHETGGARAFYSGLQGRVRVGIEATGHTHWFEAMLAELGHELWMGDAAKIRASVIRKQKTDARDAAHLLDLLRQDGFPQIWRPSPAERDLRQLVWHRQKLVWMRGAVKNQLHALAMGEGVCRKKKLFTAKGRKELEGLALGPWASYRRQELLRMFDELAAATTQLDAAVEQAAKNQPLAVRRMTHPGVGPVTSLAFLLIIGPVERFERSKQVVSYLGLNPQEHSSGGKQRLGAISKQGNPMMRWLLVEAGHTAARFDPALQRMYQRLKFRRGASVAKVAVARKLAVRMYWMLRSTADYAQLVRMQGSPWATLVENSPSLG

SEQ ID NO: 435086 - protein, 408 aa, unidentified
MEVIHDRCAGLDVHKETVIGCLRVRERGQIRREVRRWATTTAGLLELADWLRQAGCTHVAMEATGIYWKPVWHILEGEFELVLANPAHIRNVPGRKSDVNDATWIADLMAHGLIRASLVPPGPIQELRDLTRTRKQLMREIGQHKQRIQKVLEDANVKLASVVSDVFGESGRRMLKALSADETDPWQLAALRDGRLTASRETLAAALHGKVTAHHRFLLSQHLRMIEHLEQTVTVFEAQIEASLEPFRAAFEHLVTIPGVSTTAAHVIIAEVGVDTSRFATAGHLRSWAGLCPQLHESAGKVMSRRLRHGTPWLKTVLVQCAWAATRNKKNYFYAQFVRLRARRGPKKAIMAVAASILTTAYYLLRHQVPYRDLGALYFTRIDKERTAQRLARRIKELGYEVEIRTAA

SEQ ID NO: 435087 - protein, 389 aa, unidentified
MYFIGIDISKYKHDCFIVSSDGEAPFGVFSFENNKNGFQLLLDRLDSLDSSEEKRIGFESTSHYTLNLKLFLEKHHYTFMEFQPALISQYGKALSLRKTKTDAIDSQTIARWLMTVEYKPYPLSFYHNYSLKSLTRLRFSLIKQRTFYLIRLTDILDHIFPEFKPFFNNNFSATALHILEKYGSPEKIAAFRTTSYDELRKISRGKFSMQKFLALKDLAKNSVGVSNRIFEMDLSCILRLYRQIDEEITNIETEIKALTLELNRPCLTIPGVGVLSAAIILSEYGDISKFKSPGQMLSFAGLEPGYFQSGQSEHTGHMVKRGSSHLRCAIINCCLPLIQFNMTFAEFYAKKRAEGKPHRVAMSHVAKKLIRLIYTLETTNQPFDTDKLR

SEQ ID NO: 435088 - protein, 345 aa, unidentified
MVKSHESALCPHGTTNACFDEIAQAKHRLGLAETAPVVSCYEAGREGFWLHRLLLAQGITNHVVDSSAIEVSRRQRRAKSDGLDVRKLLSMLMRYEQGERKVWHVIKVPSMEAEDQRHLHRDLETLKQERASTTTRIKGLLSSYGIRVTSMTKLPEQLDALRLWDGSPIPPGLRRRVLRVYAHHTFLSEQIAEVEVQRRAQLQTSSDASIDKVRQLIQLKGIGINGSWLLVMEFFGWRELKHRREVGGLAGLTPTPYQSGESAREQGITKSGNRHVRWMTTELAWSWLRYQPDSALSVWFRERFGGGGKRLRRIGIVAVARKLLIALWRFLEKGVLPEGGVLKEA

SEQ ID NO: 435089 - protein, 349 aa, unidentified
MTEAYDGRQVVGMDLHRRRSVLVRMTEDGRKLETVRITNSPAALRAVIARAGKNPRVVIEATYGWYWAVDVLEAAGAEVHLAHPLGVKAFSYRRVKNDERDSADLADLLRMGRLPEAWIAPPEIRELREITRYRHKLVKARTSYKDQVHGVLAKLGVPVTHSDIFGVHGQDWLDELPLPQPYAGKVASLRQLAGALTAEITLLDKVLADLLDGHEGYHAIQALPGIGPVLAAVIVAEIGDIRRFPGPGQLGSWAGLTPRHYESDTKVIRGHVTKQGSRMLRWAVTEAIQRQPAGSRPGEVKDAIIARRGKEAKNIAKIAAARELLTLVYYGMRDGRVRRLAAPRPRPAA

SEQ ID NO: 435090 - protein, 338 aa, unidentified
MPVTIGIDPHKSTHTAVAVDRDEQPIARLMVAAKRGQTERLLAWAEPLDAERVWAIESAAGLGRLLAQELVAAGERVIDVPPTLSARVRLLASSKTSKNDSNDALSTAIAGMRHCGLRVVRSDDHTAVLRLLADRHHDLTGLRTQAVCRLHVMFRELLPGGARLRISAAQGRSLLDTIEPADPVSRERVRLAGEHLADIERLDIEIAATKQRITEHVAATGTALVELHGVGPVIAAIVLGQVGDIRRFRTRAQFANYNGTAPIEASSANTHRHRLNMRGNRSLNHAIHIIAVTQVGHDTPGRAYYLRKQAEGKTRKEALRALKRRVSDAVWRQLQLDH

SEQ ID NO: 435091 - protein, 355 aa, unidentified
MKQGTQLDFIGQTIFAGIDVHKKSWKVCIRSEHMELKTFSQEPSAKTLSNHLKNNYPSATYKVVYEAGFCGFGYQREFSDEGINCIIVHPADVPTTDKEKQRKSDKVDCRKLGKTLSEGSLEGIFVPDVEQQDDRGVIRVYQQMVKDQTRFKNRIKGWLSFQGIVIPGDDDYKYWSNNFTKWLKGLSLTSSARINLDILIQGYEQSRAMVLAATRQVRALSKQERYKKKIELIRTIPGIGEIAALLFTTEIGDMNRFKELDQLCDYVGLVPKIHGSGDKETVLGLTHRGHHELRETLIEASWTAIRLDPAMTMAFNEYCKRMKKNRAIIKIGKKMLNRIRYVMKNQKDYVTAVVK

SEQ ID NO: 435092 - protein, 323 aa, unidentified
MHYTQFVGIDVSKAWLEVAVCDEKGDRAGKTERYHNGGEGWAALSRRFADRWGETFVVLESTGGYEAVLLAYLVAEDVAVHRAHPLTAKHFLRSLQRAKTDALDAAALARYGAERWAQLPRFRAADAPTAALAALLARRSDLVELRAAEQTRRQHPRYAALQDSVRAVLRTLDREIAKIEARMRALVEKSSALRTRCDVIESVKGVAEKTAWTLLAAMPELGTLTRRQAASLAGCAPHPRDSGQRQGYRRTGGGREPVKRALFLACWSAVRYNPRLKEFYDRLRQNGKKPMVALVAAMRKLITILNAKLRDALAVKSPLGSAV

SEQ ID NO: 435093 - protein, 311 aa, unidentified
MQLTIGIDVSKDRLDAYRLSDRRHIQVTNDKAGHKALIGWIGKAEQPLVVFEATGAYHRHLEAALGAGGIPFAKVNPRQARRFAEATGRLAKTDRVDAAMLARMGAVLELEGRMPPDKALHELRELLAARRALIKDRTAARTRLATATLPLVKRQLAARIRQIETQLRRIDATMTGTVAQDETMAHKLAILVSIPGIAETTALSMLIEMPELGTLEGKQAASLAGLAPISRQSGKWQGRERIQGGRTALRRAIYMPALVAARFNPDLKAKYDQLIRAGKPAKLAITAVMRKLIVMANALLRDDRKWSETCP

SEQ ID NO: 435094 - protein, 404 aa, unidentified
MAVHKMWVGIDVGKGFHHACAVDETGKIVFSRKVANSQAAIEQLITRTTAKAAEVVWAVDMTSGAASLLITLLLATGQPVVSVPGRLVNRMAGAFAGEGKTDARDARTIAETARLRSDLAPITSPDAVVTDLQVLTARREDLMADWVRGVNRIRELLASIFPALERAFDYSTRSALVLLTGFQTPAGIRAAEATGLSAYLAEHGAWPKGIPAMVDKALAAAAEQTVALPGESVTAPLIARLARQLLELDREIKDLDKQLGARFAEHPDAGPITSLDGFGPILGAQLLAGTGGDLQAAFRSSAHLAAYAGLAPVPRDSGRIRGNLHRAKRYHRGLRRVFYLAALSAIKRPDGPSRAFYLRKRGEGKRHTQALIALARRLVDVIWALLRDGREFHPSPPLTATAAA

SEQ ID NO: 435095 - protein, 420 aa, unidentified
MKDVNTKKLKRVNGKTLLVTVDASKMKHTGYCRCPDGTDIKPFEFFNTGRGFQEFWDRVCQMKKTHNLEEVVVGFESTGPYAEPLLHFLQKRDARLVQVNPLHTKRLKELQGNSPGKTDQKDPKVIADIIELGHALTVIIPEGTVAELRRLTQARERSIQRRSILLNQLHDLVFLVFPEFLEVMKDMSIKSTQYLLKNYPKPQDITEAGVATLTQILKKISRGRLRKERAEALYHAATGSMGIEDGQESISFEIKEIISTIESINRFTAELENYMSNHLKEVSYSKSILSLKGIGEITAAGLIGEMGDFRNFTTISEVIKHAGLDLFEISSGKHKGKRRISKRGRPLLRKLLFFASINVVRKGGILHEQYQLHLKKGMPKIKALVAISRKLLSIVFALVRNHSIYMDNYSKIKYQLKEAA

SEQ ID NO: 435096 - protein, 343 aa, unidentified
MQVSTIGVDLAKNVFQVHGVDSAGKVVIIRQLRRKQVIDFFSKIPACLVGMEACGTAHHWAREVSKLGHTVRLMPPSYVKGYVKRSKNDAADAAAICEAVTRPSMRFVPIKSADQQALLMLHRTRDLLIRQRTQLINALRAHLAEFGLVAETGREGLAQLAAIITDESNREALPSAMKQALQAIVDQLAALELQIGTLDRAIHAHHRANDMSCRLETVPGIGVIGATAIASTVTDPSDFKSGRDFAAWIGLVPRQHSTGGKERLGGISKQGDRYLRRLLVIGATAVVRHARQCPQKHPWVMKLLGKKPAKLVAVAVANKMARIAWAIMAKGGYYRAPELAAAA

SEQ ID NO: 435097 - protein, 352 aa, unidentified
MISTQTTAIPKLFIGMGVHKKSWTVHFKTDLFDNKTVTMPADPLSLINYVEKNFSGHQVSCCYEAGCCGYWIARVLKEKRWQVSVVNPADVPRNNKQDWQKTDKIDSRNLCKHLSDGNLKGIFIPGEEQEQLRSLLRRRIHLSRHLRSIKNHIKSQLLYYGIQLPEQYDNPNWSREMKTWIGNIKWKFNSAEESMKSRLKQLEFIWYEELHISSELRAYCRKYYKKDYYLYKSVPGIGGITAAGILSELGDIRRFNRLDELAAIVGLVPGIYQSSENKINLGLTKRSNHQLRSLLVEASWVAVRTDMALQQYYRKHARKEPNKAIIKVAHKLLSRIRAVINSGIPYQTGLIK

SEQ ID NO: 435098 - protein, 479 aa, unidentified
MKSLSTHSFTAFVGIDWADMKHDFCIQAAGSDQHEFDTRDHSPEAIAKWAYSLQDRFGGPIAICLELAKGPLVCALQRFEFLVLFPVHPSTLAKYREAFVPSHAKDDPTDAEMALDILLRHPEKLQPLKLQSTAMRTLATLVEERRSLAGDVNRITNRLVSALKQYYPQVLDWFEHRDTLIFCGFLSRWRTLKHVKRARRSTLESFFHLHNVRRAYLVEERIQGIRAATALTEDESVIRPNQMVLQAKVEQLRALLQSIDHFDAEIDAVGKSLPDYDLFAALQGAGHILAPRLLVAFGEDRDRYTNAAQIQSYSGVAPVIERSGNKCWVHWRIACPTFLRQTFVEWVGSTIPRSFWAGAYYQQQRQKGCSHRVAVRALAFKWIRIIYRCWKTRTLYDESVYLKALKLRGSPLLANVSESAKNDLTECLRPRSGYSKLGEIGHTLRVCCNTSHKPFITESFRIAWISGYGNYLARRQAFP

SEQ ID NO: 435099 - protein, 286 aa, unidentified
MAEVSIIGLDLAKNVFQLHGARADGSVAFRRKLPRGKLLEFFASAPTCLVAMEACGSAHHWAREIGVLGHEVRLIAPIHVKPFVGRNKNDAADAQAIAEAASRPTMRFVAVKSVEKQAAAITFKARDLLVGQRTQTINALRGHMAEYGVIAPNGPVHVARLAQVLDEPEARLPPPVVAICRMLLAHVGSLSEQIALLERELRQRARKDETAKRLMTIPGIGVICAATAMEALAPSPESFAKGRDFAAWLGLTPRQNSSGGKLRLGGTTKMGQRDLRRLLLLSHEYA

SEQ ID NO: 435100 - protein, 479 aa, unidentified
MVLKPKKKQSEPLPPKKKLVIEIEAVLQKEAEQLALECINLTAAGIDIGSRSHFVAVPADRDPQPVQEFAAFTADLERLADWLQRCGITTVAMESTGVYWIPLFELLESRGFDVKLVNSHHIKNVPGRKSDVVDCQWIQQLHSFGLLSGSFRPDEEICVLRAHLRQRDNLTRYASAHIQHMQKALNQMNIQLHHVVSDLTGVTGMKIIRAILAGERDPQVLASHRNHRCKHPVATIAKALQGTWRQEHLFALRQALELFDVYQHKIDDCDQAIARVLDALERQTDQQAPAPVRKHRLSRNTPDINLHERLFQLTGVDLTRIDALNPHSVLKILSETGTDMSRWPSAKHFASWLGLSPGNRISGGKRIGKSNTTPSANRAAATFRMAAQSLHASQSALGGFFRRQKARLGNPKAVTAAAHKLARIFYSMLKNKTAYDTPDANYYEEQYRKRVMVNLRKRAAQMGFELVERSADDAQPCAA

SEQ ID NO: 435101 - protein, 345 aa, unidentified
MLYVGLDLSRKRLDWQALDEQGDEVAIGAVPPDRDGLARLAGRVGDAEVLGVIESMTGARFVHDQLELHGWDMRIADAVKARGIAPLACKTDRIDCWVLAELARRDFIPEIWLPDPAVRAERERARFRLHLVRHRSSLKNRVHAILFQHGIPNAHSDLFGAAGRQTLERLRLPEPWQSTVAGSLKLIDTLNLEILECERELERLGADHRYISRLVTCPGISWVLGYTIASEIGDISRFHSPRKLVGYTGLCPRVDQSGERDRRGPLRKNGPAYLRWALIESAHAGLRWHEPYRDLADRMRARHGRKRGTKIAVIEVARRQTQAIWHMLTNDQPFAPAGASLRLAA

SEQ ID NO: 435102 - protein, 347 aa, unidentified
MDHIGIDLHKRESQICILAEGGELIERRIRTDPRHFAEVLGERAPACILLEASTESEWVARCLEGLGHHVVVADPNFAPMYATRTRKVKTDRRDARALAEACLLGAYRPAHRLSDAQRHVRARLTVRDALVRTRTRYISLIRALLRQHGWLVPSGSAEGFPQRVLALPLPGRLRSEVAPLLAVMRHLQPSLAYSDERIAAVTATDERVRRLQSVPNIGPVTAAAFVAAIDEASRFRRAHEVEAYLGLVPRELSSGETQRRGRITKAGSSRVRWLLIQAAVSMLRLRDPRTATLREWAGRLAARRGKGIAVVALARRLAGILFALLRDGTVYELRRRHACPVTQAVPA

SEQ ID NO: 435103 - protein, 320 aa, unidentified
MTIICFDVSKDELVGVRINQRAAIKETYTLPNTEGAISSFLEEVHASHPRLTVGSEATAEYHRPLALACLARTIPFRLVNPLVTKQLTQVTIRKQKTDATDAFLIAKAVLQGAGTLVTHDSFAPGKVLNRTAVKLSHIAGALLRMERHLRETEAGAGVAETLIALREQAEETMRAAQREARASLDPGCSTLLQSIPGIGPTLSTAFLTELMPIERFPTQKGLVAYAGLDPRVKQSGVSMKRNTHLTKRGSPVLRRAAYLAASIAQRCDPELKAYYEKKRSEGKRYREATIANARHILYRIYAVWKRGTPYVKRELSTAGT

SEQ ID NO: 435104 - protein, 519 aa, unidentified
MHQTKYRGIITEAGSLTTPPWEPVFRLVKPPIKSVSPFGGDLCFGWLGSPRLYLYKPLGCVSALWKWIPAGKDKTMQYQKVLKMLESIPYLSVGLDVGADFTWMSIMLPNGTLAGKPFKIVHSDPQSRELAISKIKEAQEAYSLKSRCFLESTGIYHIPLLCFLRDKGFDCSVINPIITKNSTNLNVRKLHNDKFDSKKAAKVGLDASLKVSIIPDDEVIDLRNLVRDYYYFRDLQSAVVLKLTAELKVSFPAYRKVFSKVTTKTSLKLLDAYPLAEDLLAAPKETVVEMIRSTARFGEKYALAKYDALRTAAKDAAIFGRALKSNSVRIRLYIDSYQEYRKRLDTILEAIHGSVDGLKGNPVYDRIKILQSLRGIGFLSAVVLVAEMGSFDLFPSPKKLYAYFGLDPAVKQSGKFNGDKVHMSKRGSSLARRILHMVALNNLKVDKGSGMPVNPVIHSYYADKCKAKKKNVAVGAVMHKICNIIFAMLRDNKPFEVITPQEHCERYLATHPDKAQSAA

SEQ ID NO: 435105 - protein, 332 aa, unidentified
MYIGIDIHKRYAQVAVMDETGQITEEARVENANLDEFAQRHAGAQAAIEATSNYYHIHDTLSEYLDVVVANPGKLKTIAQSDKKTDRVDAKQLARLVRLDSVPESYVPTEQIRECRALVRGRETLVQSRTEYANKVHALLSDHGVTRNVKPLSASGRESLRELSLPETAQALLASHLTIIETLTDEITQLDERIEQRAGSLSETQLLVSIPGISYYSALTIYAELGEISRFDGDKEVVSYVGLNPVIRESGDSRFEGGISKKGSSRVRWVLVQAARVAVHTCGDEYLSRFYNRLASRKNDQKAIVATARKLLVSIYHMLDRGEEYDPPGVSS

SEQ ID NO: 435106 - protein, 410 aa, unidentified
MRRVIGIDIHRTFGEVVIWENGVLRREGRVEMTRTALEGFGRRLEKSDEVVIEATGNCMAVSRVLSPHVARVVIANPLQVKAIAHAHVKTDKVDAGILASLYAAGYLPEIWTPDADTERQRRLATRRYQVVRHRTRLKNEVHAILHAHLIPKCPHADLFNRRGREWLARQPLPEDERAAIARHVRELDRLGEDLADLDRDIAESALEDVAINRLLTITGVNLTVASGLMAAIGDIARFDSPQKLVSYFGLNPRVRQSGLGAAHHGRISKVGRSHARAMLVEAAWAAAKAPGPLRAFFIRIRARRGHQIAAVAVARKLAVLCWHMLTKEEDYLWARPSLVAHKRRAVELQAGRPQKKGNARGPAYAYNVKAIRTKEARVAEQAEKGYEHFVAAWRARPPRGRTLPQAERGS

SEQ ID NO: 435107 - protein, 419 aa, unidentified
MFKIILNNCCGLDVHKTWIYACVGITDNHNRTQYHEARFQAFSKGLRDLSAWLAKYNCTQVCMESSGKYWIPVFNILEETCKVTLAHPKYTKPMKGNKTDRKDARWICDLFMCGMVKPSFIPPPVIRQLRDLVRYRTKLTNMITGEKNRALNCLTVSNLKLDDVFSDVFGKSARSITEYILAHPGETFDVAPFVDRRCKSPISEIQAAVDGAVSHEQAVKLRQCLDHIDELEKHRSMIVTEILRLVSPFTTTLDLIHTVPGFNRDPLTAITIVSEIGVDMSVFPSSKNLVSWAGCCPRNDKSNKTVKSTRISKAGSCLKPTLVQVANAVIKSKDHPEFGIRYRRIKAHRGHKKAIIAICRMLLTAIWNVISKREPYSPDGYAVPQPSFVAKPLTKSQGLALLRQMGYVIKDDNPPPVSA

SEQ ID NO: 435108 - protein, 269 aa, unidentified
MNLPAVVLGVDIAKLKFDVCLVKENQKVKHKVFVNTKHGFDQLVAWLASHQVGSLHICLEATGSYGEALALHLHEAGYRVSVVNPAAVKAFAASRLTRTKTDKVDAELIARFCLAQQPQAWTPPASEVRQLQALVRRLESLVEMRVAEENRLSSGIIVDVVRHSLEEHIAYLVEEIKQTEKMIREHIDNHPDLKEQSDLLNSIPGIGQTTAALLLAEIVNINQYKSARQVAAYAGLSRASGVRAVRCADECSYQKSVTPAFAKHFTFRQ

SEQ ID NO: 435109 - protein, 404 aa, unidentified
MPTYFVGIDVSKFKHTCCIIDEDGEIIKKSFDFSNSKEGFDSLIEIFKSIDQSESLFQIVMEATGHYHECLFRYLVANNYLAQIKNPVVIARFKQSEYLDKAKTDNLDALLIAQYASKHPFSPSMLKSYNIERIRRISRAKYFLYQDKERTINHLHRYLDESFPELIPFLRKRGDIKRYQGRNFFDSKTTLWFVENFPSAKKFSNARSETAEKLRRMSRGAFSLIKFNELRKIAKESIGVAYQETEEIIIQLVQELRSIQERNDKLDELLTPLIDETAPNLLTVPGIGYRLAGLLISEIGDASEFPSADKIIKFAGLDVRVYQSGTIEKHGAIRKRGSPLLRYALFQAAEKARIHCPEIAEFYSKKKSEGKHPICALTHTARKILRIVWALLKTGQNYSQSISD

SEQ ID NO: 435110 - protein, 302 aa, unidentified
MEHYAGIDVSLESASVCVVDATGRIVREAKVASEPDVLIAWFRGLEFRVTRIGLEAGPLSQWLYAGMRDAGLAVELLETRHVRDAFKAMPVKTDRKDARGIAQLMRLGWFRSVHCKSLPAQEVRALLTARKLLQTKNHDVEMSLRGVLRGFGLKVGPTTPRTFAARIRVLVAGHPTLSTVAEALLAARSTLFEQWQQLEKRLRSLAREDHRVRLLITAPGVGAIVGLTYVSAIDDPSRFRSSKAVGAHFGLTPKKYQSGETDVTGRISKIGDGGVCTALYEAANVILTRPVKGSTLKSWGCV

SEQ ID NO: 435111 - protein, 309 aa, unidentified
MEQPYVGIDVSQARLDVAWNSGREGFSIACDASGLEELVRRIKATNPAVVAIEATGGLERVVVAALVAADLPYAIANPAQVRSFARALGVRAKTDPIDAAVIARFAEATALDPRSPPDEDTLRLGDLIGRRRQIGQMIVAEKQRLLRASPAMKRSIARLLKALEKELATIDTHIDDAIKASPEFRCKEGLLASVPGVGDKTARTLLAELPELGTLTRRQVSSLAGLAPFTQQSGQWRGKAFIAGGRGAVRAALYMAAVTAAHHNHLLAPFYQRLLDAGKPKKLALIAVARTLLTVLNAILRDQKPWQIA

SEQ ID NO: 435112 - protein, 368 aa, unidentified
MNQYTYVGLDVHLDSITAAIVEDAPAHPEVVKLSGDLNKVRRLFRRLSKRGPVRACYEASGAGFVLQRVLEGDGFHCEVIAPSLIPRKPGDRRKTDRLDAVNLVRLYRSGHLTPVHVPSREQEALRRLIRLRYEYVRYTTGTKNRISGMLRNHGFVYREGKSTWTKTHRQWLARLRKGLDGAMQTALVTELEHLEYLEMQRGVLDDEITRYAQSPTYRAHVEALCCLRGVKTLTAMTLLSEIGDIRRFSSPTALMAYFGLVPSERSSGDYQRRGPITKAGNNHCRRVLVEAAWNNRHRSRADLILNRRRQGQPPEIVAIALKAQHRLHKKFWRLDHKKHRLVAITAVARELCGFIWAILNAAPQLTTN

SEQ ID NO: 435113 - protein, 358 aa, unidentified
MNRNTGMNAGQIIGTMGGKQVIGLDIAKHVFQLHTVNMGTGEIVNVQIKRAKVLEHFVNMPQCLIAIEACGGAHHWARELTAQGHSVRLLHAKIVRPFVSGNKTDATDARAIWLAVQQPGVKLVGVKTAAQQATLTLHRQRELMMKMRTMQTNALRGLLYEFGATFAKGRKALFQDVEQTLEDLSTQLPQMVRDSLREQVARIKAISEDMLAIEKRLGLQLKADPQMQRIAQVPGVGLLTATAAIATMGEPSAFKSGREFCAWLGLVPKQTGTGGKVRLGGISKRGDTYLRTLLIHGARSVLAHAKEPGPWLEQIKTRRPVNVVIVAQAAKMARTIWAVTAKEQSYQRGFKSVRPQTV

SEQ ID NO: 435114 - protein, 429 aa, unidentified
MARVIIGMDPHKRSATIEIIDGREQVLAQGRYGTDSDGYRAMLAVGRRYPQRVWAVEGCNGIGRHVAQRLVADGEVVVDVPAKLSARARVFATGQGCKTDPVDAHSVAVVALRTNGLRQVMVDDATVALRLMVDRRDWLGRARTDTVNRLHALLLDLVAGGAKKHLSAPQARTILATVRPRDVVGRTRRQLASDLITELAVIDKKIKQANAALTALIATTGSRLRRLNGIGPSVAARLLGDIGDITRFASRNHFASWNGTAPLDASSGDQQRHRLSRAGNRRINRALHIMAVVQLRHDTEGRAYFRRKLAAGKTPMEAMRCLKRRLSDVVYRQMRADMKASPGGHSGATLTSSAADPTPTVDSSDKPQPGLSHEPTPPTTPVEADPPPAPTQAAKRPRTRTAKPARPTALTSTPRTTSAHPRKRSSSKA

SEQ ID NO: 435115 - protein, 394 aa, unidentified
MKKRYASVACAGVDVHYKFSAVTFRDGAGRVVARERLEHADRAALRGRLSRWPRGMPVVLEASFGWGWLSDLLEEVGLEPHLSNCYKVERMREARGEVKTNRKDADLLSLLPAEPTAWWEVWRAPPQVRQRREAMRHRAALVAVQTETKNRIHALLHRHGVFFLGGTDLFGGRGRRFLAGLSQDGRHAGGVLPEEARQGLADLVALTTHLRGRLHAVARRLRQGLERDPLTRRLDGIPGIGLILAHTLQAEIGEIGRFRSAKALASYACLAPRAQDTGEAAPGRTPLGRHLPERGNRTLKWALIEAAHGAVRHGGRWRALWDRATDGGRKNRGRGYIKVARELLNVVFLVWSRNVAYTEMPPPRPGSRSATRRARTSRPGTGQPFHPMVQASKA

SEQ ID NO: 435116 - protein, 405 aa, unidentified
MPKNMQYERAFGLDLSKKTFHGCMLDGPDLGNRHFFTGEMGPQGKAKLAGRLCECDLVLMEAGTSSFSLARFLLENTEAEVVVLNPAKLYNIFNSTLKTDKSDSEKIARIARTMPRDEWPTVSIPTKEEQAERSTVSLEVFLAQEITMLVNRLYALFNSMGHPFIKKSDLKTEEARLTLANRLLCEEALAMEQAIMLSNQIEHVADQLEQCKQRLRDICLSHPKEVLSLLSLPGVGLMTAASQIAFLNDGSRFNSPDSYVNYVGLSERRFDSGTKVSKGHISHMGNKCIRRNIIQAAWVASTKLKGNPLSMKYKDLILRGKNKPVAAVAIAKKMIQLSYILVKSNGIYEFTKQQGLGAFRRKLQYHKLTQLLDFLPEITKREMEEIDRTKRKEAAATTSSPKKFA

SEQ ID NO: 435117 - protein, 341 aa, unidentified
MSEGYDGRQVVGMDLHRRRSVLVRMTEAGDVLETVRIVNDRDRLAAVMARAGEEPEAVLEATYGWYWAADALVELGACVHLAHPLGVKAFSYRRVKNDERDARDLADLLRMGRLPEAWIAPPATRELRELVRHRAKLVHLRSGLRCQVHAVLAGQGVTVPVSDLFGLAGAKLLERAPLSPAARARVESLLRLIDAFDVEIDAAAKTTAGQLKTHTGYQAVQTLPGVGPILGAVFVVEIGDVTRFPDPTRLASWAGLTPKHHESDTTVHRGRITKQGSRLVRWAAVEAVQRVGKHTRIGAHRDRVAERRGRNIGIVAAARELTECVYYALRDGTVKRLTDTA

SEQ ID NO: 435118 - protein, 365 aa, unidentified
MKHTSIVTQTPEIVIGVDVHTKKHVVRVKIGDEYKNAINIAPNEESWMSVLRKYAPCDVTVVYESGSNGFVLHEILLPLAPLCKSLKVYMAPASQIPVAPGSKRVKTDRRDTKRIIMAWEMCAFTPVVVPEPEQREERALTRLWDQLKKKSKEVKNQIHGFLKSHGIAYPDKEVGRPWSEGWITAIKAATKAKAKTPYLAFTLKMHLEELGTHLKHEKELRKRIEALGKTGRCAPIAQALMELTGIGVLSAVRIACEVADFAAFKNSDAFASYTGLVPGEHSSGESVHHGHITKAGNARLRHIFVECAWVWLRYDPEARRIFFRIAAGKKERSCIAIVALARRLAVKAYHAVLHPAEGQDEQKAA

SEQ ID NO: 435119 - protein, 426 aa, unidentified
MAPRASTGKRNMKAWKESTYYAGFDWARDHHDVVIVDRRGQIVTDFAIAHTAEGWQRWREQVAALGAENFAVCVETSQGLVVEQLLESGVSVYPIAPVSSKAYRERKAPSGTKTDRLDAWSLADALRLDGHSWKALAKEDPLIAELRLLCRDEIALIEERTALLNQLQSALQQYYPAALEAFEDWTLPAAWAFVELFPTPAALAAAGKRKWEKFLHLHKLARPQSYAKRLEIFARGSELAAGEALTRSKSRLALARIRMLRVLQHQIEAYRAEIEKLFAQHPNHHLFGSLPGAGPKIAPRLLGEIGSDRARFDDPNALQALAGTAPVSYQSGQIHKVYLRRHCNKSLRATIHLWANLSRRASPWAALYYQALRARGKSHASALRSLGQRWLKILWKIWQTRRSDDPDLHAANQLKHGSWLLTLQST

SEQ ID NO: 435120 - protein, 343 aa, unidentified
MEYYVGLDVSLKQTSICVVDQMGAVVREGVVDSDPEAISVYVRSKAPGAIRIGLETGPTSTWLWTELKRLGLPVICIDARHAKAVLKMQINKSDRNDAIGIARIMQTGWFKEVHVKDIDSHSVRALLASRALLVKIKRDLENHVRGLLKNLGLVIGRAKFNVFAERAEELIEDRPELVAAVRPLLEARTAVERQVSELDRKVMKLVRRDVQVRRFMTVPGVGPITALAFKATIDDPARFARSRSVGAYVGLTCRRHASGEVDWSGRISKCGDAMLRSYLFEAAGVLLTRVPKWSAVKAWGVKLAKRSGLRKAKVAVARKLAIILHRMWIDGTEFNWSKKEIAA

SEQ ID NO: 435121 - protein, 406 aa, unidentified
MNMNAVGIDVSKRKSTVAVLRPGGKVVVKPFDVPHLSADFQSLEKLIRELDGETRIVMECTGRYYEPVARELSQAGFFVSTVNPQIIRNFQGQDNPLRKVKTDKADSVKIARYTLDSWANLKQYSLMDELRSQLKTMNRQFDFYMKHKTAMKNNLIGLIDQTYPGANTYFDSPAREDGSQKWVDFIGTYWHVDCVRKMSLSAFTDHYQKWCSRRKYNFSKSKAEEIYGKAKELIPVLPKDSFTKRIIKQAIDQLNAVSQTVEQLRALMNETASKLPEYPVVMAMKGVGPSLGPQLMAEIGDVTRFTHKGAITAFAGVDPGVNDSGDYSQKSVHASKHGSPVLRKTLFQIMEVLIKTKPDDAVYRFMDKKRSEGKPYYVYMTAGANKFLRIYYGRVKEYLSSLPESE

SEQ ID NO: 435122 - protein, 355 aa, unidentified
MSILAERLDYVIGVDTHLQSHTAAVLTATGMVVASLRIDAEQAGYCRLVRLVVRTAPGKRVWAVEGTRSYGAGLTGHLLSLGETVGEVDRPKRPARKRGKSDEIDAVRAAREALSMGRLASPRGSGRREALRIAASTRQEVMEERTRAMNQLRGLVVSAPEHIAARFRDRSGRSHSLERLTKRCLALRAAGTVDVEDRIRLDTMKRIAHRIVELEREAAHYETEMAELIRELAPGLLELPGVGPATAAMVLTTYSHRGRFRSEAAFASMAGVAPIPASSGKQQRHRLNRGGDRRLNQALDLIVKNRIRYDPETIAYMKRNQGGRRTDRDLRRILKRYLARSLFRFLEHMPPLDKG

SEQ ID NO: 435123 - protein, 364 aa, unidentified
MKKDGTYFIGCDKHKRYSNFAVMDEEGRVVEEVRISHEGDQLREYLSSLPPGSPIAVETSRSWYWFIDLIEECGHIPYLAHAGRAKVMMGHIDKTDKLDSVGLAKLLRMGTLPVVWIPPRDVRDVRELLRCRMVLSCTRTSVKNRIHATFSKYGIEVSGVSDLFGVRGREEAMELLELLPPETRRVQELHFRYLDQLQCHIEELECRLWELLSEEEGMRLLKTIPGVGKILSAVILYEMGDVERFPSAGHFSAYCGLVPRVYSSGGRTYHGKTRKAACLILKWAFVEAANVVSIHHRRWSYLKVAQVYRKLREKKGHGKAVVAVARRLSCAAWWILKKGEPYREAVRPGEESRALREPYEARGY

SEQ ID NO: 435124 - protein, 402 aa, unidentified
MLGSKSIRVLPQGKKSVSSKDLFGAAAQQPRKKSAGDRRPRGARKTVGELDPGRSLRRSPNSRKSRRALLTSSSHLQGREHVMDTARVDCFVGIDVSKKFWDVFLLPSRKAMKLKADEHGLNQLREALPPPGVCLIVLEASGGYEKRLAAELIDAGHKVARVNPRQVRDFARSLGRLAKTDRIDAEVLALFAQKLEPRPSEKLPEKQDEIDALVTRRRQLVQMKSAEQTRLHQVPKGKARKSVSHMLDELRKEIDVIDAEIAALIEENDEWNQRATQLATVPGVGIVTSHTLVAELPELGKLNRQQITSLVGLAPFNWDSGTMRGKRAIWGGRPSVRSVLYMATLSARKYNPVIRQFADRLENAGKPFKVMLIACMRKLLIILNTMVRTGTNWNPKTIPQTP

SEQ ID NO: 435125 - protein, 460 aa, unidentified
MSIIGIDLGVTAKHRAVIADERGRFIGPTIKFETRMRDLERLQARAREGTEPGEPLTVVMEATNIVWYPISVYFLRHEAAVHVVNPRIAADLARFYKRHASSDRLAARVLARLPIVSPDSLYPLVLSGADYLALQHGCREVDRLTTEASAIKNRLQCTDHLGWPGLKSRVFPEPCSPAARWFRDHYYNPQQVLEAGVEGLRRGWRAAEEIYDEDEDWITPLVVLAEEVRQLHGYQDTYLDYDALAAEVHRAQHWLANLEADAHYVRLKVVRPRYRDLHPSRNVETLRGVGQDGGAVYVAFIGASHRFPSNRNFRGWSGLVPRSAQSGESESKGLRITKAGPNLIKKYAYLNAGVARQWDPQIAAIYYDQMVNKGKHHSQAVCACATHLLDRVRVILAEDRPYQLRDVDGTPVTLEQARAIALERYTVPEEVRRRNTRRSRRERAERRAESKEEKRRRRSR

SEQ ID NO: 435126 - protein, 318 aa, unidentified
MMQPVLNIGVDVAKDAVVVACAEPRFPVQSVPNQRAPLRAWLKSLPAGSRIGLESTGDYHELLADLAQTQGHTVFLLNPLDTRHYAKAMGNRAKTDRVDAELIARLIAQEHTRLRAYRPPTANQRKLDRLIRRRATIVRIKGTLKLTMRNLGGFATELKAVMSKLDALIAKIDATMSALAACSPQHQEAQQRVETIVGVGPLVGISLTNTLERVPFRKADAFVAFTGLDPRANDSGHKAGRRRLSKRGPAELRRLLFNAAMSAIKTKVWKPIYEYYRTQGWSTTASLVIIARKIARAAWSIHHYRTTFNPERITKCLT

SEQ ID NO: 435127 - protein, 346 aa, unidentified
MQYYTERHRHTCGVDLHGRNLYLCVLDPDREIVLHQRIDCNERKLLRALAPFREDLVIGVECMFKWYWLADICDEHGIPFVLGHALEMKAVHGRKSGNDKLDAERIARLLGSGMYPVAYVYPTKMRSTRDLMRRRSFMVNQRSALINHIQVTNLQYNLPELGKISKPENREGIIERFEDPSVRASVEADMAVIDIFDVVITRLERMIIKTARVHDHHAYALLKSVYGIGDVIGLTLLYEIHDIHRFKSLGGFLSYCRLIKCVKTSDDKPKGTGKRKQGNHHLKWAFSEAAALFLRANPEGQKLHSRLVKKHGKAKALGILAARLARSVYYMLHRNTPFDMDRFVRA

SEQ ID NO: 435128 - protein, 344 aa, unidentified
MNITTIGIDLAKNLFQIHGVDVRGKGVLRRQLRRDQMASFFANLPACVIGMEACASSHHWARKLQAFGHSVRLMAPQFVKPYVKTNKNDIADAEAICEAVARPNMRFVPVKSVEQQAVLSLHRVRQGFVKARTAQANQIRGLLGEFGLVMPRGIANVAKCVPDLMAKASEQLPAALRELIARLLCHMKELDRQVGELEAQIKAWHRNSTTSQRVAQIPGIGPLGASALVASIADARSFANGRQTSAWLGLVPRQNSSGGKSKLLGMSKRGDTYLRMLLIHGARSAILASKRRAKVDPWLAGLLERRHPNIAAVALANKNVRTVWALLAHDREFRPDYIPAPPAA

SEQ ID NO: 435129 - protein, 347 aa, unidentified
MLYVGLDVHAKESTFAFLADGDPKPRTKTVRGPLRRIVEELAKIKEPFELAFEASNGYGPLYDMAAKMAKRVVVAHPGKLRLIFRSKNKNNPADAKALVQLLRAGFLPEVYVPKPELRAWRRLIGHRVRLVGQRTRVKCTLRALLRGVGVEMPKGLWRKAGLAWLEALTLESRGDTLMLKDYLAHLAYLNCAIRRAEHELDRIARTHPAVVLLRTIPGVGPRTAEALVAWVGDPRRFASIKAVGNYFGLVPCEDSSGSHRHFGHITHEGPAVVRRLLNQSAWQAIRHSPHVRAVYDRIRRDDPERRKIALVATMHYLARVMVTMLRTGETWDPEAHGRPAACKPVEN

SEQ ID NO: 435130 - protein, 391 aa, unidentified
MTSSHRIDTLAAGDKDGTLYVAFELSKSKWLIGLVVSGESKLSRHQVSGGDTAAVWQLISKKRAYAEKKLGRAVRVVSCYEAGYDGFWLARRLGEQGIDNRVLDPSSIEMPRRARQAKTDRLDLERLMRVLIRHDGGEPRVCSVVHPPSPEQEDARRLSRERDRLIGERTGHGNRIKGLLHGQGVREVEPRRKDFLERLAQARTGDGRVLPARLVAEIKREHARLVLLGEQLAEVEGQMRAEREAAAPDSRARQVNQLLGLKGIGAVGGETLVNEVFWRDFQNRRQVGAYFGLVGTPFDSGQSSREQGISKSGNARARTLAIELSWLWLRYQPDSALSLWFKQRVGDQKGRVKRVAIVAMARKLMVALWRFLTLGLVPENAIVRAAAPAGR

SEQ ID NO: 435131 - protein, 363 aa, unidentified
MHTTAATPTVNTTGAILAIDLGKYKSVCCLYNGNPDRARFTSFTTDRARLRQLLTRYQPAVVVIEACLLAGWVHDLCAELGIRCLVANTASEAWKFKHLKRKTDRDDALRLAQLHALGQLPTVVVPPPATRQWRCLIAGRQTLVGRRVAVQNRIRALFVGQGLPAPRGYRAWSSTGLRGLDLQAKPLAQCGPEELWRGMLHLALTEYRQLLELLDQAEQRLDALARQDHNVQLLESTPGVGPRTAEAIVAHLHQPERFENGKQVSAYVGLAPRQFQSGETDRRGRITRRGPALLRKLLVECAWVMLRYNGWARAVYQRLTHGGKTHKKQAIVAVARKLVVRCWAMLRDQKPWRDPAPAVAAVP

SEQ ID NO: 435132 - protein, 466 aa, unidentified
MENNYILYVGMDASKGKADAAILKVSDRRSVKPKFLRKKLSFKFVKSEVTSFLETVRSYSDDNCTSICFALEVTGIYSTNVYNFIKDNLNDNESIKFLNTDFVNQWRNAHNIAKSDPLDAQTISTIIGTDSDVQYVNDNVFENKNGYQDLKALVHRHYQIKKIYSQEINRLIAQCDCLFPELQYVFEPKSAAFIAVLSSYPTTHDIINASRLEVFNVVYEATKHRCSMDKIDKLFDLCHDTLVPDNISSYGRSIILDLVENIKNIKGQLKMIERYIRDVASLNPAYKLLLTITGCGPLTAATVIAETGDIKRFKNADCFVSYSGTSPRNKRSGTSVETMGKISKKGSRYLRHAIYMIAEFARRHNPVLKHQFERIKNGNKKRHKLANIAVANKIARYIYSIMKNESSFVILHEHIMRLPEETRNTFFNSISLDFPKNTRKQIYQYSDINGEAHKFVYTKLEETMIV

SEQ ID NO: 435133 - protein, 343 aa, unidentified
MAQSNLIAIDLAKNIFQVAQLKGNKLKFNKPMKREPMLELLAKAEGLKVVMEACGSAQHIARKALSLGHDVMLLPPKFVKAFRQGQKTDANDVLAIASASQAYNVKPCKIMTVEEQTLQSLSQARTLVDKQKTQLSNQIRCLLLEFGVVINQGDAALTQAVPDILEDAENALPIALKQALAVSYELYKTQCAAKAQLHKQVEAITKQNDSCQRLMALEGVGPITAIELLSFLGNTSQFSDARGAAACAGVTPTQHSSGGKAKIGHIPKRRGNTLRKNLFLGARTVVSRLKHKEATTEKERWIKNLLAKKSVKCVAIALANKTVRTAYALLKNGSTYEPKILAV

SEQ ID NO: 435134 - protein, 426 aa, unidentified
MKDQEQIVAWIGVDWADEGHHVWEYNVGTGGKENYAVQHNAESLQQWLSQVRSRYAGKRVAVVVEQARGGLIYSLMNTDFIVIYPVNPQSLAKYRKALYPGGAKSDPADAELLGEMVRQNPERFRAWVPGDAQTRTLQLLTEGRRKLVEDMTALTNQLTSVLKTYYPQALEWAGHLGSEQACAFLEKWPTLMELQKSRPFRIREFYQKYGRPSREVLNERVNQIQKGQPLTLDGAVVMSSVMMVQALVAQIRPLRLAIENYDQEIERVFQQHPDRVVFESFPGAGKVLAPRLLAAFGANRDRFQTALEVQEFSGIAPVTERSGKAIWVHRRLACPKFMLQTFHEFANCAWRFCAWSKLYYQQQRTRGKDHHAAVRALAYKWIRIMFRCWKDRTPYDDSLYVKSLSKRGSYLATGLNLPRPDSVVEI

SEQ ID NO: 435135 - protein, 337 aa, unidentified
MKYSGIDLHSNNSVVVVSDEADRVLVRRRVPNDAAAILALVAGHRDELAGVVVESTYNWYWLVDALQAAGYRVHLANTAAIKHYEGLKHSGDEDDAAYLAHLLRLRILPSGYICPPAARAVRDLARKRMQLVRSRTAQVLSVENMLSRQTGAGMRSYAVQRLTAPAVEAFGFQPDVGRAMCANVAVIKTLNREIDKLEQRLHQCVRLRPEFRLLTSVPGIGQTLATLIMLEVGTIERFAAVGNFASYARCVDSARISNGKKKGQGNVKNGNAYLAWAFVEAANFARRYCAEARRFYERKKARTNGVVATKALAHKLARACYHMLKEQKPFDVKRCFA

SEQ ID NO: 435136 - protein, 392 aa, unidentified
MVYVGIDVAKDKHDCFIVNSDGEVLYDVFTIQNNMDGFEDLLFKIKTASKNPDKVKVGLEATGHYNCNLLGFLKSKGLPTIVINPLHTNAYRKSLSLRKTKTDKVDARAIASMIMSDVSLKPYSDTLYHNEDLKSLSRYRFGKVADRAKLKQSVSRLVNILFPELEKLVSTIHAKAVYELLSEFPGAHQIASSNLKPLTSLLETASKGHFGRDKANEIREAARRSISTYLPAKSLELRHTIRLIRELTLEIGEIETEIKKIMDAIDSPILSVPGISYGIGSMIVSEIGDFSRFDSPDKILAYAGCSPTTYQSGQLYSSHSTMEKRGSKYLRWALMNAARYVCNWEPTFAAYLEKKRSEGKHYYVALSHAAKKLVRLLYHLETTGERYKPVSV

SEQ ID NO: 435137 - protein, 447 aa, unidentified
MKKKSGFPVLHPNAAGIDIASSEHYVAINPEADEQSIRAFGCFTEDLYAIADWLLECKVDTVAMEATGVYWVSLYLILEEAGLNVVLVNAKHVKNISGKKSDVKDAEWIRQLHSCGLLSASFQPDHFTRTLRTFMRHRKNLTDMAATHIHMMQKAMEQMNIKLQNVIADITGKSGQAIIEAILKGEHRPEVLVQLLDGRIKASHEEVRKSLEAVWKEENLFELKQSFELYRTYRSKIRECDEQIKAHLTTRTNEMEKEISVSKQKVKTKAKSNKNNLSFDATEMLQQIVGTDLTEIFGITDTNAIEIISEIGLDVSKWATVKHFTSWLNLAPNNKVSGGKILSSKTQKKKNKAGQIFKLAAYAVQRSKNWLAMFYHRIKSKHGTKKAITATARKIAVIFYKLMKEKTSFNPLSAELYTRTFREQQLKRLKKQADKLGLMLIQNELVT

SEQ ID NO: 435138 - protein, 345 aa, unidentified
MDEVTVIGIDLAKGVFEVCLEAGDGRVVQRRRLRRSAFERTMTAAPRVLVGLEAGPGAHHWARWLGGQGFAVKVMSPRAVRAYRTGPHKSDALDAAAIGEAATRASVRAVPVKSERAQMLQALVRVRARKVAERTRLVNQLRGLLLEFGIASTRNLMTWYPRIAGTPAFAALPERARRLFDELIAEARALDQTIRQLDRDLAGEVRADPAARLLTSAPGIGPINATQIVAQIVEPGDFARARAMPAYLGIVPRLIASGKTTRLGPITKHGPGELRKGLVLGAQAVITTALKCPDRDDPLFRFARRLLARGKPRNLVAVAVANKLARIVCAMLKSGRPYDPQYGAA

SEQ ID NO: 435139 - protein, 406 aa, unidentified
MELTALHKRVIACDVHQAQVTVCAILEEPDGSVRIEQQRFGAFQRDRRALAEWVGARRPDVVVMESTGIYWKSPYAALEAVGIRAVVVNARHVKNVPGRKTDIGDAQWLATLARAGLLRGSFVPPATLRELRLIARQRQKLMGQLASEKNRLHKVLTDGGVRLGVVVSDLHGQSARAMVKALIRGQAPHEVLRHASRRLKATRAEILDAVQGELTDSHRFVLDELMQHIEGLEARVARFEARLLAGLADQRPVLALLQTLPGVDLIGAALLLVEIGADMDVFASADRLASWVGICPGNNESAGKRKSGRVRKGNPYARRLLCEFAHAASRTPSAFQGKYKTLVVRRGHKRAIVALAHKLLRTIFFMLKRGEPYRDSATDYEALAVQRNAPRWIKALTRFGYITPAA
